United States Patent Application Publication US 2011/0183924 A1 - sequence listing, part 270

SEQ ID NO: 792654 - protein, 250 aa, Homo sapiens
MGLSPGAEGEYALRLPRIPPPLPKPASRTAGTGPKDQPPALRRSAVPHSGLNSISPLELEESVGFAALVQLPAKQPPPGTLEQGRSIQQGEKAVVSLETTPSQKADWSSIPKPENEGKLIKQAAEGKPRPRPGDLIEIFRIGYEHWAIYVEDDCVVHLAPPSEEFEVGSITSIFSNRAVVKYSRLEDVLHGCSWKVNNKLDGTYLPLPVDKIIQRTKKMVNKIVQYSLIEGNCEHFVNGLRYGVPRSQQV

SEQ ID NO: 792655 - protein, 109 aa, Homo sapiens
LESVSGSQKRDPCLGFLGVCVGCWGRSSHTSLTRLPCLHVDMREAPSACLCACLSPLTVKSFSADTCFGILTPLLTSWLTLGRKFSLSPISKSECLLTSSHWASPIEGY

SEQ ID NO: 792656 - protein, 132 aa, Homo sapiens
MLSTVPVLSTTQQTEADAVVVTWRVWAYNPPLPATTHTHRRTHIHALAHTCTCTCTHITGYLLQHCVHAHTHPCTHTHAHTRARAHTHITGYVLQHCVQAHTHIHALTHTCTCTRTHITGYLLQHCVQAHTH

SEQ ID NO: 792657 - protein, 128 aa, Homo sapiens
MAVGTSALSKEPWWTLPENFHSPMVFHMEEDQEELIFGLDDTYLRCIELHSHTLIQLERCFTATGQTRVTVVGPPMAKQWLLLMFHCVGSQDSKCHARGLKMLERVRSQPLTNDDLVTSVSLPPYTGD

SEQ ID NO: 792658 - protein, 140 aa, Homo sapiens
EPVSFVHLELRCSAQSVGGGPQATNTLLPHIPFSSLELGPGPSPSQAQASTPPHSPVLPESQPLGSTQGCHSQSPAPASDLGQSLETQKREDKTMKVSHSRRHPAVSSASKNASQRAKLPAKDIWMELWRPLRAGTAKQL

SEQ ID NO: 792659 - protein, 90 aa, Homo sapiens
LCVSHPERDRVCLESEVMWPSPPGRTGCRSPWLSFTERADRNLHALREVWELRRVYLSNELSLLIIGTPYNSYSGRIASCELRNSSEQIT

SEQ ID NO: 792660 - protein, 74 aa, Homo sapiens
RSPNHFSTCASGPARDGERAGSARAARRGAGPRERCPPPRLEGGDNSPCRAALLDGVYPFKKNLGGGGVRQKGW

SEQ ID NO: 792661 - protein, 107 aa, Homo sapiens
ACRPTPNMFVGTQSEQAYQYRAIYHLFKPVVLSCRQFCPHTAPTRRRGHSEITGDIFLAVTTGEGATGIWWLEARAATLLTSQAKNYLTKNVNRLRKPVSKLLKAVN

SEQ ID NO: 792662 - protein, 283 aa, Homo sapiens
LLYHAQSLKPLANRHATASKNIFREDPIIAMVLNATKVFKYESSENEQRRMFHATVATQTQFFHVKVLNINLKRKFIKKRIIIISNYSKRNSLLEVNEASSVSEAGPDQTFEVPKDIIRRAKKIPKINILHKQTSGYIVYGLFMLHTKIVNRKTTIYEIQDKTGSMAVVGKGECHNIPCEKGDKLRLFCFRLRKRENMSKLMSEMHSFIQIQKNTNQRSHDSRSMALPQEQSQHPKPSEASTTLPESHLKTPQMPPTTPSSSSFTKVQYPGSHDSYLPNINYK

SEQ ID NO: 792663 - protein, 305 aa, Homo sapiens
LLYHAQSLKPLANRHATASKNIFREDPIIAMVLNATKVFKYESSENEQRRMFHATVATQTQFFHVKVLNINLKRKFIKKRIIIISNYSKRNSLLEVNEASSVSEAGPDQTFEVPKDIIRRAKKIPKINILHKQTSGYIVYGLFMLHTKIVNRKTTIYEIQDKTGSMAVVGKGECHNIPCEKGDKLRLFCFRLRKRENMSKLMSEMHSFIQIQKNTNQRSHDSRSMALPQEQSQHPKPSEASTTLPESHLKTPQMPPTTPSSSSFTKKDETHPGAQSSPANFRITSPTVAPPLSSDTSTNRHPAVP

SEQ ID NO: 792664 - protein, 274 aa, Homo sapiens
LLYHAQSLKPLANRHATASKNIFREDPIIAMVLNATKVFKYESSENEQRRMFHATVATQTQFFHVKVLNINLKRKFIKKRIIIISNYSKRNSLLEVNEASSVSEAGPDQTFEVPKDIIRRAKKIPKINILHKQTSGYIVYGLFMLHTKIVNRKTTIYEIQDKTGSMAVVGKGECHNIPCEKGDKLRLFCFRLRKRENMSKLMSEMHSFIQIQKNTNQRSHDSRSMALPQEQSQHPKPSEASTTLPESHLKTPQMPPTTPSSSSFTKVTKDKDIK

SEQ ID NO: 792665 - protein, 75 aa, Homo sapiens
GLTPLLMVSCGGIPCPKKYKIPKYTASDTGQTRWMVTYEPRVLPAREKGATCHSGPRRGALRHRGSQQPWGRQAL

SEQ ID NO: 792666 - protein, 120 aa, Homo sapiens
AAWLTVVAPYLRTVASQEWLGKEQMGVAESWQVQATRPHGPFLSADPTNEEQSTGSLSGPKLLTLSQAEGLTGCGTLAVTPQPPLCKVGLIAVPQGEMQPGHRPGLCEAQEPWGTVIVPV

SEQ ID NO: 792667 - protein, 129 aa, Homo sapiens
PGSQSPTGSTHSGWYPRAVSPAGAGEGRPGGWLVFGSGAQPQRPIAAASPSSPPACCVSAWLPVGSGAPAEGEVLIFRIPKAASARARGFPCPVPRVPASGAMPHNQPLATLLGFFLCIYLYVPNNMLL

SEQ ID NO: 792668 - protein, 123 aa, Homo sapiens
MGWGPPPNKNRRGNPGALRTTPNGGSGGLDGGLNTGAQGGQKINPPRVCSVESTSTVKQDREDIAERATTEERTTGSRATQANTQSRKKHGSHEVERRQKLTDEYERTHLNAEYKQLATEQTQ

SEQ ID NO: 792669 - protein, 38 aa, Homo sapiens
MAGFLPSQESSPHPGLRSPPPSAKCRSPADAPGVQGSP

SEQ ID NO: 792670 - protein, 102 aa, Homo sapiens
RCTWLMTVAPGSPELRFRDEGDVTSLPLGFPSSVAINGLVLSFIQYVLPGHRHKYPVLCETLGVLNTESHPGPRGVHSWGRCVNRVKGMASKSCAGKSGQLE

SEQ ID NO: 792671 - protein, 70 aa, Homo sapiens
MQGFSSPHLARATLAPFAGAAGACPFSSFSPSHSLRAKAWAPQPQPGDEWPPCLPQEPKLGSAKRGDRGR

SEQ ID NO: 792672 - protein, 104 aa, Homo sapiens
VGQCSLWMKSIISYSANLTSHSLFSVFCSEFFWLVTSCLLNVGTALIVHMLRTRGISQEPLEMLSWPPETEDEDGTCFHHPPPSLFPLVNFPNNFITLNDFIKL

SEQ ID NO: 792673 - protein, 109 aa, Homo sapiens
LSIQTQIMSVLYSNLLRVKAKILTRPNKIWPLYTSLISLTKLLLPFLPHQPHLFHSQSPNALESSVVPTYQSDSQLKTFAIALFSPRTSSHKPLYLHGTFSPSSALSLK

SEQ ID NO: 792674 - protein, 97 aa, Homo sapiens
SRRRKGYGESRQHCQSLWDKRAKWFLLVRMDARESSRTRVAIKGPCPSGHPSEYDDSNRKNQVLGSARGCISSARERDYNRGLQGAPKVSHLPPRRL

SEQ ID NO: 792675 - protein, 104 aa, Homo sapiens
MFPKQLPSKVQAEGGADQAGPSCNPNVGWSSAVGQEGSQLPELGRCPQGTSPWGRHPPRGRAGTSVLGGPGQDSCLPGHPGKTLSKRFNQLSFTPVNQSENKLQ

SEQ ID NO: 792676 - protein, 75 aa, Homo sapiens
RPTHGAHGQISMDFIPSEAHKNPGVSRNLGIRPACGKELPTLALVLAVSCTLVRMTCLWKGAVLCMSPGNCSTAQ

SEQ ID NO: 792677 - protein, 52 aa, Homo sapiens
EVSSGGNACSPLTSCHGLVLVHGLGVGDPCSRYYDRNLKRKRPKILEPNSSV

SEQ ID NO: 792678 - protein, 108 aa, Homo sapiens
MTAKKGQPYLPFGLEEGWKDCLSTDNRQVTCDSDVDTPAVTPAYVPAERPRAPAVNFLGRRPLESWCFHHSSSLAHSMTEQRCNLQQVPSFLSSLSPSFTSQYVVRIK

SEQ ID NO: 792679 - protein, 110 aa, Homo sapiens
QLHRNRSPTCLCIGCNRVKRQLGSLKMHLRRRKKKRDLVADRLGHREIQNEESLLESRQRQTEEGREKGNGEKRQTEEGKEGGKGAAREEVRKEMRNRERQNFKNLEKEV

SEQ ID NO: 792680 - protein, 91 aa, Homo sapiens
QGPEPEPMPERPGKPLTTVSLRILVCEMTVKTWLLPPLGSADEAHRHPGGVDNLLEVRMHNRAEFADTNWHSVQEDSPVLGSHFPLLKSVS

SEQ ID NO: 792681 - protein, 75 aa, Homo sapiens
LVAVASRVRNRDSPGVTNKPGLSNVERNQPATQGKGSSHTTVTRQLCAQTEEGNAWEPAKYFLGGWDRPSHIPNF

SEQ ID NO: 792682 - protein, 74 aa, Homo sapiens
QYRIDALPLTERPLIDSEGRMLTRMELGLGEWGRQAVTQQAVDQRGHIMDCAVGCEGNEQTEDAEQGTSSYHGH

SEQ ID NO: 792683 - protein, 109 aa, Homo sapiens
GASTKALQMGEAGALGKGKPAPWCPEGKAAGGPVYAGPCRVSGFTLRAEGKVLIITHCSLKLLGSGNPVSASWVVGTVGRHHHLCLIIIIIFFGETGSQYVAVSQRGRF

SEQ ID NO: 792684 - protein, 295 aa, Homo sapiens
RHQCSICLKAFARPWSLSRHRLVHSTDRPFVCPDCGLAFRLASYLRQHRRVHGPLSLLAPLPAAGKKDDKASGARNSAKGPEGGEGAECGGASEGGEGGQNGGDAAPARPPAGEPRFWCPECGKGFRRRAHLRQHGVTHSGARPFQCVRCQREFKRLADLARHAQVHAGGPAPHPCPRCPRRFSRAYSLLRHQRCHRAELERAAALQALQAQAPTSPPPPPPPLKAEQEEEGLPLPLANIKEEPPSPGTPPQSPPAPPVFLSASCFDSQDHSAFEMEEEEVDSKAHLRGLGGLAS

SEQ ID NO: 792685 - protein, 70 aa, Homo sapiens
QMGKLRPGNRERWDQGHMMAEGGQGRRLTAYPARVPCQACAGAKDRGLWTAPVAGSHAGRQGLCNQADRV

SEQ ID NO: 792686 - protein, 68 aa, Homo sapiens
SWAWRLPWEATAGSADALLQPELGLFSHWEKGCGSEELGCRNFGVYKRRRELSQKSLFAGRWEMQPGG

SEQ ID NO: 792687 - protein, 77 aa, Homo sapiens
NPWCHFPGDPGGGRGCRPAEIQSRIPTAKRLVCHLQAGERGALGLHHPELCNNLEHHRVFPEMGFSSPGWSRTPGLK

SEQ ID NO: 792688 - protein, 96 aa, Homo sapiens
NPWCHFPGDPGGGRGCRPAEIQSRIPTAKRLVCHLQAGERGALGLHHPELCNNLEHHRVFPGRHKSERDRAPWAAAAWPARCLARPRGAVMERTFG

SEQ ID NO: 792689 - protein, 124 aa, Homo sapiens
SSCAGLLEAQAGEGGRVWGRRAPLSLTQRSCVFLVKPSHARGPIASSPPSLPTNIPSPDPNSPPHYPALDLGNVFLYFNIAQGKNTYILRDLGWGKQKPCGVEKTKAYFYKCLMFSPPGCSETP

SEQ ID NO: 792690 - protein, 162 aa, Homo sapiens
SNFPLLLRQTSRLQHSLQAMHKLSPAQDSAPLSSHSRFHPFPPFLQQPKCLLLQAPPGLFHEVPSAPFLEEVSVPVTRSCCPPLHPGPDSKAAGSCPRRRGKGLSAPILRLENCHLLPPHRAQGAASEPGKGVSCRANYWHFLCDLEQATSPPFASVYSSLK

SEQ ID NO: 792691 - protein, 78 aa, Homo sapiens
KSVHKKNTIYEIQDNTGSMDVVGSGKWPNIKCEKGDKLRLFCLQLRTVDRKLKLVCGSHSFIKVIKAKKNKEGPMNVN

SEQ ID NO: 792692 - protein, 69 aa, Homo sapiens
KSVHKKNTIYEIQDNTGSMDVVGSGKWPNIKCEKGDKLRLFCLQLRTVDRKLKLVIKAKKNKEGPMNVN

SEQ ID NO: 792693 - protein, 158 aa, Homo sapiens
LRETRDALREKTLALGSVQLDLRQAQHRIKEMKQMHPNGEAKESQSIGKQNSLEERIRQQELENLLLERQLEDARKEGDNKEIVINIHRDCLENGKEDLLEERNKELMKEYNYLKEKLLQCEKEKAEREVSMKKTINFWKENLNISFWLYVEPSSIYK

SEQ ID NO: 792694 - protein, 109 aa, Homo sapiens
TPGKGGEELAGGSTQTPADVPDLDTQEVAGFLFLSPTFLFVCLRQSLALSPSLECKGVILAECNGMILAHCNLRLLRRENGVNPGGGACSEPRSRHCTPAWATERDSVS

SEQ ID NO: 792695 - protein, 404 aa, Homo sapiens
RRRGSIHQPAPRLQDRASVCMGVTGAHGFPCCGKGSVEVAEMRDDLSQHQIQEEQELEADMLEQKPQLQVDLDLDPDPDPDPELEIGQVPALLESELYPALKLEAELDTEANSNEESDFEEPMQLVCKIESVHSNMGLPTPQTFRPWSLNSNCRSFTEENHMSACHHSISAQTSKHLFWANKLIQASEHSLQRAINMQLNNGSAGQPIRSPLREAIPTNALCSEEQLQIPDAHSAPPTTSSQAPSPLLSSDLPPPIDLTELITFASSLAMASSSRMDLPSLEHMMKAPPQEALEPSTEPLLTTVEEREPENHAETLPEKPREARAPLKSWSQEDKNFAQSYFDFSKPGIKRATIKGQIQLLQPPATSPLLQGSKEDSVPPGKEKENPLLVKIHFKLSAPTIPEK

SEQ ID NO: 792696 - protein, 108 aa, Homo sapiens
VITRVLQHGVLKPTNSPYNSPILPVLKPDKPYKLVQDLRLINHIVLLPIHPMVPNPYTLLSSIPASTTHYSVLDLKHAFFTIPLHPSSQPLFAFTWTDPDTHQAQQIT

SEQ ID NO: 792697 - protein, 101 aa, Homo sapiens
LQHHEMPTWHLDVHAYVEARARAETPAQKPPRTPGLMYASAGRPPAPEDIRQVVPPGCQPSRPTWEPMWTSGLSAQAPASGGGVETSGAALSWWPNLPGKS

SEQ ID NO: 792698 - protein, 105 aa, Homo sapiens [sequence omitted]

SEQ ID NO: 792699 - protein, 69 aa, Homo sapiens
LEFCPSKERAMPEPTEVGSGAALEVRACNAHVNAKDGSFSASKKAVLNMRNTAASKTERCLLSGETTNR

SEQ ID NO: 792700 - protein, 721 aa, Homo sapiens
MAQEAPQEDTSPMALMDKGENELTGSASEESQETTTSTIITTTVITTEQAPALCSVSFSNPEGYIDSSDYPLLPLNNFLECTYNVTVYTGYGVELQVKSVNLSDGELLSIRGVDGPTLTVLANQTLLVEGQVIRSPTNTISVYFRTFQDDGLGTFQLHYQAFMLSCNFPRRPDSGDVTVMDLHSGGVAHFHCHLGYELQGAKMLTCINASKPHWSSQEPICSAPCGGAVHNATIGRVLSPSYPENTNGSQFCIWTIEAPEGQKLHLHFERLLLHDKDRMTVHSGQTNKSALLYDSLQTESVPFEGLLSEGNTIRIEFTSDQARAASTFNIRFEAFEKGHCYEPYIQNGNFTTSDPTYNIGTIVEFTCDPGHSLEQGPAIIECINVRDPYWNDTEPLCRAMCGGELSAVAGVVLSPNWPEPYVEGEDCIWKIHVGEEKRIFLDIQFLNLSNSDILTIYDGDEVMPHILGQYLGNSGPQKLYSSTPDLTIQFHSDPAGLIFGKGQGFIMNYIEVSRNDSCSDLPEIQNGWKTTSHTELVRGARITYQCDPGYDIVGSDTLTCQWDLSWSSDPPFCEKIMYCTDPGEVDHSTRLISDPVLLVGTTIQYTCNPGFVLEGSSLLTCYSRETGTPIWTSRLPHCVLAEAAAETSLEGGNMALAIFIPVLIISLLLGGAYIYITRCRYYSNLRLPLMYSHPYSQITVETEFDNPIYETGETREYEVSI

SEQ ID NO: 792701 - protein, 797 aa, Homo sapiens
MAQEAPQEDTSPMALMDKGENELTGSASEESQETTTSTIITTTVITTEQAPALCSVSFSNPEGYIDSSDYPLLPLNNFLECTYNVTVYTGYGVELQVKSVNLSDGELLSIRGVDGPTLTVLANQTLLVEGQVIRSPTNTISVYFRTFQDDGLGTFQLHYQAFMLSCNFPRRPDSGDVTVMDLHSGGVAHFHCHLGYELQGAKMLTCINASKPHWSSQEPICSAPCGGAVHNATIGRVLSPSYPENTNGSQFCIWTIEAPEGQKLHLHFERLLLHDKDRMTVHSGQTNKSALLYDSLQTESVPFEGLLSEGNTIRIEFTSDQARAASTFNIRFEAFEKGHCYEPYIQNGNFTTSDPTYNIGTIVEFTCDPGHSLEQGPAIIECINVRDPYWNDTEPLCRAMCGGELSAVAGVVLSPNWPEPYVEGEDCIWKIHVGEEKRIFLDIQFLNLSNSDILTIYDGDEVMPHILGQYLGNSGPQKLYSSTPDLTIQFHSDPAGLIFGKGQGFIMNYIEVSRNDSCSDLPEIQNGWKTTSHTELVRGARITYQCDPGYDIVGSDTLTCQWDLSWSSDPPFCEKIMYCTDPGEVDHSTRLISDPVLLVGTTIQYTCNPGFVLEGSSLLTCYSRETGTPIWTSRLPHCVSEESLACDNPGLPENGYQILYKRLYLPGESLTFMCYEGFELMGEVTIRCILGQPSHWNGPLPVCKVNQDSFEHALEVAEAAAETSLEGGNMALAIFIPVLIISLLLGGAYIYITRCRYYSNLRLPLMYSHPYSQITVETEFDNPIYETGETREYEVSI

SEQ ID NO: 792702 - protein, 1076 aa, Homo sapiens
RASAQGAPEAAPARGLLPRSRFPFLAHRRPPSPAPSPSARPTASGSAPPAATMPAARPPAAGLRGISLFLALLLGSPAAALERDALPEGDASPLGPYLLPSGAPERGSPGKEHPEERVVTAPPSSSQSAEVLGELVLDGTAPSAHHDIPALSPLLPEEARPKHALPPKKKLPSLKQVNSARKQLRPKATSAATVQRAGSQPASQGLDLLSSSTEKPGPPGDPDPIVASEEASEVPLWLDRKESAVPTTPAPLQISPFTSQPYVAHTLPQRPEPGEPGPDMAQEAPQEDTSPMALMDKGENELTGSASEESQETTTSTIITTTVITTEQAPALCSVSFSNPEGYIDSSDYPLLPLNNFLECTYNVTVYTGYGVELQVKSVNLSDGELLSIRGVDGPTLTVLANQTLLVEGQVIRSPTNTISVYFRTFQDDGLGTFQLHYQAFMLSCNFPRRPDSGDVTVMDLHSGGVAHFHCHLGYELQGAKMLTCINASKPHWSSQEPICSAPCGGAVHNATIGRVLSPSYPENTNGSQFCIWTIEAPEGQKLHLHFERLLLHDKDRMTVHSGQTNKSALLYDSLQTESVPFEGLLSEGNTIRIEFTSDQARAASTFNIRFEAFEKGHCYEPYIQNGNFTTSDPTYNIGTIVEFTCDPGHSLEQGPAIIECINVRDPYWNDTEPLCRAMCGGELSAVAGVVLSPNWPEPYVEGEDCIWKIHVGEEKRIFLDIQFLNLSNSDILTIYDGDEVMPHILGQYLGNSGPQKLYSSTPDLTIQFHSDPAGLIFGKGQGFIMNYIEVSRNDSCSDLPEIQNGWKTTSHTELVRGARITYQCDPGYDIVGSDTLTCQWDLSWSSDPPFCEKIMYCTDPGEVDHSTRLISDPVLLVGTTIQYTCNPGFVLEGSSLLTCYSRETGTPIWTSRLPHCVSEESLACDNPGLPENGYQILYKRLYLPGESLTFMCYEGFELMGEVTIRCILGQPSHWNGPLPVCKVNQDSFEHALEVAEAAAETSLEGGNMALAIFIPVLIISLLLGGAYIYITRCRYYSNLRLPLMYSHPYSQITVETEFDNPIYETGETREYEVSI

SEQ ID NO: 792703 - protein, 169 aa, Homo sapiens
ISSELLLACISAEESLACDNPGLPENGYQILYKRLYLPGESLTFMCYEGFELMGEVTIRCILGQPSHWNGPLPVCKVNQDSFEHALEVAEAAAETSLEGGNMALAIFIPVLIISLLLGGAYIYITRCRYYSNLRLPLMYSHPYSQITVETEFDNPIYETGETREYEVSI

SEQ ID NO: 792704 - protein, 1007 aa, Homo sapiens
RASAQGAPEAAPARGLLPRSRFPFLAHRRPPSPAPSPSARPTASGSAPPAATMPAARPPAAGLRGISLFLALLLGSPAAALERDALPEGDASPLGPYLLPSGAPERGSPGKEHPEERVVTAPPSSSQSAEVLGELVLDGTAPSAHHDIPALSPLLPEEARPKHALPPKKKLPSLKQVNSARKQLRPKATSAATVQRAGSQPASQGLDLLSSSTEKPGPPGDPDPIVASEEASEVPLWLDRKESAVPTTPAPLQISPFTSQPYVAHTLPQRPEPGEPGPDMAQEAPQEDTSPMALMDKGENELTGSASEESQETTTSTIITTTVITTEQAPALCSVSFSNPEGYIDSSDYPLLPLNNFLECTYNVTVYTGYGVELQVKSVNLSDGELLSIRGVDGPTLTVLANQTLLVEGQVIRSPTNTISVYFRTFQDDGLGTFQLHYQAFMLSCNFPRRPDSGDVTVMDLHSGGVAHFHCHLGYELQGAKMLTCINASKPHWSSQEPICSAPCGGAVHNATIGRVLSPSYPENTNGSQFCIWTIEAPEGQKLHLHFERLLLHDKDRMTVHSGQTNKSALLYDSLQTESVPFEGLLSEGNTIRIEFTSDQARAASTFNIRFEAFEKGHCYEPYIQNGNFTTSDPTYNIGTIVEFTCDPGHSLEQGPAIIECINVRDPYWNDTEPLCRAMCGGELSAVAGVVLSPNWPEPYVEGEDCIWKIHVGEEKRIFLDIQFLNLSNSDILTIYDGDEVMPHILGQYLGNSGPQKLYSSTPDLTIQFHSDPAGLIFGKGQGFIMNYIEVSRNDSCSDLPEIQNGWKTTSHTELVRGARITYQCDPGYDIVGSDTLTCQWDLSWSSDPPFCEKIMYCTDPGEVDHSTRLISDPVLLVGTTIQYTCNPGFVLEGSSLLTCYSRETGTPIWTSRLPHCVSEESLACDNPGLPENGYQILYKRLYLPGESLTFMCYEGFELMGEVTIRCILGQPSHWNGPLPVCKGKETYSPHRVHGAWRCQAPGSQEF

SEQ ID NO: 792705 - protein, 1001 aa, Homo sapiens
RASAQGAPEAAPARGLLPRSRFPFLAHRRPPSPAPSPSARPTASGSAPPAATMPAARPPAAGLRGISLFLALLLGSPAAALERDALPEGDASPLGPYLLPSGAPERGSPGKEHPEERVVTAPPSSSQSAEVLGELVLDGTAPSAHHDIPALSPLLPEEARPKHALPPKKKLPSLKQVNSARKQLRPKATSAATVQRAGSQPASQGLDLLSSSTEKPGPPGDPDPIVASEEASEVPLWLDRKESAVPTTPAPLQISPFTSQPYVAHTLPQRPEPGEPGPDMAQEAPQEDTSPMALMDKGENELTGSASEESQETTTSTIITTTVITTEQAPALCSVSFSNPEGYIDSSDYPLLPLNNFLECTYNVTVYTGYGVELQVKSVNLSDGELLSIRGVDGPTLTVLANQTLLVEGQVIRSPTNTISVYFRTFQDDGLGTFQLHYQAFMLSCNFPRRPDSGDVTVMDLHSGGVAHFHCHLGYELQGAKMLTCINASKPHWSSQEPICSAPCGGAVHNATIGRVLSPSYPENTNGSQFCIWTIEAPEGQKLHLHFERLLLHDKDRMTVHSGQTNKSALLYDSLQTESVPFEGLLSEGNTIRIEFTSDQARAASTFNIRFEAFEKGHCYEPYIQNGNFTTSDPTYNIGTIVEFTCDPGHSLEQGPAIIECINVRDPYWNDTEPLCRAMCGGELSAVAGVVLSPNWPEPYVEGEDCIWKIHVGEEKRIFLDIQFLNLSNSDILTIYDGDEVMPHILGQYLGNSGPQKLYSSTPDLTIQFHSDPAGLIFGKGQGFIMNYIEVSRNDSCSDLPEIQNGWKTTSHTELVRGARITYQCDPGYDIVGSDTLTCQWDLSWSSDPPFCEKTEESLACDNPGLPENGYQILYKRLYLPGESLTFMCYEGFELMGEVTIRCILGQPSHWNGPLPVCKVAEAAAETSLEGGNMALAIFIPVLIISLLLGGAYIYITRCRYYSNLRLPLMYSHPYSQITVETEFDNPIYETGETREYEVSI

SEQ ID NO: 792706 - protein, 721 aa, Homo sapiens; identical to SEQ ID NO: 792700

SEQ ID NO: 792707 - protein, 125 aa, Homo sapiens
MAWAFASNFLASFHANEVNSLYIDQCFLISLSVNQDSFEHALEVAEAAAETSLEGGNMALAIFIPVLIISLLLGGAYIYITRCRYYSNLRLPLMYSHPYSQITVETEFDNPIYETGETREYEVSI

SEQ ID NO: 792708 - protein, 878 aa, Homo sapiens
MPAARPPAAGLRGISLFLALLLGSPAAALERDALPEGDASPLGPYLLPSGAPERGSPGKEHPEERVVTAPPSSSQSAEVLGELVLDGTAPSAHHDIPALSPLLPEEARPKHALPPKKKLPSLKQVNSARKQLRPKATSAATVQRAGSQPASQGLDLLSSSTEKPGPPGDPDPIVASEEASEVPLWLDRKESAVPTTPAPLQISPFTSQPYVAHTLPQRPEPGEPGPDMAQEAPQEDTSPMALMDKGENELTGSASEESQETTTSTIITTTVITTEQAPALCSVSFSNPEGYIDSSDYPLLPLNNFLECTYNVTVYTGYGVELQVKSVNLSDGELLSIRGVDGPTLTVLANQTLLVEGQVIRSPTNTISVYFRTFQDDGLGTFQLHYQAFMLSCNFPRRPDSGDVTVMDLHSGGVAHFHCHLGYELQGAKMLTCINASKPHWSSQEPICSAPCGGAVHNATIGRVLSPSYPENTNGSQFCIWTIEAPEGQKLHLHFERLLLHDKDRMTVHSGQTNKSALLYDSLQTESVPFEGLLSEGNTIRIEFTSDQARAASTFNIRFEAFEKGHCYEPYIQNGNFTTSDPTYNIGTIVEFTCDPGHSLEQGPAIIECINVRDPYWNDTEPLCRAMCGGELSAVAGVVLSPNWPEPYVEGEDCIWKIHVGEEKRIFLDIQFLNLSNSDILTIYDGDEVMPHILGQYLGNSGPQKLYSSTPDLTIQFHSDPAGLIFGKGQGFIMNYIEVSRNDSCSDLPEIQNGWKTTSHTELVRGARITYQCDPGYDIVGSDTLTCQWDLSWSSDPPFCEKIMYCTDPGEVDHSTRLISDPVLLVGTTIQYTCNPGFVLEGSSLLTCYSRETGTPIWTSRLPHCVCESCLMNWAPSR

SEQ ID NO: 792709 - protein, 172 aa, Homo sapiens
  misc_feature (102)..(102): Xaa can be any naturally occurring amino acid
  misc_feature (112)..(112): Xaa can be any naturally occurring amino acid
TLTSNKDYSECGLQWCRLCFGGRVESPTTVLIGEPLGIPAPHFIPEIFYKVEDFLMFRCLDPKSPRTFVARPMANLLFSDCRGPVISPGQWPPSFQSRPPSXKSLREAQAMXSRIMARYSAALQARRCPPVSGGRLTNIGYFRTSHWSCHLGLFMHIQQENCIFMSNRPSPG

SEQ ID NO: 792710 - protein, 165 aa, Homo sapiens
RRLSRAFSSWLYSGSGPRGNRDRPRGSRRGGEAWDVERNPRGSGLYVSPFGALPSWGPSSSGSWLWAVRGKRSGFSGEVPCLHREGLHGRGPGSPGGPNADRVSLPEPGGGGLVWAAAVVIDVPSTCTATTSPSPGVFGLNFVRESTLGWNVCCWSRGRYLYSDT

SEQ ID NO: 792711 - protein, 113 aa, Homo sapiens
VTPCWPGWSQSLDLVIHLPWPPKMLGLQALATMPGLSYTFLVLEKKIFEARILHSSGLAFKYEKCNRNNLSRIKPQKGCHTKTLLKILATIIVGDFNTTFSMANITSRQKINK

SEQ ID NO: 792712 - protein, 106 aa, Homo sapiens
CSVKAMMGPDCLQAGRSSLGHTWSKSGDFPIWILLQWLCYTEKLLLSCHLPVVLSLSSLGGRGQLLSLRAEHASEPLPTLHLIFFFLLLEETQHFLWCFIAVDSRC

SEQ ID NO: 792713 - protein, 151 aa, Homo sapiens
LHVEGKAISDCRPSRPSHTLSSLATGASRGPPLSKAPTMDAQQDRPKSQDCLGLVAPLASAAEVSSTAPVSGKKHRPPGPLFSSSDPLPATSSHSGDSAQDTSLIPAPLTPASRDAGVRRMFCVRNCLRGLGLFLLVFSFLFLLTWASFSF

SEQ ID NO: 792714 - protein, 137 aa, Homo sapiens
GSLFCSDLCALFPEPAHTLEEQHNLPIIGAGNVDLAAGFGHSGSQTGCGSSKGAEKGLQNVDFYLCPRNHPNSSCRDSYQFFCPDWTCVTLATYSGGSTRSSTLSIACASCPKLWTKRNCNPLTITVHNPNLAQWNY

SEQ ID NO: 792715 - protein, 143 aa, Homo sapiens
VVNRTPTATASSTKQVNYLQTGSEGQRKPRLHDSLVPRGSGARPRADRVSRACPTCTTAEDSAVSSGFYMWWTRPGLVLQETPSGRDGNEARAVLGSFSVAQVVAFSGKNRNEARALSGSSSFLRMVHSDIVWLCVPTQLFSQ

SEQ ID NO: 792716 - protein, 221 aa, Homo sapiens
GRPAAAGPLLKRSHSVPAPSIRKQILEELEKPGAGDPDPSAPQGGPGSATSDLGMACDRARVFLHSDEHPGSSVASKSRKSVMVAEIPSTVSQHSESHTDETLASRKSDAIFRAAKKDLLTLMKLEDSSLLDGRVALLHVPAGTVVSRQGDQDASILFVVSGLLHVYQRKIGSQEDTCLFLTRPGEMVGQLAVLTGEPLIFTVKANRDCSFLSISKAHFYE

SEQ ID NO: 792717 - protein, 159 aa, Homo sapiens
GRPAAAGPLLKRSHSVPAPSIRKQILEELEKPGAGDPDPSAPQGGPGSATSDLGMACDRARVFLHSDEHPGSSVASKSRKSVMVAEIPSTVSQHSESHTDETLASRKSDAIFRAAKKDLLTLMKLEDSSLLDGRVALLHVPAGTVVSRQGDQTLPKCFQ

SEQ ID NO: 792718 - protein, 915 aa, Homo sapiens
MVQLRKLLRVLTLMKFPCCVLEVLLCALAAAARGQEMYAPHSIRIEGDVTLGGLFPVHAKGPSGVPCGDIKRENGIHRLEAMLYALDQINSDPNLLPNVTLGARILDTCSRDTYALEQSLTFVQALIQKDTSDVRCTNGEPPVFVKPEKVVGVIGASGSSVSIMVANILRLFQIPQISYASTAPELSDDRRYDFFSRVVPPDSFQAQAMVDIVKALGWNYVSTLASEGSYGEKGVESFTQISKEAGGLCIAQSVRIPQERKDRTIDFDRIIKQLLDTPNSRAVVIFANDEDIKQILAAAKRADQVGHFLWVGSDSWGSKINPLHQHEDIAEGAITIQPKRATVEGFDAYFTSRTLENNRRNVWFAEYWEENFNCKLTISGSKKEDTDRKCTGQERIGKDSNYEQEGKVQFVIDAVYAMAHALHHMNKDLCADYRGVCPEMEQAGGKKLLKYIRNVNFNGSAGTPVMFNKNGDAPGRYDIFQYQTTNTSNPGYRLIGQWTDELQLNIEDMQWGKGVREIPASVCTLPCKPGQRKKTQKGTPCCWTCEPCDGYQYQFDEMTCQHCPYDQRPNENRTGCQDIPIIKLEWHSPWAVIPVFLAMLGIIATIFVMATFIRYNDTPIVRASGRELSYVLLTGIFLCYIITFLMIAKPDVAVCSFRRVFLGLGMCISYAALLTKTNRIYRIFEQGKKSVTAPRLISPTSQLAITSSLISVQLLGVFIWFGVDPPNIIIDYDEHKTMNPEQARGVLKCDITDLQIICSLGYSILLMVTCTVYAIKTRGVPENFNEAKPIGFTMYTTCIVWLAFIPIFFGTAQSAEKLYIQTTTLTISMNLSASVALGMLYMPKVYIIIFHPELNVQKRKRSFKAVVTAATMSSRLSHKPSDRPNGEAKTELCENVDPNSPAAKKKYVSYNNLVI

SEQ ID NO: 792719 - protein, 707 aa, Homo sapiens
MVDIVKALGWNYVSTLASEGSYGEKGVESFTQISKEAGGLCIAQSVRIPQERKDRTIDFDRIIKQLLDTPNSRAVVIFANDEDIKQILAAAKRADQVGHFLWVGSDSWGSKINPLHQHEDIAEGAITIQPKRATVEGFDAYFTSRTLENNRRNVWFAEYWEENFNCKLTISGSKKEDTDRKCTGQERIGKDSNYEQEGKVQFVIDAVYAMAHALHHMNKDLCADYRGVCPEMEQAGGKKLLKYIRNVNFNGSAGTPVMFNKNGDAPGRYDIFQYQTTNTSNPGYRLIGQWTDELQLNIEDMQWGKGVREIPASVCTLPCKPGQRKKTQKGTPCCWTCEPCDGYQYQFDEMTCQHCPYDQRPNENRTGCQDIPIIKLEWHSPWAVIPVFLAMLGIIATIFVMATFIRYNDTPIVRASGRELSYVLLTGIFLCYIITFLMIAKPDVAVCSFRRVFLGLGMCISYAALLTKTNRIYRIFEQGKKSVTAPRLISPTSQLAITSSLISVQLLGVFIWFGVDPPNIIIDYDEHKTMNPEQARGVLKCDITDLQIICSLGYSILLMVTCTVYAIKTRGVPENFNEAKPIGFTMYTTCIVWLAFIPIFFGTAQSAEKLYIQTTTLTISMNLSASVALGMLYMPKVYIIIFHPELNVQKRKRSFKAVVTAATMSSRLSHKPSDRPNGEAKTELCENVDPNSPAAKKKYVSYNNLVI

SEQ ID NO: 792720 - protein, 915 aa, Homo sapiens; identical to SEQ ID NO: 792718

SEQ ID NO: 792721 - protein, 705 aa, Homo sapiens
MVDIVKALGWNYVSTLASEGSYGEKGVESFTQISKEAGGLCIAQSVRIPQERKDRTIDFDRIIKQLLDTPNSRAVVIFANDEDIKQILAAAKRADQVGHFLWVGSDSWGSKINPLHQHEDIAEGAITIQPKRATVEGFDAYFTSRTLENNRRNVWFAEYWEENFNCKLTISGSKKEDTDRKCTGQERIGKDSNYEQEGKVQFVIDAVYAMAHALHHMNKDLCADYRGVCPEMEQAGGKKLLKYIRNVNFNGSAGTPVMFNKNGDAPGRYDIFQYQTTNTSNPGYRLIGQWTDELQLNIEDMQWGKGVREIPASVCTLPCKPGQRKKTQKGTPCCWTCEPCDGYQYQFDEMTCQHCPYDQRPNENRTGCQDIPIIKLEWHSPWAVIPVFLAMLGIIATIFVMATFIRYNDTPIVRASGRELSYVLLTGIFLCYIITFLMIAKPDVAVCSFRRVFLGLGMCISYAALLTKTNRIYRIFEQGKKSVTAPRLISPTSQLAITSSLISVQLLGVFIWFGVDPPNIIIDYDEHKTMNPEQARGVLKCDITDLQIICSLGYSILLMVTCTVYAIKTRGVPENFNEAKPIGFTMYTTCIVWLAFIPIFFGTAQSAEKLYIQTTTLTISMNLSASVALGMLYMPKVYIIIFHPELNVQKRKRSFKAVVTAATMSSRLSHKPSDRPNGEAKTELCENVDPNNFFFWLYSGTWITL

SEQ ID NO: 792722 - protein, 122 aa, Homo sapiens
RALVDGPCTQVRRQTMPFKCMQLTDFNLKFPHRAHQKYVRQAWQKANINTKWAATRWAKKIEARERKAKMTDFDHFKVMKAMRNRIIKNEVKKLQKAALQKLLPKKHLLRSVLLLLQLLLKF

SEQ ID NO: 792723 - protein, 117 aa, Homo sapiens
MMQQEAPGECFSPSLYYCHVLITVWWNLNDLLSRWINASFPVLEYRKWMDKQGLALLSRLECGSAITADCILNLSGSSSPPTSASQVAETVRACHNAQLIIWTFPIHGFQRADCETK

SEQ ID NO: 792724 - protein, 60 aa, Homo sapiens
SCLGHRQVSRNEAAVSQAGVQVTCEVVGPAAKHCLSPDSGHPSVEQGLQFPFQARGLHWL

SEQ ID NO: 792725 - protein, 109 aa, Homo sapiens
RWLLHQVPRHVRLGVPLVPEALWCRLAYPRSQGESVGPPWHWPWSQASETSRKRPADFSLAEMFLKYLTYGWARWLTPVIPTLWEAEAGGSRGQEIETILANMVKPRLY

SEQ ID NO: 792726 - protein, 105 aa, Homo sapiens
IFNLSTYKVTYSSVNWKCGYAGILVSDQMFEYLFLNGVGTSTARILKSTSAVGTGIMLSTCCRTGAGRELLQLWFLLGNKTGNQSQLTSWNWPLCVTAGCLSLQL

SEQ ID NO: 792727 - protein, 89 aa, Homo sapiens
RSWQVLTACRRLPSYLPVPSLGEKECDEGGEDQVSLLGPRLLRSFPGIFLIDCYVDHVLPSVLSRSDGQRENFCTCHVFVAKILVSSTL

SEQ ID NO: 792728 - protein, 80 aa, Homo sapiens
KIELQEIQPKEAKHIAEEADRKYEEVACKWVITEGDLERTENELSWQSPIAEEMDEQIRLMDQNLKCLSAAEENYSQDLC

SEQ ID NO: 792729 - protein, 159 aa, Homo sapiens
PRLQPPGVPSPHRPYLRSRLSLPLTIVQKCTRLPSLLKKLDFLKNNLRFTAKLRGRYREFPSPLEPPCHQHPAWGHISHHPGTCTDITSTESRADVRSPWWHSHRWTNSSIAAQEPCARPLLLPSSSPCSLRMVLPFPVRHAAELESHGLQPFQRGFST

SEQ ID NO: 792730 - protein, 115 aa, Homo sapiens
TPYHWCPRLHLCPEDTNAAVTGQINGDAFMGRRKTCPRGISPIQWEAVFQSVGDRKGRLSPCEGTFPSSHSISAPGGLASEFQREGWPFLSVLGVSWSQDPWETQIHQDACIRRT

SEQ ID NO: 792731 - protein, 166 aa, Homo sapiens
SALVAATGGDGGGGHATAAVTERLWWVGWEAGKCRGRSRHGPAATAAVSSLFPCVAAGVGGDGATLARPGCGLPGQRAGAGRTAPHRHVTMDCRTKANPDRTFDLVLKVKCHASENEEDSPAYLPRIPPGKVRRFAFCIKKLENFPVGPGVAPPVSGVDLVPAETA

SEQ ID NO: 792732 - protein, 214 aa, Homo sapiens
SALVAATGGDGGGGHATAAVTERLWWVGWEAGKCRGRSRHGPAATAAVSSLFPCVAAGVGGDGATLARPGCGLPGQRAGAGRTAPHRHVTMDCRTKANPDRTFDLVLKVKCHASENEDPVVLWKFPEDFGDQEILQSVPKFCFPFDVERVSQNQVGQHFTFVLTDIESKQRFGFCRLTSGGTICLCILRYDLNETLRSLYNHPVPKANTPVSLL

SEQ ID NO: 792733 - protein, 166 aa, Homo sapiens; identical to SEQ ID NO: 792731

SEQ ID NO: 792734 - protein, 121 aa, Homo sapiens
VIVASHAVWLFLLSQQKAFSALQSTNAWKVATLETISQILVTQWDYQLLPILVSPRRHSGANVHSWSDQWWPEESNCTNMAARGALCFGGSYRRRGIRIGTPALCSYRGSLPGCLYGELRS

SEQ ID NO: 792735 - protein, 104 aa, Homo sapiens
ITGVSHCAWPALTFLQGYTGPWLASKAGWCCVLTVSWAPAVWQPSEDTGRVGLALCLACSDHLVDEGTLPLSVPPSGLAEAGEPGQGQAPRDPLWTPGISQPFG

SEQ ID NO: 792736 - protein, 68 aa, Homo sapiens
TSPCLKKSFLAYSFLGPPPKSDFDYISLMVSTNSNLFYTVYIQPYLILKPSMPPGTVAHACNPSTLGV

SEQ ID NO: 792737 - protein, 66 aa, Homo sapiens
QITSGLTAVGGGVSSTPISSGEMEAHAASAEGEWSAQKTATDQEKLVVNKAHSLRNNLNKTRKIRA

SEQ ID NO: 792738 - protein, 104 aa, Homo sapiens
RRNLTLSPRLECSGVISAHCNLCLLSSSNFPASTSQVAEITGTHHHAWIIFVFLVETGFHHVGQAGLELMTSSDPPTLASQSAGITGVSTMLNGNYFLGMIHGT

SEQ ID NO: 792739 - protein, 172 aa, Homo sapiens
QYDNEKKWELICDQERFQVKNPPAAYIQKLKSYVDTGGVSRKFKRRVQESTQVLRELETSLRTNHIGWVQEFLNEENRGLDVLLEYLAFAQCSVTYDMESTDNGASNSEKNKPLEQSVEDLSKGPPSSVPKSRHLTIKYVGHKVGWWENREFSPHTAASSQPTPGPWGWREG

SEQ ID NO: 792740 - protein, 156 aa, Homo sapiens
MFMCCVCVCAHTLCLFVCVHVYTLCAHVSGVCVPCLSMYGGAHVACEFLFCWAGVWRWWGRLSMKGHLCQLEEGGRCCLLPQDLVGLWEAGLHPPAFPVLGPQFKRRVQESTQVLRELETSLRTNHIGWVQEFLNEENRGLDVLLEYLAFAQCSVT

SEQ ID NO: 792741 - protein, 101 aa, Homo sapiens
RNFCRLVKPLKPLWPRLAICAAVAALRMAEACSYWGIGWQACPLYPVLSPHIVAPTLSGRHLCFLPWPVSDSMTTQLWHFASWEPGTAGTLRTMGGSYWLG

SEQ ID NO: 792742 - protein, 138 aa, Homo sapiens
SFPCSLPLFSPVLWRSVLEVFMELPRVPLRKGHQQAQLTSHEQSWSPAWPGSCPAESCRGPRLWLSGRISSPNRRLHENRILQVSRKHQAMRMDGQQPGNFLSPICAGSWHRNNQDGKACGFLGFLKNYFRKEKKAQA

SEQ ID NO: 792743 - protein, 129 aa, Homo sapiens
  misc_feature (9)..(9): Xaa can be any naturally occurring amino acid
  misc_feature (15)..(15): Xaa can be any naturally occurring amino acid
VTYFSSTKXNRVYNXKSRVFRKRSFFMKSRALGHKSIPNSSKPLSLLLGPWVFLPMCIFPFSSVSPENSFCLSTFKLPLTNHHTQRDFSKVARQGTCSLLGSPCLWLNMGGTEVYFLLLKKKINSKLTV

SEQ ID NO: 792744 - protein, 125 aa, Homo sapiens
MAVEDSTLQVVVRVRPPTPRELDSQRRPVVQVVDERVLVFNPEEPDGGFPGLKWGGTHDGPKKKGKDLTFVFDRVFGEAATQQDVFQHTTHSVLDSFLQGYNCSVFAYGATGAGKTHTMLGREGD

SEQ ID NO: 792745 - protein, 409 aa, Homo sapiens
SQPCTPELPAGPRALQEESLGMEAQVERAMEGNSSDQEQSPEDEDEGPAEEVPTQMPEQNPTHALPESPRLTLQPKPVVGHFSARELDGDRSKQLALKVLCVAQRQYSLLQAANLLTPDMITEFETLQQLVQEEKIEPGAEALRTSGLARGAPLAQELCSESIPVPSPLCPEPPGYTGPVTRTMARRLSGPLHTLGIPPGPNCTPAQGSRWPMEKKRRRPSALEADSPMAPKRGTKRQRQSFLPCLRRGSLPDTQPSQGPSTPKGERASSPCHSPRVCPATVIKSRVPLGPSAMQNCSTPLALPTRDLNATFDLSEEPPSKPSFHECIGWDKIPQELSRLDQPFIPRAPVPLFTMKGPKPTSSLPGTSACKKKRVASSSVSHGRSRIARLPSSTLKRPAGPLVLPGDWH

SEQ ID NO: 792746 - protein, 440 aa, Homo sapiens
SQPCTPELPAGPRALQEESLGMEAQVERAMEGNSSDQEQSPEDEDEGPAEEVPTQMPEQNPTHALPESPRLTLQPKPVVGHFSARELDGDRSKQLALKVLCVAQRQYSLLQAANLLTPDMITEFETLQQLVQEEKIEPGAEALRTSGLARGAPLAQELCSESIPVPSPLCPEPPGYTGPVTRTMARRLSGPLHTLGIPPGPNCTPAQGSRWPMEKKRRRPSALEADSPMAPKRGTKRQRQSFLPCLRRGSLPDTQPSQGPSTPKGERASSPCHSPRVCPATVIKSRVPLGPSAMQNCSTPLALPTRDLNATFDLSEEPPSKPSFHECIGWDKIPQELSRLDQPFIPRAPVPLFTMKGPKPTSSLPGTSACKKKRVASSSVSHGRSRIARLPSSTLKRPAGPLVLPELPLSPLCPSNRRNGKDLIRVGRALSAGNGVTKVS

SEQ ID NO: 792747 - protein, 409 aa, Homo sapiens; identical to SEQ ID NO: 792745

SEQ ID NO: 792748 - protein, 336 aa, Homo sapiens
SQPCTPELPAGPRALQEESLGMEAQVERAMEGNSSDQEQSPEDEDEGPAEEVPTQMPEQNPTHALPESPRLTLQPKPVVGHFSARELDGDRSKQLALKVLCVAQRQYSLLQAANLLTPDMITEFETLQQLVQEEKIEPGAEALRTSGLARGAPLAQELCSESIPVPSPLCPEPPGYTGPVTRTMARRLSGPLHTLGIPPGPNCTPAQGSRWPMEKKRRRPSALEADSPMAPKRGTKRQRQSFLPCLRRGSLPDTQPSQGPSTPKGERASSPCHSPRVCPATVIKSRVPLGPSAMQNCSTPLALPTRDLNATFDLSEEPPSKPSFHECIGWDKIPQD

SEQ ID NO: 792749 - protein, 114 aa, Homo sapiens
GALSPGVGTAVCGVAVGPVSKQRRQRRRTEKGVTTVMAVEDSTLQVVVRVRPPTPRELDSQRRPVVQVVDERVLVFNPEEPDGGFPGLKWGGTHDRPPPQQHFEEASWAPCTPR

SEQ ID NO: 792750 - protein, 409 aa, Homo sapiens; identical to SEQ ID NO: 792745

SEQ ID NO: 792751 - protein, 409 aa, Homo sapiens; identical to SEQ ID NO: 792745

SEQ ID NO: 792752 - protein, 154 aa, Homo sapiens
TFFPMENQKIESSPGERYLSLSFTRLGGTKGDVRLLYSVLYIPAGAVDPLQAKEGILNISRRNDLIFPEQKTQVTTKLPIRNDAFLQNGAHFLVQLETVELLNIIPLIPPISPRFGEICNISLLVTPAIANGEIGFLSNLPIILHEPEDFAAEV

SEQ ID NO: 792753 - protein, 86 aa, Homo sapiens
RCQCPGTGFANPGSRVPESSPLSALKTSFVGLTSGSTLPTGELKLFPRRGKLPNDRGIKDFPSGFVAISNSNDMKKCSPSLRREGG

SEQ ID NO: 792754 - protein, 107 aa, Homo sapiens
LSVTSLDPGSLRCPVCLSMEGCLEGTTEEICPKGTTHCYDGLLRLRGGGIFSNLRVQGCMPQPVCNLLNGTQEIGPVGMTENCDMKDFLTCHRGTTIMTHGNLAACI

SEQ ID NO: 792755 - protein, 300 aa, Homo sapiens
MDLPPQLSFGLYVAAFALGFPLNVLAIRGATAHARLRLTPSLVYALNLGCSDLLLTVSLPLKAVEALASGAWPLPASLCPVFAVAHFFPLYAGGGFLAALSAGRYLGAAFPLGYQAFRRPCYSWGVCAAIWALVLCHLGLVFGLEAPGGWLDHSNTSLGINTPVNGSPVCLEAWDPASAGPARFSLSLLLFFLPLAITAFCYVGCLRALARSGLTHRRKLRAAWVAGGALLTLLLCVGPYNASNVASFLYPNLGGSWRKLGLITGAWSVVLNPLVTGYLGRGPGLKTVCAARTQGGKSQK

SEQ ID NO: 792756 - protein, 186 aa, Homo sapiens
RGEREEEKKRHSYFEKPKVHDESVDVDKGPGSAKELIKSINEKFAGSAGWEGTESLKIAEDKKQLRDFFGMSNSYAECYPATMDDMAVDSDEEVDYSKMDQGNKKRTLSRWDFDTQEDYSEYMNNKEALPKAAFQYGIKMSEGRKTRRFKETNDKAALDCQWKISAIIEKRKKMEADGVEVKRPKY

SEQ ID NO: 792757 - protein, 67 aa, Homo sapiens
SQVLVPNKHLAPQIPSQNLLPENPIYTKTLMIPVISVIPAEVPLVSEAILDQQTSCASSNIKNNQLR

SEQ ID NO: 792758 - protein, 217 aa, Homo sapiens
ETEFRSCCPGCSGNGAILAHCNLRLLGSSDSPVSASRVAGITGMCHHAGLIFVFLVETGFHHVGQAGLQLLTLGDPPASASQSAGITGVSHRARPVTGIFNGVLPFLALFHITTGHHIYFLPYFLASQKIGRALPEQCRARIPDFLGYLISTSRNVGSYPLFLLFLPKKGENSSHIYIVGLAFQSKAKLNSVDFAWESSGPLVLETSLNCEELLICR

SEQ ID NO: 792759 - protein, 156 aa, Homo sapiens [sequence omitted]

SEQ ID NO: 792760 - protein, 156 aa, Homo sapiens [sequence omitted]

SEQ ID NO: 792761 - protein, 97 aa, Homo sapiens
MTHQPPPKAFYSAGGVGHRERHLQRLGERTREWAEGKALQWEGCDQRVLHAKRILRVDITNRKIVLAFLFVCRITVALKSTPSALQTLKKVSRWKNL

SEQ ID NO: 792762 - protein, 125 aa, Homo sapiens
MRGMMTASPPVSPEPPLQEKPVLPIRRLCRAWTRLFAGLLSHQHLPRVGPRESLQPSPAQASDREMQNLSVTIRAACALPVLQGWHWKKHLPPAGCSGSRLQSQHFGRPRWADHEVRKSSVDLSL

SEQ ID NO: 792763 - protein, 68 aa, Homo sapiens
GARRARGRRSFRWRDPAGMLPASASASALASGPPAHAGRPGPHLPLGTARPCPAALGAGVGVAERKSR

SEQ ID NO: 792764 - protein, 168 aa, Homo sapiens
QLLHADYEESLSGKNMFPQPSFGPNPFLGPVPIAPPFFPHVWHGYPFQGFIENPVMRQNIVLPSDEKGELDLSLENLDLSKDCGSVSTVDEFPAARSEHVHSLPEASVSSKPDEGRTEQSSQTRKADMALASIPPVAEGKAHPPTQILNREREKLCLLNLNLKGPFKV

SEQ ID NO: 792765 - protein, 80 aa, Homo sapiens
LTGKLKEPAGYLHMMELLETFEKPHSHSQDEKYTNLAPRFPYLVRTHRGGGQGTAVIIHLHTYRGNTASDAGHMPLSFLM

SEQ ID NO: 792766 - protein, 210 aa, Homo sapiens
MAQVLRGTVTDFPGFDERADAETLRKAMKGLGTDEESILTLLTSRSNAQRQEISAAFKTLFGRDLLDDLKSELTGKFEKLIVALMKPSRLYDAYELKHALKGAGTNEKVLTEIIASRTPEELRAIKQVYEEEYGSSLEDDVVGDTSGYYQRMLVVLLQANRDPDAGIDEAQVEQDAQALFQAGELKWGTDEEKFITIFGTRSVSPFEKGV

SEQ ID NO: 792767 - protein, 72 aa, Homo sapiens
EEELGQINLTPGNHDSDEGILIRVMVSRSEIDLFNIRKEFRKNFATSLYSMIKGDTSGDYKKALLLLCGEDD

SEQ ID NO: 792768 - protein, 136 aa, Homo sapiens
MAQVLRGTVTDFPGFDERADAETLRKAMKGLGTDEESILTLLTSRSNAQRQEISAAFKTLFGRDLLDDLKSELTGKFEKLIVALMKPSRLYDAYELKHALKGAGTNEKVLTEIIASRTPEELRAIKQVYEEEYAQA

SEQ ID NO: 792769 - protein, 210 aa, Homo sapiens; identical to SEQ ID NO: 792766

SEQ ID NO: 792770 - protein, 210 aa, Homo sapiens; identical to SEQ ID NO: 792766

SEQ ID NO: 792771 - protein, 210 aa, Homo sapiens; identical to SEQ ID NO: 792766

SEQ ID NO: 792772 - protein, 210 aa, Homo sapiens; identical to SEQ ID NO: 792766

SEQ ID NO: 792773 - protein, 210 aa, Homo sapiens; identical to SEQ ID NO: 792766

SEQ ID NO: 792774 - protein, 210 aa, Homo sapiens; identical to SEQ ID NO: 792766

SEQ ID NO: 792775 - protein, 210 aa, Homo sapiens; identical to SEQ ID NO: 792766

SEQ ID NO: 792776 - protein, 210 aa, Homo sapiens; identical to SEQ ID NO: 792766

SEQ ID NO: 792777 - protein, 210 aa, Homo sapiens; identical to SEQ ID NO: 792766

SEQ ID NO: 792778 - protein, 210 aa, Homo sapiens; identical to SEQ ID NO: 792766

SEQ ID NO: 792779 - protein, 210 aa, Homo sapiens; identical to SEQ ID NO: 792766

SEQ ID NO: 792780 - protein, 283 aa, Homo sapiens
VDCFGWGRKGLGTDEESILTLLTSRSNAQRQEISAAFKTLFGRDLLDDLKSELTGKFEKLIVALMKPSRLYDAYGKVLRGTVTDFPGFDERADAETLRKAMKGLGTDEESILTLLTSRSNAQRQEISAAFKTLFGRDLLDDLKSELTGKFEKLIVALMKPSRLYDAYELKHALKGAGTNEKVLTEIIASRTPEELRAIKQVYEEEYGSSLEDDVVGDTSGYYQRMLVVLLQANRDPDAGIDEAQVEQDAQALFQAGELKWGTDEEKFITIFGTRSVSPFEKGV

SEQ ID NO: 792781 - protein, 210 aa, Homo sapiens; identical to SEQ ID NO: 792766

SEQ ID NO: 792782 - protein, 210 aa, Homo sapiens; identical to SEQ ID NO: 792766

SEQ ID NO: 792783 - protein, 183 aa, Homo sapiens
MAQVLRGTVTDFPGFDERADAETLRKAMKGLGTDEESILTLLTSRSNAQRQEISAAFKTLFGRDLLDDLKSELKGAGTNEKVLTEIIASRTPEELRAIKQVYEEEYGSSLEDDVVGDTSGYYQRMLVVLLQANRDPDAGIDEAQVEQDAQALFQAGELKWGTDEEKFITIFGTRSVSPFEKGV

SEQ ID NO: 792784 - protein, 188 aa, Homo sapiens
MAQAWKMTWWGTLQGTTSGCWWFSFRLTETLMLELMKLKLNKMLRLYFRLENLNGGQMKKSLSPSLEHEVCLHLRKVFDKYMTISGFQIEETIDRETSGNLEQLLLAVVKSIRSIPAYLAETLYYAMKGAGTDDHTLIRVMVSRSEIDLFNIRKEFRKNFATSLYSMIKGDTSGDYKKALLLLCGEDD

SEQ ID NO: 792785 - protein, 210 aa, Homo sapiens; identical to SEQ ID NO: 792766

SEQ ID NO: 792786 - protein, 302 aa, Homo sapiens
MAQVLRGTVTDFPGFDERADAETLRKAMKGLGTDEESILTLLTSRSNAQRQEISAAFKTLFGRDLLDDLKSELTGKFEKLIVALMKPSRLYDAYELKHALKGAGTNEKVLTEIIASRTPEELRAIKQVYEEEYGSSLEDDVVGDTSGYYQRMLVVLLQANRDPDAGIDEAQVEQDAQALFQAGELKWGTDVFDKYMTISGFQIEETIDRETSGNLEQLLLAVVKSIRSIPAYLAETLYYAMKGAGTDDHTLIRVMVSRSEIDLFNIRKEFRKNFATSLYSMIKGDTSGDYKKALLLLCGEDD

SEQ ID NO: 792787 - protein, 163 aa, Homo sapiens
MAQVLRGTVTDFPGFDERADAETLRKAMKGLGTDEESILTLLTSRSNAQRQEISAAFKTLFGRDLLDDLKSELTGKFEKLIVALMKPSRLYDAYELKHALKGAGTNEKVLTEIIASRTPEELRAIKQVYEEEYGSSLEDDVVGDTSGYYQRMLVVLLQVLRGD

SEQ ID NO: 792788 - protein, 293 aa, Homo sapiens
MAQVLRGTVTDFPGFDERADAETLRKAMKGLGTDEESILTLLTSRSNAQRQEISAAFKTLFGRDLLDDLKSELTGKFEKLIVALMKPSRLYDAYELKHALKGAGTNEKVLTEIIASRIQGTTSGCWWFSFRLTETLMLELMKLKLNKMLRLYFRLENLNGGQMKKSLSPSLEHEVCLHLRKVFDKYMTISGFQIEETIDRETSGNLEQLLLAVVKSIRSIPAYLAETLYYAMKGAGTDDHTLIRVMVSRSEIDLFNIRKEFRKNFATSLYSMIKGDTSGDYKKALLLLCGEDD

SEQ ID NO: 792789 - protein, 210 aa, Homo sapiens; identical to SEQ ID NO: 792766

SEQ ID NO: 792790 - protein, 118 aa, Homo sapiens
MAQVLRGTVTDFPGFDERADAETLRKAMKGLGTDEESILTLLTSRSNAQRQEISAAFKTLFGRDLLDDLKSELTGKFEKLIVALMKPSRLYDAYELKHALKGAGTNEKVLTEIIASRS

SEQ ID NO: 792791 - protein, 179 aa, Homo sapiens
SRYQTSVTSGCWWFSFRLTETLMLELMKLKLNKMLRLYFRLENLNGGQMKKSLSPSLEHEVCLHLRKVFDKYMTISGFQIEETIDRETSGNLEQLLLAVVKSIRSIPAYLAETLYYAMKGAGTDDHTLIRVMVSRSEIDLFNIRKEFRKNFATSLYSMIKGDTSGDYKKALLLLCGEDD

SEQ ID NO: 792792 - protein, 157 aa, Homo sapiens
MLELMKLKLNKMLRLYFRLENLNGGQMKKSLSPSLEHEVCLHLRKVFDKYMTISGFQIEETIDRETSGNLEQLLLAVVKSIRSIPAYLAETLYYAMKGAGTDDHTLIRVMVSRSEIDLFNIRKEFRKNFATSLYSMIKGDTSGDYKKALLLLCGEDD

SEQ ID NO: 792793 - protein, 189 aa, Homo sapiens
ASDAEVTLVDPRSPRGTTSGCWWFSFRLTETLMLELMKLKLNKMLRLYFRLENLNGGQMKKSLSPSLEHEVCLHLRKVFDKYMTISGFQIEETIDRETSGNLEQLLLAVVKSIRSIPAYLAETLYYAMKGAGTDDHTLIRVMVSRSEIDLFNIRKEFRKNFATSLYSMIKGDTSGDYKKALLLLCGEDD

SEQ ID NO: 792794 - protein, 210 aa, Homo sapiens; identical to SEQ ID NO: 792766

SEQ ID NO: 792795 - protein, 210 aa, Homo sapiens; identical to SEQ ID NO: 792766

SEQ ID NO: 792796 - protein, 153 aa, Homo sapiens
MKLKLNKMLRLYFRLENLNGGQMKKSLSPSLEHEVCLHLRKVFDKYMTISGFQIEETIDRETSGNLEQLLLAVVKSIRSIPAYLAETLYYAMKGAGTDDHTLIRVMVSRSEIDLFNIRKEFRKNFATSLYSMIKGDTSGDYKKALLLLCGEDD

SEQ ID NO: 792797 - protein, 153 aa, Homo sapiens; identical to SEQ ID NO: 792796

SEQ ID NO: 792798 - protein, 240 aa, Homo sapiens
MAQVLRGTVTDFPGFDERADAETLRKAMKGLGTDEESILTLLTSRSNAQRQEISAAFKTLFGRDLLDDLKSELTGKFEKLIVALMKPSRLYDAYELKHALKGAGTNEKVLTEIIASRTPEELRAIKQVYEEEYGSSLEDDVVGDTSGYYQRMLVVLLQANRDPDAGIDEAQVEQDAQALFQAGELKWGTDVFDKYMTISGFQIEETIDRETSGNLEQLLLAVGLTSGRSLGRILPPLFIP

SEQ ID NO: 792799 - protein, 193 aa, Homo sapiens
MAQVLRGTVTDFPGFDERADAETLRKAMKGLGTDEESILTLLTSRSNAQRQEISAAFKTLFGRDLLDDLKSELTGKFEKLIVALMKPSRLYDAYELKHALKGAGTNEKVLTEIIASRTPEELRAIKQVYEEEYGSSLEDDVVGDTSGYYQRMLVVLLQANRDPDAGIDEAQVEQDAQALISRLGETLNWGEQD

SEQ ID NO: 792800 - protein, 180 aa, Homo sapiens
MAQVLRGTVTDFPGFDERADAETLRKAMKGLGTDEESILTLLTSRSNAQRQEISAAFKTLFGRDLLDDLKSELTGKFEKLIVALMKPSRLYDAYELKHALKGAGTNEKVLTEIIASRTPEELRAIKQVYEEEYGSSLEDDVVGDTSGYYQRMLVVLLQANRDPDAGIDEAQVEQDAQALF

SEQ ID NO: 792801 - protein, 70 aa, Homo sapiens
CCVYLEDPGFACSRGAGVSVAWISLGAAAGSFSVCISASPRVPSPGSPPLSRGFGALGSHSLVLLHLPLT

SEQ ID NO: 792802 - protein, 197 aa, Homo sapiens
  misc_feature (174)..(174): Xaa can be any naturally occurring amino acid
  misc_feature (177)..(177): Xaa can be any naturally occurring amino acid
  misc_feature (183)..(183): Xaa can be any naturally occurring amino acid
MAQVLRGTVTDFPGFDERADAETLRKAMKGLGTDEESILTLLTSRSNAQRQEISAAFKTLFGRDLLDDLKSELTGKFEKLIVALMKPSRLYDAYELKHALKGAGTNEKVLTEIIASRTPEELRAIKQVYEEEYGSSLEDDVVGDTSGYYQRMLVVLLQLTETLDAWEFGMEKKXPFXKKGFFXGKKNPKKGKNWGPF

SEQ ID NO: 792803 - protein, 217 aa, Homo sapiens
MAQVLRGTVTDFPGFDERADAETLRKAMKGLGTDEESILTLLTSRSNAQRQEISAAFKTLFGRDLLDDLKSELTGKFEKLIVALMKPSRLYDAYELKHALKGAGTNEKVLTEIIASRTPEELRAIKQVYEEEYGSGRKITGGGATSRDNRGSAGDPQGTEPSRDWEPTLPSQGNQADTTGATKSPLGPGSPKGSHHSTRHHHTTHPRDPTPRGHTPG

SEQ ID NO: 792804 - protein, 119 aa, Homo sapiens
MAQVLRGTVTDFPGFDERADAETLRKAMKGLGTDEESILTLLTSRSNAQRQEISAAFKTLFGRDLLDDLKSELTGKFEKLIVALMKPSRLYDAYELKHALKGAGTNDQVYEEEYGSSLG

SEQ ID NO: 792805 - protein, 90 aa, Homo sapiens
NHLSLFLLMFQDSVAFEDVAVSFTQEEWALLDPSQKNLYRDVMQETFKNLTSVGKTWKVQNIEDEYKNPRRNLRDGVSLFPRLVIDCWIM

SEQ ID NO: 792806 - protein, 135 aa, Homo sapiens
  misc_feature (2)..(2): Xaa can be any naturally occurring amino acid
  misc_feature (4)..(4): Xaa can be any naturally occurring amino acid
  misc_feature (7)..(7): Xaa can be any naturally occurring amino acid
CXLXLIXRAHYYLCESPTEGEAHSSFYFCCYAGCCRDTRFPTPRGPGSLCHNFCRSAACTVTRTIHGSPREDTGTPRSREMMFQDSVAFEDVAVSFTQEEWALLDPSQKNLYRDVMQETFKNLTSVGKNDNITSQ

SEQ ID NO: 792807 - protein, 612 aa, Homo sapiens
  misc_feature (2)..(2): Xaa can be any naturally occurring amino acid
  misc_feature (4)..(4): Xaa can be any naturally occurring amino acid
  misc_feature (7)..(7): Xaa can be any naturally occurring amino acid
CXLXLIXRAHYYLCESPTEGEAHSSFYFCCYAGCCRDTRFPTPRGPGSLCHNFCRSAACTVTRTIHGSPREDTGTPRSREMMFQDSVAFEDVAVSFTQEEWALLDPSQKNLYRDVMQETFKNLTSVGKTWKVQNIEDEYKNPRRNLSLMREKLCESKESHHCGESFNQIADDMLNRKTLPGITPCESSVCGEVGTGHSSLNTHIRADTGHKSSEYQEYGENPYRNKECKKAFSYLDSFQSHDKACTKEKPYDGKECTETFISHSCIQRHRVMHSGDGPYKCKFCGKAFYFLNLCLIHERIHTGVKPYKCKQCGKAFTRSTTLPVHERTHTGVNADECKECGNAFSFPSEIRRHKRSHTGEKPYECKQCGKVFISFSSIQYHKMTHTGEKPYECKQCGKAFRCGSHLQKHGRTHTGEKPYECRQCGKAFRCTSDLQRHEKTHTEDKPYGCKQCGKGFRCASQLQIHERTHSGEKPHECKECGKVFKYFSSLRIHERTHTGEKPHECKQCGKAFRYFSSLHIHERTHTGDKPYECKVCGKAFTCSSSIRYHERTHTGEKPYECKHCGKAFISNYIRYHERTHTGEKPYQCKQCGKAFIRASSCREHERTHTINR

SEQ ID NO: 792808 - protein, 612 aa, Homo sapiens; identical to SEQ ID NO: 792807
  misc_feature (2)..(2): Xaa can be any naturally occurring amino acid
  misc_feature (4)..(4): Xaa can be any naturally occurring amino acid
  misc_feature (7)..(7): Xaa can be any naturally occurring amino acid

SEQ ID NO: 792809 - protein, 531 aa, Homo sapiens
MFQDSVAFEDVAVSFTQEEWALLDPSQKNLYRDVMQETFKNLTSVGKTWKVQNIEDEYKNPRRNLSLMREKLCESKESHHCGESFNQIADDMLNRKTLPGITPCESSVCGEVGTGHSSLNTHIRADTGHKSSEYQEYGENPYRNKECKKAFSYLDSFQSHDKACTKEKPYDGKECTETFISHSCIQRHRVMHSGDGPYKCKFCGKAFYFLNLCLIHERIHTGVKPYKCKQCGKAFTRSTTLPVHERTHTGVNADECKECGNAFSFPSEIRRHKRSHTGEKPYECKQCGKVFISFSSIQYHKMTHTGEKPYECKQCGKAFRCGSHLQKHGRTHTGEKPYECRQCGKAFRCTSDLQRHEKTHTEDKPYGCKQCGKGFRCASQLQIHERTHSGEKPHECKECGKVFKYFSSLRIHERTHTGEKPHECKQCGKAFRYFSSLHIHERTHTGDKPYECKVCGKAFTCSSSIRYHERTHTGEKPYECKHCGKAFISNYIRYHERTHTGEKPYQCKQCGKAFIRASSCREHERTHTINR

SEQ ID NO: 792810 - protein, 612 aa, Homo sapiens; identical to SEQ ID NO: 792807
  misc_feature (2)..(2): Xaa can be any naturally occurring amino acid
  misc_feature (4)..(4): Xaa can be any naturally occurring amino acid
  misc_feature (7)..(7): Xaa can be any naturally occurring amino acid

SEQ ID NO: 792811 - protein, 163 aa, Homo sapiens
  misc_feature (2)..(2): Xaa can be any naturally occurring amino acid
  misc_feature (4)..(4): Xaa can be any naturally occurring amino acid
  misc_feature (7)..(7): Xaa can be any naturally occurring amino acid
CXLXLIXRAHYYLCESPTEGEAHSSFYFCCYAGCCRDTRFPTPRGPGSLCHNFCRSAACTVTRTIHGSPREDTGTPRSREMMFQDSVAFEDVAVSFTQEEWALLDPSQKNLYRDVMQETFKNLTSVGKTWKVQNIEDEYKNPRRNLRDGVSLFPRLVIDCWIM

SEQ ID NO: 792812 - protein, 107 aa, Homo sapiens
SWGLWGKTATSQKPLAKVYGRSSALRCPKPSYKVGKINIFEEDQEQGKRDLTIEVCTSIPQGSPRAVVLTPEHQHLLGTCQKCKFSSLSQDLLNQKLWRVGPSPLLS

SEQ ID NO: 792813 - protein, 101 aa, Homo sapiens
WSVSLSPRLECSGVISVHCNLHLPGSSNPPTSASQVARTTGLCYHAWLICFVFSVEMAFHHVGQAGLELLVSSDPPTSASESAGITGVSHCARSKSALLGV

SEQ ID NO: 792814 - protein, 108 aa, Homo sapiens
MYGGEKRLPSKIFILCSLSRAVRHQILASAEGGDTGESLTCKIKLSLERERVSLVHRSVANAASSVPAPAHHWENHEPTLSVSPLSLSVSSLGLSCHQYTDSDSQIFP

SEQ ID NO: 792815 - protein, 691 aa, Homo sapiens
MFNCRLALKQENEEKRNADMLYNKDSEQLRIKEEECGKVVETKQQLKWNLRRLVKELRTVRNNLDLVVQERNDAQKQLSEEQDARILQDQILTSKQKELEMARKKMNSEISHRHQKEKDLFHEDCMLQEEIALLRLEIDTIKNQNKQKEKKYFEDIEAVKEKNDNLQKIIKLNEETLTETILQYSGQLNNLTAENKILNSELENGKQNQERLEIEMESYRCRLAAAVRDCDQSQTARDLKLDFQRTRQEWVRLHDKMKVDMSGLQAKNEILSEKLSNAESKINSLQIQLHNTRDALGRESLILERVQRDLSQTQCQKKETEQMYQIEQSKLKKYIAKQESVEERLSQLQSENMLLRQQLDDAHKKANSQEKTSSTIQDQFHSAAKNLQAESEKQILSLQEKNKELMDEYNHLKERMDQCEKEKAGRKIDLTEAQETVPSRCLHLDAENEVLQLQQTLFSMKAIQKQCETLQKNKKQLKQEVVNLKSYMERNMLERGKAEWHKLLIEERARKEIEEKLNEAILTLQKQAAVSHEQLVQLREDNTTSIKTQMELTIKDLESEISRIKTSQADFNKTELERYKELYLEEVKVRESLSNELSRTNEMIAEVSTQLTVEKEQTRSRSLFTAYATRPVLESPCVGNLNDSEGLNRKHIPRKKRSALKDMESYLLKVSYLFSFGVQISDRILVCYLVK

SEQ ID NO: 792816 - protein, 733 aa, Homo sapiens
MFNCRLALKQENEEKRNADMLYNKDSEQLRIKEEECGKVVETKQQLKWNLRRLVKELRTVRNNLDLVVQERNDAQKQLSEEQDARILQDQILTSKQKELEMARKKMNSEISHRHQKEKDLFHEDCMLQEEIALLRLEIDTIKNQNKQKEKKYFEDIEAVKEKNDNLQKIIKLNEETLTETILQYSGQLNNLTAENKILNSELENGKQNQERLEIEMESYRCRLAAAVRDCDQSQTARDLKLDFQRTRQEWVRLHDKMKVDMSGLQAKNEILSEKLSNAESKINSLQIQLHNTRDALGRESLILERVQRDLSQTQCQKKETEQMYQIEQSKLKKYIAKQESVEERLSQLQSENMLLRQQLDDAHKKANSQEKTSSTIQDQFHSAAKNLQAESEKQILSLQEKNKELMDEYNHLKERMDQCEKEKAGRKIDLTEAQETVPSRCLHLDAENEVLQLQQTLFSMKAIQKQCETLQKNKKQLKQEVVNLKSYMERNMLERGKAEWHKLLIEERARKEIEEKLNEAILTLQKQAAVSHEQLVQLREDNTTSIKTQMELTIKDLESEISRIKTSQADFNKTELERYKELYLEEVKVRESLSNELSRTNEMIAEVSTQLTVEKEQTRSRSLFTAYATRPVLESPCVGNLNDSEGLNRKHIPRKKRSALKDMESYLLKMQQKLQNDLTAEVAAATKYEPGSYIASPLGFTHKENLNQDPVLEVTKDAGITSVSYHTQRGSQV

SEQ ID NO: 792817 - protein, 728 aa, Homo sapiens
MFNCRLALKQENEEKRNADMLYNKDSEQLRIKEEECGKVVETKQQLKWNLRRLVKELRTVRNNLDLVVQERNDAQKQLSEEQDARILQDQILTSKQKELEMARKKMNSEISHRHQKEKDLFHEDCMLQEEIALLRLEIDTIKNQNKQKEKKYFEDIEAVKEKNDNLQKIIKLNEETLTETILQYSGQLNNLTAENKILNSELENGKQNQERLEIEMESYRCRLAAAVRDCDQSQTARDLKLDFQRTRQEWVRLHDKMKVDMSGLQAKNEILSEKLSNAESKINSLQIQLHNTRDALGRESLILERVQRDLSQTQCQKKETEQMYQIEQSKLKKYIAKQESVEERLSQLQSENMLLRQQLDDAHKKANSQEKTSSTIQDQFHSAAKNLQAESEKQILSLQEKNKELMDEYNHLKERMDQCEKEKAGRKIDLTEAQETVPSRCLHLDAENEVLQLQQTLFSMKAIQKQCETLQKNKKQLKQEVVNLKSYMERNMLERGKAEWHKLLIEERARKEIEEKLNEAILTLQKQAAVSHEQLVQLREDNTTSIKTQMELTIKDLESEISRIKTSQADFNKTELERYKELYLEEVKVRESLSNELSRTNEMIAEVSTQLTVEKEQTRSRSLFTAYATRPVLESPCVGNLNDSEGLNRKHIPRKKRSALKDMESYLLKMQQKLQNDLTAEVAAATKYEPGSYIASPLGFTHKENLNQDPVLEVTKEYAQILRRKYIL

SEQ ID NO: 792818 - protein, 56 aa, Homo sapiens
MFVNEAVCRWAKKGVCVSTIPHQRNQISLEKWIPLLEQEKDKMNLEHLVTEFKRCS

SEQ ID NO: 792819 - protein, 73 aa, Homo sapiens
QTKEGPAEQTVRRPRPDPHTKVQDLSLGRQRRDLLNRRCGGQGQIHAQRMSLVGPTPGGIACKKQGSSWPSAV

SEQ ID NO: 792820 - protein, 135 aa, Homo sapiens
MFSEVPRSHEAGADSQGNGTAVSLFFLVLCIHALLHPCPFTLPTHIPLDWPCGQSLECMGCWGPVGCTGPEPLAPSRLAWSQQVGDLSRACLSQLSPPIPPLSCLGQLERACLLAAWQGGVQGQVRSPVTARKKK

SEQ ID NO: 792821 - protein, 101 aa, Homo sapiens
GLPGVVLGRQGPCVCGRGATADTNTDRVRLEDKPYSPPPHLPRTSEALAQFSLRGAGSPTQAEFLPSKRKHRQPSFSYGLWILKTRCGEGREASAPGTPAG

SEQ ID NO: 792822 - protein, 109 aa, Homo sapiens
LPLIVMRDPFQTEELLQLFVRANPNVQTPSGTPSKKKHHFFFQAAIPHRGLFGSVDCKKRAWETISSGSVFLQALMKGISIVRFFKCSLTLKYIKITKYVPQETWENTK

SEQ ID NO: 792823 - protein, 76 aa, Homo sapiens
PCQVEGEPPVSISWQRDRLALANESGVTLMPDGSLHLAALPSRRSLPSRAHEYHCVAQNRYGRLVSRQARVQLASK

SEQ ID NO: 792824 - protein, 123 aa, Homo sapiens
QRPHHYVTKVFWNLVFQRLLERRARPAPSKPQPGRCRHAPTSSSPIYCLLENPGPSSPSPPLPLGAAQGEPGTMRAPNSCKDLSEPLRKRRSHLSFWKPEPQVSPGSLCTCNYLISIKSVFSL

SEQ ID NO: 792825 - protein, 109 aa, Homo sapiens
NPFLIVWVALKRAFGFRTPRNASLGAGVLGDSLGALGHGVLGQLAGQQQANGRLHFAGRDGGALVVVCQAGGLAGDALEDVIDEGVHDAHGLGRDAGVGVHLLQHLVHV

SEQ ID NO: 792826 - protein, 116 aa, Homo sapiens
DRVSLSLPRLECNGAISAHHNLRLPDSSDSPASASREAGITGMCHHARLIFVFLVERGFLHFGQAGLRLPTSGDPPASASQSAGITGVSHWPGQSYEFLKHFILCISVRRHHHALT

SEQ ID NO: 792827 - protein, 147 aa, Homo sapiens
CRLYQSVKLMYSIGIFFTYALQFHVPAEIIIPFAISQVSESWALFVDLSVRSALVCLTCVSAILIPRLDLVISLVGSVSSSALALIIPALLEIVIFYSEDMSCVTIAKDIMISIVGLLGCIFGTYQALYELPQPISHSMANSTGVHA

SEQ ID NO: 792828 - protein, 147 aa, Homo sapiens
RHLHPLVKKRKQTSKNNIEKKKPKFRKRKRKAILKCSFENVYSDDALSKENRVVCETEVLLKELEQMLQQALQPTATPDESEEGHGEEINMGEKLSKCSPEAPAGSLFENHYEEDYLVIDGIKLKAGECIEDITNKFKEIDALMSEF

SEQ ID NO: 792829 - protein, 240 aa, Homo sapiens
WIKATFVGHYSITLKTGVQWHNLASLQHLPPRFKQFSYLSLPSSWELQPEKCKNKKKWYKSALQEACLLYGYSHEQRLEMCCLSKQQDKSETHDKVAALVKKRKQTSKNNIEKKKPKFRKRKRKAILKCSFENVYSDDALSKENRVVCETEVLLKELEQMLQQALQPTATPDESEEGHGEEINMGEKLSKCSPEAPAGSLFENHYEEDYLVIDGIKLKAGECIEDITNKFKEIDALMSEF

SEQ ID NO: 792830 - protein, 148 aa, Homo sapiens
RINTGERRGEEKQTSKNNIEKKKPKFRKRKRKAILKCSFENVYSDDALSKENRVVCETEVLLKELEQMLQQALQPTATPDESEEGHGEEINMGEKLSKCSPEAPAGSLFENHYEEDYLVIDGIKLKAGECIEDITNKFKEIDALMSEF

SEQ ID NO: 792831 - protein, 254 aa, Homo sapiens
WIKATFVGHYSITLKTGVQWHNLASLQHLPPRFKQFSYLSLPSSWELQPEKCKNKKKWYKSALQEACLLYGYSHEQRLEMCCLSKQQDKSETHDKVAALVKKRKQTSKNNIEKKKPKFRKRKRKAILKCSFENVYSDDALSKENRVVCETEVLLKELEQMLQQALQPTATPDESEEGHGEEINMGEKLSKCSPEAPAGSLFENHYEEDYLVIDGIKLKAGECIEDITNKFKEIDADAANPPFPLSILRSNRREP

SEQ ID NO: 792832 - protein, 235 aa, Homo sapiens
WIKATFVGHYSITLKTGVQWHNLASLQHLPPRFKQFSYLSLPSSWELQPEKCKNKKKWYKSALQEACLLYGYSHEQRLEMCCLSKQQDKSETHDKVAALVKKRKQTSKNNIEKKKPKFRKRKRKAILKCSFENVYSDDALSKENRVVCETEVLLKELEQMLQQALQPTATPDESEEGHGEEINMGEKTIFFFGDRVSLCHQGWSEVMQSLLTAISASQVQVILLPQPPEYLGITE

SEQ ID NO: 792833 - protein, 143 aa, Homo sapiens
MWSGPAQNDSQANPPTTFLSHIETPTKPHDSLHPTHWKYLLLGLLLKQLHLHDRRGAPLLSCNLVVPRSREVTILMPNLVRTPDRHSALQPRTPGLKRSSSLSLPSSWDYRHEPLHPALQGISKKGKCKIVCMLYHCLCMIGG

SEQ ID NO: 792834 - protein, 101 aa, Homo sapiens
THGDPAQPIPTLASTQIHSARPQLQALSPQPPPLTCALDLRLSFPSYLSFLPPSILCPPTIHGCQRRPLRSHTWGLIASLASPDPPRSPSCAVISAVLRTV

SEQ ID NO: 792835 - protein, 107 aa, Homo sapiens
ESHSVTQARMQWQDLSSRQPLPPGFKQFLCSWDYIAMHHHAWLIFVFLVGMRFHHFGQAGLKLLTSSDLPASASQNSGIAGVSHCAWLQIVPISAYKSVDKLIPESF

SEQ ID NO: 792836 - protein, 27 aa, Homo sapiens
MESRSLDQAGVQWHNLGSLQPSPPGFK

SEQ ID NO: 792837 - protein, 84 aa, Homo sapiens
LSTQLPLGHGFLASPAGNRELLQSWRREGVTQITSAESRAWPGMGFTEALFHPSMLVPTFTSGSPEVLREPRVLGPQPQPLPST

SEQ ID NO: 792838 - protein, 116 aa, Homo sapiens
WRLCSLRCLVSEQLGWSRPQRFRSHVGKCDLNFKTLSFPGGRVPKFIPTYGSPGGPGLPLPLDASRAGMRDRETLRFRSPRRLPGARAGDIPSVQPSTLSPQFFPTFAFQESSSKT

SEQ ID NO: 792839 - protein, 299 aa, Homo sapiens
MTLSVLSRKDKERVIRRLLLQAPPGEFVNAFDDLCLLIRDEKLMHHQGECAGHQHCQKYSVPLCIDGNPVLLSHHNVMGDYRFFDHQSKLSFKYDLLQNQLKDIQSHGIIQNEAEYLRVVLLCALKLYVNDHYPKGNCNMLRKTVKSKEYLIACIEDHNYETGECWNGLWKSKWIFQVNPFLTQVTGRIFVQAHFFRCVNLHIEISKDLKESLEIVNQAQLALSFARLVEEQENKFQAAVLEELQELSNEALRKILRRDLPVTRTLIDWHRILSDLNLVMYPKLGYVIYSRSVLCNWII

SEQ ID NO: 792840 - protein, 73 aa, Homo sapiens
MCFKFYISWRGQDRLTFRLQSASSRRFCPQPGEVGNRFPQDFHWELRGRPVPGGGAGWSPPGGDRRLAGGRRG

SEQ ID NO: 792841 - protein, 47 aa, Homo sapiens
MGPHLCHFNRETVYQKLDQDLQLFKLHPLVLPQTFKASQNKSNFSMT

SEQ ID NO: 792842 - protein, 117 aa, Homo sapiens
TQNKPRQPRGAADACTTEKSNKSSLHPNRHGHSSSDPVYPCGICTNEVNDDQDAILCEASCQKWFHRICTGMTETAYGLLTAEASAVWGCDTCMADKDVQLMRTRETFGPSAVGSDA

SEQ ID NO: 792843 - protein, 120 aa, Homo sapiens
GDMKKQGNVTPSEETSNSPATDPHPKEIQESSNRELSRELTGLIVKKVINMEESFEQQHKEMRKRGGEIYEMITCQKEVLKFNRRVFLELKKSLDEIQSTLKSFNDRLEQIEEKLSGHKI

SEQ ID NO: 792844 - protein, 103 aa, Homo sapiens
FYHHNHSIITVCPEQRSPRCSLQFLPGSRTGDGRTGDKSGSENGGRGQSLPQNWEAQKWCPCPSMDFLSTVFSPFHAQLPSHQPGAHGGEKLRMCLKSKGSFV

SEQ ID NO: 792845 - protein, 144 aa, Homo sapiens
ARRSGLGEGHTRLGPTSWPSRSAEWPGTWMPWGHGVNCRLRLSGAPAAVSPRTKFRSQHPNRKGPCPRPERPLAHGRGGGAASPRAGAFRPSLAARGSLSLPLPGFCCRAPSLCGPRVNPISRGEAPVTPAFLTPAASPPLHRG

SEQ ID NO: 792846 - protein, 162 aa, Homo sapiens
ATPASSTPEEPAKQDLTALSGKAHFVSKITSSKPSAVASEKFKEQVDLAKTMTNLSPTILGNAVQLISSVPKGKLPIPPYSRMKTMEVYKIKSDANIAGFSLPGPKADCDKIPSTTEGFNAATKVASRLPVPQVSQQSACESAFCPPTKLDLNHKTKLNSGA

SEQ ID NO: 792847 - protein, 1220 aa, Homo sapiens
GSPNVVFLKIKYSEPNVSKKESPPLRERQSLVFKMKKFNFRKVLDGLTASSPGSGSSSGSNSGGGAGSGSVHPAGTAGVLREEIQETLTSEYFQICKTVRHGFPHQPTALAFDPVQKILAIGTRTGAIRILGRPGVDCYCQHESGAAVLQLQFLINEGALVSASSDDTLHLWNLRQKRPAILHSLKFNRERITYCHLPFQSKWLYVGTERGNTHIVNIESFILSGYVIMWNKAIELSTKTHPGPVVHLSDSPRDEGKLLIGYENGTVVFWDLKSKRAELRVYYDEAIHSIDWHHEGKQFMCSHSDGSLTLWNLKSPSRPFQTTIPHGKSQREGRKSESCKPILKVEYKTCKNSEPFIIFSGGLSYDKACRRPSLTIMHGKAITVLEMDHPIVEFLTLCETPYPNEFQEPYAVVVLLEKDLIVVDLTQSNFPIFENPYPMDIHESPVTCTAYFADCPPDLILVLYSIGVKHKKQGYSNKEWPISGGAWNLGAQTYPEIIITGHADGSIKFWDASAITLQMLYKLKTSKVFEKQKVGEGKQTCEIVEEDPFAIQMIYWCPESRIFCVSGVSAYVIIYKFSRHEITTEIVSLEVRLQYDVEDIITPEPETSPPFPDLSAQLPSSRSLSGSTNTVASEGVTKDSIPCLNVKTRPVRMPPGYQAELVIQLVWVDGEPPQQITSLAVSSAYGIVAFGNCNGLAVVDFIQKTVLLSMGTIDLYRSSDLYQRQPRSPRKNKQFIADNFCMRGLSNFYPDLTKRIRTSYQSLTELNDSPVPLELERCKSPTSDHVNGHCTSPTSQSCSSGKRLSSADVSKVNRWGPGRPPFRKAQSAACMEISLPVTTEENRENSYNRSRSSSISSIDKDSKEAITALYFMDSFARKNDSTISPCLFVGTSLGMVLIISLNLPLADEQRFTEPVMVLPSGTFLSLKGAVLTFSCMDRMGGLMQPPYEVWRDPNNIDENEKSWRRKVVMNSSSASQEIGDHQYTIICSEKQAKVFSLPSQTCLYVHNITETSFILQANVVVMCSSACLACFCANGHIMIMSLPSLRPMLDVNYLPLTDMRIARTFCFTNEGQALYLVSPTEIQRLTYSQEMCDNLQDMLGDLFTPIETPEAQNRGFLKGLFGGSGQTFDREELFGEASAGKASRSLAQHIPGPGSIEGMKGAAGGVMGELTRARIALDERGQRLGELEEKTAGMMTSAEAFSKHAHELMLKYKDKKWYQF

SEQ ID NO: 792848 - protein, 1227 aa, Homo sapiens
TSESARRRDQRAQRSGRSPPTSAPSASRAGRRLEASEEVFKMKKFNFRKVLDGLTASSPGSGSSSGSNSGGGAGSGSVHPAGTAGVLREEIQETLTSEYFQICKTVRHGFPHQPTALAFDPVQKILAIGTRTGAIRILGRPGVDCYCQHESGAAVLQLQFLINEGALVSASSDDTLHLWNLRQKRPAILHSLKFNRERITYCHLPFQSKWLYVGTERGNTHIVNIESFILSGYVIMWNKAIELSTKTHPGPVVHLSDSPRDEGKLLIGYENGTVVFWDLKSKRAELRVYYDEAIHSIDWHHEGKQFMCSHSDGSLTLWNLKSPSRPFQTTIPHGKSQREGRKSESCKPILKVEYKTCKNSEPFIIFSGGLSYDKACRRPSLTIMHGKAITVLEMDHPIVEFLTLCETPYPNEFQEPYAVVVLLEKDLIVVDLTQSNFPIFENPYPMDIHESPVTCTAYFADCPPDLILVLYSIGVKHKKQGYSNKEWPISGGAWNLGAQTYPEIIITGHADGSIKFWDASAITLQMLYKLKTSKVFEKQKVGEGKQTCEIVEEDPFAIQMIYWCPESRIFCVSGVSAYVIIYKFSRHEITTEIVSLEVRLQYDVEDIITPEPETSPPFPDLSAQLPSSRSLSGSTNTVASEGVTKDSIPCLNVKTRPVRMPPGYQAELVIQLVWVDGEPPQQITSLAVSSAYGIVAFGNCNGLAVVDFIQKTVLLSMGTIDLYRSSDLYQRQPRSPRKNKQFIADNFCMRGLSNFYPDLTKRIRTSYQSLTELNDSPVPLELERCKSPTSDHVNGHCTSPTSQSCSSGKRLSSADVSKVNRWGPGRPPFRKAQSAACMEISLPVTTEENRENSYNRSRSSSISSIDKDSKEAITALYFMDSFARKNDSTISPCLFVGTSLGMVLIISLNLPLADEQRFTEPVMVLPSGTFLSLKGAVLTFSCMDRMGGLMQPPYEVWRDPNNIDENEKSWRRKVVMNSSSASQEIGDHQYTIICSEKQAKVFSLPSQTCLYVHNITETSFILQANVVVMCSSACLACFCANGHIMIMSLPSLRPMLDVNYLPLTDMRIARTFCFTNEGQALYLVSPTEIQRLTYSQEMCDNLQDMLGDLFTPIETPEAQNRGFLKGLFGGSGQTFDREELFGEASAGKASRSLAQHIPGPGSIEGMKGAAGGVMGELTRARIALDERGQRLGELEEKTAGMMTSAEAFSKHAHELMLKYKDKKWYQF

SEQ ID NO: 792849 - protein, 79 aa, Homo sapiens
MATPRGVVGALWRRMCACMSGKLFLMYASALLSHTVPKRKPCAGWCSCAGDPVSASACPSGPLTIEGRAVLRGGAVLGT

SEQ ID NO: 792850 - protein, 113 aa, Homo sapiens
RRRGFTMLPRWVLELLASSDPPTSAPQSTGITGVGHHTQLDGICILNKAPGDSSLRLSSFFKCCSGCRGAGGASTGIPPALQPCSGTLEATPYYPGGSGAIASCSVTLLGVKL

SEQ ID NO: 792851 - protein, 239 aa, Homo sapiens
PRWLWARPVAFTGFLTHSWSVRVLFFFNWRWQMTVLLDFLYAHLTPAGPEIIGVPRSLWYHAPIVTTRRMTKSMPVVEEDKKEEWSCREEARQDHLQPGAAGLASQGLAPAWARQEAMMNNAIILLFIGGTWAYLKTLKKCLHFQSLRKGRSSSYSGFFMPSSGIEEPALNATWKTAWTCTFGPGHPWELSPCRLNPFWILFSPDCPRVQVFSSLVCPVKVQGWKGEGVESGALFHCWA

SEQ ID NO: 792852 - protein, 229 aa, Homo sapiens
TKTQASKTHGLFQASPGSALAQVRPKTSVCGQGRNRTQGSVSALLCPQKLATDHQPSILGEPVGGLPQDRDGDLARSFSQGFVTYSQENNSESSLQSSSSLSLSTMSVASLPAVNKIDESRESSLEGDLAVKSVFPPESMGTLQRFKDTQETETGYRYMTLHFPYRPTPASEKVPSFQHSSVSNCLTLRVHWGSEAEIHKFSLGKSSVNLIEVSQATVKTELRRTLSLG

SEQ ID NO: 792853 - protein, 563 aa, Homo sapiens
PTSPVTSGLPLFFVITVTAIKQGYEDCLRHRADNEVNKSTVYIIENAKRVRKESEKIKVGDVVEVQADETFPCDLILLSSCTTDGTCYVTTASLDGESNCKTHYAVRDTIALCTAESIDTLRAAIECEQPQPDLYKFVGRINIYSNSLEAVARSLGPENLLLKGATLKNTEKIYGVAVYTGMETKMALNYQGKSQKRSAVEKSINAFLIVYLFILLTKAAVCTTLKYVWQSTPYNDEPWYNQKTQKERETLKVLKMFTDFLSFMVLFNFIIPVSMYVTVEMQKFLGSFFISWDKDFYDEEINEGALVNTSDLNEELGQVDYVFTDKTGTLTENSMEFIECCIDGHKYKGVTQEVDGLSQTDGTLTYFDKVDKNREELFLRALCLCHTVEIKTNDAVDGATESAELTYISSSPDEIALVKGAKRYGFTFLGNRNGYMRVENQRKEIEEYELLHTLNFDAVRRRMSVIVKTQEGDILLFCKGADSAVFPRVQNHEIELTKVHVERNAMDGYRTLCVAFKEIAPDDYERINRQLIEAKMALQDREEKMEKVFDDIETNMNLIGATA

SEQ ID NO: 792854 - protein, 539 aa, Homo sapiens
PTSPVTSGLPLFFVITVTAIKQGYEDCLRHRADNEVNKSTVYIIENAKRVRKESEKIKVGDVVEVQADETFPCDLILLSSCTTDGTCYVTTASLDGESNCKTHYAVRDTIALCTAESIDTLRAAIECEQPQPDLYKFVGRINIYSNSLEAVARSLGPENLLLKGATLKNTEKIYGVAVYTGMETKMALNYQGKSQKRSAVEKSINAFLIVYLFILLTKAAVCTTLKYVWQSTPYNDEPWYNQKTQKERETLKVLKMFTDFLSFMVLFNFIIPVSMYVTVEMQKFLGSFFISWDKDFYDEEINEGALVNTSDLNEELGQVDYVFTDKTGTLTENSMEFIECCIDGHKYKGVTQEVDGLSQTDGTLTYFDKVDKNREELFLRALCLCHTVEIKTNDAVDGATESAELTYISSSPDEIALVKGAKRYELLHTLNFDAVRRRMSVIVKTQEGDILLFCKGADSAVFPRVQNHEIELTKVHVERNAMDGYRTLCVAFKEIAPDDYERINRQLIEAKMALQDREEKMEKVFDDIETNMNLIGATA

SEQ ID NO: 792855 - protein, 130 aa, Homo sapiens [sequence omitted]

SEQ ID NO: 792856 - protein, 39 aa, Homo sapiens
MWEMGTMGQKWAEEAPSPRPQFPHLYNEGPFFHGSKSHT

SEQ ID NO: 792857 - protein, 123 aa, Homo sapiens
FSVMFFPSACINRSSSLKKSKVPVNLESLFYCWVRWLTPVDTETNRERQQRQRPGERSLASSPLGSLPVGSMRHPNSSHKNLFTLLKIDEASFYFMKVHRSGLSVVVHACNPSTLGGRGRHIT

SEQ ID NO: 792858 - protein, 109 aa, Homo sapiens
KPATDIEEPIYTMDKQSSAGGVKRSVPCDSNEANEMMPETPTGDSDPQPAPKKMKTSESSTILVVRYRRNFKRTSPEELLNDHARENRINPLQMEEEEFMEIMVEIPAK

SEQ ID NO: 792859 - protein, 153 aa, Homo sapiens
ICGLDPRIQPPKLLLGNHLGQLHPMTTYAPPVIDSPEKMEFKVIGPIGPDIFTRLLRTQLSSPVLRFQLGHNIGGQKTDSQGTNWNSQGECQHTGWLPHHRPESGPGLASSGQPTRGMSWKELWPTQGGPKYTKSQVLLLLSPFYSGKTRHIV

SEQ ID NO: 792860 - protein, 82 aa, Homo sapiens
CCIHNSKDSGPTQMSNNDKVDLRKCGEDGRIGTAPVYSSQRERRRRQLSGTGTQIQIGTLIWPLDKTVNPFCMRRNLCLIFS

SEQ ID NO: 792861 - protein, 124 aa, Homo sapiens
SLALTAFVKVSSFYWSELVTKLDIDPCRGLSFSKSGRRPSAPGKLNEMKIPGPIQNQRIRSPKTRDARCASYQTTGPRAPKTTLGEPDFSYQNILCDFKSGVCLMPPSWSGVGRRIVCWGTSHN

SEQ ID NO: 792862 - protein, 108 aa, Homo sapiens
MQPVQEDGGKEKPEPGLELRRAESCGGPSGLGDAVREHEPRVPEGPERHSAIGSDHQVGDAAIVEGAMEPAFGRKLQRCVLSSAANDTGVTSEDLLIILPLLGIPRGM

SEQ ID NO: 792863 - protein, 74 aa, Homo sapiens
EAFFKSGSHAANDSKSQACSTVYTHSSQYQVRLQFSHAQSYGLESLLIRLVDGRGCLVSDETLDLDFWVNAGMS

SEQ ID NO: 792864 - protein, 126 aa, Homo sapiens
IFSLLISLFAFFLVISNINLQIRSSFLLLVVYISWCPNYVFVPTWVYVTMLLQTKAHICRWNTRMIVKKYRAAFLKELKRRNTSLSCEKESRLPLKDEFTLHIFISTEINIKCFCLFQGPFINFFQ

SEQ ID NO: 792865 - protein, 110 aa, Homo sapiens
RHFIGLMQMIEGMRHEEGECSYELEVESYLQMEDVTSTFIAPRNESNNLASDTFITHKKSSFIKNINQGSSSSVIESDEECAEIVKQTHIKPTKIVSLKKKVSKEIKKDQ

SEQ ID NO: 792866 - protein, 74 aa, Homo sapiens
MQNGQASVVGRMAHGKVSHGPETVRGLLSWSWSGSNSKSSMVERTMSVKDEANDKLRIAIQKSDPISEENNNLN

SEQ ID NO: 792867 - protein, 112 aa, Homo sapiens
LFCFLRHSLTLSPRLECSGTILAHCNLCLLGSSDLSLASTQTTGACHHAQLIFVFFVEMESHHVAQAGRLKLLGSSNLLTLVSQSVEIIGMSHCAWPKGIFIESFYKCHHVV

SEQ ID NO: 792868 - protein, 59 aa, Homo sapiens
PPALFACARATWIPWIEMAGPQNAIHLDPGVPKELPWRPAGPSAEFQKVRNKILCVIPL

SEQ ID NO: 792869 - protein, 560 aa, Homo sapiens
MPRATALGALVSLLLLLPLPRGAGGLGERPDATADYSELDGEEGTEQQLEHYHDPCKAAVFWGDIALDEDDLKLFHIDKARDWTKQTVGATGHSTGGLEEQASESSPDTTAMDTGTKEAGKDGRENTTLLHSPGTLHAAAKTFSPRVRRATTSRTERIWPGGVIPYVIGGNFTGSQRAIFKQAMRHWEKHTCVTFIERTDEESFIVFSYRTCGCCSYVGRRGGGPQAISIGKNCDKFGIVAHELGHVVGFWHEHTRPDRDQHVTIIRENIQPGQEYNFLKMEAGEVSSLGETYDFDSIMHYARNTFSRGVFLDTILPRQDDNGVRPTIGQRVRLSQGDIAQARKLYKCPACGETLQDTTGNFSAPGFPNGYPSYSHCVWRISVTPGEKIVLNFTSMDLFKSRLCWYDYVEVRDGYWRKAPLLGRFCGDKIPEPLVSTDSRLWVEFRSSSNILGKGFFAAYEATCGGDMNKDAGQIQSPNYPDDYRPSKECVWRITVSEGFHVGLTFQAFEIERHDSCAYDYLEVRDGPTEESALIGHFCGYEKPEDVKSSSNRLWMKFVS

SEQ ID NO: 792870 - protein, 1015 aa, Homo sapiens
MPRATALGALVSLLLLLPLPRGAGGLGERPDATADYSELDGEEGTEQQLEHYHDPCKAAVFWGDIALDEDDLKLFHIDKARDWTKQTVGATGHSTGGLEEQASESSPDTTAMDTGTKEAGKDGRENTTLLHSPGTLHAAAKTFSPRVRRATTSRTERIWPGGVIPYVIGGNFTGSQRAIFKQAMRHWEKHTCVTFIERTDEESFIVFSYRTCGCCSYVGRRGGGPQAISIGKNCDKFGIVAHELGHVVGFWHEHTRPDRDQHVTIIRENIQPGQEYNFLKMEAGEVSSLGETYDFDSIMHYARNTFSRGVFLDTILPRQDDNGVRPTIGQRVRLSQGDIAQARKLYKCPACGETLQDTTGNFSAPGFPNGYPSYSHCVWRISVTPGEKIVLNFTSMDLFKSRLCWYDYVEVRDGYWRKAPLLGRFCGDKIPEPLVSTDSRLWVEFRSSSNILGKGFFAAYEATCGGDMNKDAGQIQSPNYPDDYRPSKECVWRITVSEGFHVGLTFQAFEIERHDSCAYDYLEVRDGPTEESALIGHFCGYEKPEDVKSSSNRLWMKFVSDGSINKAGFAANFFKEVDECSWPDHGGCEHRCVNTLGSYKCACDPGYELAADKKMCEVACGGFITKLNGTITSPGWPKEYPTNKNCVWQVVAPAQYRISLQFEVFELEGNDVCKYDFVEVRSGLSPDAKLHGRFCGSETPEVITSQSNNMRVEFKSDNTVSKRGFRAHFFSDKDECAKDNGGCQHECVNTFGSYLCRCRNGYWLHENGHDCKEAGCAHKISSVEGTLASPNWPDKYPSRRECTWNISSTAGHRVKLTFNEFEIEQHQECAYDHLEMYDGPDSLAPILGRFCGSKKPDPTVASGSSMFLRFYSDASVQRKGFQAVHSTECGGRLKAEVQTKELYSHAQFGDNNYPSEARCDWVIVAEDGYGVELTFRTFEVEEEADCGYDYMEAYDGYDSSAPRLGRFCGSGPLEEIYSAGDSLMIRFRTDDTINKKGFHARYTSTKFQDALHMKK

SEQ ID NO: 792871 - protein, 251 aa, Homo sapiens
MSSSIITATHPLHSQLDVSLHSSPLPVPELERRPPPQLNARPLPYFLLFCPQTFNEFEIEQHQECAYDHLEMYDGPDSLAPILGRFCGSKKPDPTVASGSSMFLRFYSDASVQRKGFQAVHSTECGGRLKAEVQTKELYSHAQFGDNNYPSEARCDWVIVAEDGYGVELTFRTFEVEEEADCGYDYMEAYDGYDSSAPRLGRFCGSGPLEEIYSAGDSLMIRFRTDDTINKKGFHARYTSTKFQDALHMKK

SEQ ID NO: 792872 - protein, 538 aa, Homo sapiens
MPRATALGALVSLLLLLPLPRGAGGLGERPDATADYSELDGEEGTEQQLEHYHDPCKAAVFWGDIALDEDDLKLFHIDKARDWTKQTVGATGHSTGGLEEQASESSPDTTAMDTGTKEAGKGSQRAIFKQAMRHWEKHTCVTFIERTDEESFIVFSYRTCGCCSYVGRRGGGPQAISIGKNCDKFGIVAHELGHVVGFWHEHTRPDRDQHVTIIRENIQPGQEYNFLKMEAGEVSSLGETYDFDSIMHYARNTFSRGVFLDTILPRQDDNGVRPTIGQRVRLSQGDIAQARKLYKCPGPTCAFVSQKTSICLLHFSPTCSEGFGWQRACGETLQDTTGNFSAPGFPNGYPSYSHCVWRISVTPGEKIVLNFTSMDLFKSRLCWYDYVEVRDGYWRKAPLLGRFCGDKIPEPLVSTDSRLWVEFRSSSNILGKGFFAAYEATCGGDMNKDAGQIQSPNYPDDYRPSKECVWRITVSEGFHVGLTFQAFEIERHDSCAYDYLEVRDGPTEESALIGHFCGYEKPEDVKSSSNRLWMKFVS

SEQ ID NO: 792873 - protein, 460 aa, Homo sapiens
MKFVSDGSINKAGFAANFFKEVDECSWPDHGGCEHRCVNTLGSYKCACDPGYELAADKKMCEVACGGFITKLNGTITSPGWPKEYPTNKNCVWQVVAPAQYRISLQFEVFELEGNDVCKYDFVEVRSGLSPDAKLHGRFCGSETPEVITSQSNNMRVEFKSDNTVSKRGFRAHFFSDKDECAKDNGGCQHECVNTFGSYLCRCRNGYWLHENGHDCKEAGCAHKISSVEGTLASPNWPDKYPSRRECTWNISSTAGHRVKLTFNEFEIEQHQECAYDHLEMYDGPDSLAPILGRFCGSKKPDPTVASGSSMFLRFYSDASVQRKGFQAVHSTECGGRLKAEVQTKELYSHAQFGDNNYPSEARCDWVIVAEDGYGVELTFRTFEVEEEADCGYDYMEAYDGYDSSAPRLGRFCGSGPLEEIYSAGDSLMIRFRTDDTINKKGFHARYTSTKFQDALHMKK

SEQ ID NO: 792874 - protein, 98 aa, Homo sapiens
GLQPYTEWLQLHPGGQGSCLLLSCFNGIGGPGPQLGFGWLQRHPGSSRLNLEGQGSHQLHGACSPSWLRCCSRRNGRGRPSGAATAIKINSFPTCSNN

SEQ ID NO: 792875 - protein, 147 aa, Homo sapiens
MQRAVEGASMESPSTIEDQETVAGGREAWAGPAPRAAEHRTAAPKDAPGQASAPPTGGSPAPGEPAAPSILVDGGGELRLGLSTVVPVPCGPADADASSRGCSLGRMESPVGASRGQVSRPHGVWFLGGPKFPQSFRQNGGRRLLLL

SEQ ID NO: 792876 - protein, 305 aa, Homo sapiens
MSVDPACPQSLPCFEASDCKESSPMPVICGPEENYPSLQMSSAEMPHTETVSPLPSSMDLLIQDSPDSSTSPKGKQPTSAEKSVAKKEDKVPVKKQKTRTVFSSTQLCVLNDRFQRQKYLSLQQMQELSNILNLSYKQVKTWFQNQRMKSKRWQKNNWPKNSNGVTQKASAPTYPSLYSSYHQGCLVNPTGNLPMWSNQTWNNSTWSNQTQNIQSWSNHSWNTQTWCTQSWNNQAWNSPFYNCGEESLQSCMQFQPNSPASDLEAALEAAGEGLNVIQQTTRYFSTPQTMDLFLNYSMNMQPEDV

SEQ ID NO: 792877 - protein, 448 aa, Homo sapiens
KQKEITSHRRVMSAVLLLALLGFILPLPGVQALLCQFGTVQHVWKVSDLPRQWTPKNTSCDSGLGCQDTLMLIESGPQVSLVLSKGCTEAKDQEPRVTEHRMGPGLSLISYTFVCRQEDFCNNLVNSLPLWAPQPPADPGSLRCPVCLSMEGCLEGTTEEICPKGTTHCYDGLLRLRGGGIFSNLRVQGCMPQPGCNLLNGTQEIGPVGMTENCNRKDFLTCHRGTTIMTHGNLAQEPTDWTTSNTEMCEVGQVCQETLLLIDVGLTSTLVGTKGCSTVGAQNSQKTTIHSAPPGVLVASYTHFCSSDLCNSASSSSVLLNSLPPQAAPVPGDRQCPTCVQPLGTCSSGSPRMTCPRGATHCYDGYIHLSGGGLSTKMSIQGCVAQPSSFLLNHTRQIGIFSAREKRDVQPPASQHEGGGAEGLESLTWGVGLALAPALWWGVVCPSC

SEQ ID NO: 792878 - protein, 148 aa, Homo sapiens
AGDAERQLMFQFEGHRAGRVVHVDRVPRPFAENPLLLGGGSAFSFCLGPQLLDKACPQEGEGSTFLIKMLMPSQKHPEQFFFFFEMEPCSVSQDGVQWRNLGSPQPPPPGLTRFSYLSPLSSWDYRRVPAHPPNFCIFSRDRVSPCWP

SEQ ID NO: 792879 - protein, 99 aa, Homo sapiens
LPLPEGCVLSTADTSSSLLCGPPLCNAILSLVLRVSARHGLLSTSFLPSTLSCCRVPASFFPNIGCGTEVAMAGVLRMCSKQLCLGLNSPIWLPVLIST

SEQ ID NO: 792880 - protein, 112 aa, Homo sapiens
MSNDRRWAILSGNFQTPPPGRKECLVTSLRGERCLSSPLPVCPGRDVHTLRYREDSSGEKPQASLSAQGIGGPQPAPSSEQHTAFKGLYCCSYPAEALHQASPCKSVSPQRR

SEQ ID NO: 792881 - protein, 126 aa, Homo sapiens
MPSSTLTCKPFDLKQRSSRRGPKSTASASPRSCLKPSCGKQVCLLLSVRRSQSLAHPGRDSTRVLSYQQTSSDAVSQYKHTGKVEELYGLRLSWLSQAQFLLAQDKTAYAVKSVVLPASNHKTKGQ

SEQ ID NO: 792882 - protein, 83 aa, Homo sapiens
TTWAPSHPTLLANVEEEAAPRTHLWVALAWVAQGQTAEAWGAHAQTAEAWGAHAQTAEALQFYGFYVLSWGFDTNTMNFPMFH

SEQ ID NO: 792883 - protein, 33 aa, Homo sapiens
DARMAVLKVGMLQVKTSRPPMPLQGPQSILLVN

SEQ ID NO: 792884 - protein, 55 aa, Homo sapiens
EHWLQTLPIVLIRGLPLDSVGRAQGYCSAPLQDNNTALNVNSDHAEKASPAGTSS

SEQ ID NO: 792885 - protein, 107 aa, Homo sapiens
PEGEAPPTGPGGTRDHIQLTLGPRPPSHGGGWDHAHLAIRGLTLRCHRPLPSFAGRKSRQVRKWRAGPEKPRIRPPFKESHVETHLCYSKLLGCSQPWDFAPSALHG

SEQ ID NO: 792886 - protein, 105 aa, Homo sapiens
HGFACWEYFHFIDEEIEVHIKLFAQGHFLRKWWFWTSPLSSRPHCFPWGNQLFPYHAFLAPQKSTSLGFLCDWLRQQLVRHLGCAGALGDQMVDVACPRCIQSLP

SEQ ID NO: 792887 - protein, 118 aa, Homo sapiens
WGMQEETRVAKQSLAWQGLKETLAMLSSSFSHLSVSVPSLLHQVFPYCFPLYTLKAKMHTMELPPAGIFLLLWSLPYHAPDSICHPHPYPPVLSTFSKKTSTFGHAQREGCCPHMPVS

SEQ ID NO: 792888 - protein, 106 aa, Homo sapiens
DLRGFLLQQSGQGKEKTVLLLESLPTRGFPPVPSRCVDRAGKPSPGPGFVFPKPRDPSRASDPSSQLLFSLPRVLPNAIRSHAGYRTTGHFPVSSKSSPAKFQQFI

SEQ ID NO: 792889 - protein, 101 aa, Homo sapiens
  misc_feature (13)..(13): Xaa can be any naturally occurring amino acid
KESFLHIPGNTSXHFHMRFLCLDCSFLRYLHVWLLLHVIAQMSLFSEAFPITVSKIAAYPFHTHRLTHEHACRHAHTHTPYTSLSPFPALLFSLHLPYSTM

SEQ ID NO: 792890 - protein, 110 aa, Homo sapiens
LGGTRGRRCAGHREGPRREAASLLCARRRRRAPPAQSPLPTLPPRPPPPTNRTGSSVIRVTSAEMPSLTTQVEGTANLFSWTLFFISFTVFLPSKIILSASTYIAFPLET

SEQ ID NO: 792891 - protein, 82 aa, Homo sapiens [sequence omitted]

SEQ ID NO: 792892 - protein, 69 aa, Homo sapiens
AENWVLSPTAQKEVKPANSHRMSLEVYLVPVEPCVDCSPTGVIFNAAIDKEYTRMELPHGQEEETHKER

SEQ ID NO: 792893 - protein, 150 aa, Homo sapiens
EHLLCARHWSLGGPPAVSRLWNSQAGNIFQKVFQEEVTEMGVTPSRTRRNQVGRHGSRAKDNPGHHGHELPLHSTALHSRLGDRTRPRLKQTNKKNTTLRNYFTPFKMAGMATIKKTDNNKYWQGHGETGVLSRNDGGNIKWYSCFRKQV

SEQ ID NO: 792894 - protein, 125 aa, Homo sapiens
  misc_feature (39)..(39): Xaa can be any naturally occurring amino acid
  misc_feature (45)..(45): Xaa can be any naturally occurring amino acid
RVLGAGRVLPDSLSLSPPPPTGCQTKPERGWGAQPPPPXQGARVXSVLVPRRHPCDIRTSSSVTCVCVCAQVSERFRTPTPSTLKSEQNKKLGSSSPPNLSPASLPSVLPASSRPRQILKSRRQN

SEQ ID NO: 792895 - protein, 116 aa, Homo sapiens
RVLGAGRVLPDSLSLSPPPPTGCQTKPERGWGAQPPSVLVPRRHPCDIRTSSSVTCVCVCAQVSERFRTPTPSTLKSEQNKKLGSSSPPNLSPASLPSVLPASSRPRQILKSRRQN

SEQ ID NO: 792896 - protein, 148 aa, Homo sapiens
MYPIRSLALYSYKLNFHYCRLTSEWTHLTIPCIVPGTLRAFTTFCIIFTSVFDVLKNTVHNYFTASPSTWRPAGFPSPSLPNHVGTETRGTAGLLPIVTKQWTPLLLRFPNRGWDTQPREYEENNLRVFEPLASFCGPITFSLLILHK

SEQ ID NO: 792897 - protein, 78 aa, Homo sapiens
ENKSTLQLEQQVKELKKSGGAEEPRGSESAAAARPVAGAPVPQGAWMCGQAGWTPQEHPGLSGEAVGTGEAAGGAGEA

SEQ ID NO: 792898 - protein, 174 aa, Homo sapiens
AVWEPLIERVEGKRQWNLRLDVKKNPVQDKSLLPGDDFIPEPQMAIHISSGNTMNITISKSCLNVFNNLAKGFSEGTASTFDYSLKDRAPFTVKNAVGVPIKVKPNCNLRVMGFPEKSDIFDVDAGQNLELEYASMVPSSQGNLSILSRQESSFFTLTIVPHGYTEVANIPVAR

SEQ ID NO: 792899 - protein, 66 aa, Homo sapiens
GHAGATFCPAPLPGLCLCLECPPLSAIKVLPTLQVLVHVVASTPRKCSQAFSGLLTKDLASPDLMG

SEQ ID NO: 792900 - protein, 106 aa, Homo sapiens
MKRRFRFLPFPLLSPSLSPGQKDGSLIIRSDYYCGFEFEVGFSSTPDSWKIRSPVSSRPLLASLSAPRLISQAGARSASRRTPGRASGSRRRSPRARPPCSGLRGR

SEQ ID NO: 792901 - protein, 125 aa, Homo sapiens
KDTQILVSRTLANNLCDSVWWIKHLEHLLIWFSSLSHATLPVGQWDPLCSKPRQVFRHLEHKLTWVSSPSCSILPVQRSSYRGTLSAPCPDRSPGIQNTCLPGSAVRVTLPLLCRDLGSGGAHYT

SEQ ID NO: 792902 - protein, 104 aa, Homo sapiens
WGRPPGKALAGLEVGRQGQTGLRVATVIEGGLSKQALGEGWVRIAILQRRVGGNSKQGFRGLQRLLGANFYCFLLKSGWAFREVPGRNSPPICLGGWSGRAKTC

SEQ ID NO: 792903 - protein, 113 aa, Homo sapiens [sequence omitted]

SEQ ID NO: 792904 - protein, 454 aa, Homo sapiens
MELATRYQIPKEVADIFNAPSDDEEFVGFRDDVPMETLSSEESCDSFDSLESGKQQDVRFHSKYFTEELRRIFIEDTDSETEDFAGFTQSDLNGKTNPEVMVVESDLSDDGKASLVSEEEEDEEEDKATPRRSRSRRSSIGLRVAFQFPTKKLANKPDKNSSSEQLFSSARLQNEKKTILERKKDCRQVIQREDSTSESEDDSRDESQESSDALLKRTMNIKENKAMLAQLLAELNSMPDFFPVRTPTSASRKKTVRRAFSEGQITRRMNPTRSARPPEKFALENFTVSAAKFAEEFYSFRRRKTIGGKCREYRRRHRISSFRPVEDITEEDLENVAITVRDKIYDKVLGNTCHQCRQKTIDTKTVCRNQGCCGVRGQFCGPCLRNRYGEDVRSALLDPDWVCPPCRGICNCSYCRKRDGRCATGILIHLAKFYGYDNVKEYLESLQKELVEDN

SEQ ID NO: 792905 - protein, 203 aa, Homo sapiens
  misc_feature (200)..(200): Xaa can be any naturally occurring amino acid
MELATRYQIPKEVADIFNAPSDDEEFVGFRDDVPMETLSSEESCDSFDSLESGKQQDVRFHSKYFTEELRRIFIEDTDSETEDFAGFTQSDLNGKTNPEVMVVESDLSDDGKASLVSEEEEDEEEDKATPRRSRSRRSSIGLRVAFQFPTKKLANKPDKNSSSEQLFSSARLQNEKKTILERKKDCRQVVPRGKSPPEFXGLT

SEQ ID NO: 792906 - protein, 408 aa, Homo sapiens
MELATRYQIPKEVADIFNAPSDDEEFVGFRDDVPMETLSSEESCDSFDSLESGKQVVESDLSDDGKASLVSEEEEDEEEDKATPRRSRSRRSSIGLRVAFQFPTKKLANKPDKNSSSEQLFSSARLQNEKKTILERKKDCRQVIQREDSTSESEDDSRDESQESSDALLKRTMNIKENKAMLAQLLAELNSMPDFFPVRTPTSASRKKTVRRAFSEGQITRRMNPTRSARPPEKFALENFTVSAAKFAEEFYSFRRRKTIGGKCREYRRRHRISSFRPVEDITEEDLENVAITVRDKIYDKVLGNTCHQCRQKTIDTKTVCRNQGCCGVRGQFCGPCLRNRYGEDVRSALLDPDWVCPPCRGICNCSYCRKRDGRCATGILIHLAKFYGYDNVKEYLESLQKELVEDN

SEQ ID NO: 792907 - protein, 34 aa, Homo sapiens
MQGRDTQLRLGSRLQPQHDPRSKDACPPRSSMYR

SEQ ID NO: 792908 - protein, 78 aa, Homo sapiens
IFQLYKYYVFFLLRFHISKNPKNTQAKETPSKAHYVLALVSQCLHPTNQRAKPGRMTQQSCSTTDCWKNQSLQIGNAE

SEQ ID NO: 792909 - protein, 72 aa, Homo sapiens
TGPPSVDPASLERPSLHRPYIRRTRGTSHPYYLNPHPHLTGPDPPALTQNPPFPQHILQRSAQVGLAEDSKV

SEQ ID NO: 792910 - protein, 386 aa, Homo sapiens
MSALEKSMHLGRLPSRPPLPGSGGSQSGAKMRMGPGRKRDFSPVPWSQYFESMEDVEVENETGKDTFRVYKSGSEGPVLLLLHGGGHSALSWAVFTAAIISRVQCRIVALDLRSHGETKVKNPEDLSAETMAKDVGNVVEAMYGDLPPPIMLIGHSMGGAIAVHTASSNLVPSLLGLCMIDVVEGTAMDALNSMQNFLRGRPKTFKSLENAIEWSVKSGQIRNLESARVSMVGQVKQCEGITSPEGSKSIVEGIIEEEEEDEEGSESISKRKKEDDMETKKDHPYTWRIELAKTEKYWDGWFRGLSNLFLSCPIPKLLLLAGVDRLDKDLTIGQMQGKFQMQVLPQCGHAVHEDAPDKVAEAVATFLIRHRFAEPIGGFQCVFPGC

SEQ ID NO: 792911 - protein, 101 aa, Homo sapiens
VSEELTGKRRDPILVLVLGTYTLWVLRKGWSYNDSKLFSHWSYNNSKLFSQRQKHDFKMTSLVRFSGVWKDLIILPLLKPETYNLKPEIYHKELGKLCQIP

SEQ ID NO: 792912 - protein, 122 aa, Homo sapiens
SGSWAAGESAAPGAETGKKPTVRAKGGLRRLLRPPSPPLRQVSLLPESPGATPPVLSLAPPFLKCYVGAFGDGLRASVSLAQWEVEPKPRSPGLWPCASLAKERPVGRKQGPRRNRENTPGL

SEQ ID NO: 792913 - protein, 34 aa, Homo sapiens
VTSCCFIHCPHSSTTTKQEQDDISSSSETRKIAM

SEQ ID NO: 792914 - protein, 192 aa, Homo sapiens
MACGATLKRPMEFEAALLSPGSPKRRRCAPLPGPTPGLRPPDAEPPPPFQTQTPPQSLQQPAPPGSERRLPTPEQIFQNIKQEYSRYQRWRHLEVVLNQSEACASESQPHSSALTAPSSPGSSWMKKDQPTFTLRQVGIICERLLKDYEDKIREEYEQILNTKLAEQYESFVKFTHDQIMRRYGTRPTSYVS

SEQ ID NO: 792915 - protein, 192 aa, Homo sapiens; identical to SEQ ID NO: 792914

SEQ ID NO: 792916 - protein, 192 aa, Homo sapiens; identical to SEQ ID NO: 792914

SEQ ID NO: 792917 - protein, 192 aa, Homo sapiens; identical to SEQ ID NO: 792914

SEQ ID NO: 792918 - protein, 192 aa, Homo sapiens; identical to SEQ ID NO: 792914

SEQ ID NO: 792919 - protein, 192 aa, Homo sapiens; identical to SEQ ID NO: 792914

SEQ ID NO: 792920 - protein, 147 aa, Homo sapiens
MACGATLKRPMEFEAALLSPGSPKRRRCAPLPGPTPGLRPPDAEPPPPFQTQTPPQSLQQPAPPGSERRLPTPEQIFQNIKQEYSRYQRWRHLEVVLNQSEACASESQPHSSALTAPSSPEQYESFVKFTHDQIMRRYGTRPTSYVS

SEQ ID NO: 792921 - protein, 114 aa, Homo sapiens
MAVGKNKRLTKGGKKGAKKKVVDPFSKKDGYDVKAPAMFNIRNIGKTLVTRTQGTKIASDGLKGRVFEVSLADLQNDEVAFRKFKLITEDVQGKNCLTNFHAFLQVHFIQLERP

SEQ ID NO: 792922 - protein, 192 aa, Homo sapiens; identical to SEQ ID NO: 792914

SEQ ID NO: 792923 - protein, 51 aa, Homo sapiens
KAGGLVHEQEKQDEWGRRVEGEGTSRQAKLLNSNSSKSQGKLWHKHTKHIL

SEQ ID NO: 792924 - protein, 30 aa, Homo sapiens
MSTSSYPKLSRSVCFWRNHSAALKLVRRWD

SEQ ID NO: 792925 - protein, 67 aa, Homo sapiens
KHISQFQESGGQDLGLQQQHKPTNLSNLGSAGDGTDTSVPWSQHSPTFIHLRVIRDLDNLQGPGVLP

SEQ ID NO: 792926 - protein, 113 aa, Homo sapiens
WGVSFVDKVQSCGWLTLVIQSLASSETKPILCGLGPQEKKKVPLSDKIFQELRGYLLGTSQRPTVSLEYPEFGHPGLLSRKRARDTPVPSSNFTCLINPIFLSWGVVRKGRER

SEQ ID NO: 792927 - protein, 546 aa, Homo sapiens
AEEEHGNMSSAEIIGSTNLIILLEDEVFADFFNTFLSLPVFGQTPFYTVENSQWSLWPEIPCNLIAKYKGLLTWLEKCRLPFFCKTNLCFHYILCQEFISFIKSPEGAKMMRWKKADQWLLQKCIGGVRGMWRFYSYLTGSAGEELVDFWILAENILSIDEMDLEVRDYYLSLLLMLRATHLQEGSRVVTLCNMNIKSLLNLSIWHPNQSTTRREILSHMQKVALFKLQSYWLPNFYTHTKMTMAKEEACHGLMQEYETRLYSVCYTHIGGLPLNMSIKKCHHFQKRYSSRKAKRKMWQLVDPDSWSLEMDLKPDAIGMPLQETCPQEKVVIQMPSLKMASSKETRISSLEKDMHYAKISSMENKAKSHLHMEAPFETKVSTHLRTVIPIVNHSSKMTIQKAIKQSFSLGYIHLALCADACAGNPFRDHLKKLNLKVEIQLLDLWQDLQHFLSVLLNNKKNGNAIFRHLLGDRICELYLNEQIGPCLPLKSQTIQGLKELLPSGDVIPWIPKAQKEICKMLSPWYDEFLDEEDYWFLLFTVGRTLG

SEQ ID NO: 792928 - protein, 161 aa, Homo sapiens
AEEEHGNMSSAEIIGSTNLIILLEDEVFADFFNTFLSLPVFGQTPFYTVENSQWSLWPEIPCNLIAKYKGLLTWLEKCRLPFFCKTNLCFHYILCQEFISFIKSPEGEARVSLLKSNWWWCWRDSQEDDEIGSTRNLFPHLDNNCTGRICMICSVPGMMSF

SEQ ID NO: 792929 - protein, 102 aa, Homo sapiens
MMRWKKADQWLLQKCIGGVRGMWRFYSYLTGSAGEELVDFWILAENILSIDEMDLEVRDYYLSLLLMLRATHLQEGSRVVTLCNMNISKNYKASFWGDATKK

SEQ ID NO: 792930 - protein, 176 aa, Homo sapiens
AEEEHGNMSSAEIIGSTNLIILLEDEVFADFFNTFLSLPVFGQTPFYTVENSQWSLWPEIPCNLIAKYKGLLTWLEKCRLPFFCKTNLCFHYILCQEFISFIKSPEGGEELVDFWILAENILSIDEMDLEVRDYYLSLLLMLRATHLQEGSRVVTLCNMNISKNYKASFWGDATKK

SEQ ID NO: 792931 - protein, 76 aa, Homo sapiens
ECGLCPGEYLGTAMVWGQEAFGVSLPRHSLEDPGRHRRVRPCPCQASGIPQHPSEQNLFGKRLLEGLHDYLYRFPK

SEQ ID NO: 792932 - protein, 134 aa, Homo sapiens
SPHRPRVSQKHTLMILTVPQPRPHSCSPGQQELGSITADYSPPTAQTHSRRLTKGAPKSWERSKAETRGQSARLPSQVRTRRLRASPGSRRHGPRASSIAPHQPQEQSGPSWPLRVLKALPSNRPGCLPLPPTL

SEQ ID NO: 792933 - protein, 425 aa, Homo sapiens
AAGPAPPPTRSLSPPLRPAVPPSRRRLFLGEALFQRAGSMAAVETRVCETDGCSSEAKLQCPTCIKLGIQGSYFCSQECFKGSWATHKLLHKKAKDEKAKREVSSWTVEGDINTDPWAGYRYTGKLRPHYPLMPTRPVPSYIQRPDYADHPLGMSESEQALKGTSQIKLLSSEDIEGMRLVCRLAREVLDVAAGMIKPGVTTEEIDHAVHLACIARNCYPSPLNYYNFPKSCCTSVNEVICHGIPDRRPLQEGDIVNVDITLYRNGYHGDLNETFFVGEVDDGARKLVQTTYECLMQAIDAVKPGVRYRELGNIIQKHAQANGFSVVRSYCGHGIHKLFHTAPNVPHYAKNKAVGVMKSGHVFTIEPMICEGGWQDETWPDGWTAVTRDGKRSAQFEHTLLVTDTGCEILTRRLDSARPHFMSQF

SEQ ID NO: 792934 - protein, 293 aa, Homo sapiens
MPTRPVPSYIQRPDYADHPLGMSESEQALKGTSQIKLLSSEDIEGMRLVCRLAREVLDVAAGMIKPGVTTEEIDHAVHLACIARNCYPSPLNYYNFPKSCCTSVNEVICHGIPDRRPLQEGDIVNVDITLYRNGYHGDLNETFFVGEVDDGARKLVQTTYECLMQAIDAVKPGVRYRELGNIIQKHAQANGFSVVRSYCGHGIHKLFHTAPNVPHYAKNKAVGVMKSGHVFTIEPMICEGGWQDETWPDGWTAVTRDGKRSAQFEHTLLVTDTGCEILTRRLDSARPHFMSQF

SEQ ID NO: 792935 - protein, 363 aa, Homo sapiens
SVRWHPWTLVKISSQECFKGSWATHKLLHKKAKDEKAKREVSSWTVEGDINTDPWAGYRYTGKLRPHYPLMPTRPVPSYIQRPDYADHPLGMSESEQALKGTSQIKLLSSEDIEGMRLVCRLAREVLDVAAGMIKPGVTTEEIDHAVHLACIARNCYPSPLNYYNFPKSCCTSVNEVICHGIPDRRPLQEGDIVNVDITLYRNGYHGDLNETFFVGEVDDGARKLVQTTYECLMQAIDAVKPGVRYRELGNIIQKHAQANGFSVVRSYCGHGIHKLFHTAPNVPHYAKNKAVGVMKSGHVFTIEPMICEGGWQDETWPDGWTAVTRDGKRSAQFEHTLLVTDTGCEILTRRLDSARPHFMSQF

SEQ ID NO: 792936 - protein, 293 aa, Homo sapiens; identical to SEQ ID NO: 792934

SEQ ID NO: 792937 - protein, 425 aa, Homo sapiens; identical to SEQ ID NO: 792933

SEQ ID NO: 792938 - protein, 425 aa, Homo sapiens; identical to SEQ ID NO: 792933

SEQ ID NO: 792939 - protein, 272 aa, Homo sapiens
MSESEQALKGTSQIKLLSSEDIEGMRLVCRLAREVLDVAAGMIKPGVTTEEIDHAVHLACIARNCYPSPLNYYNFPKSCCTSVNEVICHGIPDRRPLQEGDIVNVDITLYRNGYHGDLNETFFVGEVDDGARKLVQTTYECLMQAIDAVKPGVRYRELGNIIQKHAQANGFSVVRSYCGHGIHKLFHTAPNVPHYAKNKAVGVMKSGHVFTIEPMICEGGWQDETWPDGWTAVTRDGKRSAQFEHTLLVTDTGCEILTRRLDSARPHFMSQF

SEQ ID NO: 792940 - protein, 406 aa, Homo sapiens
AAGPAPPPTRSLSPPLRPAVPPSRRRLFLGEALFQRAGSMAAVETRVCETDGCSSEAKLQCPTCIKLGIQGSYFCSQECFKGSWATHKLLHKKAKDEKAKREVSSWTVEGDINTDPWAGYRYTGKLRPHYPLMPTRPVPSYIQRPDYADHPLGMSESEQALKGTSQIKLLSSEDIEGMRLVCRLAREVLDVAAGMIKPGVTTEEIDHAVHLSCCTSVNEVICHGIPDRRPLQEGDIVNVDITLYRNGYHGDLNETFFVGEVDDGARKLVQTTYECLMQAIDAVKPGVRYRELGNIIQKHAQANGFSVVRSYCGHGIHKLFHTAPNVPHYAKNKAVGVMKSGHVFTIEPMICEGGWQDETWPDGWTAVTRDGKRSAQFEHTLLVTDTGCEILTRRLDSARPHFMSQF

SEQ ID NO: 792941 - protein, 425 aa, Homo sapiens; identical to SEQ ID NO: 792933

SEQ ID NO: 792942 - protein, 231 aa, Homo sapiens
YQVVLEENGEKNQVQLGKLEATIKSLSAELLKANEIIKKLQGDLKTLMGKLKLKNTVTIQQEKLLAEKEEKLQKEQKELQDVGQSLRIKEQEVCKLQEQLEATVKKLEESKQLLKNNEKLITWLNKELNENQLVRKQDVLGPSTTPPAHSSSNTIRSGISPNLNVVDGRLTYPTCGIGYPVSSAFAFQNTFPHSISAKNTSHPGSGTKVQFQFAVYKTNASLGDCSVTEQL

SEQ ID NO: 792943 - protein, 112 aa, Homo sapiens
EKYGKVIPASAVIFGMAVECAEIRRHHRVGIKDIAGIHLPTNVKFQSPAYSSVDTEETIEPYTTEKMSRVPGGYLALTECFEIMTVDFNNLQELKSLATKKPDKIGIPCLIF

SEQ ID NO: 792944 - protein, 1539 aa, Homo sapiens
MDSYFKAAVSDLDKLLDDFEQNPDEQDYLQDVQNAYDSNHCSVSSELASSQRTSLLPKDQECVNSCASSETSYGTNESSLNEKTLKGLTSIQNEKNVTGLDLLSSVDGGTSDEIQPLYMGRCSKPICDLISDMGNLVHATNSEEDIKKLLPDDFKSNADSLIGLDLSSVSDTPCVSSTDHDSDTVREQQNDTSSELQNREIGGIKELGIKVDTTLSDSYNYSGTENLKDKKIFNQLESIVDFNMSSALTRQSSKMFHAKDKLQHKSQPCGLLKDVGLVKEEVDVAVITAAECLKEEGKTSALTCSLPKNEDLCLNDSNSRDENFKLPDFSFQEDKTVIKQSAQEDSKSLDLKDNDVIQDSSSALHVSSKDVPSSLSCLPASGSMCGSLIESKARGDFLPQHEHKDNIQDAVTIHEEIQNSVVLGGEPFKENDLLKQEKCKSILLQSLIEGMEDRKIDPDQTVIRAESLDGGDTSSTVVESQEGLSGTHVPESSDCCEGFINTFSSNDMDGQDLDYFNIDEGAKSGPLISDAELDAFLTEQYLQTTNIKSFEENVNDSKSQMNQIDMKGLDDGNINNIYFNAEAGAIGESHGINIICETVDKQNTIENGLSLGEKSTIPVQQGLPTSKSEITNQLSVSDINSQSVGGARPKQLFSLPSRTRSSKDLNKPDVPDTIESEPSTADTVVPITCAIDSTADPQVSFNSNYIDIESNSEGGSSFVTANEDSVPENTCKEGLVLGQKQPTWVPDSEAPNCMNCQVKFTFTKRRHHCRACGKVFCGVCCNRKCKLQYLEKEARVCVVCYETISKAQAFERMMSPTGSNLKSNHSDECTTVQPPQENQTSSIPSPATLPVSALKQPGVEGLCSKEQKRVWFADGILPNGEVADTTKLSSGSKRCSEDFSPLSPDVPMTVNTVDHSHSTTVEKPNNETGDITRNEIIQSPISQVPSVEKLSMNTGNEGLPTSGSFTLDDDVFAETEEPSSPTGVLVNSNLPIASISDYRLLCDINKYVCNKISLLPNDEDSLPPLLVASGEKGSVPVVEEHPSHEQIILLLEGEGFHPVTFVLNANLLVNVKFIFYSSDKYWYFSTNGLHGLGQAEIIILLLCLPNEDTIPKDIFRLFITIYKDALKGKYIENLDNITFTESFLSSKDHGGFLFITPTFQKLDDLSLPSNPFLCGILIQKLEIPWAKVFPMRLMLRLGAEYKAYPAPLTSIRGRKPLFGEIGHTIMNLLVDLRNYQYTLHNIDQLLIHMEMGKSCIKIPRKKYSDVMKVLNSSNEHVISIGASFSTEADSHLVCIQNDGIYETQANSATGHPRKVTGASFVVFNGALKTSSGFLAKSSIVEDGLMVQITPETMNGLRLALREQKDFKITCGKVDAVDLREYVDICWVDAEEKGNKGVISSVDGISLQGFPSEKIKLEADFETDEKIVKCTEVFYFLKDQDLSILSTSYQFAKEIAMACSAALCPHLKTLKSNGMNKIGLRVSIDTDMVEFQAGSEGQLLPQHYLNDLDSALIPVIHGGTSNSSLPLEIELVFFIIEHLF

SEQ ID NO: 792945 - protein, 1539 aa, Homo sapiens; identical to SEQ ID NO: 792944

SEQ ID NO: 792946 - protein, 1582 aa, Homo sapiens
MDSYFKAAVSDLDKLLDDFEQNPDEQDYLQDVQNAYDSNHCSVSSELASSQRTSLLPKDQECVNSCASSETSYGTNESSLNEKTLKGLTSIQNEKNVTGLDLLSSVDGGTSDEIQPLYMGRCSKPICDLISDMGNLVHATNSEEDIKKLLPDDFKSNADSLIGLDLSSVSDTPCVSSTDHDSDTVREQQNDTSSELQNREIGGIKELGIKVDTTLSDSYNYSGTENLKDKKIFNQLESIVDFNMSSALTRQSSKMFHAKDKLQHKSQPCGLLKDVGLVKEEVDVAVITAAECLKEEGKTSALTCSLPKNEDLCLNDSNSRDENFKLPDFSFQEDKTVIKQSAQEDSKSLDLKDNDVIQDSSSALHVSSKDVPSSLSCLPASGSMCGSLIESKARGDFLPQHEHKDNIQDAVTIHEEIQNSVVLGGEPFKENDLLKQEKCKSILLQSLIEGMEDRKIDPDQTVIRAESLDGGDTSSTVVESQEGLSGTHVPESSDCCEGFINTFSSNDMDGQDLDYFNIDEGAKSGPLISDAELDAFLTEQYLQTTNIKSFEENVNDSKSQMNQIDMKGLDDGNINNIYFNAEAGAIGESHGINIICETVDKQNTIENGLSLGEKSTIPVQQGLPTSKSEITNQLSVSDINSQSVGGARPKQLFSLPSRTRSSKDLNKPDVPDTIESEPSTADTVVPITCAIDSTADPQVSFNSNYIDIESNSEGGSSFVTANEDSVPENTCKEGLVLGQKQPTWVPDSEAPNCMNCQVKFTFTKRRHHCRACGKVFCGVCCNRKCKLQYLEKEARVCVVCYETISKAQAFERMMSPTGSNLKSNHSDECTTVQPPQENQTSSIPSPATLPVSALKQPGVEVPAIGKKLTKASNKRVWELHFPDFQPGIQEPTVEGELGFEEAIGLCSKEQKRVWFADGILPNGEVADTTKLSSGSKRCSEDFSPLSPDVPMTVNTVDHSHSTTVEKPNNETGDITRNEIIQSPISQVPSVEKLSMNTGNEGLPTSGSFTLDDDVFAETEEPSSPTGVLVNSNLPIASISDYRLLCDINKYVCNKISLLPNDEDSLPPLLVASGEKGSVPVVEEHPSHEQIILLLEGEGFHPVTFVLNANLLVNVKFIFYSSDKYWYFSTNGLHGLGQAEIIILLLCLPNEDTIPKDIFRLFITIYKDALKGKYIENLDNITFTESFLSSKDHGGFLFITPTFQKLDDLSLPSNPFLCGILIQKLEIPWAKVFPMRLMLRLGAEYKAYPAPLTSIRGRKPLFGEIGHTIMNLLVDLRNYQYTLHNIDQLLIHMEMGKSCIKIPRKKYSDVMKVLNSSNEHVISIGASFSTEADSHLVCIQNDGIYETQANSATGHPRKVTGASFVVFNGALKTSSGFLAKSSIVEDGLMVQITPETMNGLRLALREQKDFKITCGKVDAVDLREYVDICWVDAEEKGNKGVISSVDGISLQGFPSEKIKLEADFETDEKIVKCTEVFYFLKDQDLSILSTSYQFAKEIAMACSAALCPHLKTLKSNGMNKIGLRVSIDTDMVEFQAGSEGQLLPQHYLNDLDSALIPVIHGGTSNSSLPLEIELVFFIIEHLF

SEQ ID NO: 792947 - protein, 1413 aa, Homo sapiens
MDSYFKAAVSDLDKLLDDFEQNPDEQDYLQDVQNAYDSNHCSVSSELASSQRTSLLPKDQECVNSCASSETSYGTNESSLNEKTLKGLTSIQNEKNVTGLDLLSSVDGGTSDEIQPLYMGRCSKPICDLISDMGNLVHATNSEEDIKKLLPDDFKSNADSLIGLDLSSVSDTPCVSSTDHDSDTVREQQNDTSSELQNREIGGIKELGIKVDTTLSDSYNYSGTENLKDKKIFNQLESIVDFNMSSALTRQSSKMFHAKDKLQHKSQPCGLLKDVGLVKEEVDVAVITAAECLKEEGKTSALTCSLPKNEDLCLNDSNSRDENFKLPDFSFQEDKTVIKQSAQEDSKSLDLKDNDVIQDSSSALHVSSKDVPSSLSCLPASGSMCGSLIESKARGDFLPQHEHKDNIQDAVTIHEEIQNSVVLGGEPFKENDLLKQEKCKSILLQSLIEGMEDRKIDPDQTVIRAESLDGGDTSSTVVESQEGLSGTHVPESSDCCEGFINTFSSNDMDGQDLDYFNIDEGAKSGPLISDAELDAFLTEQYLQTTNIKSFEENVNDSKSQMNQIDMKGLDDGNINNIYFNAEAGAIGESHGINIICETVDKQNTIENGLSLGEKSTIPVQQGLPTSKSEITNQLSVSDINSQSVGGARPKQLFSLPSRTRSSKDLNKPDVPDTIESEPSTADTVVPITCAIDSTADPQVSFNSNYIDIESNSEGGSSFVTANEDSVPENTCKEGLVLGQKQPTWVPDSEAPNCMNCQVKFTFTKRRHHCRACGKVFCGVCCNRKCKLQYLEKEARVCVVCYETISKAQAFERMMSPTGSNLKSNHSDECTTVQPPQENQTSSIPSPATLPVSALKQPGVEGLCSKEQKRVWFADGILPNGEVADTTKLSSGSKRCSEDFSPLSPDVAYVPVVEEHPSHEQIILLLEGEGFHPVTFVLNANLLVNVKFIFYSSDKYWYFSTNGLHGLGQAEIIILLLCLPNEDTIPKDIFRLFITIYKDALKGKYIENLDNITFTESFLSSKDHGGFLFITPTFQKLDDLSLPSNPFLCGILIQKLEIPWAKVFPMRLMLRLGAEYKAYPAPLTSIRGRKPLFGEIGHTIMNLLVDLRNYQYTLHNIDQLLIHMEMGKSCIKIPRKKYSDVMKVLNSSNEHVISIGASFSTEADSHLVCIQNDGIYETQANSATGHPRKVTGASFVVFNGALKTSSGFLAKSSIVEDGLMVQITPETMNGLRLALREQKDFKITCGKVDAVDLREYVDICWVDAEEKGNKGVISSVDGISLQGFPSEKIKLEADFETDEKIVKCTEVFYFLKDQDLSILSTSYQFAKEIAMACSAALCPHLKTLKSNGMNKIGLRVSIDTDMVEFQAGSEGQLLPQHYLNDLDSALIPVIHGGTSNSSLPLEIELVFFIIEHLF

SEQ ID NO: 792948 - protein, 1539 aa, Homo sapiens; identical to SEQ ID NO: 792944

SEQ ID NO: 792949 - protein, 1205 aa, Homo sapiens
MDSYFKAAVSDLDKLLDDFEQNPDEQDYLQDVQNAYDSNHCSVSSELASSQRTSLLPKDQECVNSCASSETSYGTNESSLNEKTLKGLTSIQNEKNVTGLDLLSSVDGGTSDEIQPLYMGRCSKPICDLISDMGNLVHATNSEEDIKKLLPDDFKSNADSLIGLDLSSVSDTPCVSSTDHDSDTVREQQNDTSSELQNREIGGIKELGIKVDTTLSDSYNYSGTENLKDKKIFNQLESIVDFNMSSALTRQSSKMFHAKDKLQHKSQPCGLLKDVGLVKEEVDVAVITAAECLKEEGKTSALTCSLPKNEDLCLNDSNSRDENFKLPDFSFQEDKTVIKQSAQEDSKSLDLKDNDVIQDSSSALHVSSKDVPSSLSCLPASGSMCGSLIESKARGDFLPQHEHKDNIQDAVTIHEEIQNSVVLGGEPFKENDLLKQEKCKSILLQSLIEGMEDRKIDPDQTVIRAESLDGGDTSSTVVESQEGLSGTHVPESSDCCEGFINTFSSNDMDGQDLDYFNIDEGAKSGPLISDAELDAFLTEQYLQTTNIKSFEENVNDSKSQMNQIDMKGLDDGNINNIYFNAEAGAIGESHGINIICETVDKQNTIENGLSLGEKSTIPVQQGLPTSKSEITNQLSVSDINSQSVGGARPKQLFSLPSRTRSSKDLNKPDVPDTIESEPSTADTVVPITCAIDSTADPQVSFNSNYIDIESNSEGGSSFVTANEDSVPENTCKEGLVLGQKQPTWVPDSEAPNCMNCQVKFTFTKRRHHCRACGKVFCGVCCNRKCKLQYLEKEARVCVVCYETISKAQAFERMMSPTGSNLKSNHSDECTTVQPPQENQTSSIPSPATLPVSALKQPGVEGLCSKEQKRVWFADGILPNGEVADTTKLSSGSKRCSEDFSPLSPDVPMTVNTVDHSHSTTVEKPNNETGDITRNEIIQSPISQVPSVEKLSMNTGNEGLPTSGSFTLDDDVFAETEEPSSPTGVLVNSNLPIASISDYRLLCDINKYVCNKISLLPNDEDSLPPLLVASGEKGSVPVVEEHPSHEQIILLLEGEGFHPVTFVLNANLLVNVKFIFYSSDKYWYFSTNGLHGLGQAEIIILLLCLPNEDTIPKDIFRLFITIYKDALKGKYIENLDNITFTESFLSSKDHGGFLFITPTFQKLDDLSLPSNPFLCGILIQKLEIPWAKVFPMRLMLRLGAEYKGKF

SEQ ID NO: 792950 - protein, 1233 aa, Homo sapiens [sequence omitted]

SEQ ID NO: 792951 - protein, 1083 aa, Homo sapiens
MDSYFKAAVSDLDKLLDDFEQNPDEQDYLQDVQNAYDSNHCSVSSELASSQRTSLLPKDQECVNSCASSETSYGTNESSLNEKTLKGLTSIQNEKNVTGLDLLSSVDGGTSDEIQPLYMGRCSKPICDLISDMGNLVHATNSEEDIKKLLPDDFKSNADSLIGLDLSSVSDTPCVSSTDHDSDTVREQQNDTSSELQNREIGGIKELGIKVDTTLSDSYNYSGTENLKDKKIFNQLESIVDFNMSSALTRQSSKMFHAKDKLQHKSQPCGLLKDVGLVKEEVDVAVITAAECLKEEGKTSALTCSLPKNEDLCLNDSNSRDENFKLPDFSFQEDKTVIKQSAQEDSKSLDLKDNDVIQDSSSALHVSSKDVPSSLSCLPASGSMCGSLIESKARGDFLPQHEHKDNIQDAVTIHEEIQNSVVLGGEPFKENDLLKQEKCKSILLQSLIEGMEDRKIDPDQTVIRAESLDGGDTSSTVVESQEGLSGTHVPESSDCCEGFINTFSSNDMDGQDLDYFNIDEGAKSGPLISDAELDAFLTEQYLQTTNIKSFEENVNDSKSQMNQIDMKGLDDGNINNIYFNAEAGAIGESHGINIICETVDKQNTIENGLSLGEKSTIPVQQGLPTSKSEITNQLSVSDINSQSVGGARPKQLFSLPSRTRSSKDLNKPDVPDTIESEPSTADTVVPITCAIDSTADPQVSFNSNYIDIESNSEGGSSFVTANEDSVPENTCKEGLVLGQKQPTWVPDSEAPNCMNCQVKFTFTKRRHHCRACGKVFCGVCCNRKCKLQYLEKEARVCVVCYETISKAQAFERMMSPTGSNLKSNHSDECTTVQPPQENQTSSIPSPATLPVSALKQPGVEVPAIGKKLTKASNKRVWELHFPDFQPGIQEPTVEGELGFEEAIGLCSKEQKRVWFADGILPNGEVADTTKLSSGSKRCSEDFSPLSPDVPMTVNTVDHSHSTTVEKPNNETGDITRNEIIQSPISQVPSVEKLSMNTGNEGLPTSGSFTLDDDVFAETEEPSSPTGVLVNSNLPIASISDYRLLCDINKYVCNKISLLPNDEDSLPPLLVASGEKGSGREAVI

SEQ ID NO: 792952 - protein, 101 aa, Homo sapiens
GRLAKQVYPTRPGRRAEAAAGAARPQNPDNPFKALRKSKKFLVNCSWYQGSDQRTRPFQQSGACSDRRAPPSVSVRSLWVRLVFGGFPGKASLWLPPFSPK

SEQ ID NO: 792953 - protein, 53 aa, Homo sapiens
MQKFITLKSLYISYYDRDPRYLTWRILLIQFKQYVANRYYRIKYNDRNISIST

SEQ ID NO: 792954 - protein, 116 aa, Homo sapiens
MAKSKNHTTHNQSRKWHRNGIKKPRSQRYESLKGVDPKFLRNMRFAKKHNKKGLKKMQANNAKAMSARAEAIKALVKPKEVKPKIPKGVSRKLDRLAYIAHPKLGKRARARIAKGL

SEQ ID NO: 792955 - protein, 144 aa, Homo sapiens
ATTCVQSLGQGKSDVVGSLALQSAGESRLWQGHHATKSEHSLSPADLGSHTSPKESSEALDAAAVLSVAECVERMAPTLPKSDLNEVKKLLKTNKTLAKMLGHIFEMNDNDPRKEEEIWKYSEYMADLTQRGRMENISCFMSSL

SEQ ID NO: 792956 - protein, 67 aa, Homo sapiens
KECLVQQEAQGKCLGNGTTVIITHLAACYKVNEIMDTKCKLDEHKGLLYRPVCPEENWCPKVCPAEN

SEQ ID NO: 792957 - protein, 120 aa, Homo sapiens
QFCRLYRKHSGICFWRGLRELLLMTEGKAGAGASHGESRSKRERVCWGRCTTMETAPSHEGFDPVIQTLPTRLHLQHWGSRFNMRFGRDIQTISSVSLIQDHMIRSSLLSSNRLNSTFSV

SEQ ID NO: 792958 - protein, 41 aa, Homo sapiens
MSAYTSYLIYFVFHGVSDYFSKHEYITKLSYSSQYGQTSPH

SEQ ID NO: 792959 - protein, 85 aa, Homo sapiens
RYYVREAGRCGWQIVRGIIQLDGFRDMEITRLLETFFEVAVLVKFFTFTKGMALQRAQAPAQEPALHQERLQVLSDVLGSVLFPW

SEQ ID NO: 792960 - protein, 69 aa, Homo sapiens
MSTCCWCTPGGASTIDFLKRYASNTPSGEFQTADEDLCYCLECVAEYHKARDELPFLHEVKYIRWAIFF

SEQ ID NO: 792961 - protein, 88 aa, Homo sapiens
MRAGHRQVQGGQEGSLAVRQLLVQPRLSLLLGHLLQTQSSAQECLVVKLQPCGSLFSEVNSVFTDKGKVPGESCSLNVHPHESELSLQ

SEQ ID NO: 792962 - protein, 67 aa, Homo sapiens
NGPHTHPAFCLSDPMAETEGPSTAAQSGALAVTSPVFTVERIYCPCRADALQGAEPPALSPLGVNKH

SEQ ID NO: 792963 - protein, 102 aa, Homo sapiens
ENWQSNYVFIELVQFIFHMMSITGSVSLIRMLEIQNAPICETWGHKFHIWVYFEFICMHEFLQKIGNPTMFLLNCAIYFPHDVYYRFSIPDQNVGNPKCPHM

SEQ ID NO: 792964 - protein, 102 aa, Homo sapiens
PASALPKCWDYRRDHRARPYFDFYSVRFSRMLTLLPLEPGTPKNKIHGGGGKELMYSVCGQPSSLVHLLFSVQTEERVSWNWSLSLPLFSSERVQCKSFFTH

SEQ ID NO: 792965 - protein, 87 aa, Homo sapiens
AAAASAASSSSASSSSSSSSSASSGPALLRVGPGFDAALQVSAAIGTNLRRFRAVFGESGGGGGSGEVPQLKRDEETLETVLRRLKR

SEQ ID NO: 792966 - protein, 103 aa, Homo sapiens
MTKTKACLGYPVGAVEAALVIWSGSGAIPCHRGLCSLTTSSARPGHFIHGMDVALVLLILIVFGASFFTPSAARILSSAVLCFDFPFCPFSQGRRLHTAASGG

SEQ ID NO: 792967 - protein, 365 aa, Homo sapiens
MDRAALLGLARLCALWAALLVLFPYGAQGNWMWLGIASFGVPEKLGCANLPLNSRQKELCKRKPYLLPSIREGARLGIQECGSQFRHERWNCMITAAATTAPMGASPLFGYELSSGTKETAFIYAVMAAGLVHSVTRSCSAGNMTECSCDTTLQNGGSASEGWHWGGCSDDVQYGMWFSRKFLDFPIGNTTGKENKVLLAMNLHNNEAGRQAVAKLMSVDCRCHGVSGSCAVKTCWKTMSSFEKIGHLLKDKYENSIQISDKTKRKMRRREKDQRKIPIHKDDLLYVNKSPNYCVEDKKLGIPGTQGRECNRTSEGADGCNLLCCGRGYNTHVVRHVERCECKFIWCCYVRCRRCESMTDVHTCK

SEQ ID NO: 792968 - protein, 372 aa, Homo sapiens
PAKTTEGKARKMERHPPMQLTTCLRETLFTGASQKTSLWWLGIASFGVPEKLGCANLPLNSRQKELCKRKPYLLPSIREGARLGIQECGSQFRHERWNCMITAAATTAPMGASPLFGYELSSGTKETAFIYAVMAAGLVHSVTRSCSAGNMTECSCDTTLQNGGSASEGWHWGGCSDDVQYGMWFSRKFLDFPIGNTTGKENKVLLAMNLHNNEAGRQAVAKLMSVDCRCHGVSGSCAVKTCWKTMSSFEKIGHLLKDKYENSIQISDKTKRKMRRREKDQRKIPIHKDDLLYVNKSPNYCVEDKKLGIPGTQGRECNRTSEGADGCNLLCCGRGYNTHVVRHVERCECKFIWCCYVRCRRCESMTDVHTCK

SEQ ID NO: 792969 - protein, 283 aa, Homo sapiens
MAPSLTWQLLSLLVKEAQPLVWVKDPLQLTSNPLGPPEPWSSRSSHLPWESPHAPAPPAAPGDFDYLGPSASSQMSALPQEPTENLAPFLKELDSAGELPLGPEPFLAAHQDLNDKRTPEERLPEVVPLLNRDQNQALVQLPRLKWVQTTDLDRAAGHQADEILVPLDSKVSRPTKFVVSPKNLKKDLAERWSLPEIVGIPHQLSKPQRQKQTLPDDYLSMDTLYPGSLPPELRVNADEPPGPPEQVGLSQFHLEPKSQNPETLEDIQSSSLQEEAQRSFYSS

SEQ ID NO: 792970 - protein, 47 aa, Homo sapiens
MASCRRRGVTRVFLSRAALPANSRILAVRYSSTASRYTGAPARTRLA

SEQ ID NO: 792971 - protein, 242 aa, Homo sapiens
MGNILTCRVHPSVSLEFDQQQGSVCPSESEIYEAGAEDRMAGAPMAAAVQPAEVTVEVGEDLHMHQVRDREMPEALEFNLSANPEASTIFQRNSQTDALEFNPSANPEASTIFQRNSQTDVVEIRRSNCTNHVSTERFSQQYSSCSTIFLDDSTAIQHYLTMTIISVTLEIPHHITQRDADRSLSIPDEQLHSFAVSTVHIMKKRNGGGSLNNYSSSIPPTPSTSQEDPQFSVPPTANTPTP

SEQ ID NO: 792972 - protein, 147 aa, Homo sapiens
MGNILTCRVHPSVSLEFDQQQGSVCPSESEIYEAGAEDRMAGAPMAAAVQPAEVTVEVGEDLHMHQVRDREMPEALEFNLSANPEASTIFQRNSQTDALEFNPSANPEASTIFQRNSQTDVVEIRRSNCTNHCDLGDTSSYHTKRCR

SEQ ID NO: 792973 - protein, 66 aa, Homo sapiens
PMAAAVQPAEVTVEVGEDLHMHQVRDREMPEGKEVIGAIYPRFASGLLLSPRFPLRHPTLRAPFCL

SEQ ID NO: 792974 - protein, 122 aa, Homo sapiens
MPPDLLHLVHSICLESIPCPTREQLITIDSLQIAWTLEHPCTSCLAYSPPVYPLLCEPLALPELQDNSWFYLLGSHWVVGFQRAGLSCSFVAPIPVPPQCLVRRRYKQLLKEDICKFYLQKN

SEQ ID NO: 792975 - protein, 73 aa, Homo sapiens
MIMPLHSTLEDEVRSHLKNKTKPNTFGLSTGRNGNATGGLGNQEDAKYSVKCFMHIISFNPQDSIIETIIFIL

SEQ ID NO: 792976 - protein, 74 aa, Homo sapiens
SASMLCNSFLPSQGMTAPTGVGSLHPWILPAEAVEKAVDKEHQKDFRDFNALRYLTITLVPKLHYLKKDLYMET

SEQ ID NO: 792977 - protein, 78 aa, Homo sapiens
GSRGPPRVLFPAARNLSVHRAPPRCARNFRCSPTTSLLRAFEHAACSACPDLRLGDSCCTSKPTGGNTSSRKPSLMPL

SEQ ID NO: 792978 - protein, 141 aa, Homo sapiens
RRRKLIRSDGKQVTGCLSGMGQRREESGLRRGHNKETWWGGYEYPFFFFAFLETGSCSVTQLIAHCILKLQGPRDLPAKQLGLQAQPTMPGCFFSFGGDEVSLCCLGLVLNSWSQGNPPTYDSQSTGITGVSHLAQPCSLS

SEQ ID NO: 792979 - protein, 317 aa, Homo sapiens
ARGKMASFRKLTLSEKVPPNHPSRKKVNFLDMSLDDIIIYKELEGTNAEEEKNKRQNHSKKESPSRQQSKAHRHRHRRGYSRCRSNSEEGNHDKKPSQKPSGFKSGQHPLNGQPLIEQEKCSDNYEAQAEKNQGQSEGNQHQSEGNPDKSEESQGQPEENHHSERSRNHLERSLSQSDRSQGQLKRHHPQYERSHGQYKRSHGQSERSHGHSERSHGHSERSHGHSERSHGHSKRSRSQGDLVDTQSDLIATQRDLIATQKDLIATQRDLIATQRDLIVTQRDLVATERDLINQSGRSHGQSERHQRYSTGKNTITT

SEQ ID NO: 792980 - protein, 160 aa, Homo sapiens
ATAFSQQDLLDGAVLYSHNSSLSPRDTMAFSVEMGPVHTDATLQVTIALEGPLAPLKLVRHKKIYVFQGEAAEIRRDQLEAAQEAVPPADIIFSVKSPPSASYLVMVSRGALADEPPSLDPVQSFSQEAVDTGRVLYLHSRPEAWSDAFSLDVASGLDAP

SEQ ID NO: 792981 - protein, 82 aa, Homo sapiens
RGLCGEGGDPGLETGGERLLDAEQVLGRGRTAAYITIAVMLSQASTWAGLGAGQAQLPVSCEAWSGAFTRPGRRRLSRRLKL

SEQ ID NO: 792982 - protein, 84 aa, Homo sapiens
AVSTVGGHHMFAVRGTQCPQQVRSVLHSGSFPVPGPELRAVKWLCPWPHGASTLEAKMDFKEITQMITSGMYLTPLGKRLLLAS

SEQ ID NO: 792983 - protein, 132 aa, Homo sapiens
MQCPQGSRVSHGAGAHVWVPGAGVLSAPERLRERPRSHTGPCWPSLCLGPSTPHSVRVNLAGTQEGKVQPEAGRRQEGLLPCDLQSPCGNQPAFLGVLLAREPAQPLPGLRVLISSSWEGSRGSEQSDSSNQ

SEQ ID NO: 792984 - protein, 112 aa, Homo sapiens
PSPFPTLLELAAFFSALPSSPGECRQRRQRPLASEARGTSQPVQGSLSCPQLVGLGLQRFQWSLMSLSTCPLGSGQMGPVAKANGQTWLPPPPRDLSSREGKQPFPHRHPFC

SEQ ID NO: 792985 - protein, 129 aa, Homo sapiens
LGRWPFVLHKMDLRKLFSAFFPSSCPEVSAQPLPAHWILVAILGPRQDGGTQDASCLGGWEPTTVLQDPTLSAPWTFIFPFGKRAFQHPSSKGQCFLRRGIQGFEVRPTRCMCLPAPCMALGTIGRLQI

SEQ ID NO: 792986 - protein, 198 aa, Homo sapiens
MWNTLTRSLSDHPVGKDPQAMRTGQRQNKGMRTRLGCLSHKSDSCSDFTAILPDKPNRALKRLSTEEATRWADSFDVLLSHKYGVAAFRAFLKTEFSEENLEFWLACEEFKKTRSTAKLVSKAHRIFEEFVDVQAPREVNIDFQTREATRKNLQEPSLTCFDQAQGKVHSLMEKDSYPRFLRSKMYLDLLSQSQRRLS

SEQ ID NO: 792987 - protein, 180 aa, Homo sapiens
MAALLMPRRNKGMRTRLGCLSHKSDSCSDFTAILPDKPNRALKRLSTEEATRWADSFDVLLSHKYGVAAFRAFLKTEFSEENLEFWLACEEFKKTRSTAKLVSKAHRIFEEFVDVQAPREVNIDFQTREATRKNLQEPSLTCFDQAQGKVHSLMEKDSYPRFLRSKMYLDLLSQSQRRLS

SEQ ID NO: 792988 - protein, 114 aa, Homo sapiens
HFSYSLMWVLTSNDADAQHVRFVKDAPSLCHESMASSPPWKATGSLLESQDKFNILPKSQATRGEEMKSLQTLHFAGENLQVCPRILTLVHLAELHGEKTAVNGEFRGMGFSLL

SEQ ID NO: 792989 - protein, 101 aa, Homo sapiens
MGHFDFLSAALAKELGVCVEGSSGLKKVVSIYQWRTLSTPSPRPAITTGVRVGCDAYRINVTETLCPHQSLGLQPRDGSSPNHDDEFFWEEYEPASGMTDR

SEQ ID NO: 792990 - protein, 239 aa, Homo sapiens
RLSPLLYSILSKYSVLGVRLPRSLHKMPGEATETVPAIEQQLLQPQAETGSGTESDSDESVPELEEQDSTQVTAQVQLVVAAEIDEEPVSKAKQRRSEKKARKARFKLGLQQVTGVTRVTIRKSKNILFVITKPDVYKSPASDTYMVFGEAKIEDLSQEAQLAAAEKFKVQGEAVSNIQENTQTPTVQEGSEDEEVDETGVEIKDIELVLSQANVWGAKAVRALKNSNDIVNAIMELTM

SEQ ID NO: 792991 - protein, 239 aa, Homo sapiens; identical to SEQ ID NO: 792990

SEQ ID NO: 792992 - protein, 132 aa, Homo sapiens
PDIDLVWGAESLTFQGKPLSLLNSTWERVKPRPWVNICNSCCLDLDQGHFAFHPLSLHFFPQVAFWVTEEAVGFQDVLLARQLQAYLALRASLKDERFPLLAQGFPKSWCLLLLPVFLSKPRDGAQACYREK

SEQ ID NO: 792993 - protein, 67 aa, Homo sapiens
IIGHTDLRCTVQIILANACTHVAHTPIKIENIAITPENSESTLPLDSSSPYLMSVMTYYCHPFWNIM

SEQ ID NO: 792994 - protein, 68 aa, Homo sapiens
NDIDQYPVVFRNASDQGSWMQLEMLLRKLSDLVWTSDALSDRFWKMVWFPSGVEDSKDTVTLFGFGSE

SEQ ID NO: 792995 - protein, 130 aa, Homo sapiens
ASGPHLALGQLWTLCRQWLRPEARSKEQMLELLVLEQFLGALPSKMRTWVQSQGPRSCREAASLVEDLTQMCQQEGERRRLPAPGRARGPDVSEDRTALLPAHIAPTPARPLPTSKPLLPRGCVFNYFYI

SEQ ID NO: 792996 - protein, 85 aa, Homo sapiens
KESSPDRVVLIFWPRLGRFSLPGRSQGDCARERHACGVNGWVLGALGTAGVLAGLRLPYVFDTVGTHNMLLLCCRQFTRVALNRS

SEQ ID NO: 792997 - protein, 193 aa, Homo sapiens
MDMTWEKRLAKKYYDKLFKEYCIADLSKYKENKFGFRWRVEKEVISGKGQFFCGNKYCDKKEGLKSWEVNFGYIEHGEKRNALVKLRLCQECSIKLNFHHRRKEIKSKKRKDKTKKDCEESSHKKSRLSSAEEASKKKDKGHSSSKKSEDSLLRNSDEEESASESELWKGPLPETDEKSQEEEFDEYFQDLFL

SEQ ID NO: 792998 - protein, 89 aa, Homo sapiens
TWEEAGEKMPSESLCLAAQARLDTEMVENRYTDGSVEPSGTKKEDLNDKEKKNEDETPAPVYRAKSILETWVWVKQPGNLSFGTLESLI

SEQ ID NO: 792999 - protein, 103 aa, Homo sapiens
PPYRPPDLIFRPNWFCCVSLSSLVNRGDARRTSGVWAGMGPPGLGRRVIHGLIGGIRCTLGTEGRTWLKDQFPVAEGHLLEHQRLLQMCPQECQQGEPAGAQV

SEQ ID NO: 793000 - protein, 123 aa, Homo sapiens
ACLMDMNALLDRFHNYILPHLRGEDRVCHCNCGRHHIHYVIPYDGDQSVVDASENYFVTDSVTKQEIDLMLGLLLGFCISWFLVWMDGVLHCAVRAWRAGRRYDGSWTWLPKLCSLRELGRRP

SEQ ID NO: 793001 - protein, 123 aa, Homo sapiens
RAGGQRGLGVVLPSSFAKLLSFPQRYHPAGQPTLAATGVHLPSLQQTTFRSLISCCSGNIWIRDFSKPLSPSSPPPPGPNSCPSHPSPCSPCPPPTPLEWPFIKPKPKKPTDLAVTTTPGPGS

SEQ ID NO: 793002 - protein, 120 aa, Homo sapiens
ALTGSPGWERAPQEGCELRTRKNATASWGLFLMCRFQISTMLQKSSNRCAPSKLATDHIQKLDFLLFWEYLDQRPCCHHYSGTWKLKRGRDGETQKAERLLFFHNTGFVDVATIRTRTAC

SEQ ID NO: 793003 - protein, 73 aa, Homo sapiens
RREGISMLVGPKTYLWPYKSFPNCLIFSAFRLWHLERNALYLLKDGISHLNPGFLTFRTSPATVSNKMFSAAS

SEQ ID NO: 793004 - protein, 47 aa, Homo sapiens
MCQHRVQYRAASCKECASSCQAPHCGLSLRGSISIFIASLATERDCL

SEQ ID NO: 793005 - protein, 36 aa, Homo sapiens
MITLGFCLRSLEWSFPSAFKKVLHSSLGYEAKIQLN

SEQ ID NO: 793006 - protein, 133 aa, Homo sapiens
LAYGPRSLNSVPRREVEVLEPRLGFLSGCPAPAAPGLPPTPHTTGRQLGPGIITVQHTCPVNRRCAQNRCRLYSPPSPFCVTPRANYSTNFCPPCSQFSCMGLLFRTQNTNSLGSITNVHPFRNCAFSNRTMG

SEQ ID NO: 793007 - protein, 128 aa, Homo sapiens
ALCIRTRPVSVAPGGDLGGGMPGTTRPEFCPVTAPKMGWGGPKLTLQGEVATSISSPPRSGSTDLLRGTAGSQGLQPPAAPSLCPEFPATLCPRPHAALFTPFAWPAVGSAFEVLFSGPTGIFAQNQN

SEQ ID NO: 793008 - protein, 271 aa, Homo sapiens
TLRPPSLPATTVRVWPAVGKEERSQGGEAWIRSLLHPPRAAHLTVAEAGAVAEAVVGAVAVAGGALEPLGRPCPAPPAAASSVSPTTSPPPAPGLEPHCRELPGTPTGTEPRVMRPKCRSRTGPRHTIVPDQPERRTQGTTEPPTGGMTHEPWTTAHFPEPAQLRRHLAQEHAGGEVELAIERVAKETAEPSWGPQDEGSEPPTTAAAGATEEEAVAAWPETWPAGEPSTLAAPTSAAEPRESESEEAEAGAAELRAELALAAGRQEEKQV

SEQ ID NO: 793009 - protein, 243 aa, Homo sapiens
HPTHLFLSLPRFPSLPSLPTGMDPQPPPPAQGSPPHRGRGRGRGRGRGRGRGRGRGGAGAPRAPLPCPTCGRLFRFPYYLSRHRLSHSGLRPHACPLCPKAFRRPAHLSRHLRGHGPQPPLRCAACPRTFPEPAQLRRHLAQEHAGGEVELAIERVAKETAEPSWGPQDEGSEPPTTAAAGATEEEAVAAWPETWPAGEPSTLAAPTSAAEPRESESEEAEAGAAELRAELALAAGRQEEKQV

SEQ ID NO: 793010 - protein, 79 aa, Homo sapiens
TPESLLYLRHCLLSDIFLFRQPCKCLARMTNELDFRGDVTVHKHSLEHAQCSGVHGTVQMPECAVGLDRDHCCRNKMQF

SEQ ID NO: 793011 - protein, 125 aa, Homo sapiens
RLEKKDLKLEPPEEEIIEGNTKSHIMLVQRQMSVIEEDLEEFQLALKHYVESASSQSGCLRISIQKLSNESRYMIYEFWENSSVWNSHLQTNYSKTFQRSNVDFLETPELTSTMLVPASWWILNN

SEQ ID NO: 793012 - protein, 84 aa, Homo sapiens
LCAWGRLCGLRAALSPQESLASEEGGSTTGGITVRHLPPALPPSCSQPPAPGRDWRATGSTARPQPPIKLELKTVIAWMFSSYI

SEQ ID NO: 793013 - protein, 364 aa, Homo sapiens
MNIIRENKDLACFYTTKHSWRGKYKRVFSVGTHAITTYNPNTLEVTNQWPYGDICSISPVGKGQGTEFNLTFRKGSGKKSETLKFSTEHRTELLTEALRFRTDFSEGKITGRRYNCYKHHWSDSRKPVILEVTPGGFDQINPATNRVLCSYDYRNIEGFVDLSDYQGGFCILYGGFSRLHLFASEQREEIIKSAIDHAGNYIGISLRIRKEPLEFEQYLNLRFGKYSTDESITSLAEFVVQKISPRHSEPVKRVLALTETCLVERDPATYNIATLKPLGEVFALVCDSENPQLFTIEFIKGQVRKYSSTERDSLLASLLDGVRASGNRDVCVKMTPTHKGQRWGLLSMPVDEEVESLHLRFLAT

SEQ ID NO: 793014 - protein, 376 aa, Homo sapiens
TSGPGFRVVGSVGIPALSSAREKPTPPAMPAPPCASCHAARAALRRPLSGQALCGACFCAAFEAEVLHTVLAGRLLPPGAVVAVGASGGKDSTVLAHVLRALAPRLGISLQLVAVDEGIGGYRDAALAAVRRQAARWELPLTVVAYEDLFGGWTMDAVARSTAGSGRSRSCCTFCGVLRRRALEEGARRVGATHIVTGHNADDMAETVLMNFLRGDAGRLARGGGLGSPGEGGALPRCRPLQFASQKEVVLYAHFRRLDYFSEECVYAPEAFRGHARDLLKRLEAARPSAVLDLVHSAERLALAPAARPPRPGACSRCGALASRALCQACALLDGLNRGRPRLAIGKGRRGLDEEATPGTPGDPARPPASKAVPTF

SEQ ID NO: 793015 - protein, 138 aa, Homo sapiens
DARGSGPAPRLQGRPHLLATSGLPPGSDAAGWGLPVNDTVNKPVTLPGLPCGVGKETGAHSPETLKKLGPQTSRSQGRRVSNWASGSEGGGGWGTILGLREERARTKPRRSGTGDPRHLWLRKEGLGSWTPGSQGGGG

SEQ ID NO: 793016 - protein, 437 aa, Homo sapiens
MRGYHGDRGSHPRPARFADQQHMDVGPAARAPYLLGSREAFSTEPRFCAPRAGLGHISPEGPLSLSEGPSVGPEGGPAGAGVGGGSSTFPRMYPGQGPFDTCEDCVGHPQGKGAPRLPPTLLDQFEKQLPVQQDGFHTLPYQRGPAGAGPGPAPGTGTAPEPRSESPSRIRHLVHSVQKLFAKSHSLEAPGKRDYNGPKAEGRGGSGGDSYPGPGSGGPHTSHHHHHHHHHHHHQSRHGKRSKSKDRKGDGRHQAKSTGWWSSDDNLDSDSGFLAGGRPPGEPGGPFCLEGPDGSYRDLSFKGRSGGSEGRCLACTGMSMSLDGQSVKRSAWHTMMVSQGRDGYPGAGPGKGLLGPETKAKARTYHYLQVPQDDWGGYPTGGKDGEIPCRRMRSGSYIKAMGDEESGDSDGSPKTSPKAVARRFTTRRSSSVDQARI

SEQ ID NO: 793017 - protein, 72 aa, Homo sapiens
RLKEEKSKSKALRQEHTGHVQASGAMGYLHFTVQPWTLPPSMSNRRTPRNKSNTRTSSNLETKARGHVNYIN

SEQ ID NO: 793018 - protein, 104 aa, Homo sapiens
TSPFELEEFYTFALVVLTLFPEEQLHPFRSGRTLHSSPSRHGCIWHHHFCSTIEASTHDGAARVVPATCPGKQEHLTVCDRSSILFLLQHLWSATTSQVPVLTW

SEQ ID NO: 793019 - protein, 103 aa, Homo sapiens
ASAQKRYVLIANTQGECDADQCCGCQRTRLHQTITSQSHLQFFALNAKLWPRIGGAACAKTQVRSHIPQAVVATFISGKAQQRNVTPGTPKFGLFLYEHLEDL

SEQ ID NO: 793020 - protein, 149 aa, Homo sapiens
MHPQAHEPGVRREGHRRHRWRQLQPGGGAGAARSHAEGGGHPAQGLRAPQHQMKRGELFDYLTEKVTLSEKETRKIMRALLEVICTLHKLNIVHRDLKPENILLDDNMNIKLTDFGFSCQLEPGERLRGLVTWPWPTSRPRVLNQPSAE

SEQ ID NO: 793021 - protein, 387 aa, Homo sapiens
MTRDEALPDSHSAQDFYENYEPKEILGRGVSSVVRRCIHKPTSQEYAVKVIDVTGGGSFSPEEVRELREATLKEVDILRKVSGHPNIIQLKDTYETNTFFFLVFDLMKRGELFDYLTEKVTLSEKETRKIMRALLEVICTLHKLNIVHRDLKPENILLDDNMNIKLTDFGFSCQLEPGERLREVCGTPSYLAPEIIECSMNEDHPGYGKEVDMWSTGVIMYTLLAGSPPFWHRKQMLMLRMIMSGNYQFGSPEWDDYSDTVKDLVSRFLVVQPQNRYTAEEALAHPFFQQYLVEEVRHFSPRGKFKVIALTVLASVRIYYQYRRVKPVTREIVIRDPYALRPLRRLIDAYAFRIYGHWVKKGQQQNRAALFENTPKAVLLSLAEEDY

SEQ ID NO: 793022 - protein, 333 aa, Homo sapiens
MHPQAHEPGVRREGHRRHRWRQLQPGGGAGAARSHAEGGGHPAQGLRAPQHQMKRGELFDYLTEKVTLSEKETRKIMRALLEVICTLHKLNIVHRDLKPENILLDDNMNIKLTDFGFSCQLEPGERLREVCGTPSYLAPEIIECSMNEDHPGYGKEVDMWSTGVIMYTLLAGSPPFWHRKQMLMLRMIMSGNYQFGSPEWDDYSDTVKDLVSRFLVVQPQNRYTAEEALAHPFFQQYLVEEVRHFSPRGKFKVIALTVLASVRIYYQYRRVKPVTREIVIRDPYALRPLRRLIDAYAFRIYGHWVKKGQQQNRAALFENTPKAVLLSLAEEDY

SEQ ID NO: 793023 - protein, 333 aa, Homo sapiens; identical to SEQ ID NO: 793022

SEQ ID NO: 793024 - protein, 333 aa, Homo sapiens; identical to SEQ ID NO: 793022

SEQ ID NO: 793025 - protein, 169 aa, Homo sapiens
MAACCCCRCPRLVLLFFLSGTRFIISFCRAVVVSSSLTCVLLHDQASSPRVGPPGGYIIRHCRLSLDYCVSVVVSPVLCSAAPLGFFVVWLVLFVCRALSCVVIVMSVLVGVNTLCGDLFVPPEQGPLDHWWVTAVYSYTDKVFGRIWEKGGRTVESGSHHPLIPRTFW

SEQ ID NO: 793026 - protein, 333 aa, Homo sapiens; identical to SEQ ID NO: 793022

SEQ ID NO: 793027 - protein, 68 aa, Homo sapiens
CQELETKATCNKRCFRYPYQEIARVLGALCQEYGTKNYGYQRLERVLGMGYKKELVNGYNNTVRRNMI

SEQ ID NO: 793028 - protein, 123 aa, Homo sapiens
RVGLLACREVHWILQTAFRRQCLIYIGAKDWLDQVWMFTQLRRKLANLQLCKWSTCQHHVACSLLYTWFTKKREDGATILNMCPFQVAPFPISRAAGIYSCKLPARLSMSAAQSYRLLFVKKK

SEQ ID NO: 793029 - protein, 139 aa, Homo sapiens
TALALEGCPLPQPHSDSSCRSRMGLSSPGHGLSPYLNLGTVVGRTMWDKKVLCPTQHQSQGGLGISRGSWKGGRTQLKSQNLGRTFSGKPLQMSSGMSMVAHTCRLNTLVKLRLEDCSRPGVEDQPGQHSKTLSLCVFF

SEQ ID NO: 793030 - protein, 86 aa, Homo sapiens
MAIVKPAVARANRGAKFAQEATLMPFLKNYSWLNPDLWLGTMSSPSLPNQEYMTHLRPTKLRGVIQPLRPTTAFTAIVHSAKRHAK

SEQ ID NO: 793031 - protein, 86 aa, Homo sapiens
MAIVKPAVARANRGAKFAQRATLMPFLKNYSWLNPDLWLGTMSSPSLPNQEYMTHLRPTKLRGVIQPLRPTTAFTAIVHSAKRHAK

SEQ ID NO: 793032 - protein, 86 aa, Homo sapiens; identical to SEQ ID NO: 793031

SEQ ID NO: 793033 - protein, 86 aa, Homo sapiens; identical to SEQ ID NO: 793031

SEQ ID NO: 793034 - protein, 188 aa, Homo sapiens
AVEGLMLGLQVDHHAQLIKNNFLVKMGSRHVAQAGLELLGLSFPPASVFQGVGITGMSHLTLQKAVWVERASAAHPGALMWEPHPWVRQRGPRCAPTGWPCRPDGTAACAPRPPRENSENPQMSLHLLQRQGLRTYPLLSTCSGVISAHCSLRLQVQENCLNLGGRGCSEPRLHHSTPAWATERDSIS

SEQ ID NO: 793035 - protein, 152 aa, Homo sapiens
PWFPLLPAVARAGFLEQRQRILLRLLRMSRFRGCSSSGVRFCSAEREASGSGRGNVLQFVQEPQAQQSRPFPAGAQLSLELLFSDWGMEWAQPRLPKPALPLPVVVAFSRAADCAVDHHFRFCLLLRLLRQLLTLLRDEEREVNPWQRKIVV

SEQ ID NO: 793036 - protein, 140 aa, Homo sapiens
ERCYGRARAPEGGWKPRTVGRVEGDRDRWGERPPWPVLPSPPFLRYREELPAAIRGRAEKHVTGSWSGCWPGSLTVKGGPPRGQGLRSAGLHWGVASAGRVSPVGAGPPWWVQHPRHPDLASHRGALPATSAAAGGHQSP

SEQ ID NO: 793037 - protein, 167 aa, Homo sapiens
MSLALRSELVVDKTKRKKRRELSEEQKQEIKDAFELFDTDKDEAIDYHELKVAMRALGFDVKKADVLKILKDYDREATGKITFEDFNEVVTDWILERDPHEEILKAFKLFDDDDSGKISLRNLRRVARELGENMSDEELRAMIEEFDKDGDGEINQEEFIAIMTGDI

SEQ ID NO: 793038 - protein, 167 aa, Homo sapiens; identical to SEQ ID NO: 793037

SEQ ID NO: 793039 - protein, 167 aa, Homo sapiens; identical to SEQ ID NO: 793037

SEQ ID NO: 793040 - protein, 156 aa, Homo sapiens
MSLALRSELVVDKTKRKKRRELSEEQKQEIKDAFELFDTDKDEAIDYHELKVAMRALGFDVKKADVLKILKDYDREATGKITFEDFNEVVTDWILERDPHEEILKAFKLFDDDDSGKISLRNLRRVARELGENMSDEELRAMIEEFDKDGDGESKF

SEQ ID NO: 793041 - protein, 111 aa, Homo sapiens
MSLALRSELVVDKTKRKKRRELSEEQKQEIKDAFELFDTDKDEAIDYHELKVAMRALGFDVKKADVLKILKDYDREATGKITFEDFNEVGVYFNSLCNQQLLGNCLINITF

SEQ ID NO: 793042 - protein, 167 aa, Homo sapiens; identical to SEQ ID NO: 793037

SEQ ID NO: 793043 - protein, 98 aa, Homo sapiens
PPIQLGSLVTQEAPAQDSLGSWINSSPDSSENLSEIPLSHKERKEILTGTKCIWVKAARRRSRALGTEGRHLLAPATERSSLSLHSLSEGDDARPPGP

SEQ ID NO: 793044 - protein, 71 aa, Homo sapiens
GSLGTQRLTRTSSGEAAGEQAHPAQNALERAGQSTRLLLTRAARGSPTRGSRPCTHDGEGGGFPLSSAERS

SEQ ID NO: 793045 - protein, 109 aa, Homo sapiens [sequence omitted]

SEQ ID NO: 793046 - protein, 77 aa, Homo sapiens
LKERDLEDCSVRGQSLRGSGGTIPLRLLERRPVSATRIQNCTHFESSTQGGSDPCLAQRCCIFLSLSERRAQCPGRG

SEQ ID NO: 793047 - protein, 302 aa, Homo sapiens
MLAAWFRMKYPHMVVGALAASDPYLEFEDLVPCGVFMKIVTTDFRKSGPHCSESIHRSWDAINRLSNTGSGLQWLTGALHLCSPLTSQDIQHLKDWISETWVNLAMVDYPYASNFLQPLPAWPIKVVCQYLKNPNVSDSLLLQNIFQALNVYYNYSGQVKCLNISETATSSLGTLGWSYQACTEVVMPFCTNGVDDMFEPHSWNLKELSDDCFQQWGVRPRPSWITTMYGGKNISSHTNIVFTMVELEPWSRKWVTQDITETLVAVTISEGPPLRFRDKKVDLFEVYRAGGTYTNGPHLNGE

SEQ ID NO: 793048 - protein, 302 aa, Homo sapiens
MLAAWFRMKYPHMVVGALAASDPYLEFEDLVPCGVFMKIVTTDFRKSGPHCSESIHRSWDAINRLSNTGSGLQWLTGALHLCSPLTSQDIQHLKDWISETWVNLAMVDYPYASNFLQPLPAWPIKVVCQYLKNPNVSDSLLLQNIFQALNVYYNYSGQVKCLNISETATSSLGTLGWSYQACTEVVMPFCTNGVDDMFEPHSWNLKELSDDCFQQWGVRPRPSWITTMYGGKNISSHTNIVFKQWWNLDPWSGGGVTKDFTDTLVAVTISEGAHNLDLRTKNAWILCLGCNPSLELDLRMVQ

SEQ ID NO: 793049 - protein, 238 aa, Homo sapiens
MLAAWFRMKYPHMVVGALAASDPYLEFEDLVPCGVFMKIVTTDFRKSGPHCSESIHRSWDAINRLSNTGSGLQWLTGALHLCSPLTSQDIQHLKDWISETWVNLAMVDYPYASNFLQPLPAWPIKVVCQYLKNPNVSDSLLLQNIFQALNVYYNYSGQVKCLNISETATSSLGTLGWSYQACTEVVMPFCTNGVDDMFEPHSWNLKELSDDCFQQWGVRPRPSWITTMYGGMVRRWSN

SEQ ID NO: 793050 - protein, 175 aa, Homo sapiens
MIEMLEERALGRYRPDLNPHSSCFGPCNSRLPLNPLSSINTWLSRNNYDLGPGPSGIFTPNWKPLHQDVCRDVSPWSGILSHLAPPQRGPLSSANLHRYHHDFPIEGIPRKQFLFSLLVQFSPEKVTFLTRLVSEKPLRCQLPVCPGPPDTFLCCVCLRNTFPRLSPTGFQQVQP

SEQ ID NO: 793051 - protein, 128 aa, Homo sapiens
FGYGSDLLVTILIFMDQQITAVIVNRKENKLKKAAGYHLDLFWVGILMALCSFMGLPWYVAATVISIAHIDRSHIDHHMPSTLNVSQFTYTFEGDTTIISILQRRKLSLGEMTRFPKLTQLARSRAWI

SEQ ID NO: 793052 - protein, 80 aa, Homo sapiens
GPRWGKEEFPLGLNLADLRSFRPTLAKVLEATALKMTSRDQPRPKGPPKSTSPCPGISNSESSPTLNYQGILNRLKQFPR

SEQ ID NO: 793053 - protein, 607 aa, Homo sapiens
GPRWGKEEFPLGLNLADLRSFRPTLAKVLEATALKMTSRDQPRPKGPPKSTSPCPGISNSESSPTLNYQGILNRLKQFPRFSPHFAAELESIYYSLHKIQQDVAEHHKQIGNVLQIVESCSQLQGFQSEEVSPAEPASPGTPQQVKDKTLQESSFEDIMATRSSDWLRRPLGEDNQPETQLFWDKEPWFWHDTLTEQLWRIFAGVHDEKAKPRDRQQAPGLGQESKAPGSCDPGTDPCPEDASTPRPPEASSSPPEGSQDRNTSWGVVQEPPGRASRFLQSISWDPEDFEDAWKRPDALPGQSKRLAVPCKLEKMRILAHGELVLATAISSFTRHVFTCGRRGIKVWSLTGQVAEDRFPESHLPIQTPGAFLRTCLLSSNSRSLLTGGYNLASVSVWDLAAPSLHVKEQLPCAGLNCQALDANLDANLAFASFTSGVVRIWDLRDQSVVRDLKGYPDGVKSIVVKGYNIWTGGPDACLRCWDQRTIMKPLEYQFKSQIMSLSHSPQEDWVLLGMANGQQWLQSTSGSQRHMVGQKDSVILSVKFSPFGQWWASVGMDDFLGVYSMPAGTKVFEVPEMSPVTCCDVSSNNRLVVTGSGEHASVYQITY

SEQ ID NO: 793054 - protein, 601 aa, Homo sapiens
GPRWGKEEFPLGLNLADLRSFRPTLAKVLEATALKMTSRDQPRPKGPPKSTSPCPGISNSESSPTLNYQGILNRLKQFPRFSPHFAAELESIYYSLHKIQQDVAEHHKQIGNVLQIVESCSQLQGFQSEEVSPAEPASPGTPQQVKDKTLQESSFEDIMATRSSDWLRRPLGEDNQPETQLFWDKEPWFWHDTLTEQLWRIFAGVHDEKAKPRDRRAGNKAPGSCDPGTDPCPEDASTPRPPEASSSPPEGSQDRNTSWGVVQEPPGRASRFLQSISWDPEDFEDAWKRPDALPGQSKRLAVPCKLEKMRILAHGELVLATAISSFTRHVFTCGRRGIKVWSLTGQVAEDRFPESHLPIQTPGAFLRTCLLSSNSRSLLTGGYNLASVSVWDLAAPSLHVKEQLPCAGLNCQALDANLDANLAFASFTSGVVRIWDLRDQSVVRDLKGYPDGVKSIVVKGYNIWTGGPDACLRCWDQRTIMKPLEYQFKSQIMSLSHSPQEDWVLLGMANGQQWLQSTSGSQRHMVGQKDSVILSVKFSPFGQWWASVGMDDFLGVYSMPAGTKVFEVPEMSPVTCCDVSSNNRLVVTGSGEHASVYQITY

SEQ ID NO: 793055 - protein, 69 aa, Homo sapiens
LSYFPSSVLSCCLFRSSASRSTSLVVVPSWFCSCRRLPPFAPFLCLSRRSVFVVALFLSRDGLGCLVVG

SEQ ID NO: 793056 - protein, 1590 aa, Homo sapiens
QPLVGVLEGKAHLPGDRLPVVEEEIFLLLPVLRLVLGPLPTLCIVQKDFHLHALPEAEEAHRTAGPGGSRNDSARARERALKVEHGGGERCPGIMVALRGLGSGLQPWCPLDLRLEWVDTVWELDFTETEPLDPSIEAEIIETGLAAFTKLYESLLPFATGEHGSMESIWTFFIENNVSHSTLVALFYHFVQIVHKKNVSVQYREYGLHAAGLYFLLLEVPGSVANQVFHPVMFDKCIQTLKKSWPQESNLNRKRKKEQPKSSQANPGRHRKRGKPPRREDIEMDEIIEEQEDENICFSARDLSQIRNAIFHLLKNFLRLLPKFSLKEKPQCVQNCIEVFVSLTNFEPVLHECHVTQARALNQAKYIPELAYYGLYLLCSPIHGEGDKVISCVFHQMLSVILMLEVGEGSHRAPLAVTSQVINCRNQAVQFISALVDELKESIFPVVRILLQHICAKVVDKSEYRTFAAQSLVQLLSKLPCGEYAMFIAWLYKYSRSSKIPHRVFTLDVVLALLELPEREVDNTLSLEHQKFLKHKFLVQEIMFDRCLDKAPTVRSKALSSFAHCLELTVTSASESILELLINSPTFSVIESHPGTLLRNSSAFSYQRQTSNRSEPSGEINIDSSGETVGSGERCVMAMLRRRIRDEKTNVRKSALQVLVSILKHCDVSGMKEDLWILQDQCRDPAVSVRKQALQSLTELLMAQPRCVQIQKAWLRGVVPVVMDCESTVQEKALEFLDQLLLQNIRHHSHFHSGDDSQVLAWALLTLLTTESQELSRYLNKAFHIWSKKEKFSPTFINNVISHTGTEHSAPAWMLLSKIAGSSPRLDYSRIIQSWEKISSQQNPNSNTLGHILCVIGHIAKHLPKSTRDKVTDAVKCKLNGFQWSLEVISSAVDALQRLCRASAETPAEEQELLTQVCGDVLSTCEHRLSNIVLKENGTGNMDEDLLVIFTLGDIAQLCPARVEKRIFLLIQSVLASSADADHSPSSQGSSEAPASQPPPQVRGSVMPSVIRAHAIITLGKLCLQHEDLAKKSIPALVRELEVCEDVAVRNNVIIVMCDLCIRYTIMVDKYIPNISMCLKDSDPFIRKQTLILLTNLLQEEFVKWKGSLFFRFVSTLIDSHPDIASFGEFCLAHLLLKRNPVMFFQHFIECIFHFNNYEKHEKYNKFPQSEREKRLFSLKGKSNKERRMKIYKFLLEHFTDEQRFNITSKICLSILACFADGILPLDLDASELLSDTFEVLSSKEIKLLAMRSKPDKDLLMEEDDMALANVVMQEAQKKLISQVQKRNFIENIIPIIISLKTVLEKNKIPALRELMHYLREVMQDYRDELKDFFAVDKQLASELEYDMKKYQEQLVQEQELAKHADVAGTAGGAEVAPVAQVALCLETVPVPAGQENPAMSPAVSQPCTPRASAGHVAVSSPTPETGPLQRLLPKARPMSLSTIAILNSVKKAVESKSRHRSRSLGVLPFTLNSGSPEKTCSQVSSYSLEQESNGEIEHVTKRAISTPEKSISDVTFGAGVSYIGTPRTPSSAKEKIEGRSQGNDILCLSLPDKPPPQPQQWNVRSPARNKDTPACSRRSLRKTPLKTAN

SEQ ID NO: 793057 - protein, 1190 aa, Homo sapiens
SRRRLSFNGSHRAPLAVTSQVINCRNQAVQFISALVDELKESIFPVVRILLQHICAKVVDKSEYRTFAAQSLVQLLSKLPCGEYAMFIAWLYKYSRSSKIPHRVFTLDVVLALLELPEREVDNTLSLEHQKFLKHKFLVQEIMFDRCLDKAPTVRSKALSSFAHCLELTVTSASESILELLINSPTFSVIESHPGTLLRNSSAFSYQRQTSNRSEPSGEINIDSSGETVGSGERCVMAMLRRRIRDEKTNVRKSALQVLVSILKHCDVSGMKEDLWILQDQCRDPAVSVRKQALQSLTELLMAQPRCVQIQKAWLRGVVPVVMDCESTVQEKALEFLDQLLLQNIRHHSHFHSGDDSQVLAWALLTLLTTESQELSRYLNKAFHIWSKKEKFSPTFINNVISHTGTEHSAPAWMLLSKIAGSSPRLDYSRIIQSWEKISSQQNPNSNTLGHILCVIGHIAKHLPKSTRDKVTDAVKCKLNGFQWSLEVISSAVDALQRLCRASAETPAEEQELLTQVCGDVLSTCEHRLSNIVLKENGTGNMDEDLLDIFTLGDIAQLCPARVEKRIFLLIQSVLASSADADHSPSSQGSSEAPASQPPPQVRGSVMPSVIRAHAIITLGKLCLQHEDLAKKSIPALVRELEVCEDVAVRNNVIIVMCDLCIRYTIMVDKYIPNISMCLKDSDPFIRKQTLILLTNLLQEEFVKWKGSLFFRFVSTLIDSHPDIASFGEFCLAHLLLKRNPVMFFQHFIECIFHFNNYEKHEKYNKFPQSEREKRLFSLKGKSNKERRMKIYKFLLEHFTDEQRFNITSKICLSILACFADGILPLDLDASELLSDTFEVLSSKEIKLLAMRSKPDKDLLMEEDDMALANVVMQEAQKKLISQVQKRNFIENIIPIIISLKTVLEKNKIPALRELMHYLREVMQDYRDELKDFFAVDKQLASELEYDMKKYQEQLVQEQELAKHADVAGTAGGAEVAPVAQVALCLETVPVPAGQENPAMSPAVSQPCTPRASAGHVAVSSPTPETGPLQRLLPKARPMSLSTIAILNSVKKAVESKSRHRSRSLGVLPFTLNSGSPEKTCSQVSSYSLEQESNGEIEHVTKRAISTPEKSISDVTFGAGVSYIGTPRTPSSAKEKIEGRSQGNDILCLSLPDKPPPQPQQWNVRSPARNKDTPACSRRSLRKTPLKTAN

SEQ ID NO: 793058 - protein, 644 aa, Homo sapiens
MYIFTLGDIAQLCPARVEKRIFLLIQSVLASSADADHSPSSQGSSEAPASQPPPQVRGSVMPSVIRAHAIITLGKLCLQHEDLAKKSIPALVRELEVCEDVAVRNNVIIVMCDLCIRYTIMVDKYIPNISMCLKDSDPFIRKQTLILLTNLLQEEFVKWKGSLFFRFVSTLIDSHPDIASFGEFCLAHLLLKRNPVMFFQHFIECIFHFNNYEKHEKYNKFPQSEREKRLFSLKGKSNKERRMKIYKFLLEHFTDEQRFNITSKICLSILACFADGILPLDLDASELLSDTFEVLSSKEIKLLAMRSKPDKDLLMEEDDMALANVVMQEAQKKLISQVQKRNFIENIIPIIISLKTVLEKNKIPALRELMHYLREVMQDYRDELKDFFAVDKQLASELEYDMKKYQEQLVQEQELAKHADVAGTAGGAEVAPVAQVALCLETVPVPAGQENPAMSPAVSQPCTPRASAGHVAVSSPTPETGPLQRLLPKARPMSLSTIAILNSVKKAVESKSRHRSRSLGVLPFTLNSGSPEKTCSQVSSYSLEQESNGEIEHVTKRAISTPEKSISDVTFGAGVSYIGTPRTPSSAKEKIEGRSQGNDILCLSLPDKPPPQPQQWNVRSPARNKDTPACSRRSLRKTPLKTAN

SEQ ID NO: 793059 - protein, 1126 aa, Homo sapiens
QPLVGVLEGKAHLPGDRLPVVEEEIFLLLPVLRLVLGPLPTLCIVQKDFHLHALPEAEEAHRTAGPGGSRNDSARARERALKVEHGGGERCPGIMVALRGLGSGLQPWCPLDLRLEWVDTVWELDFTETEPLDPSIEAEIIETGLAAFTKLYESLLPFATGEHGSMESIWTFFIENNVSHSTLVALFYHFVQIVHKKNVSVQYREYGLHAAGLYFLLLEVPGSVANQVFHPVMFDKCIQTLKKSWPQESNLNRKRKKEQPKSSQANPGRHRKRGKPPRREDIEMDEIIEEQEDENICFSARDLSQIRNAIFHLLKNFLRLLPKFSLKEKPQCVQNCIEVFVSLTNFEPVLHECHVTQARALNQAKYIPELAYYGLYLLCSPIHGEGDKVISCVFHQMLSVILMLEVGEGSHRAPLAVTSQVINCRNQAVQFISALVDELKESIFPVVRILLQHICAKVVDKSEYRTFAAQSLVQLLSKLPCGEYAMFIAWLYKYSRSSKIPHRVFTLDVVLALLELPEREVDNTLSLEHQKFLKHKFLVQEIMFDRCLDKAPTVRSKALSSFAHCLELTVTSASESILELLINSPTFSVIESHPGTLLRNSSAFSYQRQTSNRSEPSGEINIDSSGETVGSGERCVMAMLRRRIRDEKTNVRKSALQVLVSILKHCDVSGMKEDLWILQDQCRDPAVSVRKQALQSLTELLMAQPRCVQIQKAWLRGVVPVVMDCESTVQEKALEFLDQLLLQNIRHHSHFHSGDDSQVLAWALLTLLTTESQELSRYLNKAFHIWSKKEKFSPTFINNVISHTGTEHSAPAWMLLSKIAGSSPRLDYSRIIQSWEKISSQQNPNSNTLGHILCVIGHIAKHLPKSTRDKVTDAVKCKLNGFQWSLEVISSAVDALQRLCRASAETPAEEQELLTQVCGDVLSTCEHRLSNIVLKENGTGNMDEDLLVIFTLGDIAQLCPARVEKRIFLLIQSVLASSADADHSPSSQGSSEAPASQPPPQVRGSVMPSVIRAHAIITLGKLCLQHEDLAKKSIPALVRELEVCEDVAVRNNVIIVMCDLCIRYTIMVDKYIPNISMCLKDSDPFIRKQTLILLTNLLQEEFVKWKGSLFFRFVSTLIDSHPDIAR

SEQ ID NO: 793060 - protein, 1034 aa, Homo sapiens
QPLVGVLEGKAHLPGDRLPVVEEEIFLLLPVLRLVLGPLPTLCIVQKDFHLHALPEAEEAHRTAGPGGSRNDSARARERALKVEHGGGERCPGIMVALRGLGSGLQPWCPLDLRLEWVDTVWELDFTETEPLDPSIEAEIIETGLAAFTKLYESLLPFATGEHGSMESIWTFFIENNVSHSTLVALFYHFVQIVHKKNVSVQYREYGLHAAGLYFLLLEVPGSVANQVFHPVMFDKCIQTLKKSWPQESNLNRKRKKEQPKSSQANPGRHRKRGKPPRREDIEMDEIIEEQEDENICFSARDLSQIRNAIFHLLKNFLRLLPKFSLKEKPQCVQNCIEVFVSLTNFEPVLHECHVTQARALNQAKYIPELAYYGLYLLCSPIHGEGDKVISCVFHQMLSVILMLEVGEGSHRAPLAVTSQVINCRNQAVQFISALVDELKESIFPVVRILLQHICAKVVDKSEYRTFAAQSLVQLLSKLPCGEYAMFIAWLYKYSRSSKIPHRVFTLDVVLALLELPEREVDNTLSLEHQKFLKHKFLVQEIMFDRCLDKAPTVRSKALSSFAHCLELTVTSASESILELLINSPTFSVIESHPGTLLRNSSAFSYQRQTSNRSEPSGEINIDSSGETVGSGERCVMAMLRRRIRDEKTNVRKSALQVLVSILKHCDVSGMKEDLWILQDQCRDPAVSVRKQALQSLTELLMAQPRCVQIQKAWLRGVVPVVMDCESTVQEKALEFLDQLLLQNIRHHSHFHSGDDSQVLAWALLTLLTTESQELSRYLNKAFHIWSKKEKFSPTFINNVISHTGTEHSAPAWMLLSKIAGSSPRLDYSRIIQSWEKISSQQNPNSNTLGHILCVIGHIAKHLPKSTRDKVTDAVKCKLNGFQWSLEVISSAVDALQRLCRASAETPAEEQELLTQVCGDVLSTCEHRLSNIVLKENGTGNMDEDLLVIFTLGDIAQLCPARVEKRIFLLIQSVLASSADADHSPSSQGSSEAPASQPPPQVRGSVMPSVIRAHAIITLGKKNMGEWGLTSFCV

SEQ ID NO: 793061 - protein, 102 aa, Homo sapiens
QPLVGVLEGKAHLPGDRLPVVEEEIFLLLPVLRLVLGPLPTLCIVQKDFHLHALPEAEEAHRTAGPGGSRNDSARARERALKVEHGGGEPVPWDHGGVAGPW

SEQ ID NO: 793062 - protein, 187 aa, Homo sapiens
RFQSAAGGSRNNQCTEVRPSLAAPYRQMLHTGTDVARNIGSHHVRVEHFMNHSITTLAKDTPLEEVVKVVTSTDVTEYPLVESTESQILVGIVQRAQLVQALQAEPPSRAPGHQVQCLQDILARGCPTEPVTLTLFSETTLHQAQNLFKLLNLQSLFVTSRGRAVGCVSWVEMKKAISNLTNPPAPK

SEQ ID NO: 793063 - protein, 827 aa, Homo sapiens
MLTAPFAGPIDHGSLTVQDDYIFFKATSANQTKYYVSYRRNEFVLMKLPKYALPKDLQIISTDESQVFVAVQEWYQMDTYNLYQSDPRGVRYALVLQDVRSSRQAEESVLIDILEVRGVKGVFLANQKIDGKVMTLITYNKGRDWDYLRPPSMDMNGKPTNCKPPDCHLHLHLRWADNPYVSGTVHTKDTAPGLIMGAGNLGSQLVEYKEEMYITSDCGHTWRQVFEEEHHILYLDHGGVIVAIKDTSIPLKILKFSVDEGLTWSTHNFTSTSVFVDGLLSEPGDETLVMTVFGHISFRSDWELVKVDFRPSFSRQCGEEDYSSWELSNLQGDRCIMGQQRSFRKRKSTSWCIKGRSFTSALTSRVCECRDSDFLCDYGFERSSSSESSTNKCSANFWFNPLSPPDDCALGQTYTSSLGYRKVVSNVCEGGVDMQQSQVQLQCPLTPPRGLQVSIQGEAVAVRPGEDVLFVVRQEQGDVLTTKYQVDLGDGFKAMYVNLTLTGEPIRHRYESPGIYRVSVRAENTAGHDEAVLFVQVNSPLQALYLEVVPVIGLNQEVNLTAVLLPLNPNLTVFYWWIGHSLQPLLSLDNSVTTRFSDTGDVRVTVQAACGNSVLQDSRVLRVLDQFQVMPLQFSKELDAYNPNTPEWREDVGLVVTRLLSKETSVPQELLVTVVKPGLPTLADLYVLLPPPRPTRKRSLSSDKRLAAIQQVLNAQKISFLLRGGVRVLVALRDTGTGAEQLGGGGGYWAVVVLFVIGLFAAGAFILYKFKRKRPGRTVYAQMHNEKEQEMTSPVSHSEDVQGAVQGNHSGVVLSINSREMHSYLVS

SEQ ID NO: 793064 - protein, 1126 aa, Homo sapiens
RPLLLLLLLLGACGAAGRSPEPGRLGPHAQLTRVPRSPPAGRAEPGGGEDRQARGTEPGAPGPSPGPAPGPGEDGAPAAGYRRWERAAPLAGVASRAQVSLISTSFVLKGDATHNQAMVHWTGENSSVILILTKYYHADMGKVLESSLWRSSDFGTSYTKLTLQPGVTTVIDNFYICPTNKRKVILVSSSLSDRDQSLFLSADEGATFQKQPIPFFVETLIFHPKEEDKVLAYTKESKLYVSSDLGKKWTLLQERVTKDHVFWSVSGVDADPDLVHVEAQDLGGDFRYVTCAIHNCSEKMLTAPFAGPIDHGSLTVQDDYIFFKATSANQTKYYVSYRRNEFVLMKLPKYALPKDLQIISTDESQVFVAVQEWYQMDTYNLYQSDPRGVRYALVLQDVRSSRQAEESVLIDILEVRGVKGVFLANQKIDGKVMTLITYNKGRDWDYLRPPSMDMNGKPTNCKPPDCHLHLHLRWADNPYVSGTVHTKDTAPGLIMGAGNLGSQLVEYKEEMYITSDCGHTWRQVFEEEHHILYLDHGGVIVAIKDTSIPLKILKFSVDEGLTWSTHNFTSTSVFVDGLLSEPGDETLVMTVFGHISFRSDWELVKVDFRPSFSRQCGEEDYSSWELSNLQGDRCIMGQQRSFRKRKSTSWCIKGRSFTSALTSRVCECRDSDFLCDYGFERSSSSESSTNKCSANFWFNPLSPPDDCALGQTYTSSLGYRKVVSNVCEGGVDMQQSQVQLQCPLTPPRGLQVSIQGEAVAVRPGEDVLFVVRQEQGDVLTTKYQVDLGDGFKAMYVNLTLTGEPIRHRYESPGIYRVSVRAENTAGHDEAVLFVQVNSPLQALYLEVVPVIGLNQEVNLTAVLLPLNPNLTVFYWWIGHSLQPLLSLDNSVTTRFSDTGDVRVTVQAACGNSVLQDSRVLRVLDQFQVMPLQFSKELDAYNPNTPEWREDVGLVVTRLLSKETSVPQELLVTVVKPGLPTLADLYVLLPPPRPTRKRSLSSDKRLAAIQQVLNAQKISFLLRGGVRVLVALRDTGTGAEQLGGGGGYWAVVVLFVIGLFAAGAFILYKFKRKRPGRTVYAQMHNEKEQEMTSPVSHSEDVQGAVQGNHSGVVLSINSREMHSYLVS

SEQ ID NO: 793065 - protein, 110 aa, Homo sapiens
YTHLNPSSMFTPTPRHAQLNTHTFTDIQSPIHIHTDIHGQPPNTDISHTFTHTQSHMYTHTLAPTPHTFTLTLRHTQLTYTHTHRHTVSHTHIDTDIHGHTTHKHTYTRG

SEQ ID NO: 793066 - protein, 373 aa, Homo sapiens
MLHSITVKSPLCPLPQKSFSLVSKLGKRRSLLLPVQFVLGQQLEVLGAQRVQLQLQLPHTRVVATQPLALQPQPVVLVLHAREALLQFQVLLDELLLAHVLQALRVVPLVRLREVPLQKLAAVPSHPIAAPILLTPFFHEVVIAGVVGFGGGPLGVQAGFEIRLLLVVIIHEELRGVIGRDRLALGEHLGSDPCSSKALFLVELFLLFPGQLVVRFPMPLLLGRASPMFFLPQLSLLLSPLLFAPCGRSPQLTGLGVMTRLGEQLGLGRRFHFCRRREVAASGRVVPILALLALSQAARFWTGLGLQGRWLGFQAPFPLRPRTATQLGERSRLPPTVLLGHPLLRAWGALRVQLFLDSSSTCTVASLRLVLIF

SEQ ID NO: 793067 - protein, 373 aa, Homo sapiens
MLHSITVKSPLCPLPQKSFSLVSKLGKRRSLLLPVQFVLGQQLEVLGAQRVQLQLQLPHTRVVATQPLALQPQPVVLVLHAREALLQFQVLLDELLLAHVLQALRVVPLVRLREVPLQKLAAVPSHPIAAPILLTPFFHEVVIAGVVGFGGGPLGVQAGFEIRLLLVVIIHEELRGVIGRDRLALGEHLGSDPGSSKALFLVELFLLFPGQLVVRFPMPLLLGRASPMFFLPQLSLLLSPLLFAPCGRSPQLTGLGVMTRLGEQLGLGRRFHFCRRREVAASGRVVPILALLALSQAARFWTGLGLQGRWLGFQAPFPLRPRTATQLGERSRLPPTVLLGHPLLRAWGALRVQLFLDSSSTCTVASLRLVLIF

SEQ ID NO: 793068 - protein, 110 aa, Homo sapiens
AFWLGLSHLFQGNQIHFTAAVSGDGCNRLVKAQELGGERESSTLSHWITGYGRDLLAVVLDLFCTMDPFQKLMRANSLPQRAVCIPTVLQMEEGMDCRFSPCQLQSHLTK

SEQ ID NO: 793069 - protein, 84 aa, Homo sapiens
WKVKIANSEVAGSSFTYISFLFSVLWAAMLTASVAKAPWVEMVMRRSTASSWMTGSGYVLDTFSNRGNNCFRTAKSLDFNYKMK

SEQ ID NO: 793070 - protein, 182 aa, Homo sapiens
MEQGKGLAVLILAIILLQGTLAQSIKGNHLVKVYDYQEDGSVLLTCDAEAKNITWFKDGKMIGFLTEDKKKWNLGSNAKDPRGMYQCKGSQNKSKPLQVYYRMCQNCIELNAATISGFLFAEIVSIFVLAVGVYFIAGQDGVRQSRASDKQTLLPNDQLYQPLKDREDDQYSHLQGNQLRRN

SEQ ID NO: 793071 - protein, 186 aa, Homo sapiens
MEQGKGLAVLILAIILLQGTLAQSIKGNHLVKVYDYQEDGSVLLTCDAEAKNITWFKDGKMIGFLTEDKKKWNLGSNAKDPRGMYQCKGSQNKSKPLQVYYRMCQNCIELNAATISGFLFAEIVSIFVLAVGVYFIAGQDGVRQSRGKRMLLDERWDHLRPSAFLLPLCTQWKRLSWCFLLVCIVG

SEQ ID NO: 793072 - protein, 135 aa, Homo sapiens
DVQVEVAEKVQKSSSPREMQKAEEKEVPEDSLEECAITCSNSHGPYDSNQPHRKTKITFEEDKVDSTLIGSSSHVEWEDAVHIIPENESDDEEEEEKGPVSPRNLQESEEEEVPQESWDEGYSTLSIPPERLASY

SEQ ID NO: 793073 - protein, 71 aa, Homo sapiens
GGPRAERAAGIASSEGTQAMEEMWLCFCSLQKRVLEEGQQLPRVLGRQQKRVDISRARAMMKGHEIRHFGD

SEQ ID NO: 793074 - protein, 70 aa, Homo sapiens
GGGGPEGFASSLLRPAGEKVRFGSSAGGQEAQVVRDAGPGASVSVLRAQSLQASSRPRAQHSLSYGPEAL

SEQ ID NO: 793075 - protein, 56 aa, Homo sapiens
MTELVAELEPLKLLQANFLEQPKKVRAPPFRHIQLEFWNKAHERDSTHRGPLDRRR

SEQ ID NO: 793076 - protein, 71 aa, Homo sapiens
MTFGSSETAEDGQSHAEVSRTVLKIRLTKRQRRRLVDNQMCKIGKSRCNQFTYQERVITITKGKISPSQMV

SEQ ID NO: 793077 - protein, 127 aa, Homo sapiens
YLKGVMEPIIGTAGRLLYILIVHQSPELHLADVLPLPHLFERAFDDYMDSCLFYFLRWSFALVCQAGMQWCYIGLLQPPPPGFKPFSSLSLPLAGITGTRHHAQLIFVFLVETGFPHVGQAGLKLLT

SEQ ID NO: 793078 - protein, 82 aa, Homo sapiens
RAVLWQICERTAYEEREATSHTSQLRSPETALQAHKPLSQAICQEPHEEHSTAPASEAHGFAYHMSCFLLIRGSQAQCDPTS

SEQ ID NO: 793079 - protein, 81 aa, Homo sapiens
MPAIFAKCCIQEILSECVSLLLFLGSYVRLFTLGICPELKSLSPFPQGETKIEFSYLSCLILFREKILHLLNFILGLKLFF

SEQ ID NO: 793080 - protein, 210 aa, Homo sapiens
NRFTTLTKHKRIHAGEKPITCEECRKIFTSSSNFAKHKRIHTGEKPYKCEECGKAFNRSTTLTKHKRIHTGEKPYTCEECGKAFRQSSKLNEHKKVHTGERPYKCDECGKAFGRSRVLNEHKKIHTGEKPYKCEECGKAFRRSTDRSQHKKIHSADKPYKCKECDKAFKQFSLLSQHKKIHTVDKPYKCKDCDKAFKRFSHLNKHKKIHT

SEQ ID NO: 793081 - protein, 126 aa, Homo sapiens
MRKCRIRQSTMRKSAKLPPKNYLPQQLQSRNANKPVSLGVGHTQLWTTHNIFSLYFASESVYCNDFSFACFICLKLSSLKAELKINVCYQKGVAVPGHVGICPTLSVQRVSSLFLFKKFIMMIYKN

SEQ ID NO: 793082 - protein, 110 aa, Homo sapiens
LTWEAGDKSGISRFLSALLLAVCPSPLDPNQQDLHHLELGKKADFYHLKLGVGPAACLSAVLMHAGVWRAPALSPPCPFTQPCAFIPPPVALGSGHCAVGVHLAHSLFFF

SEQ ID NO: 793083 - protein, 68 aa, Homo sapiens
GKVTTRAACLVNYPENKNIQRLLGLGPPPINYGQAVEQSPGETGCWRVPPPNPTSDQEASGSGKGLPG

SEQ ID NO: 793084 - protein, 112 aa, Homo sapiens
FWAVLGAGIVPYPLLHSFPKSSHLRPSLGEKIPVPRHLCTLLYDWACFRNILQRRRRRRRNGLESCLHLVLLIRSHLERLFITPSITLCLEALVALTDRLMSRKYCSMSNGT

SEQ ID NO: 793085 - protein, 68 aa, Homo sapiens
RNTLTQLHPSVINAVAEESEGLQEPRRNTRPSPVLPPAHSPPAAVNSTMAVAHTCSSSTLRGQGARIA

SEQ ID NO: 793086 - protein, 79 aa, Homo sapiens
PSSATARASRSCSSISEQFTDMFQHKAFLHWYMGKGMDEMEFTEAESNMNDLVSEYQQYQDATAEEEGEFEEEAEEEVA

SEQ ID NO: 793087 - protein, 148 aa, Homo sapiens
MTQKGSMKPVKKKKTEEPELEPLCCCEYIDRNGEKNHVATCLCDCQDLDEGCDRWITCKSLQPETCERIMDTISDRLRIPWLRGAKKVNISIIPPLVLLPVFLHVASWHFLLGVVVLTSLPVLALWYYYLTHRRKEQTLFFLSLGLFS

SEQ ID NO: 793088 - protein, 148 aa, Homo sapiens; identical to SEQ ID NO: 793087

SEQ ID NO: 793089 - protein, 119 aa, Homo sapiens
GRGTRKRAWTWRTEAGRAEGRLGRRGEAGAPPGPRRAVVTGGRLRRGSGRAEPGSRRLLPSRPGLRVAEIGRRVCASGEADPSPLRLFGCSCTSGQRAGANHDTEGQYEACEEKENRRT

SEQ ID NO: 793090 - protein, 128 aa, Homo sapiens
VCLLSGSLSPQPAMEEQPQMQDADEPADSGGEGRAGGPPQVAGAQAACSEDRMTLLLRLRAQTKQQLLEYKSMVDASEEKTPEQIMQEKQIEAKIEDLENEIEEVKVAFEIKKLALDRMRLSTALQPG

SEQ ID NO: 793091 - protein, 311 aa, Homo sapiens
VCLLSGSLSPQPAMEEQPQMQDADEPADSGGEGRAGGPPQVAGAQAACSEDRMTLLLRLRAQTKQQLLEYKSMVDASEEKTPEQIMQEKQIEAKIEDLENEIEEVKVAFEIKKLALDRMRLSTALKKNLEKISRQSSVLMDNMKHLLELNKLIMKSQQESWDLEEKLLDIRKKRLQLKQASESKLLEIQTEQEQTERLIGTVWKTQERHTKIHTTKAYRMEIQNYYLLFTHVFPEPYFRGSNSPIGAEDPALKEHWFCKFEKNVDLIVYKIPFLTYFTFSGNLNSYLEYFCALSVHRNFESYHNGYRVVQW

SEQ ID NO: 793092 - protein, 93 aa, Homo sapiens
VCLLSGSLSPQPAMEEQPQMQDADEPADSGGEGRAGGPPQVAGAQAACSEDRMTLLLRLRAQTKQQLLEYKSMVDASEEKTPEQIMQEKQIEA

SEQ ID NO: 793093 - protein, 135 aa, Homo sapiens [sequence omitted]

SEQ ID NO: 793094 - protein, 98 aa, Homo sapiens
FLAVTTYPQENMPLAKDLLHPSPEEEKKKHKKKRLVQSPNSYFMGVKCPGYYKSPRSLAMHKGSFVCWLLHCPLPAYRRKSKAYRRMFLQEEAALKAL

SEQ ID NO: 793095 - protein, 167 aa, Homo sapiens
QDSAVVLSLIDTIDTVMGHVSSNLHGSTPQVTVEGSSAMAEFSVAKILPKTVNSSHYRFPAHGQSFIQIPHEAFHRHAWSTVVGLLYHSMHYYLNNIWPAHTKIAEAMHHQDCLLFATSHLISLEVSPPPTLSQNLSGSPLITVHLKHRLVSGGAFTLVAAFDLVSH

SEQ ID NO: 793096 - protein, 127 aa, Homo sapiens
HCERSPDFWFLCRCFFCVLTLVLVGRVAEWGHTISGAFHLAILLHTIPLSSYLQLLQRHFIACPIGFSWLRRAHKALSDLASPDLLRVISHHLSSALAIIPNDPLFLSGGTFPLIQGPEHMLCFTWL

SEQ ID NO: 793097 - protein, 105 aa, Homo sapiens
MLSPKWLSDLPKLYNALLNSDVFISCARLLKKIKINKKRKYISKKRKTRKRKKRSTFVFVQSVGSQENVPSLFVGMGTVGSGAFRSTLSFIWTVSLTSMNNYFSP

SEQ ID NO: 793098 - protein, 172 aa, Homo sapiens
IYRVKVKGWKKIFHTDGNQKQIGVAILISDKTDIKSTIVKKRQRRSLYYHKRINCRRKMSFLNIYASNTTAPRFIKQIQLDLRKEKDSNAIIVGDFSTLLTALDRSLRQKINKETLGLNWTLDQMDLTDIYRTFYHTPVEYSFFSSAHGTFLNDHMQGHKASLKKILKIEIM

SEQ ID NO: 793099 - protein, 120 aa, Homo sapiens
MGKPWLLTGLQVVFSILHLHVLCISDSLDWMHGHAGTEKSHSTVYSPFSNKVTPFPSHRLPPSPQPTYDIHSSPVLPSHPQKLGPLLICQKGNCLKKKKIPNRNRWESCPEMSEHLTVDT

SEQ ID NO: 793100 - protein, 73 aa, Homo sapiens
QPRQRQNRSGSGGGGSTSSGSERNASAARGPPRSFPAPALLCRSLLSRHPPPSPPPAHSLFPSLSPPPRLLPD

SEQ ID NO: 793101 - protein, 136 aa, Homo sapiens
QPRQRQNRSGSGGGGSTSSGSERNASAARGPPRSFPAPALLCRSLLSRHPPPSPPPAHSLFPSLSPPPRLLPDSPTALALSHSLCLSSPVPSSRSFTRPSPFSTLFIDYMLLSHPTFRRRRYSQAPCRLVGGDPQS

SEQ ID NO: 793102 - protein, 79 aa, Homo sapiens
GSGGATEETQGSKERGHHSRGSIQRPEWGPALPPTLASHPLPNPNSSSPASRALSSISNNNDTYRIAWTYPTSSDPVSA

SEQ ID NO: 793103 - protein, 348 aa, Homo sapiens
MPRSFLVKKVKLDAFSSADLESAYGRARSDLGAPLHDKGYLSDYVGPSSVYDGDAEAALLKGPSPEPMYAAAVRGELGPAAAGSAPPPTPRPELATAAGGYINGDAAVSEGYAADAFFITDGRSRRKASNAGSAAAPSTASAAAPDGDAGGGGGAGGRSLGSGPGGRGGTRAGAGTEARAGPGAAGAGGRHACGECGKTYATSSNLSRHKQTHRSLDSQLARRCPTCGKVYVSMPAMAMHLLTHDLRHKCGVCGKAFSRPWLLQGHMRSHTGEKPFGCAHCGKAFADRSNLRAHMQTHSAFKHFQCKRCKKSFALKSYLNKHYESACFKGGAGGPAAPAPPQLSPVQA

SEQ ID NO: 793104 - protein, 83 aa, Homo sapiens
VPDKAKGDWEPGVDLLPQKQEGSPTLPLKHSPLSKYKQASASTASLTREQRGRVLTILPGSFVDPQCYHLKSVKPSREPFTFH

SEQ ID NO: 793105 - protein, 1142 aa, Homo sapiens
MLVLRCRLGTSFPKLDNLVPKGKMKILLVFLGLLGNSVAMPMHMPRMPGFSSKSEEMMRYNQFNFMNGPHMAHLGPFFGNGLPQQFPQYQMPMWPQPPPNTWHPRKSSAPKRHNKTDQTQETQKPNQTQSKKPPQKRPLKQPSHNQPQPEEEAQPPQAFPPFGNGLFPYQQPPWQIPQRLPPPGYGRPPISNEEGGNPYFGYFGYHGFGGRPPYYSEEMFEQDFEKPKEEDPPKAESPGTEPTANSTVTETNSTQPNPKGSQGGNDTSPTGNSTPGLNTGNNPSARNGIGPLPAVNASGQGGPGSQIPWRPSQPNIRENHPYPNIRNFPSGRQWYFTGTVMGHRQNRPFYRNQQVQRGPRWNFFAWERKQVARPGNPVYHKAYPPTSRGNYPNYAGNPANLRRKPQGPNKHPVGTTVAPLGPKPGPVVRNEKIQNPKEKPLGPKEQIIVPTKNPTSPWRNSQQYEVNKSNYKLPHSEGYMPVPNFNSVDQHENSYYPRGDSRKVPNSDGQTQSQNLPKGIVLGSRRMPYESETNQSELKHSSYQPAVYPEEIPSPAKEHFPAGRNTWDHQEISPPFKEDPGRQEEHLPHPSHGSRGSVFYPEYNPYDPRENSPYLRGNTWDERDDSPNTMGQKESPLYPINTPDQKEIVPYNEEDPVDPTGDEVFPGQNRWGEELSFKGGPTVRHYEGEQYTSNQPKEYLPYSLDNPSKPREDFYYSEFYPWSPDENFPSYNTASTMPPPIESRGYYVNNAAGPEESTLFPSRNSWDHRIQAQGQRERRPYFNRNIWDQATHLQKAPARPPDQKGNQPYYSNTPAGLQKNPIWHEGENLNYGMQITRMNSPEREHSSFPNFIPPSYPSGQKEAHLFHLSQRGSCCAGSSTGPKDNPLALQDYTPSYGLAPGENQDTSPLYTDGSHTKQTRDIISPTSILPGQRNSSEKRESQNPFRDGVSTLRRNTPCSIKNQLGQKEIMPFPEASSLQSKNTPCLKNDLGGDGNNILEQVFEDNQLNERTVDLTPEQLVIGTPDEGSNPEGIQSQVQENESERQQQRPSNILHLPCFGSKLAKHHSSTTGTPSSDGRQSPFDGDSITPTENPNTLVELATEEQFKSINVDPLDADEHSPFEFLQRGTNVQDQVQDCLLLQA

SEQ ID NO: 793106 - protein, 45 aa, Homo sapiens
MACAVKVGRADLASYLSLLKFPKKPVVDSGSQEVWACWNLLNLQL

SEQ ID NO: 793107 - protein, 110 aa, Homo sapiens
SCSHQPWLQPDPPRPLQKLQLSDHSPCRRKISLTKKAWSTQASMALGDRPGQHRSPAQRGEHSAGYRHRPLCNVRGGSLREPLVREMEEENLPAFGPSLAANEKPDSVTH

SEQ ID NO: 793108 - protein, 109 aa, Homo sapiens
SSEQDSMGMGCAKPGMGGYLLVYRLLRPWEKSSIWSGVYRFSRYSLSWPPLARKEKSPNPLCFPGEATPCPASSCPPWAAPTVQAVPMRRTRYLSWKCRNHPSSVPILL

SEQ ID NO: 793109 - protein, 121 aa, Homo sapiens
SELVSCWEGSPQIGVISAPPVDRVSLPTGTCDPAVSSTSFQLLKPEAALRTHSQGPFTNLRQRLETGRGCNSQGRGPGLLPPWRSGLEPQVTLGLPGVRRAPWCVCFFGSPTFLSSAILQF

SEQ ID NO: 793110 - protein, 150 aa, Homo sapiens
CPSPSRRTAFLLPCSFRQLKSHGSLPLAQIGSRAGPSGSHWLEGGDAMIGQAWSRVLSQPGARSALSEEPGLRRGGCYPSRCRGSRGSHLLLRGTSSTALGWGGRAEVVSKPPYSTGRETEAQRQTVPTQSPSRVISAHLPKGWMGSVSG

SEQ ID NO: 793111 - protein, 131 aa, Homo sapiens
QRSALSRPWCPSGVTGPFHPRLLLSKLPSAQPARSLDHGSTPCLEPPAGPPTHTQPQAPECGSQTPEGAPLPDPVSSPAPSYTSVIPTTETTSHSTPSFTSSITTTETTSHSTPSFTSSITTTETTSHSTP

SEQ ID NO: 793112 - protein, 121 aa, Homo sapiens
QRSALSRPWCPSGVTGPFHPRLLLSKLPSAQPARSLDHGSTPCLEPPAGPPTHTQPQAPECGSQTPEGAPLPDPVSSPAPSPPPASFSAHELAPRSERPPPSSGCPLCACPSGNSCLPCKT

SEQ ID NO: 793113 - protein, 110 aa, Homo sapiens [sequence omitted]

SEQ ID NO: 793114 - protein, 180 aa, Homo sapiens
TLKNLLSCVYSCPSYIAKDLMKVLQGVNGEMVLSQLLPMAEQLLEKIQKEPTAVLKDEAMVLHLTLGKYNEFSVSLLNEDPKSLDIFIKAVHTTKELYAGMPTIQITALEKITKPFFAAISDEKVQQKLLRMLFDLLVNCKNSHCAQTVSSVFKGISVNAEQVRIELEPPDKAKPLGTVQ

SEQ ID NO: 793115 - protein, 91 aa, Homo sapiens
REKDTVSTEHVHVAASGQPGCSSTPRVVGDKPSWGWMWMGLKTNQRMLLCRQWRATDDNVENLKKNGDRESKERSRCGGVHNSHVKNQLQL

SEQ ID NO: 793116 - protein, 857 aa, Homo sapiens
QGVSRVPESAGGGAGGRALGRVTGRSPPSTVEAGAPARCSRCARATPRSKPRVALPGPFFPRVGAASQPPPRPRLALPSGSFGLSLAVRQALASSHQARRGARPWVSGQAASVRAAPALRTRLFIGLRISWLLLASAALLEAALRNLNMDQKLSKLVEELTTSGEPRLNPEKMKELKKICKSSEEQLSRAYRLLIAQLTQEHAEIRLSAFQIVEELFVRSHQFRMLVVSNFQEFLELTLGTDPAQPLPPPREAAQRLRQATTRAVEGWNEKFGEAYKKLALGYHFLRHNKKVDFQDTNARSLAERKREEEKQKHLDKIYQERASQAEREMQEMSGEIESCLTEVESCFRLLVPFDFDPNPETESLGMASGMSDALRSSCAGQVGPCRSGTPEPRDGEQTCCSRDLPASAGHPRAGGGAQPSQTATGDPSDEDEDSDLEEFVRSHGLGSHKYTLDVELCSEGLKVQENEDNLALIHAARDTLKLIRNKFLPAVCSWIQRFTRVATHGGCLKRAIDLKAELELVLRKYKELDIEPEGGERRRTEALGDAEEDEDDEDFVEVPEKEGYEPHIPDHLRPEYGLEAAPEKDTVVRCLRTRTRMDEEVSDPTSAAAQLRQLRDHLPPPSSASPSRALPEPQEAQKLAAERARAPVVPYGVDLHYWGQELPTAGKIVKSDSQHRFWKPSEVEEEVVNADISEMLRSRHITFAGKFEPVQHWCRAPRPDGRLCERQDRLKCPFHGKIVPRDDEGRPLDPEDRAREQRRQLQKQERLEWQDPELMRDVEAATGQDLGSSRYSGKGRGKKRRYPSLTNLKAQADTARARIGRKVFAKAAVRRVVAAMNRMDQKKHEKFSNQFNYALN

SEQ ID NO: 793117 - protein, 113 aa, Homo sapiens
QGVSRVPESAGGGAGGRALGRVTGRSPPSTVEAGAPARCSRCARATPRSKPRVALPGPFFPRVGRSFPASAPASPGASFRVLRPFPGGAAGPRLIPPGTPRCSALGIRAGCLR

SEQ ID NO: 793118 - protein, 342 aa, Homo sapiens
  misc_feature (313)..(313): Xaa can be any naturally occurring amino acid
QGVSRVPESAGGGAGGRALGRVTGRSPPSTVEAGAPARCSRCARATPRSKPRVALPGPFFPRVGAASQPPPRPRLALPSGSFGLSLAVRQALASSHQARRGARPWVSGQAASVRAAPALRTRLFIGLRISWLLLASAALLEAALRNLNMDQKLSKLVEELTTSGEPRLNPEKMKELKKICKSSEEQLSRAYRLLIDPNCSGHSPRTARHAPAVRKFSPDLKLLKDVKISVSFTESCRSKDRKVLYTGAERDVRAECGLLLSPVSGDVHACPFGGSVGDGVGIGGESADKKDEENELDQEKRVEYAVLDELEDXTDNLELDEEGAGGFTAKAIVQRDRVDEDA

SEQ ID NO: 793119 - protein, 130 aa, Homo sapiens
APVRSPGLCGRRAETCGQGVSRVPESAGGGAGGRALGRVTGRSPPSTVEAGAPARCSRCARATPRSKPRVALPGPFFPRVGRSFPASAPASPGASFRVLRPFPGGAAGPRLIPPGTPRCSALGIRAGCLR

SEQ ID NO: 793120 - protein, 92 aa, Homo sapiens
KAKRATALVCPNLWEWDAPSTRMACIFTMTFSSGDRQPHHLNRLPLSPKNPQALGKTIPPKHPSVPRRFIPALQAPPNHLDQPPHQRATSSK

SEQ ID NO: 793121 - protein, 105 aa, Homo sapiens
MGARSQPRTAGAVAGGGSGGNSCVSELSGHCHPVMPSDGFKQQRSTKEAGGRGGLPVRAPPWERAGCESLGSSHSPHPMRKLRPALSPSPVPFPGACVRAATGHL

SEQ ID NO: 793122 - protein, 66 aa, Homo sapiens
VKGIKGRLNRLPAAGVGDMGMATVKKGKLELRKKCSGTLVKGTPLENTEGGMSGGSASPWLPTMNA

SEQ ID NO: 793123 - protein, 77 aa, Homo sapiens
RFDYAARSDYAARSDYAARSDYAARSDYAARSDYAARSDLRDSIMFQSHWFYLLLYCSSDLFQVIIKIPTKLQVSKF

SEQ ID NO: 793124 - protein, 102 aa, Homo sapiens
GPLELCGSPSSCSVHRSSCSPQLPSALQPHSQPLADLLTMTSKHPESSRLSPPSLPLFPKGCCPWVCLLEPPRRREDFKDRKRARHQTSSRPCFPRLSNLKK

SEQ ID NO: 793125 - protein, 75 aa, Homo sapiens
HESASNDCRLILSNHSVILETITVLLIEFCLLKIVRDCIYPVRDCRITVFFGTERNVSFCKASLSNDMAVLNVLL

SEQ ID NO: 793126 - protein, 107 aa, Homo sapiens
NHSSLQPHTTGFKKFSQLITLPNSWKNRHVPPHQFFNSNYLTSPRKQTSPNMYICYSHPLLCKLHLPCHDSAPPVRHYSSYSLHNYLLSIYLVPGNPLGTEAITDNK

SEQ ID NO: 793127 - protein, 120 aa, Homo sapiens
HHFHRGTTSPGMHPYRIYPAAFPELSHLPQVPKPTFTILGPVLGFLLWKAIPSFASSTLRMSSSLHSLWFVPLVSEEEVLIILSGSECSTCPYVLSYPTSSLTLFHQFLSFSPCCVFPST

SEQ ID NO: 793128 - protein, 165 aa, Homo sapiens
TPVTPLQAPTTLMVTEGDSQHPSVPVRALVLTAPWSMPHAPTLGLAPGPDGTWPLESAGGPQSWWSHSLPSWVSTSCLDRTLWPVRALASPAAAPPILIPHPIPCQHPKAPGGHPLCSKLLTCLPATPAVPSQPGHHHPLFIMSGLMGAWPSPEAGPGVLPSWTT

SEQ ID NO: 793129 - protein, 165 aa, Homo sapiens; identical to SEQ ID NO: 793128

SEQ ID NO: 793130 - protein, 167 aa, Homo sapiens
TPVTPLQAPTTLMVTEGDSQHPSVPVRALVLTAPWSMPHAPTLGLAPGPDGTWPLESAGGPQSWWSHSLPSWVSTSCLDRTLWPVRALASPAAAPPILIPHPIPCQHPKAPGGHPLCSKLLTCLPATPAVPSQPGHHHPLFIMSGLMGAWPSPEAGPGVLPSWTTAE

SEQ ID NO: 793131 - protein, 310 aa, Homo sapiens
ALVGPAGPGPPRAESQEGVREGEGWRGAWPGRGEVCKRLTPMSQQVRHVSTLLPALLGALGEGDARLVGAALGALRRLLLRPRAPVRLLSAELGPRLPPLLDDTRDSIRASAVGLLGTLVRRGRGGLRLGLRGPLRKLVLQSLVPLLLRLHDPSRDAAEVQRYPGHVPNFLSQTQGYLRSPQDPLRRAATVLIGFLVHHASPGCVNQDLLDSLFQDLGRLQSDPKPAVAAAAHVSAQQVAMLARARGCRRGPAFSASPRAPPGPHQSSPTAPSSAGASRAAGAAPDPAEPEARAGAEGQGPTRAPHAHSS

SEQ ID NO: 793132 - protein, 282 aa, Homo sapiens
DHTESAAFPRPAASSLRAGRPLPPLQPLSVSACPDCALPTQTRDSIRASAVGLLGTLVRRGRGGLRLGLRGPLRKLVLQSLVPLLLRLHDPSRDAAEVQRYPGHVPNFLSQTQGYLRSPQDPLRRAATVLIGEAARGHTAPGTGALGAGPASPWGAVGPALMHLLWSRLPCPPRQPRLCQPGPAGLPVPGPRAAAERPQAGRGRGSARVRSAGGDAGPCPGLPPRPRLLRIAPRPARPPPVFADSPFQRRSVAGRWGCSGPRRARGSGWGRGPGSDSGTPRA

SEQ ID NO: 793133 - protein, 215 aa, Homo sapiens
ALVGPAGPGPPRAESQEGVREGEGWRGAWPGRGEVCKRLTPMSQQVRHVSTLLPALLGALGEGDARLVGAALGALRRLLLRPRAPVRLLSAELGPRLPPLLDDTRDSIRASAVGLLGTLVRRGRGGLRLGLRGPLRKLVLQSLVPLLLRLHDPSRDAAEVQRYPGHVPNFLSQTQGYLRSPQDPLRRAATVLIGLNEERATGHMRKRLPWELLML

SEQ ID NO: 793134 - protein, 222 aa, Homo sapiens
ALVGPAGPGPPRAESQEGVREGEGWRGAWPGRGEVCKRLTPMSQQVRHVSTLLPALLGALGEGDARLVGAALGALRRLLLRPRAPVRLLSAELGPRLPPLLDDTRDSIRASAVGLLGTLVRRGRGGLRLGLRGPLRKLVLQSLVPLLLRLHDPSRDAAEVSSPHTIPPLCHPTLTTPTVPPLRQLQSSEWTLARCDHAFCWGLLEELVTVAHYDSPEALSHL

SEQ ID NO: 793135 - protein, 118 aa, Homo sapiens
KEQVRELALVGFGGTQSTRPGLGLGGNETCGGSGLKMWQRPEPGERLNPFGQGEGERGKGLVLLFKQEEDYKPPSTICQALEFEPPSSGVTQMQRKPGLLLTFLRGGKSINGDPHMYK

SEQ ID NO: 793136 - protein, 362 aa, Homo sapiens
MDLHMMNCELLATCSALGYLEGDTYHKEPDCLESVKDLIRYLRHEDETRDVRQQLGAAQILQSDLLPILTQHHQDKPLFDAVIRLMVNLTQPALLCFGNLPKEPSFRHHFLQVLTYLQAYKEAFASEKAFGVLSETLYELLQLGWEERQEEDNLLIERILLLVRNILHVPADLDQEKKIDDDASAHDQLLWAIHLSGLDDLLLFLASSSAEEQWSLHVLEIVSLMFRDQNPEQLAGVGQGRLAQERSADFAELEVLRQREMAEKKTRALQRGNRHSRFGGSYIVQGLKSIGERDLIFHKGLHNLRNYSSDLGKQPKKVPKRRQAARELSIQRRSALNVRLFLRDFCSEFLENCYNRLMGSVK

SEQ ID NO: 793137 - protein, 109 aa, Homo sapiens
ESLKLFDSICNNKWFTDTSIILFLNKKDIFEEKIKKSPLTICFPEYTGPSAFTEAVAYIQAQYESKNKSAHKEIYTHVTCATDTNNIQFVFDAVTDVIIAKNLRGCGLY

SEQ ID NO: 793138 - protein, 157 aa, Homo sapiens
MVKTGTGQWRRSFCLWSVMRGTQGSFLLCGERGAQSRTEPRGCQGEAARPGPWNQPPKALEPACSMQLRLFQSVSYSVPFQQTPPCFALISLHFLLLLSGKILCALTDSRVFLLEVDFLVTVRYPNIGECKAFFFQLFILMNYIQEISRKLNSLKDY

SEQ ID NO: 793139 - protein, 80 aa, Homo sapiens
PLMPGACGAAAAPSVGPRACAHPELMLPASPMRSPVPTCASPSTPLCQPRELLRPRPTQRGAPTVQRLAKGLLKRGQSGR

SEQ ID NO: 793140 - protein, 315 aa, Homo sapiens
MHREPAKKKAEKRLFDASSFGKDLLAGGVAAAVSKTAVAPIERVKLLLQVQASSKQISPEARYKGMVDCLVRIPREQGFFSFWRGNLANVIRYFPTQALNFAFKDKYKQLFMSGVNKEKQFWRWFLANLASGGAAGATSLCVVYPLDFARTRLGVDIGKGPEERQFKGLGDCIMKIAKSDGIAGLYQGFGVSVQGIIVYRASYFGAYDTVKGLLPKPKKTPFLVSFFIAQVVTTCSGILSYPFDTVRRRMMMQSGEAKRQYKGTLDCFVKIYQHEGISSFFRGAFSNVLRGTGGALVLVLYDKIKEFFHIDIGGR

SEQ ID NO: 793141 - protein, 134 aa, Homo sapiens
MHREPAKKKAEKRLFDASSFGKDLLAGGVAAAVSKTAVAPIERVKLLLQVQASSKQISPEARYKGMVDCLVRIPREQGFFSFWRGNLANVIRYFPTQALNFAFKDKYKQLFMSGVNKEKQLQPDGVLSMENYLF

SEQ ID NO: 793142 - protein, 204 aa, Homo sapiens
MSGVNKEKQFWRWFLANLASGGAAGATSLCVVYPLDFARTRLGVDIGKGPEERQFKGLGDCIMKIAKSDGIAGLYQGFGVSVQGIIVYRASYFGAYDTVKGLLPKPKKTPFLVSFFIAQVVTTCSGILSYPFDTVRRRMMMQSGEAKRQYKGTLDCFVKIYQHEGISSFFRGAFSNVLRGTGGALVLVLYDKIKEFFHIDIGGR

SEQ ID NO: 793143 - protein, 66 aa, Homo sapiens
SLFFPDKNLNSKKRTGIILPNPTSHEPMQEAQNHLLSGHVAADSISEVLAAYDFTDEDGSHLSRDS

SEQ ID NO: 793144 - protein, 106 aa, Homo sapiens
QHFPIEVRHYLSQWIESQAWDSVDLDNPQENIKATQLLEGLVQELQKKAEHQVGEDGFLLKIKLGHYATQLQNTYDRCPMELVRCIRHILYNEQRLVREANNVSVP

SEQ ID NO: 793145 - protein, 232 aa, Homo sapiens
QHFPIEVRHYLSQWIESQAWDSVDLDNPQENIKATQLLEGLVQELQKKAEHQVGEDGFLLKIKLGHYATQLQNTYDRCPMELVRCIRHILYNEQRLVREANNGSSPAGSLADAMSQKHLQINQTFEELRLVTQDTENELKKLQQTQEYFIIQYQESLRIQAQFGPLAQLSPQERLSRETALQQKQVSLEAWLQREAQTLQQYRVELAEKHQKTLQLLRKQQTIILDDELIQW

SEQ ID NO: 793146 - protein, 79 aa, Homo sapiens
QSIEQTSINPQKTLSRRTLSLLETQKLRGAAGDHGVKKVGGLSTAVCTQPGTRVKTTGLVLKNPSLVKQPVGVCGRRKN

SEQ ID NO: 793147 - protein, 247 aa, Homo sapiens
GQVLVQLLWALKGASRPEPQALAATRALGEMLAVSGCVGATRGFYPHLLLALVTQLHKLARSPCSPDMPKIWVLSHRGPPHSHASCAVEALKALLTGDGGRMVVTCMEQAGGWRRLVGAHTHLEGVLLLARAVAEPPTARLLREEVILERLLTWQGDPEPTVRWLGLLGLGHLALNRRKVRHVSTLLPALLGALGEGDARLVGAALGALRRLLLRPRAPVRLLSAELGPRLPPLLDDTRDSIRASAV

SEQ ID NO: 793148 - protein, 111 aa, Homo sapiens
SYPCSPGGEPDRSKHVRPALKGQLQSVLSGALSLFFPTQPCAMLMLHEIPASSSFVTRAHDALSDDTSDPRRIHAVETNNSLFALMTCHLIDTSLDGWSTGIWATREFRLG

SEQ ID NO: 793149 - protein, 214 aa, Homo sapiens
RSACGAAAATDVHKGLERSVERVRGQAMNLGDGLKLETELLDGKTKLILSPYEHKSKISVKMGNKAKIAKCPLRTKTGHILKSTQDTCIGSEKLLQKKPVGSETSQAKGEKNGMTFSSTKDLCKQCIDKDCLHIQKEISPATPNMQKTRNTVNTSLVGKQKPHKKHITAENMKSSLVCLTQDQLQQILMTVNQGNRSLSLTENGKEAKSQYSLY

SEQ ID NO: 793150 - protein, 153 aa, Homo sapiens
MGNKAKIAKCPLRTKTGHILKSTQDTCIGSEKLLQKKPVGSETSQAKGEKNGMTFSSTKDLCKQCIDKDCLHIQKEISPATPNMQKTRNTVNTSLVGKQKPHKKHITAENMKSSLVCLTQDQLQQILMTVNQGNRSLSLTENGKEAKSQYSLY

SEQ ID NO: 793151 - protein, 153 aa, Homo sapiens; identical to SEQ ID NO: 793150

SEQ ID NO: 793152 - protein, 153 aa, Homo sapiens; identical to SEQ ID NO: 793150

SEQ ID NO: 793153 - protein, 153 aa, Homo sapiens; identical to SEQ ID NO: 793150

SEQ ID NO: 793154 - protein, 203 aa, Homo sapiens
LQDGMVPCRESELATCGRIIVLNQDIKYWNAKGVMWFDYIYYIVGSELRNMGNKAKIAKCPLRTKTGHILKSTQDTCIGSEKLLQKKPVGSETSQAKGEKNGMTFSSTKDLCKQCIDKDCLHIQKEISPATPNMQKTRNTVNTSLVGKQKPHKKHITAENMKSSLVCLTQDQLQQILMTVNQGNRSLSLTENGKEAKSQYSLY

SEQ ID NO: 793155 - protein, 153 aa, Homo sapiens; identical to SEQ ID NO: 793150

SEQ ID NO: 793156 - protein, 111 aa, Homo sapiens
YFLFLRRSLTLLPRLECSGAISTRRNLHLTDSSNSPASASRVAGITGARHHARLIFVFLVETGFHHFGQAGLKLLTSGEPPAFGLPKCWDYRHEPPPRPATKIFSLHKDTS

SEQ ID NO: 793157 - protein, 32 aa, Homo sapiens
KGTVRGTVYSERSTSAALSCVVSTRTVLVRLF

SEQ ID NO: 793158 - protein, 68 aa, Homo sapiens
DPRSRERLDTQWVGRGISGGSRSASYLGKTTGNCTVDYSKIDSVHLWGKWADEEVHLGKGKRSDSNWS

SEQ ID NO: 793159 - protein, 132 aa, Homo sapiens
KEGPVLKYQKRVALYIAAFCGYIELTEWALKQGARPHEAVGVHPYRAWCHEALHADVSKCPIHAAAEAGQLLILKAFVNYSVLCLECKNAAGQTPLTIVFKHKHKDCVLYLLSKMWSTVSFPKISVTNEDLY

SEQ ID NO: 793160 - protein, 101 aa, Homo sapiens
DLTRTFTAALFITIKPAGLFTIAKIWNQPNCPSVDEWIKKMWYIYTMEYYSALMRKEILSFVITWMNLEDRTQMFVNRIEFLNCGIFRLWTITQQLKSINY

SEQ ID NO: 793161 - protein, 107 aa, Homo sapiens
SQPPPHFAPPHFAPPSSRSPHPSPGLPSPAGTEMKAALPALSILMGRCQAHSQTLGNLGQGNEAAGQGRARPVLSLGECLTAPDQGHHLASLPPPSPIPLSCPPSRP

SEQ ID NO: 793162 - protein, 123 aa, Homo sapiens
NSIKEVHNLNTKNYKTSLEEIKHLNMWKDILCSSIRRINIVKTAIVPILVYRFNPIPIKILTAFFFFFFFCRNGKSDPKIHTELQEASDCQNYPIKELNWKTYTSQFQKLLQNCSNQDSMVLA

SEQ ID NO: 793163 - protein, 106 aa, Homo sapiens
VGGDGVQGGGSWAWGLVLEASGLEGLRQLRGRVVYQASVREVSPHLPVTGRGLKKQPSPKHLHPQTTQSSRPGTERALGFHQVSGTGGEAWGPLLQKGPRQITVSP

SEQ ID NO: 793164 - protein, 152 aa, Homo sapiens
KGKGEQRENRPKWLTKKLKKIYLQKMGKRKLRRVQPLMKQERKKPSLINNHIPCLISGPCLPSCTIQRNIFINYFVNASFLVALETFLRRRESHLIPFFKCKCFFLRGEIICWLFIFWYNQKIVWDIELWEALTVSGVSLTFHRWGVSFYIL

SEQ ID NO: 793165 - protein, 152 aa, Homo sapiens; identical to SEQ ID NO: 793164

SEQ ID NO: 793166 - protein, 152 aa, Homo sapiens; identical to SEQ ID NO: 793164

SEQ ID NO: 793167 - protein, 38 aa, Homo sapiens
MVFAISPEGLNSPSIFCHREQGGLTVLQMRRPSVHLAS

SEQ ID NO: 793168 - protein, 241 aa, Homo sapiens
MQDPNEDTEWNDILRDFGILPPKEESKDEIEEMVLRLQKEAMVKPFEKMTLAQLKEAEDEFDEEDMQAVETYRKKRLQEWKALKKKQKFGELREISGNQYVNEVTNAEEDVWVIIHLYRSSIPMCLLVNQHLSLLARKFPETKFVKAIVNSCIQHYHDNCLPTIFVYKNGQIEAKFIGIIECGGINLKLEELEWKLAEVGAIQTDLEENPRKDMVDMMVSSIRNTSIHDDSDSSNSDNDTK

SEQ ID NO: 793169 - protein, 122 aa, Homo sapiens
MQDPNEDTEWNDILRDFGILPPKEESKDEIEEMVLRLQKEAMVKPFEKMTLAQLKEAEDEFDEEDMQAVETYRKKRLQEWKALKKKQKFGELREISGNQYVNEVTNAEEDVWVIIHLYRSRT

SEQ ID NO: 793170 - protein, 70 aa, Homo sapiens
NLVLWVPESQGVSGSQPYPGPLKREFLRPHDITRNTGRSCISFLLFYFLSRIALCQNALTFVEHVMNSDE

SEQ ID NO: 793171 - protein, 90 aa, Homo sapiens
IGEKRITLGRDRTGFLPGQGSKSSALKVPSAAKLLIICLPAFEGSGVDCDDCKNPESGMLVPELPPASFPFPAFPRQHPGENLRTLSTTV

SEQ ID NO: 793172 - protein, 271 aa, Homo sapiens
MLLAPPSTPSRGRTPSAVERLEADKAKYVKTHQVIARRQEPALRGSPGPLTPHPCNELGPPASPRTPRPVRRGSGRRLPRPDSLIFYRQKRDCKASVNKENAKGQGLVRRLFLGAPRDAAPSSPASTERPAASGGWAAPQDAPEAAGKRALCPTCSLPLSEKERFFNYCGLERALVEVLGAERFSPQSWGADASPQAGTSPPPGSGDASDWTSSDRGVDSPGGAGGGGGSEAAGSARDRRPPVSVVERNARVIQWLYGCQRARGPPRESEV

SEQ ID NO: 793173 - protein, 123 aa, Homo sapiens
TLRSPGTLGLVSAQEPSASQNVEITGVSHHAPLTFFSSVHYSRGELRVVLHMCTALSFMDLLGWLHPPSVSPSCSSSTWLVPVGHFWKFMPVQSTLSTSSFCVTELTMLGFIYVSLATRSFTS

SEQ ID NO: 793174 - protein, 468 aa, Homo sapiens
KKIRGKEVYMTMAYGKGDPLLPPRLQHSMHYGHDPPMHYSQTAGNVMSNEHFHPQHPSPRQGRGYGMPRNSSRFINRHNMPGPKVDFYPGPGKRCCQSYDNFSYRSRSFRRSHRQMSCVNKESQYGFTPGNGQMPRGLEETITFYEVEEGDETAYPTLPNHGGPSTMVPATSGYCVGRRGHSSGKQTLNLEEGNGQSENGRYHEEYLYRAEPDYETSGVYSTTASTANLSLQDRKSCSMSPQDTVTSYNYPQKMMGNIAAVAASCANNVPAPVLSNGAAANQAISTTSVSSQNAIQPLFVSPPTHGRPDTKVLQYYFNLGLQCYYHSYWHSMVYVPQMQQQLHVENYPVYTEPPLVDQTVPQCYSEVRREDGIQAEASANDTFPNADSSSVPHGAVYYPVMSDPYGQPPLPGFDSCLPVVPDYSCVPPWHPVGTAYGGSSQIHGAINPGPIGCIAPSPPASHYVPQGM

SEQ ID NO: 793175 - protein, 211 aa, Homo sapiens
MLVPLYHHHHHHHHHHHHHHLLLLLLLLLLLLLLLMWERLQTYNHHHHYHLHLIPVIQAAVICLKCYYHSYWHSMVYVPQMQQQLHVENYPVYTEPPLVDQTVPQCYSEVRREDGIQAEASANDTFPNADSSSVPHGAVYYPVMSDPYGQPPLPGFDSCLPVVPDYSCVPPWHPVGTAYGGSSQIHGAINPGPIGCIAPSPPASHYVPQGM

SEQ ID NO: 793176 - protein, 539 aa, Homo sapiens
KKIRGKEVYMTMAYGKGDPLLPPRLQHSMHYGHDPPMHYSQTAGNVMSNEHFHPQHPSPRQGRGYGMPRNSSRFINRHNMPGPKVDFYPGPGKRCCQSYDNFSYRSRSFRRSHRQMSCVNKESQYGFTPGNGQMPRGLEETITFYEVEEGDETAYPTLPNHGGPSTMVPATSGYCVGRRGHSSGKQTLNLEEGNGQSENGRYHEEYLYRAEPDYETSGVYSTTASTANLSLQDRKSCSMSPQDTVTSYNYPQKMMGNIAAVAASCANNVPAPVLSNGAAANQAISTTSVSSQNAIQPLFVSPPTHGRPVIASPSYPCHSAIPHAGASLPPPPPPPPPPPPPPPPPPPPPPPPPPPALDVGETSNLQPPPPLPPPPYSCDPSGSDLPQDTKVLQYYFNLGLQCYYHSYWHSMVYVPQMQQQLHVENYPVYTEPPLVDQTVPQCYSEVRREDGIQAEASANDTFPNADSSSVPHGAVYYPVMSDPYGQPPLPGFDSCLPVVPDYSCVPPWHPVGTAYGGSSQIHGAINPGPESRPLFFWQF

SEQ ID NO: 793177 - protein, 248 aa, Homo sapiens
KKIRGKEVYMTMAYGKGDPLLPPRLQHSMHYGHDPPMHYSQTAGNVMSNEHFHPQHPSPRQGRGYGMPRNSSRFINRHNMPGPKVDFYPGPGKRCCQSYDNFSYRSRSFRRSHRQMSCVNKESQYGFTPGNGQMPRGLEETITFYEVEEGDETAYPTLPNHGGPSTMVPATSGYCVGRRGHSSGKQTLNLEEGNGQSENGRYHEEYLYRAVSSGQKVMFYVSSGHSYLIQLPPEDDGKYCSSCSFLCQ

SEQ ID NO: 793178 - protein, 137 aa, Homo sapiens [sequence omitted]

SEQ ID NO: 793179 - protein, 211 aa, Homo sapiens; identical to SEQ ID NO: 793175

SEQ ID NO: 793180 - protein, 211 aa, Homo sapiens; identical to SEQ ID NO: 793175

SEQ ID NO: 793181 - protein, 226 aa, Homo sapiens
MLVPLYHHHHHHHHHHHHHHLLLLLLLLLLLLLLLMWERLQTYNHHHHYHLHLIPVIQAAVICLKCYYHSYWHSMVYVPQMQQQLHVENYPVYTEPPLVDQTVPQCYSEVRREDGIQAEASANDTFPNADSSSVPHGAVYYPVMSDPYGQPPLPGFDSCLPVVPDYSCVPPWHPVGTAYGGSSQIHGAINPGPIGCIAPSPPASHYVPQESKTKSLCFWITHLILN

SEQ ID NO: 793182 - protein, 72 aa, Homo sapiens
ARIQASNDVRGHGCLGSMTTFQLECTHCPRNPAFQGGSAFDSARRFVGPDGVGLWLRTWRRCAFASIVGHSF

SEQ ID NO: 793183 - protein, 111 aa, Homo sapiens
MAPDEPQYPQVLVKELVLPPAFPHMGSCSSSHTASDSLYRTCPQMSSETGNTGRPVAQTQEEPAERLRGGIADGVTRMKMPTSVLLPENNCQASMSFQLELFLFSPCLSLF

SEQ ID NO: 793184 - protein, 81 aa, Homo sapiens
SKEWSILFIKSIWNSIVCESVQEHNESQSEKNFGFLVPTALLFRYSLLFCYVKRELEFHVKYKNQGEESCLGPSSIIALWS

SEQ ID NO: 793185 - protein, 104 aa, Homo sapiens [sequence omitted]

SEQ ID NO: 793186 - protein, 120 aa, Homo sapiens
SGNLPLSLLTSLPPPPLQHLPSSHQQFPADHPALIPNFTPPNKAQYRPSGWCMGFIFLVNTFLTNHYHLLFCAKLQSDGTKCRYSACPSLGWFFSVVFTPVFERVPGVVLPATAAQGLTG

SEQ ID NO: 793187 - protein, 102 aa, Homo sapiens
KSGRECPAWPVWLPRESLILTRFGWSQQGGEEKKAHSGCWSRGRFSDSSPRCSLGRGPSGVCSTLPRLETALLSKPQSRDKQPKFYGWGGWAKMGGRTCPGS

SEQ ID NO: 793188 - protein, 102 aa, Homo sapiens
NPDELLSSQVPSTIPSHLAYSGHHTLITLGSFHFLKLEELFSPRGHTCCSLGLQRSSSTVRGWIPIYFGLSSSVISLQKPSLVVSLGAATKHPKPIFLFALY

SEQ ID NO: 793189 - protein, 140 aa, Homo sapiens
RFSAPAPWPEPQACRYPHPGHAFLPRGRTAPESRALAGNSQAPGSRGRKCDEEAGPARTCGSGQEPRPPRALLLAHDGGRRRPLLPGPMNKAGDAALESALGPASSLGFGDRSPGRSLRIGGQGLRGVCDSGPPAGQQRP

SEQ ID NO: 793190 - protein, 449 aa, Homo sapiens
MATRSSDWLRRPLGEDNQPETQLFWDKEPWFWHDTLTEQLWRIFAGVHDEKAKPRDRQQAPGLGQESKAPGSCDPGTDPCPEDASTPRPPEASSSPPEGSQDRNTSWGVVQEPPGRASRFLQSISWDPEDFEDAWKRPDALPGQSKRLAVPCKLEKMRILAHGELVLATAISSFTRHVFTCGRRGIKVWSLTGQVAEDRFPESHLPIQTPGAFLRTCLLSSNSRSLLTGGYNLASVSVWDLAAPSLHVKEQLPCAGLNCQALDANLDANLAFASFTSGVVRIWDLRDQSVVRDLKGYPDGVKSIVVKGYNIWTGGPDACLRCWDQRTIMKPLEYQFKSQIMSLSHSPQEDWVLLGMANGQQWLQSTSGSQRHMVGQKDSVILSVKFSPFGQWWASVGMDDFLGVYSMPAGTKVFEVPEMSPVTCCDVSSNNRLVVTGSGEHASVYQITY

SEQ ID NO: 793191 - protein, 571 aa, Homo sapiens
ARGNLADLRSFRPVRDPCPGISNSESSPTLNYQGILNRLKQFPRFSPHFAAELESIYYSLHKIQQDVAEHHKQIGNVLQIVESCSQLQGFQSEEVSPAEPASPGTPQQVKDKTLQESSFEDIMATRSSDWLRRPLGEDNQPETQLFWDKEPWFWHDTLTEQLWRIFAGVHDEKAKPRDRQQAPGLGQESKAPGSCDPGTDPCPEDASTPRPPEASSSPPEGSQDRNTSWGVVQEPPGRASRFLQSISWDPEDFEDAWKRPDALPGQSKRLAVPCKLEKMRILAHGELVLATAISSFTRHVFTCGRRGIKVWSLTGQVAEDRFPESHLPIQTPGAFLRTCLLSSNSRSLLTGGYNLASVSVWDLAAPSLHVKEQLPCAGLNCQALDANLDANLAFASFTSGVVRIWDLRDQSVVRDLKGYPDGVKSIVVKGYNIWTGGPDACLRCWDQRTIMKPLEYQFKSQIMSLSHSPQEDWVLLGMANGQQWLQSTSGSQRHMVGQKDSVILSVKFSPFGQWWASVGMDDFLGVYSMPAGTKVFEVPEMSPVTCCDVSSNNRLVVTGSGEHASVYQITY

SEQ ID NO: 793192 - protein, 245 aa, Homo sapiens
PRRARCLGSPGSSGEPRGGGRGKGGKRRWWRPRPAGGQLRVLCAQEKRRLQEEIRAARREVEEEKLRVERLKRKSLRERWLMDGAAAVPEPSEDPTSKDPQSPEGQAQARIRNLEDSLFTLQSQLQLLQSASTGAQHKPSGRPSWRRQGHRPLSQSIVEAGSVGQTDLNKRASLPAGLVGTPPESPSEPREDVLGFLPGPRQVPGAAGDSSEANGPCPSPIPTPEQGLSQRAVPSEGRVGEAKGG

SEQ ID NO: 793193 - protein, 207 aa, Homo sapiens
GGDKIPAQPAEVGRGLYMDRGSLYAQPQLPSPAQRKSLRERWLMDGAAAVPEPSEDPTSKDPQSPEGQAQARIRNLEDSLFTLQSQLQLLQSASTGAQHKPSGRPSWRRQGHRPLSQSIVEAGSVGQTDLNKRASLPAGLVGTPPESPSEPREDVLGFLPGPRQVPGAAGDSSEANGPCPSPIPTPEQGLSQRAVPSEGRVGEAKGG

SEQ ID NO: 793194 - protein, 173 aa, Homo sapiens
RGCPGPSLRTHFDPRKGGRAGTETAATRQCPAFTAASANHRPAPPGPVRRHRPLLRPEENLALVGHLRLIQSERAALPRRPARGRGLGSRRRGVPRGQGRELRAGRAAPSARTRRCPFKMILLPGPSSALAAPPQGAATSGLPDWRRRRPLGQLPVPAGCPAHRRRRRGALQA

SEQ ID NO: 793195 - protein, 662 aa, Homo sapiens [sequence omitted]

SEQ ID NO: 793196 - protein, 289 aa, Homo sapiens
FVESSPPVSLLPQPTKFMVGTEQGIVISCNRKAKTSAEKIVCTFPGHHGPIYALQRNPFYPKNFLTVGDWTARIWSEDSRESSIMWTKYHMAYLTDAAWSPVRPTVFFTTRMDGTLDIWDFMFEQCDPTLSLKVCDEALFCLRVQDNGCLIACGSQLGTTTLLEVSPGLSTLQRNEKNVASSMFERETRREKILEARHREMRLKEKGKAEGRDEEQTDEELAVDLEALVSKAEEEFFDIIFTELKKKEADAIKLTPVPQQPSPEEDQVVEEGEEAAGEEGDEEVEEDLA

SEQ ID NO: 793197 - protein, 640 aa, Homo sapiens
TGKRRPFEEHRSRDRGLDASPETQKQKERTQAAGTMEIVYVYVKKRSEFGKQCNFSDRQAELNIDIMPNPELAEQFVERNPVDTGIQCSISMSEHEANSERFEMETRGVNHVEGGWPKDVNPLELEQTIRFRKKVEKDENYVNAIMQLGSIMEHCIKQNNAIDIYEEYFNDEEAMEVMEEDPSAKTINVFRDPQEIKRAATHLSWHPDGNRKLAVAYSCLDFQRAPVGMSSDSYIWDLENPNKPELALKPSSPLVTLEFNPKDSHVLLGGCYNGQIACWDTRKGSLVAELSTIESSHRDPVYGTIWLQSKTGTECFSASTDGQVMWWDIRKMSEPTEVVILDITKKEQLENALGAISLEFESTLPTKFMVGTEQGIVISCNRKAKTSAEKIVCTFPGHHGPIYALQRNPFYPKNFLTVGDWTARIWSEDSRESSIMWTKYHMAYLTDAAWSPVRPTVFFTTRMDGTLDIWDFMFEQCDPTLSLKVCDEALFCLRVQDNGCLIACGSQLGTTTLLEVSPGLSTLQRNEKNVASSMFERETRREKILEARHREMRLKEKGKAEGRDEEQTDEELAVDLEALVSKAEEEFFDIIFTELKKKEADAIKLTPVPQQPSPEEDQVVEEGEEAAGEEGDEEVEEDLA

SEQ ID NO: 793198 - protein, 599 aa, Homo sapiens
TGKRRPFEEHRSRDRGLDASPETQKQKERTQAAGTMEIVYVYVKKRSEFGKQCNFSDRQAELNIDIMPNPELAEQFVERNPVDTGIQCSISMSEHEANSERFEMETRGVNHVEGGWPKDVNPLELEQTIRFRKKVEKDENYVNAIMQLGSGPPGNQEGCQHLSWHPDGNRKLAVAYSCLDFQRAPVGMSSDSYIWDLENPNKPELALKPSSPLVTLEFNPKDSHVLLGGCYNGQIACWDTRKGSLVAELSTIESSHRDPVYGTIWLQSKTGTECFSASTDGQVMWWDIRKMSEPTEVVILDITKKEQLENALGAISLEFESTLPTKFMVGTEQGIVISCNRKAKTSAEKIVCTFPGHHGPIYALQRNPFYPKNFLTVGDWTARIWSEDSRESSIMWTKYHMAYLTDAAWSPVRPTVFFTTRMDGTLDIWDFMFEQCDPTLSLKVCDEALFCLRVQDNGCLIACGSQLGTTTLLEVSPGLSTLQRNEKNVASSMFERETRREKILEARHREMRLKEKGKAEGRDEEQTDEELAVDLEALVSKAEEEFFDIIFTELKKKEADAIKLTPVPQQPSPEEDQVVEEGEEAAGEEGDEEVEEDLA

SEQ ID NO: 793199 - protein, 332 aa, Homo sapiens
GRSLAMEGSNGFGIDSILSHRAGSPALPKGDPLLGDCRSPLELSPRSESSSDCSSPASPGRDCLETGTPRPGGASGPGLDSHLQPGQLSAPAQSRTVTSSFLIRDILADCKPLAACAPYSSSGQPAAPEPGGRLAAKAAEDFRDKLDKSGSNASSDSEYKVKEEGDREISSSRDSPPVRLKKPRKARTAFTDHQLAQLERSFERQKYLSVQDRMELAASLNLTDTQVKTWYQNRRTKWKRQTAVGLELLAEAGNYSALQRMFPSPYFYPQSLVSNLDPGAALYLYRGPSAPPPALQRPLVPRILIHGLQGASEPPPPLPPLAGVLPRAAQPR

SEQ ID NO: 793200 - protein, 132 aa, Homo sapiens
MENLPINNGSGQSYGLVLYEKSICSGGRLRAHAHDMAQVFLDETMIGILNENNKDLHIPELRDCRYLRILVENQGRVNFSWQIQNEQKGITGSVSINNSSLEGFTIYSLEMKMSFFERLRSATWKPVPDSHQ

SEQ ID NO: 793201 - protein, 493 aa, Homo sapiens
MERSPDVSPGPSRSFKEELLCAVCYDPFRDAVTLRCGHNFCRGCVSRCWEVQVSPTCPVCKDRASPADLRTNHTLNNLVEKLLREEAEGARWTSYRFSRVCRLHRGQLSLFCLEDKELLCCSCQADPRHQGHRVQPVKDTAHDFRAKCRNMEHALREKAKAFWAMRRSYEAIAKHNQVEAAWLEGRIRQEFDKLREFLRVEEQAILDAMAEETRQKQLLADEKMKQLTEETEVLAHEIERLQMEMKEDDVSFLMKHKSRKRRLFCTMEPEPAQPGMLIDVCKYLGSLQYRVWKKMLASVESVPFSFDPNTAAGWLSVSDDLTSVTNHGYRVQVENPERFSSAPCLLGSRVFSQGSHAWEVALGGLQSWRVGVVRVRQDSGAEGHSHSCYHDTRSGFWYVCRTQGVEGDHCVTSDPATSPLVLAIPRRLRVELECEEGELSFYDAERHCHLYTFHARFGEVRPYFYLGGARGAGPPEPLRICPLHISVKEELDG

SEQ ID NO: 793202 - protein, 158 aa, Homo sapiens
GTLEHPHLLPHDQGHRVQPVKDTAHDFRAKCRNMEHALREKAKAFWAMRRSYEAIAKHNQVEAAWLEGRIRQEFDKLREFLRVEEQAILDAMAEETRQKQLLADEKMKQLTEETEVLAHEIERLQMEMKEDDVSFLMVRSSASGFSDRATCSRTSWEP

SEQ ID NO: 793203 - protein, 376 aa, Homo sapiens
GTLEHPHLLPHDQGHRVQPVKDTAHDFRAKCRNMEHALREKAKAFWAMRRSYEAIAKHNQVEAAWLEGRIRQEFDKLREFLRVEEQAILDAMAEETRQKQLLADEKMKQLTEETEVLAHEIERLQMEMKEDDVSFLMKHKSRKRRLFCTMEPEPAQPGMLIDVCKYLGSLQYRVWKKMLASVESVPFSFDPNTAAGWLSVSDDLTSVTNHGYRVQVENPERFSSAPCLLGSRVFSQGSHAWEVALGGLQSWRVGVVRVRQDSGAEGHSHSCYHDTRSGFWYVCRTQGVEGDHCVTSDPATSPLVLAIPRRLRVELECEEGELSFYDAERHCHLYTFHARFGEVRPYFYLGGARGAGPPEPLRICPLHISVKEELDG

SEQ ID NO: 793204 - protein, 530 aa, Homo sapiens
MERSPDVSPGPSRSFKEELLCAVCYDPFRDAVTLRCGHNFCRGCVSRCWEVQVSPTCPVCKDRASPADLRTNHTLNNLVEKLLREEAEGARWTSYRFSRVCRLHRGQLSLFCLEDKELLCCSCQADPRHQGHRVQPVKDTAHDFRVRSLIAEERRNFLPTHQWIVTKTRLQTSSPNLQSRRQAKCRNMEHALREKAKAFWAMRRSYEAIAKHNQVEAAWLEGRIRQEFDKLREFLRVEEQAILDAMAEETRQKQLLADEKMKQLTEETEVLAHEIERLQMEMKEDDVSFLMKHKSRKRRLFCTMEPEPAQPGMLIDVCKYLGSLQYRVWKKMLASVESVPFSFDPNTAAGWLSVSDDLTSVTNHGYRVQVENPERFSSAPCLLGSRVFSQGSHAWEVALGGLQSWRVGVVRVRQDSGAEGHSHSCYHDTRSGFWYVCRTQGVEGDHCVTSDPATSPLVLAIPRRLRVELECEEGELSFYDAERHCHLYTFHARFGEVRPYFYLGGARGAGPPEPLRICPLHISVKEELDG

SEQ ID NO: 793205 - protein, 376 aa, Homo sapiens; identical to SEQ ID NO: 793203

SEQ ID NO: 793206 - protein, 218 aa, Homo sapiens
GTLEHPHLLPHDQGHRVQPVKDTAHDFRAKCRNMEHALREKAKAFWAMRRSYEAIAKHNQVEAAWLEGRIRQEFDKLREFLRVEEQAILDAMAEETRQKQLLADEKMKQLTEETEVLAHEIERLQMEMKEDDVSFLMKHKSRKRRLFCTMEPEPAQPGMLIDVCKYLGSLQYRVWKKMLASVESVPFSFDPNTAAGWLSVSDDLTSVTNHGYRVQEQC

SEQ ID NO: 793207 - protein, 218 aa, Homo sapiens; identical to SEQ ID NO: 793206

SEQ ID NO: 793208 - protein, 108 aa, Homo sapiens
CTQRAGSRSLHRLSATASLAAYLAPPAGLPPYLPSRCRFQCPCARGTREAARESPGALSLSLSALWPRLWEGTASEPGVLWGLLPWEESVPSPPQPSLPAHLGRGRAA

SEQ ID NO: 793209 - protein, 108 aa, Homo sapiens
MGLCLLEIISKNLHLFLTFVFFLRVLFFSCTQTLQVLVHQSDLLIHLSATGLCQLSSFFCAFHVSFNDHQLTSHLFILPICLICNVLSFFELDFLEFHLLHLLRPRFQ

SEQ ID NO: 793210 - protein, 145 aa, Homo sapiens
MLSRSYSSNLRMEELYGLKNHKLLSKSYSSAPKSSKTELFKEPNAEGRRLSLTSGLIGILTPSSSSSSQLAPNGAKCIPVRDRGFLVQTIEFAEQRIPVLNEYCVVCDEPHVFPFQTLGVMNEAADEIATGAQVVDLLVSMCRSA

SEQ ID NO: 793211 - protein, 168 aa, Homo sapiens
MFWKLSLSLFLVAVLVKVAEARKNRPAGAIPSPYKDGSSNNSERWQHQIKEVLASSQEALVVTERKYLKSDWCKTQPLRQTVSEEGCRSRTILNRFCYGQCNSFYIPRHVKKEEESFQSCAFCKPQRVTSVLVELECPGLDPPFRLKKIQKVKQCRCMSVNLSDSDKQ

SEQ ID NO: 793212 - protein, 112 aa, Homo sapiens
DRAMQDLPGIRCEPLFLTQLSPWRSFHFLCILLPPPWLVSISDLNPHQITSFFLTVLSQLTPNVTTIKLKTILPKPGLTLKLPLLISGTMFKRLTTLNYCFFSFVSTSTPLP

SEQ ID NO: 793213 - protein, 238 aa, Homo sapiens
YSLTNRGFGEAMSYFRTPQTHPGPLPSGQGGAASPGLSLGLCSPVEPVVVASGGTGPLSQKAEQVAPAAQAWGPALAMPQARGCPGGTSWETLRKEYSRNCHKFPHVRQLESLGWDNGYSRSRAPDLGGPSRPRPLMLCGLSPRVLPVPSEAVGKEASSQPDICILTLAMMIAGIPTVPVPGVREEDLIWAAQAFMMAHPEPEGAVEGARWEQAHAHTASGKMPLVRSKRGQPPGSCL

SEQ ID NO: 793214 - protein, 175 aa, Homo sapiens
RRCARATRGGGGCARATRGGDLGWAVALPHRPSALAGPLPSQTAERQARPLVRELGRGSAAAGCPSLPGATTPRPRRCCVPRDLWGGRESLRVPFQPTWSWDTPPRNLVGTAQGIPAAGFWPQHALRQPGERPCGLQVPVGCVRRGQKNHVFFQSGAPFGCLFTKRFRSRKKIHC

SEQ ID NO: 793215 - protein, 188 aa, Homo sapiens
TLRAGHARRRRLRAGHARRRLGLGGRPAPPPFGARRSAPLPNRRAAGAAAGSRARPGQRSRRLPLAPRRHNPAPSPLLRPARPVGRPGVTSGSLSAHVVLGHSTQEPSRHRAGNPSSGVLAPARVAAAWRASLRPPSAGGVRAQGAGKKHPQVSVLNIFSDQDYKRSVITIATSVDKLGIRLNIRHLS

SEQ ID NO: 793216 - protein, 121 aa, Homo sapiens
ARYPERVGKIMSSSRVGLRLAACLLNVSEAGRKYIVENIAKAALLDKNGKKHPQVSVLNIFSDQDYKRSVITIATSVDKLETESHHVAQAGLQLLSSRNLPAWASQSAEIRGVSHYPQQGP

SEQ ID NO: 793217 - protein, 288 aa, Homo sapiens
TLRAGHARRRRLRAGHARRRLGLGGRPAPPPFGARRSAPLPNRRAAGAAAGSRARPGQRSRRLPLAPRRHNPAPSPLLRPARPVGRPGVTSGSLSAHVVLGHSTQEPSRHRAGNPSSGVLAPARVCGSLASVLAASKCRWGACAGGRKIMSSSRVGLRLAACLLNVSEAGRKYIVENIAKAALLDKNGKKHPQVSVLNIFSDQDYKRSVITIATSVDKLGLAEDLVLHVPGCSVFLFGEADLPEKRSLVQRRKQLGWFTRRDFSALQPDLGAAPSQRCGLTVDKRNQA

SEQ ID NO: 793218 - protein, 175 aa, Homo sapiens; identical to SEQ ID NO: 793214

SEQ ID NO: 793219 - protein, 175 aa, Homo sapiens; identical to SEQ ID NO: 793214

SEQ ID NO: 793220 - protein, 489 aa, Homo sapiens
MEAPDYEVLSVREQLFHERIRECIISTLLFATLYILCHIFLTRFKKPAEFTTVDDEDATVNKIALELCTFTLAIALGAVLLLPFSIISNEVLLSLPRNYYIQWLNGSLIHGLWNLVFLFSNLSLIFLMPFAYFFTESEGFAGSRKGVLGRVYETVVMLMLLTLLVLGMVWVASAIVDKNKANRESLYDFWEYYLPYLYSCISFLGVLLLLVCTPLGLARMFSVTGKLLVKPRLLEDLEEQLYCSAFEEAALTRRICNPTSCWLPLDMELLHRQVLALQTQRVLLEKRRKASAWQRNLGYPLAMLCLLVLTGLSVLIVAIHILELLIDEAAMPRGMQGTSLGQVSFSKLGSFGAVIQVVLIFYLMVSSVVGFYSSPLFRSLRPRWHDTAMTQIIGNCVCLLVLSSALPVFSRTLGLTRFDLLGDFGRFNWLGNFYIVFLYNAAFAGLTTLCLVKTFTAAVRAELIRAFGLDRLPLPVSGFPQASRKTQHQ

SEQ ID NO: 793221 - protein, 347 aa, Homo sapiens
MEAPDYEVLSVREQLFHERIRECIISTLLFATLYILCHIFLTRFKKPAEFTTVDDEDATVNKIALELCTFTLAIALGAVLLLPFSIISNEVLLSLPRNYYIQWLNGSLIHGLWNLVFLFSNLSLIFLMPFAYFFTESEGFAGSRKGVLGRVYETVVMLMLLTLLVLGMVWVASAIVDKNKANRESLYDFWEYYLPYLYSCISFLGVLLLLVCTPLGLARMFSVTGKLLVKPRLLEDLEEQLYCSAFEEAALTRRICNPTSCWLPLDMELLHRQVLALQTQRVLLEKRRKASAWQRNLGYPLAMLCLLVLTGLSVLIVAIHILELLIDEAAMPRGMQLPNGVLSCGLL

SEQ ID NO: 793222 - protein, 288 aa, Homo sapiens
MRALSLLTEPSVDGDVMRLTADEWSHLESIKAVGSAGAGLETQWDDDVWLPDPVIGGASGRLYLSPRLPRVSVAGCEERPLGWVWVLGGGGFLPARPPRAQRHLGFSHAEQSMEAPDYEVLSVREQLFHERIRECIISTLLFATLYILCHIFLTRFKKPAEFTTVDDEDATVNKIALELCTFTLAIALGAVLLLPFSIISNEVLLSLPRNYYIQWLNGSLIHGLWNLVFLFSNLSLIFLMPFAYFFTESEGFAGSRKVSRGYVSRQETEFHTHGSAEEILIKRLFAEV

SEQ ID NO: 793223 - protein, 484 aa, Homo sapiens
MVNVKALCEPEVSNCWMNVITGTGSVSSPLLVLPQPGPETSLMTGEPVDDEDATVNKIALELCTFTLAIALGAVLLLPFSIISNEVLLSLPRNYYIQWLNGSLIHGLWNLVFLFSNLSLIFLMPFAYFFTESEGFAGSRKGVLGRVYETVVMLMLLTLLVLGMVWVASAIVDKNKANRESLYDFWEYYLPYLYSCISFLGVLLLLVCTPLGLARMFSVTGKLLVKPRLLEDLEEQLYCSAFEEAALTRRICNPTSCWLPLDMELLHRQVLALQTQRVLLEKRRKASAWQRNLGYPLAMLCLLVLTGLSVLIVAIHILELLIDEAAMPRGMQGTSLGQVSFSKLGSFGAVIQVVLIFYLMVSSVVGFYSSPLFRSLRPRWHDTAMTQIIGNCVCLLVLSSALPVFSRTLGLTRFDLLGDFGRFNWLGNFYIVFLYNAAFAGLTTLCLVKTFTAAVRAELIRAFGLDRLPLPVSGFPQASRKTQHQ

SEQ ID NO: 793224 - protein, 381 aa, Homo sapiens
MEAPDYEVLSVREQLFHERIRECIISTLLFATLYILCHIFLTRFKKPAEFTTVDDEDATVNKIALELCTFTLAIALGAVLLLPFSIISNEVLLSLPRNYYIQWLNGSLIHGLWNLVFLFSNLSLIFLMPFAYFFTESEGFAGSRKGVLGRVYETVVMLMLLTLLVLGMVWVASAIVDKNKANRESLYDFWEYYLPYLYSCISFLGVLLLLVCTPLGLARMFSVTGKLLVKPRLLEDLEEQLYCSAFEEAALTRRICNPTSCWLPLDMELLHRQVLALQTQRVLLEKRRKASAWQRNLGYPLAMLCLLVLTGLSVLIVAIHILELLIDEAAMPRGMQGTSLGQVSFSKLGSFGAVIQVVLIFLVSFWKPIIASVQQTCLLGL

SEQ ID NO: 793225 - protein, 362 aa, Homo sapiens
MPFAYFFTESEGFAGSRKGVLGRVYETVVMLMLLTLLVLGMVWVASAIVDKNKANRESLYDFWEYYLPYLYSCISFLGVLLLLVCTPLGLARMFSVTGKLLVKPRLLEDLEEQLYCSAFEEAALTRRICNPTSCWLPLDMELLHRQVLALQTQRVLLEKRRKASAWQRNLGYPLAMLCLLVLTGLSVLIVAIHILELLIDEAAMPRGMQGTSLGQVSFSKLGSFGAVIQVVLIFYLMVSSVVGFYSSPLFRSLRPRWHDTAMTQIIGNCVCLLVLSSALPVFSRTLGLTRFDLLGDFGRFNWLGNFYIVFLYNAAFAGLTTLCLVKTFTAAVRAELIRAFGLDRLPLPVSGFPQASRKTQHQ

SEQ ID NO: 793226 - protein, 441 aa, Homo sapiens
VPEFPVAAITRTRWAQLELCTFTLAIALGAVLLLPFSIISNEVLLSLPRNYYIQWLNGSLIHGLWNLVFLFSNLSLIFLMPFAYFFTESEGFAGSRKGVLGRVYETVVMLMLLTLLVLGMVWVASAIVDKNKANRESLYDFWEYYLPYLYSCISFLGVLLLLVCTPLGLARMFSVTGKLLVKPRLLEDLEEQLYCSAFEEAALTRRICNPTSCWLPLDMELLHRQVLALQTQRVLLEKRRKASAWQRNLGYPLAMLCLLVLTGLSVLIVAIHILELLIDEAAMPRGMQGTSLGQVSFSKLGSFGAVIQVVLIFYLMVSSVVGFYSSPLFRSLRPRWHDTAMTQIIGNCVCLLVLSSALPVFSRTLGLTRFDLLGDFGRFNWLGNFYIVFLYNAAFAGLTTLCLVKTFTAAVRAELIRAFGLDRLPLPVSGFPQASRKTQHQ

SEQ ID NO: 793227 - protein, 381 aa, Homo sapiens; identical to SEQ ID NO: 793224

SEQ ID NO: 793228 - protein, 343 aa, Homo sapiens
MEAPDYEVLSVREQLFHERIRECIISTLLFATLYILCHIFLTRFKKPAEFTTVDDEDATVNKIALELCTFTLAIALGAVLLLPFSIISNEVLLSLPRNYYIQWLNGSLIHGLWNLVFLFSNLSLIFLMPFAYFFTESEGFAGSRKGVLGRVYETVVMLMLLTLLVLGMVWVASAIVDKNKANRESLYDFWEYYLPYLYSCISFLGVLLLLVCTPLGLARMFSVTGKLLVKPRLLEDLEEQLYCSAFEEAALTRRICNPTSCWLPLDMELLHRQVLALQTQRVLLEKRRKASAWQRNLGYPLAMLCLLVLTGLSVLIVAIHILELLIDEAAMPRGMQQTCLLGL

SEQ ID NO: 793229 - protein, 493 aa, Homo sapiens
MEAPDYEVLSVREQLFHERIRECIISTLLFATLYILCHIFLTRFKKPAEFTTVDDEDATVNKIALELCTFTLAIALGAVLLLPFSIISNEVLLSLPRNYYIQWLNGSLIHGLWNLVFLFSNLSLIFLMPFAYFFTESEGFAGSRKGVLGRVYETVVMLMLLTLLVLGMVWVASAIVDKNKANRESLYDFWEYYLPYLYSCISFLGVLLLLVCTPLGLARMFSVTGKLLVKPRLLEDLEEQLYCSAFEEAALTRRICNPTSCWLPLDMELLHRQVLALQTQRVLLEKRRKASAWQRNLGYPLAMLCLLVLTGLSVLIVAIHILELLIDEAAMPRGMQSCNPSGNPSLPLFSKPVSWDSRPSTSWTFYLMVSSVVGFYSSPLFRSLRPRWHDTAMTQIIGNCVCLLVLSSALPVFSRTLGLTRFDLLGDFGRFNWLGNFYIVFLYNAAFAGLTTLCLVKTFTAAVRAELIRAFGLDRLPLPVSGFPQASRKTQHQ

SEQ ID NO: 793230 - protein, 489 aa, Homo sapiens; identical to SEQ ID NO: 793220

SEQ ID NO: 793231 - protein, 138 aa, Homo sapiens
MRLPCPEACSYLMVSSVVGFYSSPLFRSLRPRWHDTAMTQIIGNCVCLLVLSSALPVFSRTLGLTRFDLLGDFGRFNWLGNFYIVFLYNAAFAGLTTLCLVKTFTAAVRAELIRAFGLDRLPLPVSGFPQASRKTQHQ

SEQ ID NO: 793232 - protein, 522 aa, Homo sapiens
MEAPDYEVLSVREQLFHERIRECIISTLLFATLYILCHIFLTRFKKPAEFTTVDDEDATVNKIALELCTFTLAIALGAVLLLPFSIISNEVLLSLPRNYYIQWLNGSLIHGLWNLVFLFSNLSLIFLMPFAYFFTESEGFAGSRKGVLGRVYETVVMLMLLTLLVLGMVWVASAIVDKNKANRESLYDFWEYYLPYLYSCISFLGVLLLLVCTPLGLARMFSVTGKLLVKPRLLEDLEEQLYCSAFEEAALTRRICNPTSCWLPLDMELLHRQVLALQTQRVLLEKRRKASAWQRNLGYPLAMLCLLVLTGLSVLIVAIHILELLIDEAAMPRGMQGTSLGQVSFSKLGSFGAVIQVVLIFYLMVSSVVGFYSSPLFRSLRPRWHDTAMTQIIGNCVCLLVLSSALPVFSRTLGLTRFDLLGDFGRFNWLGNFYIVFLYNAAFAGLTTLWRGKNLNWTWPGKNLTGPLGLEKKAACPFPGFPQGFWENPAPGAPHLGGGKKKTDPAHWFQSPGGKPQGSWTP

SEQ ID NO: 793233 - protein, 396 aa, Homo sapiens
MEAPDYEVLSVREQLFHERIRECIISTLLFATLYILCHIFLTRFKKPAEFTTVDDEDATVNKIALELCTFTLAIALGAVLLLPFSIISNEVLLSLPRNYYIQWLNGSLIHGLWNLVFLFSNLSLIFLMPFAYFFTESEGFAGSRKGVLGRVYETVVMLMLLTLLVLGMVWVASAIVDKNKANRESLYDFWEYYLPYLYSCISFLGVLLLLVCTPLGLARMFSVTGKLLVKPRLLEDLEEQLYCSAFEEAALTRRICNPTSCWLPLDMELLHRQVLALQTQRVLLEKRRKASAWQRNLGYPLAMLCLLVLTGLSVLIVAIHILELLIDEAAMPRGMQGTSLGQVSFSKLGSFGAVIQVVLIFYLMVSSVVGFYSSPLFRSLRPRWHDTAMTQVAGRE

SEQ ID NO: 793234 - protein, 347 aa, Homo sapiens; identical to SEQ ID NO: 793221

SEQ ID NO: 793235 - protein, 332 aa, Homo sapiens
MEAPDYEVLSVREQLFHERIRECIISTLLFATLYILCHIFLTRFKKPAEFTTVDDEDATVNKIALELCTFTLAIALGAVLLLPFSIISNEVLLSLPRNYYIQWLNGSLIHGLWNLVFLFSNLSLIFLMPFAYFFTESEGFAGSRKGVLGRVYETVVMLMLLTLLVLGMVWVASAIVDKNKANRESLYDFWEYYLPYLYSCISFLGVLLLLVCTPLGLARMFSVTGKLLVKPRLLEDLEEQLYCSAFEEAALTRRICNPTSCWLPLDMELLHRQVLALQTQRVLLEKRRKASAWQRNLGYPLAMLCLLVLTGLSCSCVPSTSERACRYRARLS

SEQ ID NO: 793236 - protein, 374 aa, Homo sapiens
MEAPDYEVLSVREQLFHERIRECIISTLLFATLYILCHIFLTRFKKPAEFTTVDDEDATVNKIALELCTFTLAIALGAVLLLPFSIISNEVLLSLPRNYYIQWLNGSLIHGLWNLVFLFSNLSLIFLMPFAYFFTESEGFAGSRKGVLGRVYETVVMLMLLTLLVLGMVWVASAIVDKNKANRESLYDFWEYYLPYLYSCISFLGVLLLLVCTPLGLARMFSVTGKLLVKPRLLEDLEEQLYCSAFEEAALTRRICNPTSCWLPLDMELLHRQVLALQTQRVLLGMWLRRAWDTWVSPRRVAPGSRCLLTASHPCTEKRRKASAWQRNLGYPLAMLCLLVLTVGIPALEVRSGPSVLEAFSGRGEAMQGPGYHQ

SEQ ID NO: 793237 - protein, 138 aa, Homo sapiens
MVNVKALCEPEVSNCWMNVITGTGSVSSPLLVLPQPGPETSLMTGEPVDDEDATVNKIALELCTFTLAIALGAVLLLPFSIISNEVLLSLPRNYYIQWLNGSLIHGLWNLVFLFSNLSLISQICLHINLPHCCSGPSP

SEQ ID NO: 793238 - protein, 176 aa, Homo sapiens [sequence omitted]

SEQ ID NO: 793239 - protein, 124 aa, Homo sapiens
MVNVKALCEPEVSNCWMNVITGTGSVSSPLLVLPQPGPETSLMTGEPVDDEDATVNKIALELCTFTLAIALGAVLLLPFSIISNEVLLSLPRNYYIQWLNGSLIHGLWNLVFLFSNLSLISSRA

SEQ ID NO: 793240 - protein, 95 aa, Homo sapiens
NLSVAVLKCGHQEAAESWAGSRKGPGEPTSHPGLCASGLTRFDLLGDFGRFNWLGNFYIVFLYNAAFAGLTTLCLVKTFTAAVRAELIRAFGERE

SEQ ID NO: 793241 - protein, 158 aa, Homo sapiens
MSWSLHPRNLILYFYALLFLSSTCVAYVATRDNCCILDERFGSYCPTTCGIADFLSTYQTKVDKDLQSLEDILHQVENKTSEVKQLIKAIQLTYNPDESSKPNMIDAATLKSRKMLEEIMKYEASILTHDSSIRYLQEIYNSNNQKIVKLSGEGNRVL

SEQ ID NO: 793242 - protein, 673 aa, Homo sapiens
MGNQNGNPTGTLGAWGNLLPQESTEPQTSTSQNVSFSAQPQNLNTDGPNNTNPMNSSPNPINAMQTNGLPNWGMAVGMGAIIPPHLQGLPGANGSSVSQVSGGSAEGISNSVWGLSPGNPATGNSNSGFSQGNGDTVNSALSAKQNGSSSAVQKEGSGGNAWDSGPPAGPGILAWGRGSGNNGVGNIHSGAWGHPSRSTSNGVNGEWGKPPNQHSNSDINGKGSTGWESPSVTSQNPTVQPGGEHMNSWAKAASSGTTASEGSSDGSGNHNEGSTGREGTGEGRRRDKGIIDQGHIQLPRNDLDPRVLSNTGWGQTPVKQNTAWEFEESPRSERKNDNGTEAWGCAATQASNSGGKNDGSIMNSTNTSSVSGWVNAPPAAVPANTGWGDSNNKAPSGPGVWGDSISSTAVSTAAAAKSGHAWSGAANQEDKSPTWGEPPKPKSQHWGDGQRSNPAWSAGGGDWADSSSVLGHLGDGKKNGSGWDADSNRSGSGWNDTTRSGNSGWGNSTNTKANPGTNWGETLKPGPQQNWASKPQDNNVSNWGGAASVKQTGTGWIGGPVPVKQKDSSEATGWEEPSPPSIRRKMEIDDGTSAWGDPSNYNNKTVNMWDRNNPVIQSSTTTNTTTTTTTTTSNTTHRVETPPPHQAGTQLNRSPLLGPGRKGISCFFTSKKK

SEQ ID NO: 793243 - protein, 136 aa, Homo sapiens
MNVNSMDMTGGLSVKDPSQSQSRLPQWTHPNSMDNLPSAASPLEQNPSKHGAIPGGLSIGPPGKSSIDDSYGRYDLIQNSESPASPPVAVPHSWSRAKSDSDKISNGSSINWPPGKTMQHFCATAAGQNVLQACRE

SEQ ID NO: 793244 - protein, 1551 aa, Homo sapiens
MGNQNGNPTGTLGAWGNLLPQESTEPQTSTSQNVSFSAQPQNLNTDGPNNTNPMNSSPNPINAMQTNGLPNWGMAVGMGAIIPPHLQGLPGANGSSVSQVSGGSAEGISNSVWGLSPGNPATGNSNSGFSQGNGDTVNSALSAKQNGSSSAVQKEGSGGNAWDSGPPAGPGILAWGRGSGNNGVGNIHSGAWGHPSRSTSNGVNGEWGKPPNQHSNSDINGKGSTGWESPSVTSQNPTVQPGGEHMNSWAKAASSGTTASEGSSDGSGNHNEGSTGREGTGEGRRRDKGIIDQGHIQLPRNDLDPRVLSNTGWGQTPVKQNTAWEFEESPRSERKNDNGTEAWGCAATQASNSGGKNDGSIMNSTNTSSVSGWVNAPPAAVPANTGWGDSNNKAPSGPGVWGDSISSTAVSTAAAAKSGHAWSGAANQEDKSPTWGEPPKPKSQHWGDGQRSNPAWSAGGGDWADSSSVLGHLGDGKKNGSGWDADSNRSGSGWNDTTRSGNSGWGNSTNTKANPGTNWGETLKPGPQQNWASKPQDNNVSNWGGAASVKQTGTGWIGGPVPVKQKDSSEATGWEEPSPPSIRRKMEIDDGTSAWGDPSNYNNKTVNMWDRNNPVIQSSTTTNTTTTTTTTTSNTTHRVETPPPHQAGTQLNRSPLLGPVSSGWGEMPNVHSKTENSWGEPSSPSTLVDNGTAAWGKPPSSGSGWGDHPAEPPVAFGRAGAPVAASALCKPASKSMQEGWGSGGDEMNLSTSQWEDEEGDVWNNAASQESTSSCSSWGNAPKKGLQKGMKTSGKQDEAWIMSRLIKQLTDMGFPREPAEEALKSNNMNLDQAMSALLEKKVDVDKRGLGVTDHNGMAAKPLGCRPPISKESSVDRPTFLDKDGGLVEEPTPSPFLPSPSLKLPLSHSALPSQALGGIASGLGMQNLNSSRQIPSGNLGMFGNSGAAQARTMQQPPQPPVQPLNSSQPSLRAQVPQFLSPQVQAQLLQFAAKNIGLNPALLTSPINPQHMTMLNQLYQLQLAYQRLQIQQQMLQAQRNVSGSMRQQEQQVARTITNLQQQIQQHQRQLAQALLVKQPPPPPPPPHLSLHPSAGKSAMDSFPSHPQTPGLPDLQTKEQQSSPNTFAPYPLAGLNPNMNVNSMDMTGGLSVKDPSQSQSRLPQWTHPNSMDNLPSAASPLEQNPSKHGAIPGGLSIGPPGKSSIDDSYGRYDLIQNSESPASPPVAVPHSWSRAKSDSDKISNGSSINWPPEFHPGVPWKGLQNIDPENDPDVTPGSVPTGPTINTTIQDVNRYLLKSGGKLSDIKSTWSSGPTSHTQASLSHELWKVPRNSTAPTRPPPGLTNPKPSSTWGASPLGWTSSYSSGSAWSTDTSGRTSSWLVLRNLTPQIDGSTLRTLCLQHGPLITFHLNLTQGNAVVRYSSKEEAAKAQKSLHMCVLGNTTILAEFAGEEEVNRFLAQGQALPPTSSWQSSSASSQPRLSAAGSSHGLVRSDAGHWNAPCLGGKGSSELLWGGVPQYSSSLWGPPSADDSRVIGSPTPLTTLLPGDLLSGESL

SEQ ID NO: 793245 - protein, 1551 aa, Homo sapiens; identical to SEQ ID NO: 793244

SEQ ID NO: 793246 - protein, 1590 aa, Homo sapiens
MGNQNGNPTGTLGAWGNLLPQESTEPQTSTSQNVSFSAQPQNLNTDGPNNTNPMNSSPNPINAMQTNGLPNWGMAVGMGAIIPPHLQGLPGANGSSVSQVSGGSAEGISNSVWGLSPGNPATGNSNSGFSQGNGDTVNSALSAKQNGSSSAVQKEGSGGNAWDSGPPAGPGILAWGRGSGNNGVGNIHSGAWGHPSRSTSNGVNGEWGKPPNQHSNSDINGKGSTGWESPSVTSQNPTVQPGGEHMNSWAKAASSGTTASEGSSDGSGNHNEGSTGREGTGEGRRRDKGIIDQGHIQLPRNDLDPRVLSNTGWGQTPVKQNTAWEFEESPRSERKNDNGTEAWGCAATQASNSGGKNDGSIMNSTNTSSVSGWVNAPPAAVPANTGWGDSNNKAPSGPGVWGDSISSTAVSTAAAAKSGHAWSGAANQEDKSPTWGEPPKPKSQHWGDGQRSNPAWSAGGGDWADSSSVLGHLGDGKKNGSGWDADSNRSGSGWNDTTRSGNSGWGNSTNTKANPGTNWGETLKPGPQQNWASKPQDNNVSNWGGAASVKQTGTGWIGGPVPVKQKDSSEATGWEEPSPPSIRRKMEIDDGTSAWGDPSNYNNKTVNMWDRNNPVIQSSTTTNTTTTTTTTTSNTTHRVETPPPHQAGTQLNRSPLLGPVSSGWGEMPNVHSKTENSWGEPSSPSTLVDNGTAAWGKPPSSGSGWGDHPAEPPVAFGRAGAPVAASALCKPASKSMQEGWGSGGDEMNLSTSQWEDEEGDVWNNAASQESTSSCSSWGNAPKKGLQKGMKTSGKQDEAWIMSRLIKQLTDMGFPREPAEEALKSNNMNLDQAMSALLEKKVDVDKRGLGVTDHNGMAAKPLGCRPPISKESSVDRPTFLDKDGGLVEEPTPSPFLPSPSLKLPLSHSALPSQALGGIASGLGMQNLNSSRQIPSGNLGMFGNSGAAQARTMQQPPQPPVQPLNSSQPSLRAQVPQFLSPQVQAQLLQFAAKNIGLNPALLTSPINPQHMTMLNQLYQLQLAYQRLQIQQQMLQAQRNVSGSMRQQEQQVARTITNLQQQIQQHQRQLAQALLVKQPPPPPPPPHLSLHPSAGKSAMDSFPSHPQTPGLPDLQTKEQQSSPNTFAPYPLAGLNPNMNVNSMDMTGGLSVKDPSQSQSRLPQWTHPNSMDNLPSAASPLEQNPSKHGAIPGGLSIGPPGKSSIDDSYGRYDLIQNSESPASPPVAVPHSWSRAKSDSDKISNGSSINWPPEFHPGVPWKGLQNIDPENDPDVTPGSVPTGPTINTTIQDVNRYLLKSGGSSPPSSQNATLPSSSAWPLSASGYSSSFSSIASAPSVAGKLSDIKSTWSSGPTSHTQASLSHELWKVPRNSTAPTRPPPGLTNPKPSSTWGASPLGWTSSYSSGSAWSTDTSGRTSSWLVLRNLTPQIDGSTLRTLCLQHGPLITFHLNLTQGNAVVRYSSKEEAAKAQKSLHMCVLGNTTILAEFAGEEEVNRFLAQGQALPPTSSWQSSSASSQPRLSAAGSSHGLVRSDAGHWNAPCLGGKGSSELLWGGVPQYSSSLWGPPSADDSRVIGSPTPLTTLLPGDLLSGESL

SEQ ID NO: 793247 - protein, 456 aa, Homo sapiens
MNVNSMDMTGGLSVKDPSQSQSRLPQWTHPNSMDNLPSAASPLEQNPSKHGAIPGGLSIGPPGKSSIDDSYGRYDLIQNSESPASPPVAVPHSWSRAKSDSDKISNGSSINWPPEFHPGVPWKGLQNIDPENDPDVTPGSVPTGPTINTTIQDVNRYLLKSGGSSPPSSQNATLPSSSAWPLSASGYSSSFSSIASAPSVAGKLSDIKSTWSSGPTSHTQASLSHELWKVPRNSTAPTRPPPGLTNPKPSSTWGASPLGWTSSYSSGSAWSTDTSGRTSSWLVLRNLTPQIDGSTLRTLCLQHGPLITFHLNLTQGNAVVRYSSKEEAAKAQKSLHMCVLGNTTILAEFAGEEEVNRFLAQGQALPPTSSWQSSSASSQPRLSAAGSSHGLVRSDAGHWNAPCLGGKGSSELLWGGVPQYSSSLWGPPSADDSRVIGSPTPLTTLLPGDLLSGESL

SEQ ID NO: 793248 - protein, 739 aa, Homo sapiens
MGNQNGNPTGTLGAWGNLLPQESTEPQTSTSQNVSFSAQPQNLNTDGPNNTNPMNSSPNPINAMQTNGLPNWGMAVGMGAIIPPHLQGLPGANGSSVSQVSGGSAEGISNSVWGLSPGNPATGNSNSGFSQGNGDTVNSALSAKQNGSSSAVQKEGSGGNAWDSGPPAGPGILAWGRGSGNNGVGNIHSGAWGHPSRSTSNGVNGEWGKPPNQHSNSDINGKGSTGWESPSVTSQNPTVQPGGEHMNSWAKAASSGTTASEGSSDGSGNHNEGSTGREGTGEGRRRDKGIIDQGHIQLPRNDLDPRVLSNTGWGQTPVKQNTAWEFEESPRSERKNDNGTEAWGCAATQASNSGGKNDGSIMNSTNTSSVSGWVNAPPAAVPANTGWGDSNNKAPSGPGVWGDSISSTAVSTAAAAKSGHAWSGAANQEDKSPTWGEPPKPKSQHWGDGQRSNPAWSAGGGDWADSSSVLGHLGDGKKNGSGWDADSNRSGSGWNDTTRSGNSGWGNSTNTKANPGTNWGETLKPGPQQNWASKPQDNNVSNWGGAASVKQTGTGWIGGPVPVKQKDSSEATGWEEPSPPSIRRKMEIDDGTSAWGDPSNYNNKTVNMWDRNNPVIQSSTTTNTTTTILAEFAGEEEVNRFLAQGQALPPTSSWQSSSASSQPRLSAAGSSHGLVRSDAGHWNAPCLGGKGSSELLWGGVPQYSSSLWGPPSADDSRVIGSPTPLTTLLPGDLLSGESL

SEQ ID NO: 793249 - protein, 1447 aa, Homo sapiens
MGNQNGNPTGTLGAWGNLLPQESTEPQTSTSQNVSFSAQPQNLNTDGPNNTNPMNSSPNPINAMQTNGLPNWGMAVGMGAIIPPHLQGLPGANGSSVSQVSGGSAEGISNSVWGLSPGNPATGNSNSGFSQGNGDTVNSALSAKQNGSSSAVQKEGSGGNAWDSGPPAGPGILAWGRGSGNNGVGNIHSGAWGHPSRSTSNGVNGEWGKPPNQHSNSDINGKGSTGWESPSVTSQNPTVQPGGEHMNSWAKAASSGTTASEGSSDGSGNHNEGSTGREGTGEGRRRDKGIIDQGHIQLPRNDLDPRVLSNTGWGQTPVKQNTAWEFEESPRSERKNDNGTEAWGCAATQASNSGGKNDGSIMNSTNTSSVSGWVNAPPAAVPANTGWGDSNNKAPSGPGVWGDSISSTAVSTAAAAKSGHAWSGAANQEDKSPTWGEPPKPKSQHWGDGQRSNPAWSAGGGDWADSSSVLGHLGDGKKNGSGWDADSNRSGSGWNDTTRSGNSGWGNSTNTKANPGTNWGETLKPGPQQNWASKPQDNNVSNWGGAASVKQTGTGWIGGPVPVKQKDSSEATGWEEPSPPSIRRKMEIDDGTSAWGDPSNYNNKTVNMWDRNNPVIQSSTTTNTTTTTTTTTSNTTHRVETPPPHQAGTQLNRSPLLGPVSSGWGEMPNVHSKTENSWGEPSSPSTLVDNGTAAWGKPPSSGSGWGDHPAEPPVAFGRAGAPVAASALCKPASKSMQEGWGSGGDEMNLSTSQWEDEEGDVWNNAASQESTSSCSSWGNAPKKGLQKGMKTSGKQDEAWIMSRLIKQLTDMGFPREPAEEALKSNNMNLDQAMSALLEKKVDVDKRGLGVTDHNGMAAKPLGCRPPISKESSVDRPTFLDKDGGLVEEPTPSPFLPSPSLKLPLSHSALPSQALGGIASGLGMQNLNSSRQIPSGNLGMFGNSGAAQARTMQQPPQPPVQPLNSSQPSLRAQVPQFLSPQVQAQLLQFAAKNIGLNPALLTSPINPQHMTMLNQLYQLQLAYQRLQIQQQMLQAQRNVSGSMRQQEQQVARTITNLQQQIQQHQRQLAQALLVKQPPPPPPPPHLSLHPSAGKSAMDSFPSHPQTPGLPDLQTKEQQSSPNTFAPYPLAGLNPNMNVNSMDMTGGLSVKDPSQSQSRLPQWTHPNSMDNLPSAASPLEQNPSKHGAIPGGLSIGPPGKSSIDDSYGRYDLIQNSESPASPPVAVPHSWSRAKSDSDKISNGSSINWPPEFHPGVPWKGLQNIDPENDPDVTPGSVPTGPTINTTIQDVNRYLLKSGGSSPPSSQNATLPSSSAWPLSASGYSSSFSSIASAPSVAGKLSDIKSTWSSGPTSHTQASLSHELWKVPRNSTAPTRPPPGLTNPKPSSTWGASPLGWTSSYSSGSAWSTDTSGRTSSWLVLRNLTPQVQYGAPASLSMIQGGFPLGPQCR

SEQ ID NO: 793250 - protein, 1219 aa, Homo sapiens
MGNQNGNPTGTLGAWGNLLPQESTEPQTSTSQNVSFSAQPQNLNTDGPNNTNPMNSSPNPINAMQTNGLPNWGMAVGMGAIIPPHLQGLPGANGSSVSQVSGGSAEGISNSVWGLSPGNPATGNSNSGFSQGNGDTVNSALSAKQNGSSSAVQKEGSGGNAWDSGPPAGPGILAWGRGSGNNGVGNIHSGAWGHPSRSTSNGVNGEWGKPPNQHSNSDINGKGSTGWESPSVTSQNPTVQPGGEHMNSWAKAASSGTTASEGSSDGSGNHNEGSTGREGTGEGRRRDKGIIDQGHIQLPRNDLDPRVLSNTGWGQTPVKQNTAWEFEESPRSERKNDNGTEAWGCAATQASNSGGKNDGSIMNSTNTSSVSGWVNAPPAAVPANTGWGDSNNKAPSGPGVWGDSISSTAVSTAAAAKSGHAWSGAANQEDKSPTWGEPPKPKSQHWGDGQRSNPAWSAGGGDWADSSSVLGHLGDGKKNGSGWDADSNRSGSGWNDTTRSGNSGWGNSTNTKANPGTNWGETLKPGPQQNWASKPQDNNVSNWGGAASVKQTGTGWIGGPVPVKQKDSSEATGWEEPSPPSIRRKMEIDDGTSAWGDPSNYNNKTVNMWDRNNPVIQSSTTTNTTTTTTTTTSNTTHRVETPPPHQAGTQLNRSPLLGPVSSGWGEMPNVHSKTENSWGEPSSPSTLVDNGTAAWGKPPSSGSGWGDHPAEPPVAFGRAGAPVAASALCKPASKSMQEGWGSGGDEMNLSTSQWEDEEGDVWNNAASQESTSSCSSWGNAPKKGLQKGMKTSGKQDEAWIMSRLIKQLTDMGFPREPAEEALKSNNMNLDQAMSALLEKKVDVDKRGLGVTDHNGMAAKPLGCRPPISKESSVDRPTFLDKDGGLVEEPTPSPFLPSPSLKLPLSHSALPSQALGGIASGLGMQNLNSSRQIPSGNLGMFGNSGAAQARTMQQPPQPPVQPLNSSQPSLRAQVPQFLSPQVQAQLLQFAAKNIGLNPALLTSPINPQHMTMLNQLYQLQLAYQRLQIQQQMLQAQRNVSGSMRQQEQQVARTITNLQQQIQQHQRQLAQALLVKQPPPPPPPPHLSLHPSAGKSAMDSFPSHPQTPGLPDLQTKEQQSSPNTFAPYPLAGLNPNMNVNSMDMTGGLSVKDPSQSQSRLPQWTHPNSMDNLPSAASPLEQNPSKHGTSELGCLWWDHCWLINRSSCCIAWPFYTFLRIEH

SEQ ID NO: 793251 - protein, 53 aa, Homo sapiens
INTTIQDVNRYLLKSGGEGAALPASAWTVSLDPFGDVRGDRLGCEAGMIQGTV

SEQ ID NO: 793252 - protein, 93 aa, Homo sapiens
SRGPRDGLGPEPQEPPPGPPPSPAAAPEAVPPPPAPPSYSDKGVQTPSKGTPAPLPNGNHRYCRLCNIKFSSLSTFIAHKKYYCSSHAAEHVK

SEQ ID NO: 793253 - protein, 74 aa, Homo sapiens
APSPPSADVNLTPPPAPPSYSDKGVQTPSKGTPAPLPNGNHRYCRLCNIKFSSLSTFIAHKKYYCSSHAAEHVK

SEQ ID NO: 793254 - protein, 727 aa, Homo sapiens
MDSDMDYERPNVETIKCVVVGDNAVGKTRLICARACNATLTQYQLLATHVPTVWAIDQYRVCQEVLERSRDVVDDVSVSLRLWDTFGDHHKDRRFAYGRSDVVVLCFSIANPNSLHHVKTMWYPEIKHFCPRAPVILVGCQLDLRYADLEAVNRARRPLARPIKPNEILPPEKGREVAKELGIPYYETSVVAQFGIKDVFDNAIRAALISRRHLQFWKSHLRNVQRPLLQAPFLPPKPPPPIIVVPDPPSSSEEGPAHLLEDPLCADVILVLQERVRIFAHKIYLSTSSSKFYDLFLMDLSEGELGGPSEPGGTHPEDHQGHSDQHHHHHHHHHGRDFLLRAASFDVCESVDEAGGSGPAGLRASTSDGILRGNGTGYLPGRGRVLSSWSRAFVSIQEEMAEDPLTYKSRLMVVVKMDSSIQPGPFRAVLKYLYTGELDENERDLMHIAHIAELLEVFDLRMMVANILNNEAFMNQEITKAFHVRRTNRVKECLAKGTFSDVTFILDDGTISAHKPLLISSCDWMAAMFGGPFVESSTREVVFPYTSKSCMRAVLEYLYTGMFTSSPDLDDMKLIILANRLCLPHLVALTEQYTVTGLMEATQMMVDIDGDVLVFLELAQFHCAYQLADWCLHHICTNYNNVCRKFPRDMKAMSPENQEYFEKHRWPPVWYLKEEDHYQRARKEREKEDYLHLKRQPKRRWLFWNSPSSPSSSAASSSSPSSSSAVV

SEQ ID NO: 793255 - protein, 727 aa, Homo sapiens; identical to SEQ ID NO: 793254

SEQ ID NO: 793256 - protein, 176 aa, Homo sapiens
MQAWRKGPDGPQKTSSDSMSRLMDSDMDYERPNVETIKCVVVGDNAVGKTRLICARACNATLTQYQLLATHVPTVWAIDQYRVCQEVLERSRDVVDDVSVSLRLWDTFGDHHKDRRFAYGRSDVVVLCFSIANPNSLHHVKTMWYPEIKHFCPRAPVILVGCQLDLRYADLEAVNR

SEQ ID NO: 793257 - protein, 749 aa, Homo sapiens
MQAWRKGPDGPQKTSSDSMSRLMDSDMDYERPNVETIKCVVVGDNAVGKTRLICARACNATLTQYQLLATHVPTVWAIDQYRVCQEVLERSRDVVDDVSVSLRLWDTFGDHHKDRRFAYGRSDVVVLCFSIANPNSLHHVKTMWYPEIKHFCPRAPVILVGCQLDLRYADLEAVNRARRPLARPIKPNEILPPEKGREVAKELGIPYYETSVVAQFGIKDVFDNAIRAALISRRHLQFWKSHLRNVQRPLLQAPFLPPKPPPPIIVVPDPPSSSEEGPAHLLEDPLCADVILVLQERVRIFAHKIYLSTSSSKFYDLFLMDLSEGELGGPSEPGGTHPEDHQGHSDQHHHHHHHHHGRDFLLRAASFDVCESVDEAGGSGPAGLRASTSDGILRGNGTGYLPGRGRVLSSWSRAFVSIQEEMAEDPLTYKSRLMVVVKMDSSIQPGPFRAVLKYLYTGELDENERDLMHIAHIAELLEVFDLRMMVANILNNEAFMNQEITKAFHVRRTNRVKECLAKGTFSDVTFILDDGTISAHKPLLISSCDWMAAMFGGPFVESSTREVVFPYTSKSCMRAVLEYLYTGMFTSSPDLDDMKLIILANRLCLPHLVALTEQYTVTGLMEATQMMVDIDGDVLVFLELAQFHCAYQLADWCLHHICTNYNNVCRKFPRDMKAMSPENQEYFEKHRWPPVWYLKEEDHYQRARKEREKEDYLHLKRQPKRRWLFWNSPSSPSSSAASSSSPSSSSAVV

SEQ ID NO: 793258 - protein, 749 aa, Homo sapiens; identical to SEQ ID NO: 793257

SEQ ID NO: 793259 - protein, 576 aa, Homo sapiens
MLGFLLEPTRPIKPNEILPPEKGREVAKELGIPYYETSVVAQFGIKDVFDNAIRAALISRRHLQFWKSHLRNVQRPLLQAPFLPPKPPPPIIVVPDPPSSSEEGPAHLLEDPLCADVILVLQERVRIFAHKIYLSTSSSKFYDLFLMDLSEGELGGPSEPGGTHPEDHQGHSDQHHHHHHHHHGRDFLLRAASFDVCESVDEAGGSGPAGLRASTSDGILRGNGTGYLPGRGRVLSSWSRAFVSIQEEMAEDPLTYKSRLMVVVKMDSSIQPGPFRAVLKYLYTGELDENERDLMHIAHIAELLEVFDLRMMVANILNNEAFMNQEITKAFHVRRTNRVKECLAKGTFSDVTFILDDGTISAHKPLLISSCDWMAAMFGGPFVESSTREVVFPYTSKSCMRAVLEYLYTGMFTSSPDLDDMKLIILANRLCLPHLVALTEQYTVTGLMEATQMMVDIDGDVLVFLELAQFHCAYQLADWCLHHICTNYNNVCRKFPRDMKAMSPENQEYFEKHRWPPVWYLKEEDHYQRARKEREKEDYLHLKRQPKRRWLFWNSPSSPSSSAASSSSPSSSSAVV

SEQ ID NO: 793260 - protein, 203 aa, Homo sapiens
MAAMFGGPFVESSTREVVFPYTSKSCMRAVLEYLYTGMFTSSPDLDDMKLIILANRLCLPHLVALTEQYTVTGLMEATQMMVDIDGDVLVFLELAQFHCAYQLADWCLHHICTNYNNVCRKFPRDMKAMSPENQEYFEKHRWPPVWYLKEEDHYQRARKEREKEDYLHLKRQPKRRWLFWNSPSSPSSSAASSSSPSSSSAVV

SEQ ID NO: 793261 - protein, 164 aa, Homo sapiens
GDVAVWFDRGLEQSILPVFLGSLLLIPIFLLGCGLRCCHPLLTLLLLSPSAFTPLLFRITPSTLQGPGGPRNQDPEGGALLTSHRGSAREELSPVEQNGNHLQRSPDPKQDGRQLLGGAKSPGILSLGLRALESKGKPPSLQGFSVCLGCCSGQGGSPTPSKQK

SEQ ID NO: 793262 - protein, 293 aa, Homo sapiens
RRLLLATRRALSGAADLMDADSLLLSLELASGSGQGLSPDRRASLLTSLMLVKRDYRYDRVLFWGRILGLVADYYIAQGLSEDQLAPRKTLYSLNCTEWSLLPPATEEMVAQSSVVKGRFMGDPSYEYEHTELQKVNEGEKVFEEEIVVQIKEETRLVSVIDQIDKAVAIIPRGALFKTPFGPTHVNRTFEGLSLSEAKKLSSYFHFREPVELKNKTLLEKADLDPSLDFMDSLEHDIPKGSWSIQMERGNALVVLRSLLWPGLTFYHAPRTKNYGYVYVGTGEKNMDLPFML

SEQ ID NO: 793263 - protein, 338 aa, Homo sapiens
RRLLLATRRALSGAADLMDADSLLLSLELASGSGQGLSPDRRASLLTSLMLVKRDYRYDRVLFWGRILGLVADYYIAQGLSEDQLAPRKTLYSLNCTEWSLLPPATEEMVAQSSVVKGRFMGDPSYEYEHTELQKVNEGEKVFEEEIVVQIKEETRLVSVIDQIDKAVAIIPRGALFKTPFGPTHVNRTFEGLSLSEAKKLSSYFHFREPVELKNKTLLEKADLDPSLDFMDSLEHDIPKGSEAVVQGDFTWLLSRCGFGWPCSWDSCSVSMRVLEHPDGEGQCPGGAAQPALAGPHLLPCSPHQELWLRLRGHWREEHGLALHAIEWEPAWMFLNRV

SEQ ID NO: 793264 - protein, 265 aa, Homo sapiens
RRLLLATRRALSGAADLMDADSLLLSLELASGSGQGLSPDRRASLLTSLMLVKRDYRYDRVLFWGRILGLVADYYIAQGLSEDQLAPRKTLYSLNCTEWSLLPPATEEMVAQSSVVKGRFMGDPSYEYEHTELQKVNEGEKVFEEEIVVQIKEETRLVSVIDQIDKAVAIIPRGALFKTPFGPTHVNRTFEGLSLSEAKKLSSYFHFREPVELKNKTLLEKADLDPSLDFMDSLEHDIPKGSWSIQMERGNALVGYDVPTCFVSS

SEQ ID NO: 793265 - protein, 194 aa, Homo sapiens
RRLLLATRRALSGAADLMDADSLLLSLELASGSGQGLSPDRRASLLTSLMLVKRDYRYDRVLFWGRILGLVADYYIAQGLSEDQLAPRKTLYSLNCTEWSLLPPATEEMVAQSSVVKGRFMGDPSYEYEHTELQKVNEGEKVFEEEIVVQIKEETRLVSVIDQIDKAVAIIPRGALFKTPFGPTHVNRTFEELV

SEQ ID NO: 793266 - protein, 85 aa, Homo sapiens
GTRVYTMDRGLISYKGLHPFHVEKGVKPLGQLAPAPAPSQSSCGVKRGSPCLLGFLTQAAALALPCPSKAIMVPSRQSGAGLGDI

SEQ ID NO: 793267 - protein, 517 aa, Homo sapiens
MAALRLLASVLGRGVPAGGSGLALSQGCARCFATSPRLRAKFYADPVEMVKDISDGATVMIGGFGLCGIPENLIAALLRTRVKDLQVVSSNVGVEDFGLGLLLAARQVRRIVCSYVGENTLCESQYLAGELELELTPQGTLAERIRAGGAGVPAFYTPTGYGTLVQEGGAPIRYTPDGHLALMSQPREVREFNGDHFLLERAIRADFALVKGWKADRAGNVVFRRSARNFNVPMCKAADVTAVEVEEIVEVGAFPPEDIHVPNIYVDRVIKGQKYEKRIERLTILKEEDGDAGKEEDARTRIIRRAALEFEDGMYANLGIGIPLLASNFISPSMTVHLHSENGILGLGPFPTEDEVDADLINAGKQTVTVLPGGCFFASDDSFAMIRGGHIQLTMLGAMQVSKYGDLANWMIPGKKVKGMGGAMDLVSSQKTRVVVTMQHCTKDNTPKIMEKCTMPLTGKRCVDRIITEKAVFDVHRKKELTLRELWEGLTVDDIKKSTGCAFAVSPNLRPMQQVAP

SEQ ID NO: 793268 - protein, 526 aa, Homo sapiens
MAALRLLASVLGRGVPAGGSGLALSQGCARCFATSPRLRAKFYADPVEMVKDISDGATVMIGGFGLCGIPENLIAALLRTRVKDLQVVSSNVGVEDFGLGLLLAARQVRRIVCSYVGENTLCESQYLAGELELELTPQGTLAERIRAGGAGVPAFYTPTGYGTLVQEGGAPIRYTPDGHLALMSQPREVREFNGDHFLLERAIRADFALVKGWKADRAGNVVFRRSARNFNVPMCKAADVTAVEVEEIVEVGAFPPEDIHVPNIYVDRVIKGQKYEKRIERLTILKEEDGDAGKEEDARTRIIRRAALEFEDGMYANLGIGIPLLASNFISPSMTVHLHSENGILGLGPFPTEDEVDADLINAGKQTVTVLPGGCFFASDDSFAMIRGGHIQLTMLGAMQVSKYGDLANWMIPGKKVKGMGGAMDLVSSQKTRVVVTMQHCTKDNTPKIMEKCTMPLTGKRCVDRIITEKAVFDVHRKKELTLRELWEGLTVDDIKKSTGCAFAVSPNLRPMQQVDSAPLESCDFN

SEQ ID NO: 793269 - protein, 143 aa, Homo sapiens
KADLAVAAFTITAEREKVIDFSKPFMTLGISILYRVHMGRKPGYFSFLDPFSPAVWLFMLLAYLAVSCVLFLAARLSPYEWYNPHPCLRARPHILENQYTLGNSLWFPTLLEVGRASGQMGVPWCPSTLLFLSFLGGETSEFL

SEQ ID NO: 793270 - protein, 109 aa, Homo sapiens
PDKNSGSTVPLPGQSTVGKGQAHKVGLQRPLRTPATVSGGTSWPSLLPFDPPPGPLPQINCCHSYQGKGCLSTGMLPAEELCPGASAGKAARRVAVPGAAQRGETKLHK

SEQ ID NO: 793271 - protein, 129 aa, Homo sapiens
LFPSTGPVGSVFKVYPESHHFSSASVPTSSHFGGPVPLEESVELSGSFSLLCISMDASLVPATYTHLDFWNILLTPLLSSHTCFLPSYFPMAARMGILKCKSDHIVLMLKTFPYFFMILRIKRNLFMNL

SEQ ID NO: 793272 - protein, 93 aa, Homo sapiens
PVSAWLRNKVCQRQWWGVRHSRRFGATVCREPCSCYVSFARCHTNTAPRGAHSVQAGTGWCQWPLQIVPRCVALGTHGFPGELPYHLGLTLRD

SEQ ID NO: 793273 - protein, 189 aa, Homo sapiens
MGYRVRVSPAPAQPTSRRILISKDPWSLGSHPSGLSGRPLPFTRRAGSARSALRTRSLGRPEPDGPAGVGRRRNGLAFRDQREGGPRCPSGRVLSTRSPHSQGLASGGARTGAWGRRRRSQKGPSGAETFGGRRGLRVSMAGSGMRLDRPGRRSGTRREAEGLASSRTSICSEPGRGFGIRSLTPCVSS

SEQ ID NO: 793274 - protein, 189 aa, Homo sapiens; identical to SEQ ID NO: 793273

SEQ ID NO: 793275 - protein, 109 aa, Homo sapiens
SGQPTQAPPLGGGPSDFRVLKPGMTEQPRESACSSLLDTTEVFAFLTSGWPHPDSSTWGSTNQLSARGQLLLLMISPLTQPVSTPHSLAPYLSNYLKNPLTSEPLVRWI

SEQ ID NO: 793276 - protein, 123 aa, Homo sapiens
RPPRVGAGSSGDVGRGPGGGEAPGGQARGREAPGNPQPLRRPSQGARARKRPVCTRPPPSPRPARAPRSLEPERWLRAAWRGGEACPPPPLPPTPRCGSEEQLPLAGARRGRAAAPTGAGKRP

SEQ ID NO: 793277 - protein, 293 aa, Homo sapiens
MDTAKSKSESPKELVQLKKLFIGGLSFETTNESLRSHSEQWGTLADCVVMRDPNTKHSRGFGFATYATEEEVDAATNARPHKVDGRVVEPKRAVSREDSQRPDAHLTMEKIFVGGINEDTEEYHLSDYFEQYGKTEVIEIMTDQGSGKKRGFAFVTFDDHDSVDKTVIQKYHTVNGHNCEIRKGLSKQEMVSASSSQRGQSTSGNFGGGRGGGFGRNDNFGCEGNFSGHGGFGGSCGGGGYRAVGMAIMDLVMMEAILEVEATMILAIIYQISPSLNVSLLLTLSILSIIAGS

SEQ ID NO: 793278 - protein, 257 aa, Homo sapiens
MPARCVAAHCGNTTKSGKSLFRFPKDRAVRLLWDRFVRGCRADWYGGNDRSVICSDHFAPACFDVSSVIQKNLRFSQRLRLVAGAVPTLHRVPAPAPKRGEEGDQAGRLDTRGELQAARHSEAAPGPVSCTRPRAGKQAAASQITCENELVQTQPHADNPSNTVTSVPTHCEEGPVHKSTQISLKRPRHRSVGIQAKVKAFGKRLCNATTQTEELWSRTSSLFDIYSSDSETDTDWDIKSEQSDLSYMAVQVKEETC

SEQ ID NO: 793279 - protein, 138 aa, Homo sapiens
MEAVNKLSLRLQRTLVACAGSSSDQYASGHGCPGPCSVVKQVLAAEAIEMETGRSAVDESHYLLSLTLFGLNKLPVFLTNRGRVGTEPQKSSLDFLLIGHWKFKRLTRKQVSICTPTLCNRLHTICSIWHPFLRLDSQ

SEQ ID NO: 793280 - protein, 138 aa, Homo sapiens; identical to SEQ ID NO: 793279

SEQ ID NO: 793281 - protein, 167 aa, Homo sapiens
RDLPPAAKQQDGAAAMEMQPLKSAEGGDADDRKKASMHKKEKSVLQGKLTKLAVQIGKAGLVMSAITVIILVLYFTVDTFVVNKKPWLPECTPVYVQYFVKFFIIGVTVLVVAVPEGLPLAVTISLAYSVKVRGEESRTSRLMQLQLRAWGNHWGWCWGWEMNEEAP

SEQ ID NO: 793282 - protein, 132 aa, Homo sapiens
EEKDLLKAERCLLETLALAPHEEYIQRHLNIVRDKISSSSFIEPIFPTSKISSVEGKKIPTESVKEIRGESRQTQIVKTSDNKSQSKSNKQLGKNGDEETPHKTTKDIKEIEKKRVAALKRLEEIERILNGE

SEQ ID NO: 793283 - protein, 104 aa, Homo sapiens
MRSSAASPTSLPAFADPAAVPPLEHVYVWTLLLCQRWCTYMYMDSTATTLTKHCCCPPPIPPIGVLLPADWGHIGPSSDSRSENKAMGLVPAPRVRACRPRVLN

SEQ ID NO: 793284 - protein, 126 aa, Homo sapiens
MGLGQSNLNTPLSASLSQCPCLATPSCTSPTSLPAFADPAAVPPLEHVYVWTLLLCQRWCTYMYMDSTATTLTKHCCCPPPIPPIGVLLPADWGHIGPSSDSRSENKAMGLVPAPRVRACRPRVLN

SEQ ID NO: 793285 - protein, 1170 aa, Homo sapiens [sequence omitted]

SEQ ID NO: 793286 - protein, 503 aa, Homo sapiens
MELGGPSEMEEVRCPEHGTFCFLKTGVRDGPNKGKSFYVCRADTCSFVRATDIPVSHCLLHEDFVVELQGLLLPQDKKEYRLFFRCIRSKAEGKRWCGSIPWQDPDSKEHSVSNKSQHASETFHHSSNWLRNPFKVLDKNQEPALWKQLIKGEGEEKKADKKQREKGDQLFDQKKEQKPEMMEKDLSSGLVPKKKQSVVQEKKQEEGAEIQCEAETGGTHKRDFSEIKSQQCQGNELTRPSASSQEKSSGKSQDVQRESEPLREKVTQLLPQNVHSHNSISKPQKGGPLNKEYTNWEAKETKAKDGPSIQATQKSLPQGHFQERPETHSVPAPGGPAAQAAPAAPGLSLGEGREAATSSDDEEEDDVVFVSSKPGSPLLFDSTLDLETKENLQFPDRSVQRKVSPASGVSKKVEPSDPVARRVYLTTQLKQKKSTLASVNIQALPDKGQKLIKQIQELEEVLSGLTLSPEQGKVAYASELRVCIDFTRDIREALLIKNVLIQK

SEQ ID NO: 793287 - protein, 989 aa, Homo sapiens
MEKDLSSGLVPKKKQSVVQEKKQEEGAEIQCEAETGGTHKRDFSEIKSQQCQGNELTRPSASSQEKSSGKSQDVQRESEPLREKVTQLLPQNVHSHNSISKPQKGGPLNKEYTNWEAKETKAKDGPSIQATQKSLPQGHFQERPETHSVPAPGGPAAQAAPAAPGLSLGEGREAATSSDDEEEDDVVFVSSKPGSPLLFDSTLDLETKENLQFPDRSVQRKVSPASGVSKKVEPSDPVARRVYLTTQLKQKKSTLASVNIQALPDKGQKLIKQIQELEEVLSGLTLSPEQGTNEKSNSQVPQQSHFTKTTTGPPHLVPPQPLPRRGTQPVGSLELKSACQVTAGGSSQCYRGHTNQDHVHAVWKITSEAIGQLHRSLESCPGETVVAEDPAGLKVPLLLHQKQALAWLLWRESQKPQGGILADDMGLGKTLTMIALILTQKNQEKKEEKEKSTALTWLSKDDSCDFTSHGTLIICPASLIHHWKNEVEKRVNSNKLRVYLYHGPNRDSRARVLSTYDIVITTYSLVAKEIPTNKQEAEIPGANLNVEGTSTPLLRIAWARIILDEAHNVKNPRVQTSIAVCKLQACARWAVTGTPIQNNLLDMYSLLKFLRCSPFDEFNLWRSQVDNGSKKGGERLSILTKSLLLRRTKDQLDSTGRPLVILPQRKFQLHHLKLSEDEETVYNVFFARSRSALQSYLKRHESRGNQSGRSPNNPFSRVALEFGSEEPRHSEAADSPRSSTVHILSQLLRLRQCCCHLSLLKSALDPMELKGEGLVLSLEEQLSALTLSELRDSEPSSTVSLNGTFFKMELFEGMRESTKISSLLAELEAIQRNSASQKSVIVSQWTNMLKVVALHLKKHGLTYATIDGSVNPKQRMDLVEAFNHSRGPQVMLISLLAGGVGLNLTGGNHLFLLDMHWNPSLEDQACDRIYRVGQQKDVVIHRFVCEGTVEEKILQLQEKKKDLAKQVLSGSGESVTKLTLADLRVLFGI

SEQ ID NO: 793288 - protein, 387 aa, Homo sapiens
MYSLLKFLRCSPFDEFNLWRSQVDNGSKKGGERLSILTKSLLLRRTKDQLDSTGRPLVILPQRKFQLHHLKLSEDEETVYNVFFARSRSALQSYLKRHESRGNQSGRSPNNPFSRVALEFGSEEPRHSEAADSPRSSTVHILSQLLRLRQCCCHLSLLKSALDPMELKGEGLVLSLEEQLSALTLSELRDSEPSSTVSLNGTFFKMELFEGMRESTKISSLLAELEAIQRNSASQKSVIVSQWTNMLKVVALHLKKHGLTYATIDGSVNPKQRMDLVEAFNHSRGPQVMLISLLAGGVGLNLTGGNHLFLLDMHWNPSLEDQACDRIYRVGQQKDVVIHRFVCEGTVEEKILQLQEKKKDLAKQVLSGSGESVTKLTLADLRVLFGI

SEQ ID NO: 793289 - protein, 1301 aa, Homo sapiens
MARNCSECKEKRAAHILCTYCNRWLCSSCTEEHRHSPVPGGPFFPRAQKGSPGVNGGPGDFTLYCPLHTQEVLKLFCETCDMLTCHSCLVVEHKEHRCRHVEEVLQNQRMLLEGVTTQVAHKKSSLQTSAKQIEDRIFEVKHQHRKVENQIKMAKMVLMNELNKQANGLIEELEGITNERKRKLEQQLQSIMVLNRQFEHVQNFINWAVCSKTSVPFLFSKELIVFQMQRLLETSCNTDPGSPWSIRFTWEPNFWTKQLASLGCITTEGGQMSRADAPAYGGLQGSSPFYQSHQSPVAQQEALSHPSHKFQSPAVCSSSVCCSHCSPVSPSLKGQVPPPSIHPAHSFRQPPEMVPQQLGSLQCSALLPREKELACSPHPPKLLQPWLETQPPVEQESTSQRLGQQLTSQPVCIVPPQDVQQGAHAQPTLQTPSIQVQFGHHQKLKLSHFQQQPQQQLPPPPPPLPHPPPPLPPPPQQPHPPLPPSQHLASSQHESPPGPACSQNMDIMHHKFELEEMQKDLELLLQAQQPSLQLSQTKSPQHLQQTIVGQINYIVRQPAPVQSQSQEETLQATDEPPASQGSKPALPLDKNTAAALPQASGEETPLSVPPVDSTIQHSSPNVVRKHSTSLSIMGFSNTLEMELSSTRLERPLEPQIQSVSNLTAGAPQAVPSLLSAPPKMVSSLTSVQNQAMPSLTTSHLQTVPSLVHSTFQSMPNLISDSPQAMASLASDHPQAGPSLMSGHTQAVPSLATCPLQSIPPVSDMQPETGSSSSSGRTSGSLCPRDGADPSLENALCKVSPGEMLSKLPLFIIGQKIGHWDPYSDLSLTVLRPLMTTMSEFFDSCRHFTFEKMESEDSTRFTDLLGQGPIVPGLDAPKDLAIPSELEEPINLSVKKPPLAPVVSTSTALQQYQNPKECENFEQGALELDAKENQSIRAFNSEHKIPYVRLERLKICAASSGEMPVFKLKPQKNDQDGSFLLIIECGTESSSMSIKVSQDRLSEATQAPGLEGRKVTVTSLAGQRPPEVEGTSPEEHRLIPRTPGAKKGPPAPIENEDFCAVCLNGGELLCCDRCPKVFHLSCHVPALLSFPGGEWVCTLCRSLTQPEMEYDCENACYNQPGMRASPGLSMYDQKKCEKLVLSLCCNNLSLPFHEPVSPLARHYYQIIKRPMDLSIIRRKLQKKDPAHYTTPEEVVSDVRLMFWNCAKFNYPDSEVAEAGRCLEVFFEGWLKEIYPEKRFAQPRQEDSDSEEVSSESGCSTPQGFPWPPYMQEGIQPKRRRRHMENERAKRMSFRLANSISQV

SEQ ID NO: 793290 - protein, 103 aa, Homo sapiens
MYNVYSHNPAPESQRGSTSRLAIPSQLSKGRKSAMKKKSHPFFPHGHRRLASRHVDSQPWGPEVLEKKSQKDRKGFGKNSFVPSAQMVILGTVSLWLLITVHI

SEQ ID NO: 793291 - protein, 109 aa, Homo sapiens
MEPELVPVLVPGAAHYHSSWHAWLCTVARPHTHLLTYPWPLCTWIALGGMGSRTVVWTECSLLGRVARATGHRGFWLGNWHQKNKSCVTKSAFTSVRNERGDENISSKC

SEQ ID NO: 793292 - protein, 228 aa, Homo sapiens
VLPTSKSPQSILTSQFPIPSLFATISQPLIQPQCPECHESLGLTQDSGLQRTPGPSKDSRVPRNLDLAQNPDLYKNPGLTQDPGLHENPGLAPNQGLHEFPGLPQDSYLCQNPSPSQDFGLHKNSGITQDSHPQKNTGLTQEAGILRSPCLTQSPGLHKKTPFTQTSDLQRSSGFTQDSGIYRNLEPNQETVIYKNQDLSQATDHQKNLGSSKDSGGHKNTGNVQDPG

SEQ ID NO: 793293 - protein, 103 aa, Homo sapiens
TNKRMNKETAGLLLRSRQSADRNCGRCTESQKDQPHREAQSIRHGAGPRAPRGGREAAAAPRGVRARPLSGSEVMLPGEGQMDSSVCRCGAREDPTPPVWHSP

SEQ ID NO: 793294 - protein, 75 aa, Homo sapiens
MSTCSTGMGCHWPVRPLLTRTSPELLRGLVVSVPSTRPRSPGFSSTYRPVPSWGECQPPWRLRPCRTHMLSSLMG

SEQ ID NO: 793295 - protein, 101 aa, Homo sapiens
EKACWSSVCFALVLNSSFCYVWPFRVEQVNNCMLVVERGGTGMSQPLGRGRGMSHCRDSLAAFLFLSRLLSPVTVGDNLKKPHHHWLLFSLLLIENSCFWR

SEQ ID NO: 793296 - protein, 75 aa, Homo sapiens
SLGTALEPPSVNCTLTIWSPAFSLKGLDWIFPVSPEINFKQVNKTIEEKCLEYFIRRQKSPGVKWKETCLYKQLK

SEQ ID NO: 793297 - protein, 123 aa, Homo sapiens
GNVSAHLGSLLQQEWRCVMSNRPSLSLRPGSGPTQPLLPESRGGSKRMALAFECSQAIQVQSILLLSSVPEASLLLLGQTHFSPQGLLSCSRVYTCCPSKAFTMIQAWPVAPASGTSHGLRST

SEQ ID NO: 793298 - protein, 48 aa, Homo sapiens
MAVTVPTSDALSFETWQAWYALALAAPRVPWTCCLGAALPSRRARLLR

SEQ ID NO: 793299 - protein, 138 aa, Homo sapiens
MMPHIQHLKGAHSKNLFLKDKKKKNYWLVTVLHDRQINLNELAKQLGVGSGNLRFADETAMLEKLKVGQGCATPLALFCDGGDVKFVLDSAFLEGGHEKVYFHPMTNAATMGLSPEDFLTFVKMTGHDPIILNFDKNN

SEQ ID NO: 793300 - protein, 72 aa, Homo sapiens
VYFKQFCRTCQKSYNPYRVEDITCQSCKQTRCSCPVKLRHVDPKRPHRQDLCGRCKGKRLSCDSTFSFKYII

SEQ ID NO: 793301 - protein, 162 aa, Homo sapiens
LPAISKAPSMDVQQETHKSQDCLGLLAPLASAAGVPSTAPMSGKKHRPPGPLFSSSDPLPATSSHSQDSAQVTSLIPAPFPAASMDAGMRRTRCGTSAPAAAAAAPPPSTLNPTLGSLLEWMEALHISGPQPQLQQVPRGQNQRSQTSRTSSCPKRNAISSP

SEQ ID NO: 793302 - protein, 122 aa, Homo sapiens
PTLTPCNLLNGKYYVSAVSDGNRAGFQEELTEHMILQGNQVTKSPQASPSLSVNQGSGGNPSTAALQWPMKYLFPTSSMSLIAFWLRKADSVSRATNMVSQLFNHSKFFFQPQLDYSYSEHV

SEQ ID NO: 793303 - protein, 104 aa, Homo sapiens
SCWAWNMFFSSLESSSFVFPLHLDGFSVPCLTWNNVPSVPCVSTKMSCPKEHAFQAPCPEPPTANGLAFPNLLGFLTHPIQYFPSRSSPPTCNDLCHVSFPSRL

SEQ ID NO: 793304 - protein, 90 aa, Homo sapiens
EDHSDVGAARGHTLSKVLKASAHWGQLAMGVCGRCHSKPLLTLGVPPSDSRGKESLGLVSGLGAAWATHIFERRFGGTAGDSLSHHLSPL

SEQ ID NO: 793305 - protein, 128 aa, Homo sapiens
PVPHQMLPYMNVGTLSRTELQLLNQLHCRRKRRHRTIFTDEQLEALENLFQETKYPDVGTREQLARKVHLREEKVEVWFKNRRAKWRRQKRSSSEESENAEKWNKTSSSKASPEKREEEGKSDLDSDS

SEQ ID NO: 793306 - protein, 99 aa, Homo sapiens
MGAGARSEKPSIFGAEKEGCLALDQRGFVTLVHICYSLGTSASLGVLGWLKESQIRVDKCSGFLHYVSKNHAASAFTLPVTKSQLFLLCEEGVCYIDPK

SEQ ID NO: 793307 - protein, 101 aa, Homo sapiens
AQETLGGLAPALENKFLVCPPELMVWWRICLKEFVPGKVQLHLTGKGEKRERGINLWPSASCLGICPFQPAPTPLEPKTMPCTCNQPATCEDHIKVFLSWL

SEQ ID NO: 793308 - protein, 137 aa, Homo sapiens
SPQVTSLMEGTSQVHGFGKPGLQRAPADTSLRQHRESVRWAPGPESLSSRPRLQERRLWALPASSLGRGQGCFGLCWAVENEGNFPCEDTRLANLPTHSSQGLSPYDSEGWALRNRHTGGCAGRERLTPGLTCPDPH

SEQ ID NO: 793309 - protein, 105 aa, Homo sapiens
PKNEEMFCDTEKFWKLKKKLDAQLNLSPEDTAFRNEDTAFPGEDTAFSEEDTAFPDEDIAFPGKDTPFSEEATAFSEEDTAFPDEDTAFPEEDTAFPDEVLASFR

SEQ ID NO: 793310 - protein, 86 aa, Homo sapiens
LWAAVWGREAGQMSRSPGEEAAPRGGQAGPQAWQDCLLPLGPGSAAWGWGTAMGQADLLPSLAPALRCGYPQVLEPLSAPFSPARE

SEQ ID NO: 793311 - protein, 134 aa, Homo sapiens
SSAGSRRTTGFGRRPRRPVDGRVGRGTGPTAAVSRFCPRRVRAMAASPGSGSANPRKFSEKIALHTQRQAEETRAFEQLMTDLTLSRVQFQKLQQLRLTQYHGGSLPNVSQLRSNASEFQVERNSSPCVDGLRQ

SEQ ID NO: 793312 - protein, 105 aa, Homo sapiens
  misc_feature (7)..(7): Xaa can be any naturally occurring amino acid
  misc_feature (9)..(9): Xaa can be any naturally occurring amino acid
NPWKRIXLXAAYTIPFSLKLLSKAFSCNDCAAFFFPLVASFPGPLKEENLLNVPKPLPKQLWETKEVGEQYSAMFVVTECLYLEVIEKSCRGESKRNWGKRRRFV

SEQ ID NO: 793313 - protein, 661 aa, Homo sapiens
SSAGSRRTTGFGRRPRRPVDGRVGRGTGPTAAVSRFCPRRVRAMAASPGSGSANPRKFSEKIALHTQRQAEETRAFEQLMTDLTLSRVQFQKLQQLRLTQYHGGSLPNVSQLRSNASEFQPSFHQADNVRGTRHHGLVERPSRNRFHPLHRRSGDKPGRQFDGSAFGANYSSQPLDESWPRQQPPWKDEKHPGFRLTSALNRTNSDSALHTSALSTKPQDPYGGGGQSAWPAPYMGFCDGENNGHGEVASFPGPLKEENLLNVPKPLPKQLWETKEIQSLSGRPRSCDVGGGNAFPHNGQNLGLSPFLGTLNTGGSLPDLTNLHYSTPLPASLDTTDHHFGSMSVGNSVNNIPAAMTHLGIRSSSGLQSSRSNPSIQATLNKTVLSSSLNNHPQTSVPNASALHPSLRLFSLSNPSLSTTNLSGPSRRRQPPVSPLTLSPGPEAHQGFSRQLSSTSPLAPYPTSQMVSSDRSQLSFLPTEAQAQVSPPPPYPAPQELTQPLLQQPRAPEAPAQQPQAASSLPQSDFQLLPAQGSSLTNFFPDVGFDQQSMRPGPAFPQQVPLVQQGSRELQDSFHLRPSPYSNCGSLPNTILPDSSTSLFKDLNSALAGLPEVSLNVDTPFPLEEELQIEPLSLDGLNMLSDSSMGLLDPSVEETFRADRL

SEQ ID NO: 793314 - protein, 661 aa, Homo sapiens; identical to SEQ ID NO: 793313

SEQ ID NO: 793315 - protein, 661 aa, Homo sapiens; identical to SEQ ID NO: 793313

SEQ ID NO: 793316 - protein, 661 aa, Homo sapiens; identical to SEQ ID NO: 793313

SEQ ID NO: 793317 - protein, 470 aa, Homo sapiens
SSAGSRRTTGFGRRPRRPVDGRVGRGTGPTAAVSRFCPRRVRAMAASPGSGSANPRKFSEKIALHTQRQAEETRAFEQLMTDLTLSRVQFQKLQQLRLTQYHGGSLPNVSQLRSNASEFQPSFHQADNVRGTRHHGLVERPSRNRFHPLHRRSGDKPGRQFDGSAFGANYSSQPLDESWPRQQPPWKDEKHPGFRLTSALNRTNSDSALHTSALSTKPQDPYGGGGQSAWPAPYMGFCDGENNGHGEVASFPGPLKEENLLNVPKPLPKQLWETKEIQSLSGRPRSCDVGGGNAFPHNGQNLGLSPFLGTLNTGGSLPDLTNLHYSTPLPASLDTTDHHFGSMSVGNSVNNIPAAMTHLGIRSSSGLQSSRSNPSIQATLNKTVLSSSLNNHPQTSVPNASALHPSLRLFSLSNPSLSTTNLSKPGLACSGLLDQTDGILAAALNPSAGISQGTSVQLLPLSLILLYELL

SEQ ID NO: 793318 - protein, 437 aa, Homo sapiens
SSAGSRRTTGFGRRPRRPVDGRVGRGTGPTAAVSRFCPRRVRAMAASPGSGSANPRKFSEKIALHTQRQAEETRAFEQLMTDLTLSRVQFQKLQQLRLTQYHGGSLPNVSQLRSNASEFQPSFHQADNVRGTRHHGLVERPSRNRFHPLHRRSGDKPGRQFDGSAFGANYSSQPLDESWPRQQPPWKDEKHPGFRLTSALNRTNSDSALHTSALSTKPQDPYGGGGQSAWPAPYMGFCDGENNGHGEVASFPGPLKEENLLNVPKPLPKQLWETKEIQSLSGRPRSCDVGGGNAFPHNGQNLGLSPFLGTLNTGGSLPDLTNLHYSTPLPASLDTTDHHFGSMSVGNSVNNIPAAMTHLGIRSSSGLQSSRSNPSIQATLNKTVLSSSLNNHPQTSVPNASALHPSLRLFSLSNPSLSRKSNSSLRRRSMCSRQPGL

SEQ ID NO: 793319 - protein, 315 aa, Homo sapiens
SSAGSRRTTGFGRRPRRPVDGRVGRGTGPTAAVSRFCPRRVRAMAASPGSGSANPRKFSEKIALHTQRQAEETRAFEQLMTDLTLSRVQFQKLQQLRLTQYHGGSLPNVSQLRSNASEFQPSFHQADNVRGTRHHGLVERPSRNRFHPLHRRSGDKPGRQFDGSAFGANYSSQPLDESWPRQQPPWKDEKHPGFRLTSALNRTNSDSALHTSALSTKPQDPYGGGGQSAWPAPYMGFCDGENNGHGEVASFPGPLKEENLLNVPKPLPKQLWETKEVGEQYSAMFVVTECLYLEVIEKSCRGESKRNWGKRRRFV

SEQ ID NO: 793320 - protein, 91 aa, Homo sapiens
GRRGARKTLALGYLFPEHTLALGPEISPCRGSHELRGQQQGWPHHPSATSSPAAQPAISPLTASVRGPCKTTKRKRRDHLRYDFKSSHWVV

SEQ ID NO: 793321 - protein, 101 aa, Homo sapiens
VIDVATSGVFSVFFLERYGEMWPCLVSLPEPHIGWIAVGGADFVATEPQTPLLPTGVIYKACRMPVRQWLQSGHSHWLAAPGVAHAENRSVPPSQQPVEIS

SEQ ID NO: 793322 - protein, 100 aa, Homo sapiens
RGLLQGWGLLYPLAPDKSQGTDVTHYEQAVKLWQGWSCPRLWHHPRGLELTPRYRLFRTPRPQAGASGEAFGHSESWHSQRVTQHEAPPPPPSTVSCEQS

SEQ ID NO: 793323 - protein, 69 aa, Homo sapiens
RLSSLAGGLEHRYFRDQLLEVQVLGLASSQALKPQVLQTHTTTCSRRALVLGEGGGELRECFFPSGQEN

SEQ ID NO: 793324 - protein, 89 aa, Homo sapiens
EGRCCQIEELGWNMPAHAGFPSDTREACIESPGHGPSRSSADSPFHTVGVRLRDSVLLRGTHRTRLTCAPRAAPSRNSRRSWGKEFPSG

SEQ ID NO: 793325 - protein, 74 aa, Homo sapiens
ERRWPGAPRERRGGRQRRRRRRRLPGCDFARGGHPGYLNGVGGAGSGLLGRAGGRRCTGAGRRMRQERRAAPRG

SEQ ID NO: 793326 - protein, 621 aa, Homo sapiens
RHHVHASPQLQELGGIPHPAQLGDAPGGRPPAPGGEGSSRPQSTPGAAGGRVKAGVPGRNVEGRRGLGPVALGWGPQLAPLGALGGGSSRLWGGEGAGWAGSGARGGGPGAAGSSPRGCLSAARRAEDSAGRARLGCRPAPSPRPCPGPRAPAAACAPQPRSPAPAAASSMGNLLGGVSFREPTTVEDCDSTWQTDSEPEPEEPGPGGGSEGPGQESEQPAQPPEQAGGRPGASPAPDEDAEAAGAEQGGDSTEATAKPKRSFYAARDLYKYRHQYPNFKDIRYQNDLSNLRFYKNKIPFKPDGVYIEEVLSKWKGDYEKLEHNHTYIQWLFPLREQGLNFYAKELTTYEIEEFKKTKEAIRRFLLAYKMMLEFFGIKLTDKTGNVARAVNWQERFQHLNESQHNYLRITRILKSLGELGYESFKSPLVKFILHEALVENTIPNIKQSALEYFVYTIRDRRERRKLLRFAQKHYTPSENFIWGPPRKEQSEGSKAQKMSSPLASSHNSQTSMHKKAKDSKNSSSAVHLNSKTAEDKKVAPKEPVEETDRPSPEPSNEAAKPRNTEKDSNAENMNSQPEKTVTTPTEKKESVSPENNEEGGNDNQDNENPGNTNCHDVVLVQ

SEQ ID NO: 793327 - protein, 334 aa, Homo sapiens
RHEEKFFIISFPFTENFFNVNTIWPKWKGDYEKLEHNHTYIQWLFPLREQGLNFYAKELTTYEIEEFKKTKEAIRRFLLAYKMMLEFFGIKLTDKTGNVARAVNWQERFQHLNESQHNYLRITRILKSLGELGYESFKSPLVKFILHEALVENTIPNIKQSALEYFVYTIRDRRERRKLLRFAQKHYTPSENFIWGPPRKEQSEGSKAQKMSSPLASSHNSQTSMHKKAKDSKNSSSAVHLNSKTAEDKKVAPKEPVEETDRPSPEPSNEAAKPRNTEKDSNAENMNSQPEKTVTTPTEKKESVSPENNEEGGNDNQDNENPGNTNCHDVVLVQ

SEQ ID NO: 793328 - protein, 190 aa, Homo sapiens
MPPLHQLAIPSLSLSLGLPIPSDTTILKLGPLNNPSLTYKCSSERKSHTFLTLKRKEQSEGSKAQKMSSPLASSHNSQTSMHKKAKDSKNSSSAVHLNSKTAEDKKVAPKEPVEETDRPSPEPSNEAAKPRNTEKDSNAENMNSQPEKTVTTPTEKKESVSPENNEEGGNDNQDNENPGNTNCHDVVLVQ

SEQ ID NO: 793329 - protein, 166 aa, Homo sapiens
MGNLLGGVSFREPTTVEDCDSTWQTDSEPEPEEPGPGGGSEGPGQESEQPAQPPEQAGGRPGASPAPDEDAEAAGAEQVRGPAVASGRAGAPRHPRGASAKPPSRSEARGARWLLAAATRPLRAAADLSPGGARGPAGAQSAGPSHCRPGAWPRARRGSPSRQNPT

SEQ ID NO: 793330 - protein, 252 aa, Homo sapiens
MMLEFFGIKLTDKTGNVARAVNWQERFQHLNESQHNYLRITRILKSLGELGYESFKSPLVKFILHEALVENTIPNIKQSALEYFVYTIRDRRERRKLLRFAQKHYTPSENFIWGPPRKEQSEGSKAQKMSSPLASSHNSQTSMHKKAKDSKNSSSAVHLNSKTAEDKKVAPKEPVEETDRPSPEPSNEAAKPRNTEKDSNAENMNSQPEKTVTTPTEKKESVSPENNEEGGNDNQDNENPGNTNCHDVVLVQ

SEQ ID NO: 793331 - protein, 621 aa, Homo sapiens; identical to SEQ ID NO: 793326

SEQ ID NO: 793332 - protein, 106 aa, Homo sapiens
IRQAILLEPIQIKLPNTERCFLHPARGAHSIFPCLTSWCEPWALLTMAQDSCPSESTRSIHVDRLPRRNSASLSLSAFPVSAGALINGEAWVRMGQVPIPKAPGRA

SEQ ID NO: 793333 - protein, 33 aa, Homo sapiens
FRRMVSISGGWRFPPHGNVAGAWSASSWLSVEG

SEQ ID NO: 793334 - protein, 119 aa, Homo sapiens
MGITPRQKCLLGDRHWLGWDQVASFCSPAQRTGSSRSALFFLDRGNENEYFPLKLTCFRILSGREHCSFLVLSHFQDPPTPACPHFELSSSAPASPHSSPRWLLSAHPDSRPHCAFFLR

SEQ ID NO: 793335 - protein, 169 aa, Homo sapiens
MEVFPAHISSYLRRLLQARTLLRGGYSPLIQTPALTAPSSCDDRGGGGRPPLASFQRTFKPEPQSQSPRAVEKSGAPRGPHRKLRAFPWKGREQGRPSWPLSPLLQGRRPLSERAALLVPPEVIVRVHFLGETEVILSSPPFLLFSGGRRLLDPGSLPASREIREGLYC

SEQ ID NO: 793336 - protein, 110 aa, Homo sapiens
EPFLHSVCFLRTPVFTKGVGKGREHRTYSGIQVTFYICLELGERLTNDSAGLTATANQADASNEEDLPRPGGCLLPPSGPWHISGPPALLSERDDGQRRILRDRACLQIL

SEQ ID NO: 793337 - protein, 102 aa, Homo sapiens
FTLLPGLECSGTISARCKLCLRGSSKSPASASRVIGTMGACHHAQLIFVFLVETGFHHVGFGQDGLELLTSSDLPASASQSAEMTGVSHCAWLDIIHFFPLS

SEQ ID NO: 793338 - protein, 69 aa, Homo sapiens
LLLVDEIIWSVLDFLPYSSFNGGRGICVLTVADIFFLSRWASSGTSSLLSSLCCSKEPSGKGARLSPHQ

SEQ ID NO: 793339 - protein, 71 aa, Homo sapiens
CNESTCTVKERDMQSPGLVQGSQMASVLKGKQAPSIRRWVADGRVTLGWERSLAAMSCQKARSSVVRNIRG

SEQ ID NO: 793340 - protein, 111 aa, Homo sapiens
NKNQNSSLYLHAKRTHDTNSTVISIKRVPYHTSGRIFVKDISKVTLTFLLFFVMVSNVNFFPYHLILEEIYFYSLLNREGNQMVSHLKLLDIILLLCSSKNIQQSQTEIIT

SEQ ID NO: 793341 - protein, 81 aa, Homo sapiens
EQDGERQKPNSRICWVLQTVAGTSLPGRCPSSVCSSGPQGGRKEPQRVRTTALTDARAGLHSVNLTKRTGCAGMFFFHFLH

SEQ ID NO: 793342 - protein, 115 aa, Homo sapiens
RPSKVAKWERLHRVGCRKTLTLAPAQPLSSRVALGDTCPWSVSLPVNLGTWKPCSRRAHPQEVIRVLLQVRNLAAVCENLRKGRGKRLWQEVRRELVIPWAGCHELGWKPQDECK

SEQ ID NO: 793343 - protein, 104 aa, Homo sapiens
SVFHPGIMPLVASPGLRARVSPASRQNQEGLPQSWARSGRWRAPLHRGLAEHSGKCKLPWAMPRVGQEYPLARNQEASKGNASMVTRRDGEAAPQGSSGAQKGA

SEQ ID NO: 793344 - protein, 116 aa, Homo sapiens
LKYSLPSQIPSPFLTKHRITKNRTTQPQYHLLRQFQPTFSAKAVSSLSGCIPCRQSELLARKQSSLLIFAVLKPIAEAMLCPSPDGSSVITKPSVGLLLCSGATGRERLNAFHPGP

SEQ ID NO: 793345 - protein, 107 aa, Homo sapiens
LTFDSTSAYSLTYALSRKWTLAQITPLLSTSIPRGGPTPFQLGSELGKFRPRVDFNSATCQRVDPNMPCVSPVGILGFPGSMLRRLGPPPDFFKALPKSQLLQSQEP

SEQ ID NO: 793346 - protein, 137 aa, Homo sapiens [sequence omitted]

SEQ ID NO: 793347 - protein, 101 aa, Homo sapiens
LLLPRLECNGTISAHCNLRLLGSNNSPTSASQVAVITGTCHHAQLIFIFLTEIRFHHIGQAGLKLLTSGDPPASASQSAGITGMSHRAWPSPRIETKLILY

SEQ ID NO: 793348 - protein, 83 aa, Homo sapiens
HRLIRGCSDYAADADYAARSDYAARSDYAARSDYAARSDYAARSHYAARSDTRLSTAPLELTTFPGLPRYLWLAAAILHRAGL

SEQ ID NO: 793349 - protein, 51 aa, Homo sapiens
MGCAGSFSKAWCALACARDPGRGLSANRGFAMWPARAYLRAVTTRLEAWAA

SEQ ID NO: 793350 - protein, 120 aa, Homo sapiens
RKGRREDLSPHLILPQWEWPLHVQLVPGSPNPSSSWEEGSGSSQQRAPGPALPCGRQGPPPKPLFLPINVFTLVLPQVRGCDNGIPSLHGGQELNFSLQAMKVQGLHFINGCYVIKNDKM

SEQ ID NO: 793351 - protein, 216 aa, Homo sapiens
QAAVPSGQCPPCRISRIWKAAAARNKKSERARLSRSSARRVPAPCRAWEPASHAINPLAGSPRSSRATRKTVSQPPWGPTDIVLTPCTTLLRGHTGPCSIESSGSPISAGDEGGRMTEPWLALGTSWTLPLQDRELGPEELDELQAAFEEFDTDRDGYISHRELGDCMRTLGYMPTEMELLEVSQHIKMRMGGRVDFEEFVELIGPKLREETAHML

SEQ ID NO: 793352 - protein, 101 aa, Homo sapiens
MTEPWLALGTSWTLPLQDRELGPEELDELQAAFEEFDTDRDGYISHRELGDCMRTLGYMPTEMELLEVSQHIKMRMGGRVDFEEFVELIGPKLREETAHML

SEQ ID NO: 793353 - protein, 78 aa, Homo sapiens
QAAVPSGQCPPCRISRIWKAAAARNKKSERARLSRSSARRVPAPCRAWEPASHAINPLAGSPRSSRATRKTVSQPPWG

SEQ ID NO: 793354 - protein, 486 aa, Homo sapiens
  misc_feature (20)..(20): Xaa can be any naturally occurring amino acid
PLPAAPEPLRPAARSPGTGXGAMDRGQVLEQLLPELTGLLSLLDHEYLSDTTLEKKMAVASILQSLQPLPAKEVSYLYVNTADLHSGPSFVESLFEEFDCDLSDLRDMPEDDGEPSKGASPELAKSPRLRNAADLPPPLPNKPPPEDYYEEALPLGPGKSPEYISSHTDGPWADCTFWLWCLDQMAAAPHTRSVDGYYEDADSSYPATRVNGELKSSYNDSDAMSSSYESYDEEEEEGKSPQPRHQWPSEEASMHLVRECRICAFLLRKKRFGQWAKQLTVIREDQLLCYKSSKDRQPHLRLALDTCSIIYVPKDSRHKRHELRFTQGATEVLVLALQSREQAEEWLKVIREVSKPVGGAEGVEVPRSPVLLCKLDLDKRLSQEKQTSDSDSVGVGDNCSTLGRRETCDHGKGKKSSLAELKGSMSRAAGRKITRIIGFSKKKTLADDLQTSSTEEEVPCCGYLNVWVTRREDAVPPDCHHCLTLC

SEQ ID NO: 793355 - protein, 88 aa, Homo sapiens
FTLPPAFCELLPPSPSASLSLPCSAPLALFFVPLQAADLPPPLPNKPPPEDYYEEALPLGPGKSPEYISSHSKFWSSWWGWGLPVPEK

SEQ ID NO: 793356 - protein, 94 aa, Homo sapiens
MEVKKIPVEEGLCTTIPCAFEFPKEPPSNSMIMHYWLNKNISSLVATNKPNATIGDNTKDKFYMTGNLDEEDCTLLIHDILKGNSIIYLFYADL

SEQ ID NO: 793357 - protein, 59 aa, Homo sapiens
VEVQGVAHEDAVQGIANEDAAHGITNEVAAHGIANEDAAQGIANEDAAQGIAHEDAVQG

SEQ ID NO: 793358 - protein, 70 aa, Homo sapiens
LILGTCQYVTLCGKRDFADVIKFKDLEMGRVPWTIQVGPISSQVLKIGELFLGCGKPERWQHEKNFAPYC

SEQ ID NO: 793359 - protein, 99 aa, Homo sapiens
EIRTFWNLNMRGLGGEGGTEEESSLGQAGGKLKTAAWPSWVAEVGAAGALADPGGQKSGSFLPSQQLQCIPGPGLYAGEASKDPVLRKLPFQCGRTHNP

SEQ ID NO: 793360 - protein, 99 aa, Homo sapiens; identical to SEQ ID NO: 793359

SEQ ID NO: 793361 - protein, 127 aa, Homo sapiens
TSVQISANVGWRTVYGHESKSFLMYLFNRGSQVDPAPAFFLPGLCLAAGSGNNPKGFISFRCLWPLLHNPDAFALTLHHIPLRVLFLMVPIGANTVDSVLSHHLAPTLKSKPELSPCILLAQSPPSV

SEQ ID NO: 793362 - protein, 103 aa, Homo sapiens
MSSVFWIYVQPRKQRLWDFNIEVSSKNVQRLIALREINLGPFVFSKHVLPSRNTCYGWFHPQDCIFLHWPQVTACCSQLISKDPQNNPIHAFPSPATPVIELP

SEQ ID NO: 793363 - protein, 87 aa, Homo sapiens
SSWTRGQRACSEPSPWTCLLCSVHAMEEVVKEVVGHAKETGEKAIAEAIKKAQESGDKKMKEVTETVTNTVTNAITHAAESLGKLGQ

SEQ ID NO: 793364 - protein, 426 aa, Homo sapiens
MAGLGFWGHPAGPLLLLLLLVLPPRALPEGPLVFVALVFRHGDRAPLASYPMDPHKEVASTLWPRGLGQLTTEGVRQQLELGRFLRSRYEAFLSPEYRREEVYIRSTDFDRTLESAQANLAGLFPEAAPGSPEARWRPIPVHTVPVAEDKLLRFPMRSCPRYHELLREATEAAEYQEALEGWTGFLSRLENFTGLSLVGEPLRRAWKVLDTLMCQQAHGLPLPAWASPDVLRTLAQISALDIGAHVGPPRAAEKAQLTGGILLNAILANFSRVQRLGLPLKMVMYSAHDSTLLALQGALGLYDGHTPPYAACLGFEFRKHLGNPAKDGGNVTVSLFYRNDSAHLPLPLSLPGCPAPCPLGRFYQLTAPARPPAHGVSCHGPYEAAIPPAPVVPLLAGAVAVLVALSLGLGLLAWRPGCLRALGGPV

SEQ ID NO: 793365 - protein, 79 aa, Homo sapiens
SRVTFTLQQSRWSTLVKDQEYYQFSDEERNIFGHQQSAFDHPQSQVFHRCLEKYFIQRTHMSSLNVSFLGAVGERNFKM

SEQ ID NO: 793366 - protein, 201 aa, Homo sapiens
SNFLFGGHTVFLQHLEPGAGFSDPLLWSTSAADDQSGSVVILVGITLLTTLKGLNWVPCYREGLLQITVDSITMNGEAIACAEGCQAIVDTGTSLLTGPTSPIANIQSDIGASENSDGDMVVSCSAISSLPDIVFTINGVQYPVPPSAYILQSEGSCISGFQGMNLPTESGELWILGDVFIRQYFTVFDRANNQVGLAPVA

SEQ ID NO: 793367 - protein, 285 aa, Homo sapiens
SNFLFGGHTVFLQHLEPGAGFSDPLLWSTSAADDQSGSVVILVGITLLTTLKGLNWVPCYREGLLQITVDSITMNGEAIACAEGCQAIVDTGTSLLTGPTSPIANIQSDIGASENSDGDMVVSCSAISSLPDIVFTINGVQYPVPPSAYILQSEGSCISGFQGMNLPTESTSPSGMLPPWQMTQPLENYLDMEYFATIGIATPAQDCAPSSFDTRLLPPRWVPSVYCSSLACTSHIRFNPEDSSTYQSTIETVSITLRHRQHDTASSDTTLSRLEPSLTPIRSSA

SEQ ID NO: 793368 - protein, 72 aa, Homo sapiens
VYHPAPITAESVSQLHFYSPFLQSEGSCISGFQGMNLPTESGELWILGDVFIRQYFTVFDRANNQVGLAPVA

SEQ ID NO: 793369 - protein, 109 aa, Homo sapiens
QTIQTAQGEVMGSINKLYLHPPVSSCSSSCYHKRHTVICGKINQQTTSGCGHTKELPQTPLPNINPSFCKFGAASSLTVKGAAGRLTKTCLPDFESIFPFSRVTSHQPP

SEQ ID NO: 793370 - protein, 122 aa, Homo sapiens
YNQCAVVGNGGILNKSLCGTEIDKSDFVFRCNLPPTTGDVSKDVGSKTNLVTINPSIITLKYGNLKEKKALFLEDIATYGDAFFLLPAFSFRANTGTSFKVYYTLEESKASFSPSAKQKEEL

SEQ ID NO: 793371 - protein, 92 aa, Homo sapiens
THTEACGPILTGTCGLGTGGAGKTPPTFGPWKAPLPMSLFAGSPDPTWGSHGSPAQPGVGMGHRPFLFSLYRQILTTHPPSPDTFYLITCHC

SEQ ID NO: 793372 - protein, 76 aa, Homo sapiens
MRLSLLRIPDVREPVWASRHLLALPQGGTTLQGALLVQHAGALAPINPRMRHSGQLGIEPVASQRVLPRHVLALFY

SEQ ID NO: 793373 - protein, 341 aa, Homo sapiens
MEVTRQHPRHPYPKVGSRIPSNRKCHSPPPPPSGTLTGAECGGGRGRERRGGGTRHTHHAENCFTAFLKVAEGAAAAAAKETQDRERRSGGDGGGNSEGARNSPSARQGRGRRGRGASRRTPRTVTAATAGRARARALPSLRPREPEKDSHPRSRRRPLPHFRRLLATAGVGAGMRAGVVVQFNPSGAARRLERLEKPPTPAAFVSPAGNTQPAQLVPAGSFRDSSRLRPHGGHRPRELLEGFFSLCLLDGRREEGTAPLLGTSSVERSPFNRQGLNFHASCQCALDFILLRIGPHPPWCSDCEFPNPGFCARTLALPVRWFLADNPSSGWVRGYIYVAFF

SEQ ID NO: 793374 - protein, 363 aa, Homo sapiens
MEVTRQHPRHPYPKVGSRIPSNRKCHSPPPPPSGTLTGAECGGGRGRERRGGGTRHTHHAENCFTAFLKVFKMQFLQPENSHPFTSPSPHPAPHPHRGLRWAVSPRRPRPHAPRRAAPGGGVPDAAQLGMLRYLYVVVLAVIGHPFQICVAVEEGPAAPRDFLFQQHLQLRHLHILLLLLLITGRRGSGGRSAKETQDRERRSGGDGGGNSEGARNSPSARQEEGATGAGREPTDSEDGHRGDGRPGARTRAPFPPPPGARKRFPPSLAPPAPPPLPASPSDGGGRGRDARGSWWCSLTLPAPPAAWSGWRSPRLRRPLLARPGTHNLLSWFLPGPSGTHLGSVPMEVIGLGNFSKAFLPLLA

SEQ ID NO: 793375 - protein, 141 aa, Homo sapiens
ARAGEAEKKHQAYKCMLTCSRNRLIAWAFPWDPCLQASLIHAFLGSPHQPLLKTLQGFSCQAPCRTSQALWDSSSRASPASFATVTHSPALIHQLAHHRRSYKISFETLILYIYVHPPKLIKQESRQVVIDKYVIKCLQNV

SEQ ID NO: 793376 - protein, 119 aa, Homo sapiens
VHAPPVQPISLKINEYIQVQIRSQDKIIFCFTYEQKQICLNLGTRYKFVIPEVLSEMKKKTILEAEPGPTAQKIRVLLGKMNRLLNYATTPDLENFIEAVSISLMDNKYLKKMLSKLWF

SEQ ID NO: 793377 - protein, 112 aa, Homo sapiens
NIIDMWKWLFDYNNCIMTSDFILQPTVISQLPLQCERCYQRFCIPYGLKLLRRNIFLCLTKAYEENVTKIFIKGQVRWLTPVIPALWEAKAGRSRGQEFKTSLANIGKPHLY

SEQ ID NO: 793378 - protein, 140 aa, Homo sapiens
YLHFAQERIEREQFRVSQNQITKDLSPNTHTCNYSMLLPGTGLYLEVANFTTTEDLRKPLACLHPTHTQSIKNNRNILCMELCYHPIALRTTGLGHISKCTLNETIPPYLLTRLTFDPHFTEQVSKTPAEKITYPRSQTL

SEQ ID NO: 793379 - protein, 149 aa, Homo sapiens
YVGITSRTTKMTIKESLLSAGSTAGMGLSTHCNVICTGKHHIGHINSGKIVVEKLPQLGVVVTPVIPELCKAVRLVDPLRPRVRDQPEQNRETPPMQKIQKLARRGGALLLTQLFRKLRQKDHKKSRPQWGIITSLHSTMGDRGETLLQ

SEQ ID NO: 793380 - protein, 129 aa, Homo sapiens
PLSSCSPGTLQPEQDCTCSLPGASSLSGLALASDALSFGFEICWVRFTRALAFFGLGILNSFFKQAVDQLYLLTSGCISCSPAPDLLFPWFILSLCCSTSSSGFQRNSEWKPSFLTLTYFRMSLFYPNS

SEQ ID NO: 793381 - protein, 155 aa, Homo sapiens
MRWLYTWVTRAHTEPSTRPTSFPYSSARPVNSENAQIPAGPGLPGRAGRTGLRGAARGRGRGRGRRKSQESLWGLQGRGSGCGCGVGICISRAGPADARGLQETRGPGLGVQEVIREGLGRPRGQGSSREAAPRRSQEGRRATPGPATFQRLGTA

SEQ ID NO: 793382 - protein, 192 aa, Homo sapiens
MGEDTLPDQGPPYERWSPTSPRPYMRNLPGRCNKSETDPLILSQVAFTPEAMDGLGGRGKWGQASAAAPEGRSLANGTPPMGAASKVPAVQSVCARGMAGQLAPLQVTEGSTSSGTESSESDSEMLIPGSQPLIFGNPAVLRSPSLLRSRGSLGGLRLMRNRRRMSEEARSQVFSPSNLGSRDQGFPKDHLF

SEQ ID NO: 793383 - protein, 85 aa, Homo sapiens
SRLALTPLTEFPLSILWGAASQEALPRPGCSFFPRKPPGDAPGGPATPWRRRVIVLSGILQDHHETLNWITLPRPALLTEQLEPI

SEQ ID NO: 793384 - protein, 393 aa, Homo sapiens
AGRVRPRGLGRDRCMGDSRRRSLGNQPSSEAAGRSEREQDGDPRGLQSSVYESRRVTDPERQDLDNAELGPEDPEEELPPEEVAGEEFPETLDPKEALSELERVLDKDLEEDIPEISRLSISQKLPSTTMTKARKRRRRRRLMELAEPKINWQVLKDRKGRCGKGYAWISPCKMSLHFCLCWPSVYWTERFLEDTTLTITVPAVSRRVEELSRPKRFYLEYYNNNRTTPVWPIPRSSLEYRASSRLKELAAPKIRDNFWSMPMSEVSQVSRAAQMAVPSSRILQLSKPKAPATLLEEWDPVPKPKPHVSDHNRLLHLARPKAQSDKCVPDRDPRWEVLDVTKKVVASPRIISLAKPKVRKGLNEGYDRRPLASMSLPPPKASPEKCDQPRPGL

SEQ ID NO: 793385 - protein, 169 aa, Homo sapiens
QSFSFQRDNPGTSSSQCCTQKENLRPSSPHRSTQWNNPRNSSPHRTNKDIPWASFPLRPTQSDGPRTSSPSRSKQSEVPWASIALRPTQGDRPQTSSPSRPAQHDPPQSSFGPTQYNLPSRATSSSHNPGHQSTSRTSSPVYPAAYGAPLTSPEPSQPPCAVCIGHRDA

SEQ ID NO: 793386 - protein, 37 aa, Homo sapiens
MILSDDQPAAITGCLLSNRLHVFCYEIQKKHDVLAES

SEQ ID NO: 793387 - protein, 103 aa, Homo sapiens [sequence omitted]

SEQ ID NO: 793388 - protein, 261 aa, Homo sapiens [sequence omitted]

SEQ ID NO: 793389 - protein, 194 aa, Homo sapiens
MTVFRQENVDDYYDTGEELGSGQFAVVKKCREKSTGLQYAAKFIKKRRTKSSRRGVSREDIEREVSILKEIQHPNVITLHEVYENKTDVILILELWVPPGPGWGEGVVGVSWHLRSSWTTPQRARERDQELVLLYEVCENNAVLPDLKPSCRDLEQTLKSNSHHCGSTQFARGSPSLAVHHFLGFIFAVSTSVF

SEQ ID NO: 793390 - protein, 79 aa, Homo sapiens
WYGPGLWECDCMRLYVSAACPFSLVFIHSHSDEQWWRQCPELWQPPCSREAPVGMTVKRTTEMPAPGPTAAAPASRLRV

SEQ ID NO: 793391 - protein, 71 aa, Homo sapiens
  misc_feature (31)..(31): Xaa can be any naturally occurring amino acid
MLASFILHASDDPVAPQCQAPLALLRTSVTXMFSPTACCQSDGGDRTAVPDGGGNAQSCGSHLAAVKHQWE

SEQ ID NO: 793392 - protein, 99 aa, Homo sapiens
KGFHNATGVVWLVAVIVGSPMWHVQQLEIKYDFLYEKEHICCLEEWTSPVHQKIYTTFILVILFLLPLMEEETSCHYDGDSGGSLCCVLGTIPCCPYDD

SEQ ID NO: 793393 - protein, 112 aa, Homo sapiens
LSPTECCVCQKLKSWIRAKFVVPLGGASALLCAAWVRTEPPNLKSWIRAKFVVPLGGASALLCAAWVRTEPPNLELHLSGPIPVLSSEKRKSCKENRRHLFCHCHALVLAQT

SEQ ID NO: 793394 - protein, 114 aa, Homo sapiens
RRNILSASRILADSPQPRVPMATAWRLMVTSFSTSVERFVYSAILSSAYDSTGHALHCKLSDLPDICNFGCCHWPRLQTFSVLYFDISLCPSLPTSFSHSYPFTHTTSELFCGD

SEQ ID NO: 793395 - protein, 251 aa, Homo sapiens
RDQAAGLEESQRRQAQSRRASPIGGHIRRASWRRKGSWCQGSGGSGLRERDEEEEAGPGSGRRQRELNRRKYQARGRRCREIEQVNERVLNRLHQVQRITRRLQQERRFLMRVLDSYGDDYRASQFTIVLEDEGSQGTDAPTPGNAENEPPEKETLSPPRRTPAPPEPGSPAPGEGPSGRKRRRVPRDGRRAGNALTPELAPVQIKVEQHFVFQTDKALDPSSVPPAPDKLVPYIDLEQSQPLIFVMPHHL

SEQ ID NO: 793396 - protein, 121 aa, Homo sapiens
MSAAGPFAPPGDLRRVACPAPEPRLEAAVGPGLLRRHPLPPRRVGLCQPRVSRGRGRGSGLSGRRKRNGASPRARRDSLSCGTCTQDSAHTCSSLSCWWGERRSCASVTPRRQWGLVNPQT

SEQ ID NO: 793397 - protein, 220 aa, Homo sapiens
MMTEKHEDHCLKSCSGHSYIRKNWLGCIVFPFSALLQQSEFLDQTEVLQRAQIFKKNCKAMFPNRRIVTTVFNDEGIQFLVTRYIKALNPPQQLLDIFLHNSNATFDLIARFVSLIPFVPNTPDENDGSDIWMTSEHCISLAIGNKEEHAILLCNFFLYFGKKALVLLGTSVLEGHVAYVVTQETNEYLLWNPSTGQCYKQFDPFCPLKSVDCLFDDRNV

SEQ ID NO: 793398 - protein, 151 aa, Homo sapiens
MKRSFKLYQSFPLCSPGHDYSFSSLSKIKDNIYINIFDEMMTEKHEDHCLKSCSGHSYIRKNWLGCIVFPFSALLQQSEFLDQTEVLQRAQIFKKNCKAMFPNRRIVTTVFNDEGIQFLVTRYIKALNPPQQLLDIFLHNSNATFVSYYYF

SEQ ID NO: 793399 - protein, 112 aa, Homo sapiens
MPCLISGSFTGFRSPFLPLVPTKIQKGPDNTKARKGTTVTLTAEILGEPAPDVGWTKDGEDIEEDDRVFFEIGSTTTTLTIRRATPQDSGKYEVYVENSLGMDQSFARVDVA

SEQ ID NO: 793400 - protein, 175 aa, Homo sapiens
MPCLISGSFTGFRSPFLPLVPTKIQKGPDNTKARKGTTVTLTAEILGEPAPDVGWTKDGEDIEEDDRRGPGPAARPGPGAGTWVGLSPEIWLECRGRGLGSEEQSWLRSPAQCARVLTTAPPSSPPPFRRVFFEIGSTTTTLTIRRATPQDSGKYEVYVENSLGMDQSFARVDVA

SEQ ID NO: 793401 - protein, 90 aa, Homo sapiens
TYAQENMPLAKELLHPSPEEEKRKHKKKRLVQSPNSYFMDVKCPGCYKITTVFSHAQTVVLCVGCSTVLCQPTGGKARLTEGCSFRRKQH

SEQ ID NO: 793402 - protein, 595 aa, Homo sapiens
MKFFSYILVYRRFLFVVFTVLVLLPLPIVLHTKEAECAYTLFVVATFWLTEALPLSVTALLPSLMLPMFGIMPSKKVASAYFKDFHLLLIGVICLATSIEKWNLHKRIALKMVMMVGVNPAWLTLGFMSSTAFLSMWLSNTSTAAMVMPIAEAVVQQIINAEAEVEATQMTYFNGSTNHGLEIDESVNGHEINERKEKTKPVPGYNNDTGKISSKVELEKNSGMRTKYRTKKGHVTRKLTCLCIAYSSTIGGLTTITGTSTNLIFAEYFNTRYPDCRCLNFGSWFTFSFPAALIILLLSWIWLQWLFLGFNFKEMFKCGKTKTVQQKACAEVIKQEYQKLGPIRYQEIVTLVLFIIMALLWFSRDPGFVPGWSALFSEYPGFATDSTVALLIGLLFFLIPAKTLTKTTPTGEIVAFDYSPLITWKEFQSFMPWDIAILVGGGFALADGCEESGLSKWIGNKLSPLGSLPAWLIILISSLMVTSLTEVASNPATITLFLPILSPLAEAIHVNPLYILIPSTLCTSFAFLLPVANPPNAIVFSYGHLKVIDMVKAGLGVNIVGVAVVMLGICTWIVPMFDLYTYPSWAPAMSNETMP

SEQ ID NO: 793403 - protein, 223 aa, Homo sapiens
MKFFSYILVYRRFLFVVFTVLVLLPLPIVLHTKEAECAYTLFVVATFWLTEALPLSVTALLPSLMLPMFGIMPSKKVASAYFKDFHLLLIGVICLATSIEKWNLHKRIALKMVMMVGVNPAWLTLGFMSSTAFLSMWLSNTSTAAMVMPIAEAVVQQIINAEAEVEATQMTYFNGSTNHGLEIDESVNGHEINERKEKTKPVPGYNNDTGKISSKVELEKGTV

SEQ ID NO: 793404 - protein, 254 aa, Homo sapiens
MKFFSYILVYRRFLFVVFTVLVLLPLPIVLHTKEAECAYTLFVVATFWLTEALPLSVTALLPSLMLPMFGIMPSKKVASAYFKDFHLLLIGVICLATSIEKWNLHKRIALKMVMMVGVNPAWLTLGFMSSTAFLSMWLSNTSTAAMVMPIAEAVVQQIINAEAEVEATQMTYFNGSTNHGLEIDESVNGHEINERKEKTKPVPGYNNDTGKISSKVELEKHWKLAVQDGSPSPSVHSVSQLAAQGKEKVEGICT

SEQ ID NO: 793405 - protein, 290 aa, Homo sapiens
MKFFSYILVYRRFLFVVFTVLVLLPLPIVLHTKEAECAYTLFVVATFWLTEALPLSVTALLPSLMLPMFGIMPSKKVASAYFKDFHLLLIGVICLATSIEKWNLHKRIALKMVMMVGVNPAWLTLGFMSSTAFLSMWLSNTSTAAMVMPIAEAVVQQIINAEAEVEATQMTYFNGSTNHGLEIDESVNGHEINERKEKTKPVPGYNNDTGKISSKVELEKNSGMRTKYRTKKGHVTRKLTCLCIAYSSTIGGLTTITGTSTNLIFAEYFNTFHPHRRGDRTRHVHQEAEI

SEQ ID NO: 793406 - protein, 99 aa, Homo sapiens
SGSLPGELALLAVLPVLLLQITVGLVFLCLQYRLRGKLRAEIENLHRTFDPHFLRVPCWKITLFVIVPVLGPLVALIICYNWLHRRLAGQFLEELRNPF

SEQ ID NO: 793407 - protein, 147 aa, Homo sapiens
SGSLPGELALLAVLPVLLLQITVGLVFLCLQYRLRGKLRAEIENLHRTFDPHFLRVPCWKITLFVIVPVLGPLVALIICYNWLHRRLAGQFLEELRKFSSLCYKQRIKSQERETEATRGRGGLLRDHIPRGKEELESLGGGKTPPGR

SEQ ID NO: 793408 - protein, 69 aa, Homo sapiens
HDEAHVPSQQVKEEQPEQEGWFGTRTPESQTYAHPPGRGFTLSSPSPHSVPLHPAKPPCLDQCPLLDET

SEQ ID NO: 793409 - protein, 357 aa, Homo sapiens
MMARLLRTSFALLFLGLFGVLGAATISCRNEEGKAVDWFTFYKLPKRQNKESGETGLEYLYLDSTTRSWRKSEQLMNDTKSVLGRTLQQLYEAYASKSNNTAYLIYNDGVPKPVNYSRKYGHTKGLLLWNRVQGFWLIHSIPQFPPIPEEGYDYPPTGRRNGQSGICITFKYNQYEAIDSQLLVCNPNVYSCSIPATFHQELIHMPQLCTRASSSEIPGRLLTTLQSAQGQKFLHFAKSDSFLDDIFAAWMAQRLKTHLLTETWQRKRQELPSNCSLPYHVYNIKAIKLSRHSYFSSYQDHAKWCISQKGTKNRWTCIGDLNRSPHQAFRSGGFICTQNWQIYQAFQGLVLYYESCK

SEQ ID NO: 793410 - protein, 265 aa, Homo sapiens
MKQKMMARLLRTSFALLFLGLFGVLGAATISCRNEEGKAVDWFTFYKLPKRQNKESGETGLEYLYLDSTTRSWRKSEQLMNDTKSVLGRTLQQLYEAYASKSNNTAYLIYNDGVPKPVNYSRKYGHTKGLLLWNRVQGFWLIHSIPQFPPIPEEGYDYPPTGRRNGQSGICITFKYNQYEAIDSQLLVCNPNVYSCSIPATFHQELIHMPQLCTRASSSEIPGRLLTTLQSAQGQKFLHFAKSDSFLDGMKDHHQTTCCIILLLN

SEQ ID NO: 793411 - protein, 155 aa, Homo sapiens
SRAVQRIRGKKPCVHAHPKGSVLLFYIGTKSIFATSGWKCVLTYLSLLRGWNISLASHRAVVDLSRGRRRRKRAEPLSGILRSLFSCRFEDILQGLAQGEPHRVQVHTAEQDLNATSCLPWVWDPRVNGTQRGACHLSLESLLIFFNKVHTNRNS

SEQ ID NO: 793412 - protein, 102 aa, Homo sapiens
MYSIVFSNFCVDLKINTLPIVTQQKKKKTFGGLSILFGVRKTRRYSDKRGTRAQKQRDPWATAFLCPNGGRLCRDPHIREPAYFRKPRVTAILTQERESRHA

SEQ ID NO: 793413 - protein, 137 aa, Homo sapiens
ECTSERVARNECAGQEASPISGSRASDRRPAPSQAHMPRGQLDVAWGPCSLEHVAHQACLRPQSSVPALFSRTGGCPSPRPCPTRTPASRCGLVHPHGLTPGTVRGRGPALPPEAWTQGNGSQRLQSRRLCLGLAGS

SEQ ID NO: 793414 - protein, 49 aa, Homo sapiens
MIVYFDSKNKKNRIDIFSSKLLFICRYETPTLKQKQRTKQFLKTTQNKQ

SEQ ID NO: 793415 - protein, 109 aa, Homo sapiens
GSLALDVLCCDHVGSSGRGACFGFLLTCPRQLRGERLSCTSCRACSHPDLVFGLSEPAVPQAPGAGSCHAASPLQEGGHPRIPLCREDIFGTSICGRRVLGRLRSYSGE

SEQ ID NO: 793416 - protein, 168 aa, Homo sapiens
MKGKTSLAHQFVEGEFSEGYDPTVENTYSKIVTLGKDEFHLHLVDTAGQDEYSILPYSFIIGVHGYVLVYSVTSLHSFQVIESLYQKLHEGHGKTRVPVVLVGNKADLSPEREVQAVEGKKLAESWGATFMESSARENQLTQGIFTKVIQEIARVENSYGQERRCHLM

SEQ ID NO: 793417 - protein, 183 aa, Homo sapiens
MPLVRYRKVVILGYRCVGKTSLAHQFVEGEFSEGYDPTVENTYSKIVTLGKDEFHLHLVDTAGQDEYSILPYSFIIGVHGYVLVYSVTSLHSFQVIESLYQKLHEGHGKTRVPVVLVGNKADLSPEREVQAVEGKKLAESWGATFMESSARENQLTQGIFTKVIQEIARVENSYGQERRCHLM

SEQ ID NO: 793418 - protein, 564 aa, Homo sapiens
IFTVSESESTKGSADCLPKLSYQNSSSIVRLTGTSNNSAGKISGESMESTPELLLISSLEDTNETRNIQSRCFRKRHKSDNETNLQQQVVWGNRNRNLSGGVLMGFMLNRINQEATPGDIVEKLGADAKILSNVISKSTRPNTLDIGKPPLRSKRDSLEKESSDDDTPFDGSNYLADKVDSPVIFDLEDLDSETDVSKAGCVATQNPKRIQRMNSSFSVKPFEKTDVATGFDPLSLLVAETEQQQKEEEEEDEDDSKSISTPSARRDLAEEIVMYMNNMSSPLTSRTPSIDLQRACDDKLNKKSPPLVKACRRSSLPPNSPKPVRLTKSKSYTKSEEKPRDRLWSSPAFSPTCPFREESQDTLTHSSPSFNLDTLLVPKLDVLRNSMFTAGKGVAEKASKWYSRFTMYTTSSKDQSSDRTSLSSVGAQDSESTSLTDEDVCHELEGPISSQETSATSGTKRIDLSRISLESSASLEGISRSLPNWEIRKRHPTTTRSNTQLSPDNYAQGGPQHQEATGRTVMYGPDYDNPMETRAIPTTKMHTETKETHRTDTTNTVQNNTTRE

SEQ ID NO: 793419 - protein, 125 aa, Homo sapiens
LSPDADLSVTEASSSDSRGERAELYAQVEEGLLGGEASYLGPPLTPEKDDALHQATAVANLRAALMSKNSLLSLKADVLGDDGSLLFEYLPRGAHSLSRKCRPWGPLGFGVVLKAEGCRSRAKMR

SEQ ID NO: 793420 - protein, 102 aa, Homo sapiens
LSPDADLSVTEASSSDSRGERAELYAQVEEGLLGGEASYLGPPLTPEKDDALHQATAVANLRAALMSKNSLLSLKADVLGDDGSLLFEYLPRGAHSLSRVIG

SEQ ID NO: 793421 - protein, 168 aa, Homo sapiens
MILWPAYAHELPKYGVKVGLTNYAAAYCTGLLLARRLLNMFGMDKIYEGQVEVTGDEYNVESIDGQPGAFTCYLDAGLARTTTGNKVFGALKGAVDGGLSIPHSTKRFPGYDSESKEFNAEVHRKHIMGQNVADYMRYLMEEDEDAYKKQFSQYIKNSVTPDMMEEMY

SEQ ID NO: 793422 - protein, 125 aa, Homo sapiens
PFSPSHLTSYFSFPRIAMETYIRQRQLIMSPLITSHVIGENEPLTSVLNKVIAAKEVNHKGQGLWVSLKLLPGDLTQVQKNFSHLVDRSTAIARKYVVTEVCESRKYVVRKYVVRKYVVRKYVVT

SEQ ID NO: 793423 - protein, 213 aa, Homo sapiens
PFSPSHLTSYFSFPRIAMETYIRQRQLIMSPLITSHVIGENEPLTSVLNKVIAAKEVNHKGQGLWVSLKLLPGDLTQVQKNFSHLVDRSTAIARKMGFPEIILPGDVRNDIYVTLIHGEFDKGKKKTPKNVEVTMSVHDEEGKLLEKAIHPGAGYEGISEYKSVVYYQVKQPCWYETVKVSIAIEEVTRCHIRFTFRHRSSQETRDKSERAFG

SEQ ID NO: 793424 - protein, 180 aa, Homo sapiens
PFSPSHLTSYFSFPRIAMETYIRQRQLIMSPLITSHVIGENEPLTSVLNKVIAAKEVNHKGQGLWVSLKLLPGDLTQVQKNFSHLVDRSTAIARKMGFPEIILPGDVRNDIYVTLIHGEFDKGKKKTPKNVEVTMSVHDEEGKLLEVRGMAQKSCYHRIRLYNHDRILAVFQFFFASGWV

SEQ ID NO: 793425 - protein, 392 aa, Homo sapiens
MGSLSTANVEFCLDVFKELNSNNIGDNIFFSSLSLLYALSMVLLGARGETAEQLEKVLHFSHTVDSLKPGFKDSPKCSQAGRIHSEFGVEFSQINQPDSNCTLSIANRLYGTKTMAFHQQYLSCSEKWYQARLQTVDFEQSTEETRKMINAWVENKTNGKVANLFGKSTIDPSSVMVLVNTIYFKGQRQNKFQVRETVKSPFQLSEGKNVTVEMMYQIGTFKLAFVKEPQMQVLELPYVNNKLSMIILLPVGIANLKQIEKQLNSGTFHEWTSSSNMMEREVEVHLPRFKLEIKYELNSLLKPLGVTDLFNQVKADLSGMSPTKGLYLSKAIHKSYLDVSEEGTEAAAATGDSIAVKSLPMRAQFKANHPFLFFIRHTHTNTILFCGKLASP

SEQ ID NO: 793426 - protein, 392 aa, Homo sapiens; identical to SEQ ID NO: 793425

SEQ ID NO: 793427 - protein, 290 aa, Homo sapiens
MDCSLVRTLVHRYCAGEENWVDSRTIYVGHREPPPGAEAYIPQRYPDNRIVSSKYTFWNFIPKNLFEQFRRVANFYFLIIFLVQLIIDTPTSPVTSGLPLFFVITVTAIKQGYEDWLRHKADNAMNQCPVHFIQHGKLVRKQSRKLRVGDIVMVKEDETFPCDLIFLSSNRGDGTCHVTTASLDGESSHKTHYAVQDTKGFHTEEDIGGLHATIECEQPQPDLYKFVGRINVYSDLNDPVVRPLGSENLLLRGATLKNTEKIFGVAIYTGMETKMALNYQSKSQKRSAVE

SEQ ID NO: 793428 - protein, 42 aa, Homo sapiens
MTFSKLVIPALWEAQAGGSRGQEIETILANTVKPRLYQKIQK

SEQ ID NO: 793429 - protein, 148 aa, Homo sapiens
VQNLSRPGVTRGMKTISGPRGPGPGPGRGRPGHPGTASRAAPARAGRTGGLGPGGDTKNPERQTPPAGARSNPRSAPPADKFTAPSAHPALPTRAKFPVARLGPRHRVGSRLPPPPPPAQRPFPLSPPPLPLPPTLSGAHRGAGAPRP

SEQ ID NO: 793430 - protein, 117 aa, Homo sapiens
MRTPDTSSAQDCWVPPRPLKAHHVAARPALVRRRCPGGACALPSRGAGVPRKSVWRGRGGCLGWDAVGGVGSLCKSQRSAHGPEAGLAMQRQVRLANSEGAGRNPLPLSASADVADV

SEQ ID NO: 793431 - protein, 371 aa, Homo sapiens
MELELDAGDQDLLAFLLEESGDLGTAPDEAVRAPLDWALPLSEVPSDWEVDDLLCSLLSPPASLNILSSSNPCLVHHDHTYSLPRETVSMDLESESCRKEGTQMTPQHMEELAEQEIARLVLTDEEKSLLEKEGLILPETLPLTKTEEQILKRVRRKIRNKRSAQESRRKKKVYVGGLESRVLKYTAQNMELQNKVQLLEEQNLSLLDQLRKLQAMVIEISNKTSSSSTCILVLLVSFCLLLVPAMYSSDTRGSLPAEHGVLSRQLRALPSEDPYQLELPALQSEVPKDSTHQWLDGSDCVLQAPGNTSCLLHYMPQAPSAEPPLEWPFPDLFSEPLCRGPILPLQANLTRKGGWLPTGSPSVILQDRYSG

SEQ ID NO: 793432 - protein, 211 aa, Homo sapiens
MSGTPGVWDIVDQAVGGLESRVLKYTAQNMELQNKVQLLEEQNLSLLDQLRKLQAMVIEISNKTSSSSTCILVLLVSFCLLLVPAMYSSDTRGSLPAEHGVLSRQLRALPSEDPYQLELPALQSEVPKDSTHQWLDGSDCVLQAPGNTSCLLHYMPQAPSAEPPLEWPFPDLFSEPLCRGPILPLQANLTRKGGWLPTGSPSVILQDRYSG

SEQ ID NO: 793433 - protein, 278 aa, Homo sapiens
MELELDAGDQDLLAFLLEESGDLGTAPDEAVRAPLDWALPLSEVPSDWEVDDLLCSLLSPPASLNILSSSNPCLVHHDHTYSLPRETVSMDLESESCRKEGTQMTPQHMEELAEQEIARLVLTDEEKSLLEKEGLILPETLPLTKTEEQILKRVRRKIRNKRSAQESRRKKKVYVGGLESRVLKYTAQNMELQNKVQLLEEQNLSLLDQLRKLQAMVIEISNKTSSSSTCILVLLVSFCLLLVPAMYPHLCPNKKRWARAGRSSCALSGRLRAQTHHT

SEQ ID NO: 793434 - protein, 438 aa, Homo sapiens
EKLNGTDPEDVIQQLTFACFDEEAQVYIHVGSSRPGAAHSPLGDRFHTMRNVERRCTEECTHGVTKGNFNYVEVHPILKHGAKDKDDQCHRTAPDEAVRAPLDWALPLSEVPSDWEVDDLLCSLLSPPASLNILSSSNPCLVHHDHTYSLPRETVSMDLESESCRKEGTQMTPQHMEELAEQEIARLVLTDEEKSLLEKEGLILPETLPLTKTEEQILKRVRRKIRNKRSAQESRRKKKVYVGGLESRVLKYTAQNMELQNKVQLLEEQNLSLLDQLRKLQAMVIEISNKTSSSSTCILVLLVSFCLLLVPAMYSSDTRGSLPAEHGVLSRQLRALPSEDPYQLELPALQSEVPKDSTHQWLDGSDCVLQAPGNTSCLLHYMPQAPSAEPPLEWPFPDLFSEPLCRGPILPLQANLTRKGGWLPTGSPSVILQDRYSG

SEQ ID NO: 793435 - protein, 182 aa, Homo sapiens
MELQNKVQLLEEQNLSLLDQLRKLQAMVIEISNKTSSSSTCILVLLVSFCLLLVPAMYSSDTRGSLPAEHGVLSRQLRALPSEDPYQLELPALQSEVPKDSTHQWLDGSDCVLQAPGNTSCLLHYMPQAPSAEPPLEWPFPDLFSEPLCRGPILPLQANLTRKGGWLPTGSPSVILQDRYSG

SEQ ID NO: 793436 - protein, 182 aa, Homo sapiens; identical to SEQ ID NO: 793435

SEQ ID NO: 793437 - protein, 160 aa, Homo sapiens
MELELDAGDQDLLAFLLEESGDLGTAPDEAVRAPLDWALPLSEVPSDWEVDDLLCSLLSPPASLNILSSSNPCLVHHDHTYSLPRETVSMDLESESCRKEGTQMTPQHMEELAEQWPFPDLFSEPLCRGPILPLQANLTRKGGWLPTGSPSVILQDRYSG

SEQ ID NO: 793438 - protein, 156 aa, Homo sapiens
MVIEISNKTSSSSTCILVLLVSFCLLLVPAMYSSDTRGSLPAEHGVLSRQLRALPSEDPYQLELPALQSEVPKDSTHQWLDGSDCVLQAPGNTSCLLHYMPQAPSAEPPLEWPFPDLFSEPLCRGPILPLQANLTRKGGWLPTGSPSVILQDRYSG

SEQ ID NO: 793439 - protein, 394 aa, Homo sapiens
MELELDAGDQDLLAFLLEESGDLGTAPDEAVRAPLDWALPLSEVPSDWEVDDLLCSLLSPPASLNILSSSNPCLVHHDHTYSLPRETVSMDLGVEISLTGRTGFMGLAIHTFPFAESESCRKEGTQMTPQHMEELAEQEIARLVLTDEEKSLLEKEGLILPETLPLTKTEEQILKRVRRKIRNKRSAQESRRKKKVYVGGLESRVLKYTAQNMELQNKVQLLEEQNLSLLDQLRKLQAMVIEISNKTSSSSTCILVLLVSFCLLLVPAMYSSDTRGSLPAEHGVLSRQLRALPSEDPYQLELPALQSEVPKDSTHQWLDGSDCVLQAPGNTSCLLHYMPQAPSAEPPLEWPFPDLFSEPLCRGPILPLQANLTRKGGWLPTGSPSVILQDRYSG

SEQ ID NO: 793440 - protein, 344 aa, Homo sapiens
MELELDAGDQDLLAFLLEESGDLGTAPDEAVRAPLDWALPLSEVPSDWEVDDLLCSLLSPPASLNILSSSNPCLVHHDHTYSLPRETVSMDLESESCRKEGTQMTPQHMEELAEQEIARLVLTDEEKSLLEKEGLILPETLPLTKTEEQILKRVRRKIRNKRSAQESRRKKKVYVGGLESRVLKYTAQNMELQNKVQLLEEQNLSLLDQLRKLQAMVIEISNKTSSSSTCILVLLVSFCLLLVPAMYSSDTRGSLPAEHGVLSRQLRALPSEDPYQLELPALQSEVPKDSTHHAEPPLEWPFPDLFSEPLCRGPILPLQANLTRKGGWLPTGSPSVILQDRYSG

SEQ ID NO: 793441 - protein, 234 aa, Homo sapiens
MELELDAGDQDLLAFLLEESGDLGTAPDEAVRAPLDWALPLSEVPSDWEVDDLLCSLLSPPASLNILSSSNPCLVHHDHTYSLPRETVSMDLESESCRKEGTQMTPQHMEELAEQEIARLVLTDEEKSLLEKEGLILPETLPLTKTEEQILKRVRRKIRNKRSAQESRRKKKVYVGGLESRYERERDSVVSIRFLKGGYRPYPRIFVISPRVLKYTAQNMELQNKVQLLEEQNL

SEQ ID NO: 793442 - protein, 293 aa, Homo sapiens
RYPVRRRLSLSMDLESESCRKEGTQMTPQHMEELAEQEIARLVLTDEEKSLLEKEGLILPETLPLTKTEEQILKRVRRKIRNKRSAQESRRKKKVYVGGLESRVLKYTAQNMELQNKVQLLEEQNLSLLDQLRKLQAMVIEISNKTSSSSTCILVLLVSFCLLLVPAMYSSDTRGSLPAEHGVLSRQLRALPSEDPYQLELPALQSEVPKDSTHQWLDGSDCVLQAPGNTSCLLHYMPQAPSAEPPLEWPFPDLFSEPLCRGPILPLQANLTRKGGWLPTGSPSVILQDRYSG

SEQ ID NO: 793443 - protein, 182 aa, Homo sapiens; identical to SEQ ID NO: 793435

SEQ ID NO: 793444 - protein, 85 aa, Homo sapiens
GVGEAGLGARGRCSRAGIWGFSGTAAAAVGGPWRGDERPVSGVSEPVSPAGEEGERGQRLVSLRRAPRRQGRPRRGRHLLGALES

SEQ ID NO: 793445 - protein, 245 aa, Homo sapiens
MGSFPLGMLLFLCGANVKLLTPRHSHTQPGLPPLQAPAPPSLLVTQPYPLLGTLPLVQLGRLLVLVEPQLGRLEGLQALPHGPVEDFPVLFLVLRGRELVSAVQMLVLRDQARRSQLCPAPDILALLPQELSTDPPWSQEGTRKPPHGVPAGSSSPQPAVPTSCRGLYRPGATTALSVTLSSRGWALPQGSCMTMATYRRKETEASTVDDRGVKSTLTTLSVLGERMKARDPRRSPCGQEAARRP

SEQ ID NO: 793446 - protein, 187 aa, Homo sapiens
IGLMSRTESARSHHSPVCDSQLPRLGSSPGKLHDHGHIQEVGDRGLHGGRSWREVHVDHVVGAGGADEGQGPAALLPVVRKQPGDPKTPLASCPELNQPVPEPAAAPTRQSKRLCYLSHVADGILQVQLVEDIQDPVSRLLGRPSHEDPAEELPVEVGPPVGTDLGCEPQVTGALEPAGRVARPLLS

SEQ ID NO: 793447 - protein, 279 aa, Homo sapiens
MPPQVWGPPLLSGREEPTGSPHAAEPRVVVVGRGSRMVAGVVGGEAQGPPANLVTYVGVRGARQRPEPPLSLPTLQPGSRPPRARVSELSLACRACGLGVCVEPGPGALLPDLHWLALLTAPGPRALCQEVPCHLAWPSHGWHIWGECTSVEAESFCLNEWSFQAPTGPLCEGLQGLAGQVFLSGESTHPDRLLDEGTKARWEGSVLREELRNPCSCAPRPCLAHFLQPGRPWGGQGRPGRLRPTCHSGQVREPGRQWPRGWVGRLASGLWSSQGLCRR

SEQ ID NO: 793448 - protein, 134 aa, Homo sapiens [sequence omitted]

SEQ ID NO: 793449 - protein, 161 aa, Homo sapiens
MLPMAGLKLLGSSDPLASASQSAEITGAHHHAQLAFFFNELLLCVLWPFFHSEIIPIFLIDIYITALYTHTRTYIYIKVINLLLYKLSAFLLFLTFTYYGIVIIFFYTAVWFPHQFISFRSLYTLNNVEVLISPIDSHSLALPMSLAPFGWLLSISSPTRG

SEQ ID NO: 793450 - protein, 38 aa, Homo sapiens
MNSPNGSRLPSVSPPFVNPEPLFLSKETEFYIDGSVAP

SEQ ID NO: 793451 - protein, 124 aa, Homo sapiens
LRSMWTEAHSHIFIQVRADLDVVLKTTQQKQANSPELNNSLHPTPHTKGPTLPTGLELVNRPPSSTELGRPNPLALEAGKLPCEDPELDDDFDAHKALEDDEELAHLGLGVDVAKGDDELGTLE

SEQ ID NO: 793452 - protein, 348 aa, Homo sapiens
HSASDYEELLIRQQIQRNTLRQEKETAAAAAGAVGPPGSWGAEPSSPAFEQLSRGQTPFAGTQDKSSLVGLPPSKLSGPILGPGSFPSDDRLSRPPPPATPSSMDVNSRQLVGGSQAFYQRAPYPGSLPLQQQQQQLWQQQQATAATSMRFAMSARFPSTPGPELGRQALGSPLAGISTRLPGPGEPVPGPAGPAQFIELRHNVQKGLGPGGTPFPGQGPPQRPRFYPVSEDPHRLAPEGLRGLAVSGLPPQKPSAPPAPELNNSLHPTPHTKGPTLPTGLELVNRPPSSTELGRPNPLALEAGKLPCEDPELDDDFDAHKALEDDEELAHLGLGVDVAKGDDELGTL

SEQ ID NO: 793453 - protein, 69 aa, Homo sapiens
VIQTPILLHLSGLSLISSCQETDDGGREAFWLSQASGSPKGFERPPDKQTQALSPGHSLFKKHQVYEFP

SEQ ID NO: 793454 - protein, 112 aa, Homo sapiens
CIGGRRESVWHSHLGPRVSQEAALNPATSQLPKNSKGSTSLSGGSRISTLGLQSGRRLCVQGKEWYLKAVFAQHIALDLKNVHHPFQTVGALLIKIIKAFRTHPPHKLPPAP

SEQ ID NO: 793455 - protein, 143 aa, Homo sapiens
PDAHSSLACGQRPTESQAVGHASDPVGRASGASAGTCLLHQHNGVHRLALVGLGRAGTQSPSAPPPARGPRSLGRGRGCGRCGPDPCGEGSSLQQPGRSGGPGDPRAGAPAGGGVGAGEGEWRRLGQRRGRAGGDARCGAPRF

SEQ ID NO: 793456 - protein, 30 aa, Homo sapiens
NVNDRVPVSLVSCSYLWVKLSFPDCYQNSP

SEQ ID NO: 793457 - protein, 76 aa, Homo sapiens
CFRLAVSPVSVAAPLMSCTHHPRRSPQNLADCLQSNRGSLLHLHCCLCAFIISQPSFHMSMVVQACNLSSSGGRIT

SEQ ID NO: 793458 - protein, 112 aa, Homo sapiens
QVYTASFLNFYSVEMKSPYVAQAGLELLSLNNPPTHTSQSAGITGVSHCAPPQIHFTTISSIQRMRDSDAINMKTLSFSIQFQRAQTNYSDQKWVTNSSNSIFTSSYKIRNC

SEQ ID NO: 793459 - protein, 101 aa, Homo sapiens
MSCTTCRDSESRQVVHLINYQDDAELATRALPELTKLLNDEDPVVVTKAAMMVNQLSKKEASRRALMGSPQLVAAVVRTMQNTRDLDTARCTTSILHNGYR

SEQ ID NO: 793460 - protein, 298 aa, Homo sapiens
GTRHQMADDAGAAGGPGGPGGPGMGNRGGFRGGFGSGIRGRGRGRGRGRGRGRGARGGKAEDKEWMPVTKLGRLVKDMKIKSLEEIYLFSLPIKESEIIDFFLGASLKDEVLKIMPVQKQTRAGQRTRFKAFVAIGDYNGHVGLGVKCSKEVATAIRGAIILAKLSIVPVRRGYWGNKIGKPHTVPCKVTGRCGSVLVRLIPAPRGTGIVSAPVPKKLLMMAGIDDCYTSARGCTATLGNFAKATFDAISKTYSYLTPDLWKETVFTKSPYQEFTDHLVKTHTRVSVQRTQAPAVATT

SEQ ID NO: 793461 - protein, 298 aa, Homo sapiens; identical to SEQ ID NO: 793460

SEQ ID NO: 793462 - protein, 205 aa, Homo sapiens
MSVDPMTYEAQFFGFTPQTCMLRIYIAFQDYLFEVMQAVEQVILKKLDGIPDCDISPVQIRKCTEKFLCFMKGHFDNLFSKMEQLFLQLILRIPSNILLPEDKCKETPYSEEDFQHLQKEIEQLQEKYKTELCTKQALLAELEEQKIVQAKLKQTLTFFDELHNVGRDHGTSDFRESLVSLVQNSRKLQNIRDNVEKESKRLKIS

SEQ ID NO: 793463 - protein, 205 aa, Homo sapiens; identical to SEQ ID NO: 793462

SEQ ID NO: 793464 - protein, 205 aa, Homo sapiens; identical to SEQ ID NO: 793462

SEQ ID NO: 793465 - protein, 205 aa, Homo sapiens; identical to SEQ ID NO: 793462

SEQ ID NO: 793466 - protein, 148 aa, Homo sapiens [sequence omitted]

SEQ ID NO: 793467 - protein, 53 aa, Homo sapiens
MLEADSCHRLRPTEERRGKGVEGHTGRRSRVTRDHHRPQPRPLHCGGAGAPRT

SEQ ID NO: 793468 - protein, 136 aa, Homo sapiens
MSQEGRLCLQSQLGSPNIRDPEGSGSDQRHLKGPCGILAIHPLPCTSFFPELQGYTSGRLPRPNSTSVPILDPLTHKTRSEAVMQPLGTNRQSPGLLTPGNKACSFALLHFKVQAAFKLTRQSFVFSSKAESTVLC

SEQ ID NO: 793469 - protein, 470 aa, Homo sapiens
MGKPWLRALQLLLLLGASWARAGAPRCTYTFVLPPQKFTGAVCWSGPASTRATPEAANASELAALRMRVGRHEELLRELQRLAAADGAVAGEVRALRKESRGLSARLGQLRAQLQHEAGPGAGPGADLGAEPAAALALLGERVLNASAEAQRAAARFHQLDVKFRELAQLVTQQSSLIARLERLCPGGAGGQQQVLPPPPLVPVVPVRLVGSTSDTSRMLDPAPEPQRDQTQRQQEPMASPMPAGHPAVPTKPVGPWQDCAEARQAGHEQSGVYELRVGRHVVSVWCEQQLEGGGWTVIQRRQDGSVNFFTTWQHYKAGFGRPDGEYWLGLEPVYQLTSRGDHELLVLLEDWGGRGARAHYDGFSLEPESDHYRLRLGQYHGDAGDSLSWHNDKPFSTVDRDRDSYSGNCALYQRGGWWYHACAHSNLNGVWHHGGHYRSRYQDGVYWAEFRGGAYSLRKAAMLIRPLKL

SEQ ID NO: 793470 - protein, 101 aa, Homo sapiens
MVTLKPRLHHSAIYSCNKTALVPLNIYFKKVSQRMFSFTRHFVFISFLFFFFFEMDSCSVAQDECSGVILAHCNLCLPGSSDSPASASRVAEITGTRHHIR

SEQ ID NO: 793471 - protein, 108 aa, Homo sapiens [sequence omitted]

SEQ ID NO: 793472 - protein, 85 aa, Homo sapiens
MRGLGAPTADSNSAGQKRNAHAGALVEVEGREVRRGAAPTAEQTWVPDQADPGPPSLPQPPAPLAHPVVLAPFWMAACLTDWSPP

SEQ ID NO: 793473 - protein, 94 aa, Homo sapiens
LPAVILPMAVDGPDGAWSPQNVQKLDKGGLQMQWLSYHRKPTASRGGPLLRSLQRAQVSVRPKFPLLPNAGEERILEAHPVPWLPWHMEPLNVL

SEQ ID NO: 793474 - protein, 281 aa, Homo sapiens
VFSIWGRSQLSAHGPASFKMSTVHEILCKLSLEGDHSTPPSAYGSVKAYTNFDAERDALNIETAIKTKGVDEVTIVNILTNRSNAQRQDMAFAYQRRTKKELASALKSALSGHLETVILGLLKTPAQYDASELKASMKGLGTDEDSLIEIICSRTNQELQEINRVYKEMYKTDLEKDIISDTSGDFRKLMVALAKGRRAEDGSVIDYELIDQDARDLYDAGVKRKGTDVPKWISIMTERSVPHLQKVFDRYKSYSPYDMLESIFQVSFNLFRDAFQHVYKG

SEQ ID NO: 793475 - protein, 289 aa, Homo sapiens
MVKGVDEATIIDLLTKRNHAQRQQIQAAYLQETGKPLDETLKKALTGHLEEVVLALLKTPAPFDADELRASMKGLGTDEDSLIEIICSRTNQELQEINRVYKEMYKTDLEKDIISDTSGDFRKLMVALAKGRRAEDGSVIDYELIDQDARDLYDAGVKRKGTDVPKWISIMTERSVPHLQKVFDRYKSYSPYDMLESIRKEVKGDLENAFLNLVQCIQNKPLYFADQLYDSMKGKGTRDKVLIRIMVSRSEVDMLKIRSEFKRKYGKSLYYYIQQDTKGDYQQSPWPSL

SEQ ID NO: 793476 - protein, 354 aa, Homo sapiens
VFSIWGRSQLSAHGPASFKMSTVHEILCKLSLEGDHSTPPSAYGSVKAYTNFDAERDALNIETAIKTKGVDEVTIVNILTNRSNAQRQDMAFAYQRRTKKELASALKSALSGHLETVILGLLKTPAQYDASELKASMKGLGTDEDSLIEIICSRTNQELQEINRVYKEMYKTDLEKDIISDTSGDFRKLMVALAKGRRAEDGSVIDYELIDQDARDLYDAGVKRKGTDVPKWISIMTERSVPHLQKVFDRYKSYSPYDMLESIRKEVKGDLENAFLNLVQCIQNKPLYFADQLYDSMKGKGTRDKVLIRIMVSRSEVDMLKIRSEFKRKYGKSLYYYIQQDTKGDYQQSPWPSL

SEQ ID NO: 793477 - protein, 102 aa, Homo sapiens
GLPTLPLEWKHYHFFPPPAEKVMSLGRNWHRPCLRCQRCHKTLTAGSHAEHDGVPYCHVPCYGYLFGPKGGQPHPRHWDGMYMPEVWHVHGLWVCVDNFPCG

SEQ ID NO: 793478 - protein, 140 aa, Homo sapiens
HKPCYGALFGPRGVNIGGVGSYLYNPPTPSPGCTTPLSPSSFSPPRPRTGLPQGKKTEKVMSLGRNWHRPCLRCQRCHKTLTAGSHAEHDGVPYCHVPCYGYLFGPKGGQPHPRHWDGMYMPEVWHVHGLWVCVDNFPCG

SEQ ID NO: 793479 - protein, 127 aa, Homo sapiens
HKPCYGALFGPRGVNIGGVGSYLYNPPTPSPGCTTPLSPSSFSPPRPRTGLPQGKKTEKVMSLGRNWHRPCLRCQRCHKTLTAGSHAEHDGVPYCHVPCYGYLFGPKGVNIGDVGCYIYDPVKIKFK

SEQ ID NO: 793480 - protein, 140 aa, Homo sapiens; identical to SEQ ID NO: 793478

SEQ ID NO: 793481 - protein, 140 aa, Homo sapiens; identical to SEQ ID NO: 793478

SEQ ID NO: 793482 - protein, 109 aa, Homo sapiens
HKPCYGALFGPRGVNIGGVGSYLYNPPTPSPGCTTPLSPSSFSPPRPRTGLPQGKKTEKVMSLGRNWHRPCLRCQRCHKTLTAGSHAEHDGVPYCHVPCYGYLFGPKAL

SEQ ID NO: 793483 - protein, 89 aa, Homo sapiens
HKPCYGALFGPRGVNIGGVGSYLYNPPTPSPGCTTPLSPSSFSPPRPRTGLPQGKKTEKVMSLGRNWHRPCLRCQRCHKTLTAGSHAEV

SEQ ID NO: 793484 - protein, 71 aa, Homo sapiens
GWRWEENQAETALFLSVSQHDGVPYCHVPCYGYLFGPKGGQPHPRHWDGMYMPEVWHVHGLWVCVDNFPCG

SEQ ID NO: 793485 - protein, 59 aa, Homo sapiens
MAPPGPANYSCSPTQKRFSTRGGSCLTPYGLGPPPPKTIKRKAPMPSTPPSPKYFGNLF

SEQ ID NO: 793486 - protein, 75 aa, Homo sapiens
SPEGPRLDGTVHLHHHHQPGFVGERIFCHLFLDAHKSSAPGRQHTTPARWNLTLLPRLECSECNGSLQSLPPRFK

SEQ ID NO: 793487 - protein, 130 aa, Homo sapiens
MVVVVMVVVLIRVALVVLWVGAPWLRGAPQLPLTQVHEEQVIELGGGGGEVDLVGKDAHPLLQHQDDVRAERVLQEVGGALLAAGGRVGHHDDRGRWLGGEEGCLQQRPLHIAEVGLPELQVAAGDECSS

SEQ ID NO: 793488 - protein, 129 aa, Homo sapiens
PGYQTELVIQLVWVGGEPPQQITSLAVNSSYGLVVFGNCNGIAMVDYLQKAVLLNLGTIELYGSNDPYRREPRSPRKSRQPSGAGLCDISEGTVVPEDRCKSPTSGSSSPHNSDDEQKMNNFIEKGIVS

SEQ ID NO: 793489 - protein, 185 aa, Homo sapiens
PGYQTELVIQLVWVGGEPPQQITSLAVNSSYGLVVFGNCNGIAMVDYLQKAVLLNLGTIELYGSNDPYRREPRSPRKSRQPSGAGLCDISEGTVVPEDRCKSPTSDCSHGFPYQPSALAFDPVQKILAVGTQTGALRLFGRPGVECYCQHDSGAAVIQLQFLINEGALVSALADDTLHLWNSSEV

SEQ ID NO: 793490 - protein, 104 aa, Homo sapiens
TPGAGICPQAWVTRHSRRKGLIRPSAEFTPSALQPQMPLNRAKAGPSSAIDAQDAEWGCGLRQGYQLCGLRKSTDLSEFQFPERQSVGNSTQGLNEIVHVQHLA

SEQ ID NO: 793491 - protein, 112 aa, Homo sapiens
SESRAARATSCAGRKVGATSRSGGGCGREGPFPSRCPAREARPGPGPPPPLCRTLSHFLLVAYASPAALAGEACPRPGAGSYGGGGRGSTPEPPQTPSSLQWKRVLLSFRAL

SEQ ID NO: 793492 - protein, 74 aa, Homo sapiens
NDGPQLNDGPQLNDGPQLNDGPQLNDGPQLNDWCLSLQKCWDYRREPPCLAKGYGFYFVLSAHLQDPSELRTIV

SEQ ID NO: 793493 - protein, 98 aa, Homo sapiens
KEWFLEIEFTPGEDAANIVDMITKDLESYINMIEKAVAGLERIDFNFERSSTVNKMLSNSITYYRKIFHEKESIDSSFIVAFILRNYHNHPNLQQPPS

SEQ ID NO: 793494 - protein, 902 aa, Homo sapiens
TVSLCQTRLKKEHYFILIKQVYAATRTMESTLTLATEQPVKKNTLKKYKIACIVLLALLVIMSLGLGLGLGLRKLEKQGSCRKKCFDASFRGLENCRCDVACKDRGDCCWDFEDTCVESTRIWMCNKFRCGETRLEASLCSCSDDCLQRKDCCADYKSVCQGETSWLEENCDTAQQSQCPEGFDLPPVILFSMDGFRAEYLYTWDTLMPNINKLKTCGIHSKYMRAMYPTKTFPNHYTIVTGLYPESHGIIDNNMYDVNLNKNFSLSSKEQNNPAWWHGQPMWLTAMYQGLKAATYFWPGSEVAINGSFPSIYMPYNGSVPFEERISTLLKWLDLPKAERPRFYTMYFEEPDSSGHAGGPVSARVIKALQVVDHAFGMLMEGLKQRNLHNCVNIILLADHGMDQTYCNKMEYMTDYFPRINFFYMYEGPAPRIRAHNIPHDFFSFNSEEIVRNLSCRKPDQHFKPYLTPDLPKRLHYAKNVRIDKVHLFVDQQWLAVRSKSNTNCGGGNHGYNNEFRSMEAIFLAHGPSFKEKTEVEPFENIEVYNLMCDLLRIQPAPNNGTHGSLNHLLKVPFYEPSHAEEVSKFSVCGFANPLPTESLDCFCPHLQNSTQLEQVNQMLNLTQEEITATVKVNLPFGRPRVLQKNVDHCLLYHREYVSGFGKAMRMPMWSSYTVPQLGDTSPLPPTVPDCLRADVRVPPSESQKCSFYLADKNITHGFLYPPASNRTSDSQYDALITSNLVPMYEEFRKMWDYFHSVLLIKHATERNGVNVVSGPIFDYNYDGHFDAPDEITKHLANTDVPIPTHYFVVLTSCKNKSHTPENCPGWLDVLPFIIPHRPTNVESCPEGKPEALWVEERFTAHIARVRDVELLTGLDFYQDKVQPVSEILQLKTYLPTFETTI

SEQ ID NO: 793495 - protein, 318 aa, Homo sapiens
TVSLCQTRLKKEHYFILIKQVYAATRTMESTLTLATEQPVKKNTLKKYKIACIVLLALLVIMSLGLGLGLGLRKLEKQGSCRKKCFDASFRGLENCRCDVACKDRGDCCWDFEDTCVESTRIWMCNKFRCGETRLEASLCSCSDDCLQRKDCCADYKSVCQGETSWLEENCDTAQQSQCPEGFDLPPVILFSMDGFRAEYLYTWDTLMPNINKLKTCGIHSKYMRAMYPTKTFPNHYTIVTGLYPESHGIIDNNMYDVNLNKNFSLSSKEQNNPAWWHGQPMWLTAMYQGLKAATYFWPGSEVAINGSFPSIYMPYNG

SEQ ID NO: 793496 - protein, 78 aa, Homo sapiens
DDTVDAELFYRSRAHMTVQKVMARSRRSARDTRSSARLSQSSQDSSPVRNLQSFGTEEPAYSTRRVTRSQQQPTPVTP

SEQ ID NO: 793497 - protein, 106 aa, Homo sapiens
SNCQAVAVELLLTLQLVLCVFASTDSRQTSGSPATMIGISVALGRLIGLSLQEDTKKRSRQHVANVARRHPIICNPRGKPSPHTNPAGSLLLDFQFQNYEKIHFCV

SEQ ID NO: 793498 - protein, 86 aa, Homo sapiens
SPSTHVPLTEDGSFSIADGHPLLPSTQLWKERIWSAVSPGGHKEKIKTACSKCSKEASNHLQPKGQTLATHQPCWLLAFGLPVSEL

SEQ ID NO: 793499 - protein, 134 aa, Homo sapiens
LKPEPVALCYSFPGKHAAPTAGALSWQHSICHGPPGDALAAPASAHVQGNPVGAQIQPQDTGPAEAANPPVPPVTLSGGPAHSMGVMWWSPCREGTWSQDREGPCLIQWARVRVLGPPTACVGGSREVGGSRPA

SEQ ID NO: 793500 - protein, 146 aa, Homo sapiens
TASQGRRIFLSTEQNGVSYVYFFLHRHSNNLISLSFPHISPFSIRQNRHRHHGPFSMSCWVHLPDGVAAGQRGSSLPRRGGWAEAPPTSRKGQWPGGGCPPPPSRMGRMSFFSYVCWSHKCKLGKFTHIFGLLKAELFYFRKCISK

SEQ ID NO: 793501 - protein, 62 aa, Homo sapiens
MHRWTRERPARGGGEGRVRPGDPSDHLHVELARASLARRGGRPIHLAEGVLHREVVFVLPAA

SEQ ID NO: 793502 - protein, 157 aa, Homo sapiens
RPPSSPRPAQPLRRSRGAAPSHGPGWRAGCGQDPGARALARGKDRNGASGGTLPHRLYMAKFLAELLGCTLPSKGASPMFESKSHSRVGLKSSTKQKTTIFSTLASEKSLSDCKKEQQWKPSMYSSITPVCFPSPLIEKPIGKVRMNLLLSDTMIRA

SEQ ID NO: 793503 - protein, 80 aa, Homo sapiens
AAAELSPPGPAPPPQPRGSPEPRPRLAGGLRAGSWRSGSGKGKGQKRRIGRDPASPLVYGKVSRRAPGLHVAEQGRLSHV

SEQ ID NO: 793504 - protein, 117 aa, Homo sapiens
RPPSSPRPAQPLRRSRGAAPSHGPGWRAGCGQDPGARALARGKDRNGASGGTLPHRLYMAKFLAELLGCTLPSKGASPMFESKSHSRVGLKSSTKQKTTIFSTLASEKSLSDCKKDN

SEQ ID NO: 793505 - protein, 80 aa, Homo sapiens; identical to SEQ ID NO: 793503

SEQ ID NO: 793506 - protein, 132 aa, Homo sapiens
RPPSSPRPAQPLRRSRGAAPSHGPGWRAGCGQDPGARALARGKDRNGASGGTLPHRLYMAKFLAELLGCTLPSKGASPMFESKSHSRVGLKSSTKQKTTIFSTLASEKSLSDCKKAYSDQTLERSRFLMNAC

SEQ ID NO: 793507 - protein, 157 aa, Homo sapiens
QRLTDILKPEPWQYYFKPMMKEFGRESYYGSSLDGPDMRSSGLEILRDNGRWQGKERTYARDTLREWTVFGTSVCGEERGRKERRKGLKRPLQGPSNCRYSAPQSRISFLLPPPSRTPFPGSPLHLESLYLPSYPLISHPLTPALSLSISFFLSCYK

SEQ ID NO: 793508 - protein, 38 aa, Homo sapiens
MQGTMSNHPLKGTASNYPQLINFPPMKMTVLAQQTPVL

SEQ ID NO: 793509 - protein, 121 aa, Homo sapiens
MIPILQGHLFCGHRGHLGSRSGLSSPAWGTVCSVSRLWNKEDSCFSEEPHLLRGKILCLSESFTFCEPAPWPDRVTGPRSGQGSFCECIERQECPGGCVVFGPIPVIASGNAISGVCPRCL

SEQ ID NO: 793510 - protein, 121 aa, Homo sapiens; identical to SEQ ID NO: 793509

SEQ ID NO: 793511 - protein, 78 aa, Homo sapiens
QRRISCQGLAIKFFKRLKEQKGGRSGSQTKGKKGFAATDQELLRPLAWSPEPTFATELSELLWPLQCSEAQESLCQCC

SEQ ID NO: 793512 - protein, 70 aa, Homo sapiens
TLAQLTCNSYQPQEQIAKMVTIHLLPALQCDFAAPSFKRSGLFLYPLNLGSSCDFGQRNAAEERMCQFQA

SEQ ID NO: 793513 - protein, 100 aa, Homo sapiens
SSKKPRRRMDRYNKICSTVVTLGVEMGLELLQALHGQLLTSHLDSGHQLLGRSCPASHDSISSGEGAPGPRDFSATMRSQTSCGGTLSSQLQSNPLQRVC

SEQ ID NO: 793514 - protein, 104 aa, Homo sapiens
PLDGGAGLPGGKSAGRGAPRIGVEGPAPQAVPRGGGSATRAAGPGRGRGGFSQLWTRARRGWGLVEPILDPAVGSLCSESGPKSGTLEGPQGNSATAESGTGSG

SEQ ID NO: 793515 - protein, 115 aa, Homo sapiens
MYLLSFCFTIEVDGTLNFWVHGNMLKTEHNPDHHSCLAVSWEAAGCHGAGTQQSPLGVAGPWRPRPPCVGSLLAARSLHKQVILFGLLGFAYDLQPNLGCRGSSAGPCSFVCWVT

SEQ ID NO: 793516 - protein, 107 aa, Homo sapiens
QHGAHVLVSLCPLDAMEKVSCSKGATQLGTFLAMEQLLQQAGSECTVDVFNVALQQSQACDLMTPTLKQYIYLYNCLNSALADGLPLSRHWSLCRRGLCPVGWGQHS

SEQ ID NO: 793517 - protein, 130 aa, Homo sapiens
QHGAHVLVSLCPLDAMEKVSCSKGATQLGTFLAMEQLLQQAGSECTVDVFNVALQQSQACDLMTPTLVRGDGAGVGAWGLSCGKGWEVRELLPRPLGSTTRVATRWRCGPLCILPDGALGVGTHKGALFC

SEQ ID NO: 793518 - protein, 73 aa, Homo sapiens
CLQALCHRQSSDLTQLLYIGWSAATSLELKEKHFVKVLEEHLRAGRGGALSRKCSHPCMFEKHAVIFILHLLS

SEQ ID NO: 793519 - protein, 106 aa, Homo sapiens
MECAPTINIKFYACCTFQKAQEDIDSRPVFSVMSPQDRRLYGQKSCIFNTENPITSFDVTEVDLPPEIRDSAPCWRCPTLPEMCRCQVDYLEKMLQEKVNPDSQAS

SEQ ID NO: 793520 - protein, 69 aa, Homo sapiens
SLNKPSDLTGPRAANDMVYKKRLIEPPYRNATLLLLILHITLGSLLSRNRNQDFCLFLHHGFFKSRILK

SEQ ID NO: 793521 - protein, 172 aa, Homo sapiens
MGGCSSLPTPGVSRACHCGPAPYALHLVSLPTDLLIPSQNILSREGRRSFKKSGGVGLDPGQGGGSDLALGPSSLLPCAKNWGRAGGGQSPLLYTQGGILTPKPRLSTPWRTPVTSLLCLWRTLGESYRRSNNRLGQVTALHQAAAHASALAPPGDSLPIPSLCRRMCVAPS

SEQ ID NO: 793522 - protein, 556 aa, Homo sapiens
MALVALVAGARLGRRLSGPGLGRGHWTAARRSRSRREAAEAEAEVPVVQYVGERAARADRVFVWGFSFSGALGVPSFVVPSSGPGPRAGARPRRRIQPVPYRLELDQKISSAACGYGFTLLSSKTADVTKVWGMGLNKDSQLGFHRSRKDKTRGYEYVLEPSPVSLPLDRPQETRVLQVSCGRAHSLVLTDREGVFSMGNNSYGQCGRKVVENEIYSESHRVHRMQDFDGQVVQVACGQDHSLFLTDKGEVYSCGWGADGQTGLGHYNITSSPTKLGGDLAGVNVIQVATYGDCCLAVSADGGLFGWGNSEYLQLASVTDSTQVNVPRCLHFSGVGKVRQAACGGTGCAVLNGEGHVFVWGYGILGKGPNLVESAVPEMIPPTLFGLTEFNPEIQVSRIRCGLSHFAALTNKGELFVWGKNIRGCLGIGRLEDQYFPWRVTMPGEPVDVACGVDHMVTLAKSFIYNLPHLLGRPRPGNHWHSLAEASAWPAPRGSWMVVAEDPACSVTLCPESLSGYLPGGSGQGPSPAAGEACGTQLGWQPLVGRCGPHVSVLSK

SEQ ID NO: 793523 - protein, 556 aa, Homo sapiens; identical to SEQ ID NO: 793522

SEQ ID NO: 793524 - protein, 634 aa, Homo sapiens
MALVALVAGARLGRRLSGPGLGRGHWTAARRSRSRREAAEAEAEVPVVQYVGERAARADRVFVWGFSFSGALGVPSFVVPSSGPGPRAGARPRRRIQPVPYRLELDQKVQAAASSLSPSLSSALPASLDLFGSLQEVGSSGWTDFRQDDPQSWLQAQEGKALGVAINIYWVAVPDVVPGRVIRLAPISSAACGYGFTLLSSKTADVTKVWGMGLNKDSQLGFHRSRKDKTRGYEYVLEPSPVSLPLDRPQETRVLQVSCGRAHSLVLTDREGVFSMGNNSYGQCGRKVVENEIYSESHRVHRMQDFDGQVVQVACGQDHSLFLTDKGEVYSCGWGADGQTGLGHYNITSSPTKLGGDLAGVNVIQVATYGDCCLAVSADGGLFGWGNSEYLQLASVTDSTQVNVPRCLHFSGVGKVRQAACGGTGCAVLNGEGHVFVWGYGILGKGPNLVESAVPEMIPPTLFGLTEFNPEIQVSRIRCGLSHFAALTNKGELFVWGKNIRGCLGIGRLEDQYFPWRVTMPGEPVDVACGVDHMVTLAKSFIYNLPHLLGRPRPGNHWHSLAEASAWPAPRGSWMVVAEDPACSVTLCPESLSGYLPGGSGQGPSPAAGEACGTQLGWQPLVGRCGPHVSVLSK

SEQ ID NO: 793525 - protein, 202 aa, Homo sapiens
MALVALVAGARLGRRLSGPGLGRGHWTAARRSRSRREAAEAEAEVPVVQYVGERAARADRVFVWGFSFSGALGVPSFVVPSSGPGPRAGARPRRRIQPVPYRLELDQKISSAACGYGFTLLSSKTADVTKVWGMGLNKDSQLGFHRSRKDKTRGYEYVLEPSPVSLPLDRPQETRVLQVSCGRAHSLVLTDREGDPEIVNNV

SEQ ID NO: 793526 - protein, 648 aa, Homo sapiens
LSLGLPSAPLPSTRSKSGRSLFRRGLVLRVTQDGGAQRLLRRGTEDGAGGVGGWGSAGAAAERAGAGARALDGGQALPEPARSGRSRGGGARGPVRGRARCPRRSRLRVGLQLLGGAGRAFLCGAQLRARAPRRRPTAPQDPARALSPGAGPKARGYEYVLEPSPVSLPLDRPQETRVLQVSCGRAHSLVLTDREGVFSMGNNSYGQCGRKVVENEIYSESHRVHRMQDFDGQVVQVACGQDHSLFLTDKGEVYSCGWGADGQTGLGHYNITSSPTKLGGDLAGVNVIQVATYGDCCLAVSADGGLFGWGNSEYLQLASVTDSTQVNVPRCLHFSGVGKVRQAACGGTGCAVLNGEGHVFVWGYGILGKGPNLVESAVPEMIPPTLFGLTEFNPEIQVSRIRCGLSHFAALTNKGELFVWGKNIRGCLGIGRLEDQYFPWRVTMPGEPVDVACGVDHMVTLAKSFIYNLPHLLGRPRPGNHWHSLAEASAWPAPRGSWMVVAEDPACSVTLCPESLSGYLPGGSGQGPSPAAGGGLRNSAWMAAFGGPLWPARLCSLQVTCDGVWCHVSPEKPVLGKLSLNTVLGRFLLCLSWQSLGLCLAKAMRVPRTEPQLRRGSQAGFGPRFSFRPPCSWPFLAACHTASSLGGH

SEQ ID NO: 793527 - protein, 212 aa, Homo sapiens
MALVALVAGARLGRRLSGPGLGRGHWTAARRSRSRREAAEAEAEVPVVQYVGERAARADRVFVWGFSFSGALGVPSFVVPSSGPGPRAGARPRRRIQPVPYRLELDQKISSAACGYGFTLLSSKTADVTKVWGMGLNKDSQLGGSLWWAAVARTSLFSPTTLTAWLGKVKKPLRKRIEAKFLCAEGPEHIRQGSAAVPGGGGRSRNCEQCLI

SEQ ID NO: 793528 - protein, 188 aa, Homo sapiens
MALVALVAGARLGRRLSGPGLGRGHWTAARRSRSRREAAEAEAEVPVVQYVGERAARADRVFVWGFSFSGALGVPSFVVPSSGPGPRAGARPRRRIQPVPYRLELDQKISSAACGYGFTLLSSKTADVTKVWGMGLNKDSQLGKVKKPLRKRIEAKFLCAEGPEHIRQGSAAVPGGGGRSRNCEQCLI

SEQ ID NO: 793529 - protein, 298 aa, Homo sapiens
MRSPSAAWLLGAAILLAASLSCSGTIQGTNRSSKGKKPYGIEVDGNHTQIELEEGVTVETALTLGIELFLCFCVPSWENCDHWLSPFTMVIQQMAVGGGLAKNGMALWVFLFRTKKKHPAVIYMANLALADLLSVIWFPLKMGYHIHGNNWIYGEALCNVLIGFFYGKHVLFHSLHDLAQCAEVSGHREPHGALRKKENCHWISLEIWLLILAGQQSLGCREADHLNLGRGKSRTWSCTFACKSTCGASNAFKNITHRGKGAYMVHNNPTKPANGGENTKADMCRGKTDERVGRTHDT

SEQ ID NO: 793530 - protein, 81 aa, Homo sapiens
VVQPLKHSRFGFKSKLELQKLKSEEWWTLYAIEISSCHAVSCFIKMPKWQGTDVCSQKPATQGLPKATCMNLEVDLFSIGP

SEQ ID NO: 793531 - protein, 147 aa, Homo sapiens
IHSRTRATWSQSPCSLLLLSLASEIAPYPPLPLLSCSVAQLLPFSCHLTSLDLRFSILALHENHQGVLRNADAQADRVQGRARVTGIFPTLSGDVSALWGLRSPTQGGASTLKAPASCPTQVPSSLTPPLSTTCQCDSSIWHGKQKK

SEQ ID NO: 793532 - protein, 146 aa, Homo sapiens
MFITNNSIQVSTPPPPHHVQLNHVEFEDQDDEARVQYEGFRPGMYVRVEIENVPCEFVQNFDPHYPIILGGLGNSEGNVGHVQMRLKKHRWYKKILKSQDPIIFSVGWRRFQTILLYYIEDHNGRQRLLKYTPQHIHCGAAFWGKI

SEQ ID NO: 793533 - protein, 105 aa, Homo sapiens
MFITNNSIQVSTPPPPHHVQLNHVEFEDQDDEARVQYEGFRPGMYVRVEIENVPCEFVQNFDPHYPIILGGLGNSEGNVGHVQVGPFAAYLVPEALWISPPSIIL

SEQ ID NO: 793534 - protein, 71 aa, Homo sapiens
MESSLVSLLEEIELIFGEPVIFKGRPYLDKMKSDKVEMLYWLQQQRRVRHLVSALKDPHQSTLFRSSAASL

SEQ ID NO: 793535 - protein, 83 aa, Homo sapiens
SCFNLSAMFLQGAPGFPKDMDLACKYSMKACDLGHIWACANASRMYKLGDGVDKDEAKAEVLKNRAQQLHREQQKGVQPLTFG

SEQ ID NO: 793536 - protein, 83 aa, Homo sapiens; identical to SEQ ID NO: 793535

SEQ ID NO: 793537 - protein, 196 aa, Homo sapiens
MVGFGANRRAGRLPSLVLVVLLVVIVVLAFNYWSISSRHVLLQEEVAELQGQVQRTEVARGRLEKRNSDLLLLVDTHKKQIDQKEADYGASAAGCRPERASGRDARMTRFTLQKQHIVSDRRHTSSHGANCSSFRRHSSPPRPPFTPIGRTHYTCESRTLCTLRGHTSGWPASDHSLHSRTAPHHPSPAPARLPPP

SEQ ID NO: 793538 - protein, 179 aa, Homo sapiens
MVGFGANRRAGRLPSLVLVVLLVVIVVLAFNYWSISSRHVLLQEEVAELQGQVQRTEVARGRLEKRNSDLLLLVDTHKKQIDQKEADYGGLSSRLQAREGLGKRCEDDKVKLQNNISYQMADIHHLKEQLAELRQEFLRQEDQLQDYRKNNTYLVKRLEYESFQCGQQMKELRAQHEEN

SEQ ID NO: 793539 - protein, 90 aa, Homo sapiens
MIDPETRHKAFLKAWPWQNSTITFVPGLAICHYSSVQVPRRGAILPMLYALCYVKMPSFQHGPGRMYHLTCDWPRKMSLSCHVCRAHFRD

SEQ ID NO: 793540 - protein, 93 aa, Homo sapiens
SWCGGVWSYDQHLRCQWMLQLLQGWPALPASLSCHLWAFTLCQVELRCHDLRKFMFPHFTEGESETEDCRNNKGGRSRCKPGRPTPACFPSGY

SEQ ID NO: 793541 - protein, 74 aa, Homo sapiens
YATWGFSRTYLTDGSDQFEPLTPEYPSRGNNQQRPCYFCGCLGILTEAWFNPELYTGWFKCFPADFGSNVLGHS

SEQ ID NO: 793542 - protein, 96 aa, Homo sapiens
TLKTGSDPRCSVDSGVAAGRATRTLASSVSSRPLLMAPHRQAELHLRSPPAAAEERRARPRPGRNPHSLCAPACLKDKVYLQRRDAHIKDNETPKC

SEQ ID NO: 793543 - protein, 384 aa, Homo sapiens
LLQFLSCLENGLLPHGQLDPPLWSQRGKGKVFPKLRKRSPQGSAESTSSDKDDDEATDYVFRIIYPGMQSEFVPQDLMDVSVSNLPSLWQPSPRKSSCSSCSQSGSADGSSTNGCNHERAPLKLLCDNMKYQILSRAFYGWLAYCRHLSTVRTHLSALVNHMIVSPDLPCDAGQGLTARIWEQYLHDSTSYEEQELLRLIYYGGIQPEIRKAVWPFLLGHYQFGMTETERKEVDEQIHACYAQTMAEWLGCEAIVRQRERESHAAALAKCSSGASLDSHLHRMLHRDSTISNESSQSCSSGRQNIRLHSDSSSSTQVFESVDEVEQVEAEGRLEEKQPKIPNGNLVNGTCSPDSGHPSSHNFSSGLSEHSEPSLSTEDSVLDAQ

SEQ ID NO: 793544 - protein, 104 aa, Homo sapiens
LLTKLFAPLHPPQSYEEQELLRLIYYGGIQPEIRKAVWPFLLGHYQFGMTETERKEVGYLPWALGSLATKGARYCGAGECWFHAGPRKGREIRGRWEPEGGAVQ

SEQ ID NO: 793545 - protein, 261 aa, Homo sapiens
LHTAVGVVSPCFRQPRDAVITIPKDLNTYTVILCGQLVKAGEELVEGHDQFLCSALGRQAGEALDVSKQDAHVVMFLDVNLMDHPKILLLGVDVCFHFPPGNMTGKDRQQEPFLLLVLPLRVEPRLDALSGLLESLSLGDLSRIVGADTHDVGAGENENIGDKLLQQELVLGVGAQGDGQVEGGQEHPAEHCGPHAHGQQRVDGVDEEHGPPDALRGAAWLRQQQAHHLDGQHHGDERIAGQAHVVLVEGGAVAKHSHDED

SEQ ID NO: 793546 - protein, 118 aa, Homo sapiens
HEGVRGVVVPPARKRLSLGDAALGDPRQAWDEGPLSPGPYQCRPSLPAQLYPQSLMAAATLRTPTQGTVTFEDVAVHFSWEEWGLLDEAQRCLYRDVMLENLALLTSLGKVLLPFPVP

SEQ ID NO: 793547 - protein, 91 aa, Homo sapiens
ERRWFRHSSCRSGGSSPASRRPGGPEKPRARRALPPRSRPEAARRRPGCPPATDGDVQKGPECPALRLVFFLSGACFCVLLRQFMCVICET

SEQ ID NO: 793548 - protein, 79 aa, Homo sapiens
LPPRSGTLDKSPPLSEPRVRAPSSTRWHPHQQVFMERLPFARRCGLAVQVPLWEEHENSLQILEQGQGLAEKNHSGFNR

SEQ ID NO: 793549 - protein, 285 aa, Homo sapiens
NHGAQPRATLGPAGAFRFLASFFPAPPAAGEAAGAQCLEVAPSPPLAAGTERRRRPEQGGRPEPRARPAPARNMATCGDRSSSGVSCCTADFLEQRKRLARRRRQVEPGPCGPGRGQHRHSHEAPGAALGANESHGNLQTAPQQPLGSAHTSLQVAPLALHLPRPPRGELRCQQGRADTGGPGPQQPRSPGALPGVTRRRRRCPRKRQELRARVPVPGMARSRRWRGGDGEGEAAGGKERRSTGGVNMRWLSLEYEEDEASQKERKREGAMTQQSTMQNPALGLQ

SEQ ID NO: 793550 - protein, 69 aa, Homo sapiens
VKGRVRWRQPAVSEEQHKTAEKLILRRQSQMARQKLLPNLLLTGAPDWTTIHTKKYLHENHNSGSYQAR

SEQ ID NO: 793551 - protein, 102 aa, Homo sapiens
MGGVWDWRRRVRAEAGGKLSPGQEDHARYPKGLNYFLWEVGIRLGFSRRGKDLGVTFCCPTRLAHRGHFLGVAHRLWRTAACVLSKGSHFRVPHFQVSSIWP

SEQ ID NO: 793552 - protein, 123 aa, Homo sapiens
PGFPGPCSLESQSPWVPRPQPWRLLLQRRPAGPWTRWTGSLGTPAGPAPSSLLASSSPHAVPSLGPQHSVPPLQEIGPMAGLGRRQGGGEPHLSNRVIGEAGARSSGARLLHGVKIGGWTAVG

SEQ ID NO: 793553 - protein, 113 aa, Homo sapiens
PRENSVCPHGKKKGSWQGHFCCKGDFTMQPLLKTTDVIDDDDDDDDDDDDDDHDHDHDDGDHDDGDEDGNDCRIWGRGSLKESTKQCPSNQSLFNADFSFFYGSVWGQVSQIT

SEQ ID NO: 793554 - protein, 195 aa, Homo sapiens
WSPLLRSRQHVSRGTQQPESPKVAGAEVAVSWPEVEEALVLLQLWANLDVLLVASWQELSRHVCAVTKALAQYPLKQYRESQAFSFCTAGRWAAGEPVARDGAGLQAAWRRQIRQFSRVSPAVADAVVTAFPSPRLLQQALEACSTERERMGLLADLPVPPSEGGRPRRVGPDLSRRICLFLTTANPDLLLDLGS

SEQ ID NO: 793555 - protein, 210 aa, Homo sapiens
WSPLLRSRQHVSRGTQQPESPKVAGAEVAVSWPEVEEALVLLQLWANLDVLLVASWQELSRHVCAVTKALAQYPLKQYRESQAFSFCTAGRWAAGEPVARDGAGLQAAWRRQIRQFSRVSPAVADAVVTAFPSPRLLQQALEACSTERERMGLLADLPVPPSEGGRPRRVGPDLSRRICLFPSWTRPPAFASHKLYSIFIKSLFHNFQKK

SEQ ID NO: 793556 - protein, 110 aa, Homo sapiens
WVTYLVHMSAGIILINGQLTMQSISRSILFPDRHGFYFLSAQLGRLVSAGLPSHGKPLITLSQYILWGPSTFPIKDNYTWPSAVANACNPRTLGSQGGWITKSGDQDHPG

SEQ ID NO: 793557 - protein, 103 aa, Homo sapiens
MEGHEQRGTLRTPDHTQCQSQKRKGPEQRNPPSQGSGQRGRGRGDLWTWGGRIHGCGEQDGGAGEREWDFMGAEFQFGREVLGWMVVTVAQPCKCTYCHWAVT

SEQ ID NO: 793558 - protein, 77 aa, Homo sapiens
GSKREPQLCNLPAYLGLSISHLKMRRPEIAAALPAVIISVTEQVYGDHQSVSGTLVDMGLALCVQTRALTARLTSQW

SEQ ID NO: 793559 - protein, 125 aa, Homo sapiens
MLECTETNSLGFILAFLYNGLLSISAFACSYLGKDLPENYNEAKCVTFSLLFNFVSWIAFFTTASVYDGKYLPAANMMAGLSSLSSGFGGYFLPKCYVILCRPDLNSTEHFQASIQDYTRRCGST

SEQ ID NO: 793560 - protein, 114 aa, Homo sapiens
PRQAPYALVSLPSAQLSSPSPTLPGALSLSMSPPPPLCTVPLSAAEPDPMRDPAGWGQGWAPSRRGQTLSFPVLAWELPLGIPSSATDFVGTGWGVGSRLHQEPGERVETPILE

SEQ ID NO: 793561 - protein, 97 aa, Homo sapiens
GGLKGLLKCAKAGAQAEETPRASEGCEDCQHTVTISVTWSQIIIRKTNQDRNSRESEKDKGPMAESLGILASSTTGLRQEIKQAQFNMSSQSIHRYC

SEQ ID NO: 793562 - protein, 125 aa, Homo sapiens
SGRFHTGSDMFKIWILKNLGNLRGSRTAAGPCWTVPVHVPGHGAGEPAHHPAMSPDSHLHTSMYFFLSNLSLPDIGFTSTTVPQMTVDIQSRSRVISYAGCLTQKSLFAIFGGTEERHAPECDGL

SEQ ID NO: 793563 - protein, 106 aa, Homo sapiens
PALLGYLAPGPGLSLPQLLNTRSLLRLAGLQNTLDLSASSVPLWSAAMTKLETVIITHILRQHRPDVGGSHQHFGRLRQADHLRSGVQHQPGQHGETLSLLKIQKN

SEQ ID NO: 793564 - protein, 124 aa, Homo sapiens
MAERWRPRGSEKGEGFPPHAGWPRPALPAWVPPLQLRRKLLDTPLFGRFHSNPVPGKMPKYYYNHPEERTIQVAVSLSVCNIHPVYVPSGPPKVLPVTACQSYVCPDASMCVCRATNKHADAEL

SEQ ID NO: 793565 - protein, 98 aa, Homo sapiens
AVAEDSDGREIKISQHSNYKNDVMIRKEAYVHKSMMEELKSIIDDSEITKEDDALWPPPNREGRQELEIIIGDEHISFTTSKIGSLIDVSQSKDPEGL

SEQ ID NO: 793566 - protein, 102 aa, Homo sapiens
FFLRGGSSAIASISIFHVWPKTILLPMWPREAKRLDSSDLDPPKKKTITSGAFCKFSLTELLLQEERLQYVNTPRQTFVTNHCLPCRSNRLYLRPLYVLQVH

SEQ ID NO: 793567 - protein, 46 aa, Homo sapiens
MVVVWSTGEESLRVLAFLVLSRVCRHKKDTFLGPVLKQMYIMYVRN

SEQ ID NO: 793568 - protein, 70 aa, Homo sapiens
VKHACFPFAFCHDYKFPEAFPAMLPVQPSELFDHMICFGRWNVSSWGPFCHHKSLDYPDGRWKTHGCCSS

SEQ ID NO: 793569 - protein, 113 aa, Homo sapiens
QEIQELIEAQTRAPGPCAEVRALPAPAAEPEPAWEEAPPERALELEGAPAKDQTNEELPEITEVPESIKRRLGRRVPAATPAPRGNLLLQAWMRVHSWASRLFAPNVLPGTGP

SEQ ID NO: 793570 - protein, 78 aa, Homo sapiens
LGPGRRKLQLSRERFVGQKLEVLKKLKDRASKGAGIYPESFRGRAWDNLSSNIKYIALSYNLKYKTAQSPCCYKYVIK

SEQ ID NO: 793571 - protein, 298 aa, Homo sapiens
MTLNTEQEAKTPLHRRASTPLPLSPRGHQPGRLSTVPSTQSQHPRLGQSASLNPPTQKPSPAPDDWSSESSDSEGSWEALYRVVLLGDPGVGKTSLASLFAGKQERDLHEQLGEDVYERTLTVDGEDTTLVVVDTWEAEKLDKSWSQESCLQGGSAYVIVYSIADRGSFESASELRIQLRRTHQADHVPIILVGNKADLARCREVSVEEGRACAVVFDCKFIETSATLQHNVAELFEGVVRQLRLRRRDSAAKEPPAPRRPASLAQRARRFLARLTARSARRRALKARSKSCHNLAVL

SEQ ID NO: 793572 - protein, 101 aa, Homo sapiens
KGAPMGPARTDQGQRLKGSYLKGNHPGGPEPLIFQTLQGMMLLPQSRAQARAEFGTREQERQGEEDSELSDRAVLLCSSWLLGIGFREYSAVLDALRHLRV

SEQ ID NO: 793573 - protein, 156 aa, Homo sapiens
MILQVSGGPWTVALTALLMVLLISVVQSRATPENSVYQERQECYAFNGTQRVVDGLIYNREEYVHFDSAVGEFLAVMELGRPIGEYFNSQKDFMERKRAEVDKVCRHKYELMEPLIRQRRGDVTITAVRGCWTTILSGYFLLKRGVVSGGCSWGSS

SEQ ID NO: 793574 - protein, 118 aa, Homo sapiens
TYKEWKAARFCCCTNGLPTEHRLPHPLLFQGVRFLKPSGDCDIVFFPPPMLFILSDLGARAELPAQYHPLGLVGLEKASGAGEVVSWLLQELQSSWWLRIDLCFVLGVLTLLSHVFRY

SEQ ID NO: 793575 - protein, 73 aa, Homo sapiens
RGTLRELNLLLQDEPRPRARSPPRSQPLCPIAFSISSARNALPTRANPDVPSATVGTLPSCGAFARLPQSPWL

SEQ ID NO: 793576 - protein, 106 aa, Homo sapiens
LDCTHPVEDGIMDAANFEQFLQERIKVNGKAGNLGGGVVTIERSKSKITVTSEVPFSKRYLKYLTKKYLKKNNLRDWLRVVANSKESYELRYFQINQDEEEEEDED

SEQ ID NO: 793577 - protein, 106 aa, Homo sapiens; identical to SEQ ID NO: 793576

SEQ ID NO: 793578 - protein, 106 aa, Homo sapiens; identical to SEQ ID NO: 793576

SEQ ID NO: 793579 - protein, 81 aa, Homo sapiens
NLEEMDKFLEIYNPPRLNHEEIETEQTNNSEIKRVIFKTAYKKKVQDQMNSQINSIRLSKKNQYQPYRNYSQKNTERGDLP

SEQ ID NO: 793580 - protein, 107 aa, Homo sapiens
DRNSWGPKIQLLQLHNHQLFIDLNDSQNAGTLVVSISPLYNPVRKVFYLSPFYRGGNKRSGKLNNFPKIAQLSVMDLGDKPTSHARCKVVLSPPSHEMSYRGKSFLS

SEQ ID NO: 793581 - protein, 241 aa, Homo sapiens
RLRQGCIQPCNLVPSTLESLEASALPPAVGDSGRYPLYQLLNCGRGNSCGAIHPDIAHMERLLQQAMAERERLLKAREGTRRGTEGSSGPAVPAITAPPTPPHPPGPRILDLRQHLEGWGHNPENCPHVQVSGCCCRGPLVKMGGRIKTWRKRWFCFDRQARRLAYYADKEETKLKGVIYFQAIEEVYYDHLRCAFKSPNPRLTFCVKTYERLFYMVAPSPEAMRIWMDVIVTAADENHAP

SEQ ID NO: 793582 - protein, 268 aa, Homo sapiens
  misc_feature (73)..(73): Xaa can be any naturally occurring amino acid
GSGKGVSSPEPGPLYTESLEASALPPAVGDSGRYPLYQLLNCGRGNRRDIREKVGRWKKRPSHCNPPRLCSLXPSCGAIHPDIAHMERLLQQAMAERERLLKAREGTRRGTEGSSGPAVPAITAPPTPPHPPGPRILDLRQHLEGWGHNPENCPHVQVSGCCCRGPLVKMGGRIKTWRKRWFCFDRQARRLAYYADKEETKLKGVIYFQAIEEVYYDHLRCAFKSPNPRLTFCVKTYERLFYMVAPSPEAMRIWMDVIVTAADENHAP

SEQ ID NO: 793583 - protein, 70 aa, Homo sapiens
MNPLTKVKLINELNEREVQLGVADKVSWHSEYKDSAWIFLGGLPYELTEGDIICVFSQYGEIVNINLMWD

SEQ ID NO: 793584 - protein, 114 aa, Homo sapiens
MVHHRILTVIYKPTPSSLFNRIGLLAVPHQMSSCYRSCTLAVPSTWNASFLTSFQFSSDDTLSVGPFLTTLFKIVAPSPYTYIYTHTHTHSLTHIYSTLSCPLCFYSVLSAYNI

SEQ ID NO: 793585 - protein, 107 aa, Homo sapiens
SPLPGCLEQGSAPDTPPPPQAAWSRALLESRKEHTPFLRLSELQSLASWCKCLSACHHHRVGWSVTGSAGVGKRTLGQKCKGDRAGTPHNHNSSELFLVLCGKMLGA

SEQ ID NO: 793586 - protein, 36 aa, Homo sapiens
MIPKNPLSNTTSLKAKGKPENSHSAKLGIKTNTTPK

SEQ ID NO: 793587 - protein, 67 aa, Homo sapiens
QEDQANQTLARYRKTVHELDDAEDRAGMAETALNKLRTRHRVAGKGITSVEIIQVSKTGTSKTLSEE

SEQ ID NO: 793588 - protein, 89 aa, Homo sapiens
QGHRGYTLNTAVRRPQKLQEDRWSLFLHAAESQILKLPSVHKAAQRRSVTVAAIWHRCSILTLYTSFGMQQVENYKPGSSPQVKSEKHY

SEQ ID NO: 793589 - protein, 78 aa, Homo sapiens
SPVPPRPPGAPPHSTSHAAESQILKLPSVHKAAQRRSVTVAAIWHRCSILTLYTSFGMQQVENYKPGSSPQVKSEKHY

SEQ ID NO: 793590 - protein, 75 aa, Homo sapiens
FPGLYEFGFRHTHGHASQCALAQSTPSSRNPPQPFAGVHTVQSTDFPNEPGGNVPGRTPGPEEPTESSTKKGREA

SEQ ID NO: 793591 - protein, 102 aa, Homo sapiens
AYLPPHRSTPSWGKACLAMAVQRRVLPNRMWFLKQTEAAHKAPSLASDTSLWLGARSSGAHSTGPGCTEVRVQWLTSIIPGLWEAEAGGSLERRSSRPAWTT

SEQ ID NO: 793592 - protein, 67 aa, Homo sapiens
VGECVRVRVSYVLIRAWGSEEGNPFGEGQPPNRTCCGKPHHDKEHVSARNMWASGPRKALWFPLSPQ

SEQ ID NO: 793593 - protein, 113 aa, Homo sapiens
MKLNERSLAFYATCDAPVDNAGFLYKKGGRHAAYHRRWFVLRGNMLFYFEDAASREPVGVIILVAVVSGRGPCLCLRGGSHRALQTLLDCILQSWPLGLGPLGSLPDLPSWAG

SEQ ID NO: 793594 - protein, 113 aa, Homo sapiens; identical to SEQ ID NO: 793593

SEQ ID NO: 793595 - protein, 302 aa, Homo sapiens
MKLNERSLAFYATCDAPVDNAGFLYKKGGRHAAYHRRWFVLRGNMLFYFEDAASREPVGVIILEGCTVELVEAAEEFAFAVRFAGTRARTYVLAAESQDAMEGWVKALSRASFDYLRLVVRELEQQLAAVRGGGGMALPQPQPQSLPLPPSLPSALAPVPSLPSAPAPVPALPLPRRPSALPPKENGCAVWSTEATFRPGPEPPPPTASPPGLGHPTGPWTWPPSPGCTSAMARRSGPCVASGSAAGSSPEATRAPVLGGHKLYALWDRPGPGETGGADPEGNHGQGWPPGPEWPGFGGCRL

SEQ ID NO: 793596 - protein, 116 aa, Homo sapiens
MKAVWSTEATFRPGPEPPPPTASPPGLGHPTGPWTWPPSPGCTSAMARRSGPCVASGSAAGSSPEATRAPVLGGHKLYALWDRPGPGETGGADPEGNHGQGWPPGPEWPGFGGCRL

SEQ ID NO: 793597 - protein, 302 aa, Homo sapiens; identical to SEQ ID NO: 793595

SEQ ID NO: 793598 - protein, 151 aa, Homo sapiens
DRNNITRITKMDFAGLKNLRVLHLEDNQVSVIERGAFQDLKQLERLRLNKNKLQVLPELLFQSTPKLTRLPSVELCWMALDRNHIPPTGFLQSTCSWSNYYEEDREGLENLVPVAFETCTITLQLSTLTKYQDQLCFLKDQIKSNFKWDKR

SEQ ID NO: 793599 - protein, 108 aa, Homo sapiens
MLVNLMISKEVNVAGAGVESGEEKDRRRKDKWLQKIILGLVKHGEDFGLESGSELESHFYCLLTMDKPLTSLSISFLACKIKKIYSGQARWLMPVIPAPRGGRGGRIT

SEQ ID NO: 793600 - protein, 115 aa, Homo sapiens
WKILYQDKWYTLQSHPCCAPSPLPTPQGTQQLLILWKGPTACRNLPLLVTVLRFVNGISTFPKNDQLPSCSQECQSDFAFEASSLSEHDCIKVRSWLWSTEKATAAQRLMVWAGP

SEQ ID NO: 793601 - protein, 60 aa, Homo sapiens
MFTESKSTGIGIEYVGGEHVKSVVKTESRNDTQSARPAMGTLTFKTFLLISENLQPSRGY

SEQ ID NO: 793602 - protein, 117 aa, Homo sapiens
LNLSVAAFDCLSANCFPVESYCSCSNHPVPALDTEYIKGSTKQLLPKNSQPTFLSLNDGHSPYGRSNIFLIFLCWFEIRTELDILSKLEGTSFTDNRNLEDLGFRTMLFKFNNWKIS

SEQ ID NO: 793603 - protein, 120 aa, Homo sapiens
SVVSLALCPESQGRASHAVGCPLPNPGDEATFHSEPGSAFPGRGGEESRSRECRWGRDQGLRVRKEACGPRQGESVYPSLGRCPKERDGLGEQVMAMRAGAGMGSDCKWAMISFQERKTF

SEQ ID NO: 793604 - protein, 121 aa, Homo sapiens
SDKDSHVPPRLTWILLNPTPAFSRSLGSRRPWGPTVISAVPAARHSHSNSPNHDAQNATSKKNIRALPLRKNSCTYKEEGTAQPSTFQLLSFHLHPSTLIRTYMKLCDIFLFLLNKIQLSS

SEQ ID NO: 793605 - protein, 358 aa, Homo sapiens
GPPQPQKKLDPDSIPSPIQVIENDRASRGGQVYATNTRGQIPPLVTTDCMIQDQGNASPRFIRCTTYCFPCTSDMAKQAQIPLAAVIKPFATIPSNESPLYLVNHGESGPVRCNRCKAYMCPFMQFIEGGRRYQCGFCNCVNDVPPFYFQHLDHIGRRLDHYEKPELSLGSYEYVATLDYCRKSKQPTRTDPREYLMCHLFAHINTDMTLLAESGKTHTLNNSDDNGYYPTKEAIFNEAHNCKQREQPGNGLPERFRLTTTKDFTGSFLTVEFPLVVFTRRICRVPNQWNALPVLDVRSHREKPLLGPIQKQQEARGRNTNTPRERLTHRGGKHRDGPGTLGAQTRGAQQTTPEQKKA

SEQ ID NO: 793606 - protein, 97 aa, Homo sapiens
REGRKHLCWGLLPLPQHWGITAFLAAATYHKISSAGEERMCSSQATGPLCLAPSTELPKGLTFATLELTSRGPLAYPFPCQLKRLPAAWTSWLAEGS

SEQ ID NO: 793607 - protein, 107 aa, Homo sapiens
TGCGGSRCLFCMARVPHRSQLSVCTCSDLHHSCPAPAVTTWNLQPGLGGCEVSREVDQEATPFCGTSEMTTCFTVGWGWGRKERPHYSRTFYPHRLRHPVMKSPRTA

SEQ ID NO: 793608 - protein, 828 aa, Homo sapiens
MQNRTQGQTVFVRIPALLHTSCVTSGYTVRLLKFLFFFFFFFEMEFQFLLPRLECNGEITAHCNLHLLSSRDSPASPSRVTGITGAHLHTQLIFVFLVVTGFHHVGQAGLKLLTSSDPPALASQSAGITGVSHPELAVHKVLRTCSMFTFQRIKGIHHFFFDLSILCSFRFQTAIKTSSTGEYNPRPPFPGNLDIELLLFSILGSCYAVMLTSEENSERSVHILFADLPAVLRDWSVAELTYLPYLQNSQVPRLHFPFSYKTQTLFLGPITHRNPTQHLSHWNLEEHLPKDYISSILLPFIIKSLLDGDDLNSLGACFLSCESFLGVNSEINLSLFLFLFIYFLRWTLTLSPRLECSGTISAPCNLHLPGSSDSPVSATQVAGTTGAHQHARLIFVVLVDTGFHHIGQAGLKLLTSNDPPTLASQSAGIIGVSHHALLKLIDFFQVCAVMFYFCDQTYFKSYKDSFQLYLMKASRHLMTFFSGVIVFIFCAFIFGKPVLLSVCLLISKVLLNLHYLKCPLPINFSSTLRLNIFLSGYLYIFRTFYCLKITVKASKNIHPKISQFQYPTTQRRAHGCSSPSGAHSTSEDPALKRPLAHPPAHHMLSHRFYTFIYLFIYLVRWSLALLPRLEYSGAVSAHRKPCLLGSSNSVAASRGAGITGTHHPIQLIFVFLIETGFHHVGQAGLKLLTSGDPPTSASKSAGIIGVSHCSRALMLLKFSLYLNYLEFILCLYIIWREFTEEHMYPPNCNAILAIYQIIMSILVNFCTVYSIPLSSYLFIHKYQTFYYYTLKYYYETHLVRPPLYFPTVSEFFKGSFFPMHTLESYCLF

SEQ ID NO: 793609 - protein, 584 aa, Homo sapiens
PSAMRGLLCWPVLLLLLQPWETQLQLTGPRCHTGPLDLVFVIDSSRSVRPFEFETMRQFLMGLLRGLNVGPNATRVGVIQYSSQVQSVFPLRAFSRREDMERAIRDLVPLAQGTMTGLAIQYAMNVAFSVAEGARPPEERVPRVAVIVTDGRPQDRVAEVAAQARARGIEIYAVGVQRADVGSLRAMASPPLDEHVFLVESFDLIQEFGLQFQSRLCAIDLCAEGTHGCEHHCVNSPGSYFCHCQVGFVLQQDQRSCRAIDYCSFGNHSCQHECVSTPGGPRCHCREGHDLQPDGRSCQVRDLCNGVDHGCEFQCVSEGLSYRCLCPEGRQLQADGKSCNRCREGHVDLVLLVDGSKSVRPQNFELVKRFVNQIVDFLDVSPEGTRVGLVQFSSRVRTEFPLGRYGTAAEVKQAVLAVEYMERGTMTGLALRHMVEHSFSEAQGARPRALNVPRVGLVFTDGRSQDDISVWAARAKEEGIVMYAVGVGKAVEAELREIASEPAELHVSYAPDFGTMTHLLENLRGSICPEEGISAGTELRSPCECESLVEFQGRTLGALESLTLNLAQLTARLEDLENQLANQK

SEQ ID NO: 793610 - protein, 543 aa, Homo sapiens
PSAMRGLLCWPVLLLLLQPWETQLQLTGPRCHTGPLDLVFVIDSSRSVRPFEFETMRQFLMGLLRGLNVGPNATRVGVIQYSSQVQSVFPLRAFSRREDMERAIRDLVPLAQGTMTGLAIQYAMNVAFSVAEGARPPEERVPRVAVIVTDGRPQDRVAEVAAQARARGIEIYAVGVQRADVGSLRAMASPPLDEHVFLVESFDLIQEFGLQFQSRLCAIDYCSFGNHSCQHECVSTPGGPRCHCREGHDLQPDGRSCQVRDLCNGVDHGCEFQCVSEGLSYRCLCPEGRQLQADGKSCNRCREGHVDLVLLVDGSKSVRPQNFELVKRFVNQIVDFLDVSPEGTRVGLVQFSSRVRTEFPLGRYGTAAEVKQAVLAVEYMERGTMTGLALRHMVEHSFSEAQGARPRALNVPRVGLVFTDGRSQDDISVWAARAKEEGIVMYAVGVGKAVEAELREIASEPAELHVSYAPDFGTMTHLLENLRGSICPEEGISAGTELRSPCECESLVEFQGRTLGALESLTLNLAQLTARLEDLENQLANQK

SEQ ID NO: 793611 - protein, 502 aa, Homo sapiens
PSAMRGLLCWPVLLLLLQPWETQLQLTGPRCHTGPLDLVFVIDSSRSVRPFEFETMRQFLMGLLRGLNVGPNATRVGVIQYSSQVQSVFPLRAFSRREDMERAIRDLVPLAQGTMTGLAIQYAMNVAFSVAEGARPPEERVPRVAVIVTDGRPQDRVAEVAAQARARGIEIYAVGVQRADVGSLRAMASPPLDEHVFLVESFDLIQEFGLQFQSRLCVRDLCNGVDHGCEFQCVSEGLSYRCLCPEGRQLQADGKSCNRCREGHVDLVLLVDGSKSVRPQNFELVKRFVNQIVDFLDVSPEGTRVGLVQFSSRVRTEFPLGRYGTAAEVKQAVLAVEYMERGTMTGLALRHMVEHSFSEAQGARPRALNVPRVGLVFTDGRSQDDISVWAARAKEEGIVMYAVGVGKAVEAELREIASEPAELHVSYAPDFGTMTHLLENLRGSICPEEGISAGTELRSPCECESLVEFQGRTLGALESLTLNLAQLTARLEDLENQLANQK

SEQ ID NO: 793612 - protein, 96 aa, Homo sapiens
AKSAQTLKQEKTVSRATWKGSSICFQAKASLQKPLGSSLCVSPLLPCTPDCRQASGEVANSWDPPVKSLLSARDVKRLGLSPIGRWGALSLTLPGK

SEQ ID NO: 793613 - protein, 111 aa, Homo sapiens
VGNERRVPSKHCGSRKPRDSRRRTSLSNMERIQYLFSGKSKPPKAPWFFSVCLAPSALYTRLPASKRGGGEQLGSSSEKFAQRERCQEAGIVAYREVGSSLTHTSWEMKEN

SEQ ID NO: 793614 - protein, 303 aa, Homo sapiens
MCAEVGPALCRGMERNSLGCCEAPKKLSLSFSIEAILKRPARRSDMDRPEGPGEEGPGEAAASGSGLEKPPKDQPQEGRKSKRRVRTTFTTEQLHELEKIFHFTHYPDVHIRSQLAARINLPEARVQIWFQNQRAKWRKQEKIGNLGAPQQLSEASVACPQIWMWLGPRGHPLLCAGWLLPRAVVHRLKISWPLPGSLPGSPSSQRTHGKHSLSQVFPSIKLASLCYASFHLHTPNGAASVLLQHRDWTCSPQMSHFPLQVKAGSRCALGLWGNRFHNPKMAHSPGSYPEHASWKAAPDSKAN

SEQ ID NO: 793615 - protein, 93 aa, Homo sapiens
SGEREREEAREERARGCSEASRTSSDSGPSRAPAARVVGGEAAATAAARARPRAPLAAGSPVPVRPQDAAARSAAGMQPGHGRRPPVTCRGER

SEQ ID NO: 793616 - protein, 93 aa, Homo sapiens; identical to SEQ ID NO: 793615

SEQ ID NO: 793617 - protein, 117 aa, Homo sapiens
PAIFAVPSSCMWPATLILDGAALEDFPPRKGGFFLPTGARSIWSGCLQAAECVLCLSQSLSPLCLPLHQPALPSGALPSLDSLCQVWTRLGHVPLEFSPSQPLSVGFSPWTQEEDPQ

SEQ ID NO: 793618 - protein, 102 aa, Homo sapiens
MRLHPGSNSYLQRALPVLLGIQVSASPPRSMMNAGRHPCEEPCDHFPFLKIPGGGGPWPTSALTTPGSDLARCLRCDGNFSTLNFASDPDEIASVAFASRSC

SEQ ID NO: 793619 - protein, 86 aa, Homo sapiens
PYFLIPAAVEWIFNKQPTAARDRSSGTVFLSEKSESYQRVGHLDWQDTLGLFITGENEVSRETNRNKEYELPQTELPSTILKDFCV

SEQ ID NO: 793620 - protein, 80 aa, Homo sapiens
QAVSGTACPSGSVRHCAYWAAASCPPSAPSAAARALRPATAPPPEAISGSPATDSARMHRPTDRPQCPPRAVAELPTPTP

SEQ ID NO: 793621 - protein, 140 aa, Homo sapiens
MLALQLQEILCTLTLLSQFVEEVASAFQCHIIVVKIEAQNERDVGGLQIQIDQAIDSCLQLDEIILMSLVCKKELTTKTVLAGLRSRRWPRRWSWRLQVERTVEGSWRLEERESLGLFHPNTIEARDRWVGLSNALPEHP

SEQ ID NO: 793622 - protein, 93 aa, Homo sapiens
GYLHSAHESHRGDRGPQAPSDTSTPHNAFLGYTPPTWPAQGIRSCVEESAGGGRAPGNNHGSLADKPCAHTAQALTPAAGGALLGSGPRIRAK

SEQ ID NO: 793623 - protein, 202 aa, Homo sapiens
EGVPRGAPLETLLILGVRLTAGRDLSRNLSPLTEPSLRSVHGLLLDTARIQKSMLSILKPRRSQEWRTALRRYCCPTDLQAPRSPVPPIRKVGISDVIVHANLATSLKKNTCNCQADLLSWRSWVNGISCHCPNLRPLSKSIFRDSTSLCSLSQQRLCPLHSKPEACWGLFISVHAHFRVQSGGRGNRVGKKTRVSRNDETL

SEQ ID NO: 793624 - protein, 104 aa, Homo sapiens
GVAEASAGRSSPVRRNGLGSCLKKQSGHDRIEQLCSVGGGTFLVWTVWTLQSWQAGTAESTNLQRWWPPSPGSPVPGRDRSSVLITLTGVAKASTGISVFFASK

SEQ ID NO: 793625 - protein, 173 aa, Homo sapiens [sequence omitted]

SEQ ID NO: 793626 - protein, 211 aa, Homo sapiens
PVHFPRVPRSPTRGMSSAPAPGPAPASLTLWDEEDFQGRRCRLLSDCANVCERGGLPRVRSVKVENGVWVAFEYPDFQGQQFILEKGDYPRWSAWSGSSSHNSNQLLSFRPVLCANHNDSRVTLFEGDNFQGCKFDLVDDYPSLPSMGWASKDVGSLKVSSGAWVAYQYPGYRGYQYVLERDRHSGEFCTYGELGTQAHTGQLQSIRRVQH

SEQ ID NO: 793627 - protein, 197 aa, Homo sapiens
MSSAPAPGPAPASLTLWDEEDFQGRRCRLLSDCANVCERGGLPRVRSVKVENGVWVAFEYPDFQGQQFILEKGDYPRWSAWSGSSSHNSNQLLSFRPVLCANHNDSRVTLFEGDNFQGCKFDLVDDYPSLPSMGWASKDVGSLKVSSGAWVAYQYPGYRGYQYVLERDRHSGEFCTYGELGTQAHTGQLQSIRRVQH

SEQ ID NO: 793628 - protein, 203 aa, Homo sapiens
PVHFPRVPRSPTRGMSSAPAPGPAPASLTLWDEEDFQGRRCRLLSDCANVCERGGLPRVRSVKVENGVWVAFEYPDFQGQQFILEKGDYPRWSAWSGSSSHNSNQLLSFRPVLCANHNDSRVTLFEGDNFQGCKFDLVDDYPSLPSMGWASKDVGSLKVSSGAWVAYQYVLERDRHSGEFCTYGELGTQAHTGQLQSIRRVQH

SEQ ID NO: 793629 - protein, 86 aa, Homo sapiens
KLDLRLLVTHLPQGPELCVLPLGFLCEMHRSQDSLGTCHSGAGSEASSPWFLGLCRERTGLETPSPGCFHTFKHHGFLPSLRPQWP

SEQ ID NO: 793630 - protein, 143 aa, Homo sapiens
LRLSLALPPTLVCSGVISTHCNLRLPGSSNSPASASQVAGITGTRHHAQLIFALLVESGFHRVGQAGLELLTSGDPPASISQSAGITGMSHRTQPCSTFNSSDYMGNPNSLNLETQVDNPCFKNLMSQCFFSVLTWLMPLSYS

SEQ ID NO: 793631 - protein, 115 aa, Homo sapiens
IDKSYDGPEEIEADGLSDKSSHSGQGALNCESAPQGNSELEDMENKARKVKKTKEKEKKKEKGKLKVKEKKRKEENEDPERKIKKKGFGAMLRFGKKKEDKGGKAEQKGTLKHGG

SEQ ID NO: 793632 - protein, 135 aa, Homo sapiens
PARQPESINLKASKSMDLVPDESKVHSLAGQKSDGLSDKSSHSGQGALNCESAPQGNSELEDMENKARKVKKTKEKEKKKEKGKLKVKEKKRKEENEDPERKIKKKGFGAMLRFGKKKEDKGGKAEQKGTLKHGG

SEQ ID NO: 793633 - protein, 85 aa, Homo sapiens
PLTPRALQGGAAAAWGVLSCPVCISRRTLGGPYGKALSPKLHLGGPGAGQLTPGPRLSLWSAWFCCPQWEGAWGPRRCRPCLPIY

SEQ ID NO: 793634 - protein, 125 aa, Homo sapiens
DRGGGSFMNGLAPSLWCCSHDGVLMRSDCLKVCSTAPHSLSSSALATSAVPAARSPSAMIVSFLRTPRKQMLSCFLYNLQDHEPIKPLFFIKCLLGIFYSSAKWTNTISMGGHTRNKHNWCLRKE

SEQ ID NO: 793635 - protein, 357 aa, Homo sapiens
LGPLARQAGRLRGATPLAAGMETMRAQRLQPGVGTSGRGTLRALRPGVTGAAAATATPPAGPPPAPPPPAPPPPPLLLSGAPGLPLPPGAAGSPAVLREAVEAVVRSFAKHTQGYGRVNVVEALQEFWQMKQSRGADLKNGALVVYEMVPSNSPPYVCYVTLPGGSCFGSFQFCPTKAEARRSAAKIALMNSVFNEHPSRRITDEFIEKSVSEALASFNGNREEADNPNTGIGAFRFMLESNKGKSMLEFQELMTVFQLLHWNGSLKAMRERQCSRQEVLAHYSHRALDDDIRHQMALDWVSREQSVPGALSRELASTERELDEARLAGKELRFHKEKKDILVLAAGQLGNMHSSNC

SEQ ID NO: 793636 - protein, 113 aa, Homo sapiens
EDHMRTQGEDSHLQAKERGLRRDHLYRHLDLRFLIPRIVRKSMSVVIQSKVLCCGSPSKLVLIQSTCPVAQQTHPEYVSPEMHKYVHPKTCPVIVRVVPNWKLLKYENYGMHK

SEQ ID NO: 793637 - protein, 109 aa, Homo sapiens
QWEELRAEPLTRRMKLSPGCRDLGPLSKRAAWAGTQGSHGPIPMTQDTPHPVVTLAPHGFPALQSWSRPRASYPGSCGQRCSPAPRRRDSGHSRAVRGSGQDTLDSAPQ

SEQ ID NO: 793638 - protein, 135 aa, Homo sapiens
RGAAGWRWAPRRRGQSLGLLVLLVLHAPVLEPDLDLPLAEVQQVGHLYTARPAQVAVKMELLLQLHQLRARVRRPRPLGRRRPRGALVPSPAAAATAPAATTASAAAATAAATTALCWIRGGGVGRGENEIKDNY

SEQ ID NO: 793639 - protein, 125 aa, Homo sapiens
VSRRKVSRHIVREEEAAVPAPGTTGITSHGHICAPGAPAQQVYLQETGNWKEGQEQLLRYQLAGQNQLLLLCPDFRQERQQLPGQSRLSKQSGSLGLSREKKASCGATEAFCLHSVHPETIQEQL

SEQ ID NO: 793640 - protein, 125 aa, Homo sapiens; identical to SEQ ID NO: 793639

SEQ ID NO: 793641 - protein, 77 aa, Homo sapiens
RSHVGLENECKVLLSESSSQQMREPEGRWFSPGVWLLGGPGSPPATLAKLHLVLLVDGLLACWHLSVCFSAGMLPSM

SEQ ID NO: 793642 - protein, 187 aa, Homo sapiens
MVGSLNCIVAVSQNMGIGKNGDLPWPPLRNEFRYFQRMTTTSSVEGKQNLVIMGKKTWFSIPEKNRPLKGRINLVLSRELKEPPQGAHFLSRSLDDALKLTEQPELANKVDMVWIVGGSSVYKEAMNHPGHLKLFVTRIMQDFESDTFFPEIDLEKYKLLPEYPGVLSDVQEEKGIKYKFEVYEKND

SEQ ID NO: 793643 - protein, 223 aa, Homo sapiens
QLVPREYGYRRPRASPPNLTARSAVTSGLGGPPAAVMVGSLNCIVAVSQNMGIGKNGDLPWPPLRNEFRYFQRMTTTSSVEGKQNLVIMGKKTWFSIPEKNRPLKGRINLVLSRELKEPPQGAHFLSRSLDDALKLTEQPELANKVDMVWIVGGSSVYKEAMNHPGHLKLFVTRIMQDFESDTFFPEIDLEKYKLLPEYPGVLSDVQEEKGIKYKFEVYEKND

SEQ ID NO: 793644 - protein, 187 aa, Homo sapiens; identical to SEQ ID NO: 793642

SEQ ID NO: 793645 - protein, 187 aa, Homo sapiens; identical to SEQ ID NO: 793642

SEQ ID NO: 793646 - protein, 107 aa, Homo sapiens
MVGSLNCIVAVSQNMGIGKNGDLPWPPLRNEFRYFQRMTTTSSVEGKQNLVIMGKKTWFSIPEKNRPLKGRINLVLSRELKEPPQGAHFLSRSLDDAFDVVLFQRKP

SEQ ID NO: 793647 - protein, 187 aa, Homo sapiens; identical to SEQ ID NO: 793642

SEQ ID NO: 793648 - protein, 187 aa, Homo sapiens; identical to SEQ ID NO: 793642

SEQ ID NO: 793649 - protein, 187 aa, Homo sapiens; identical to SEQ ID NO: 793642

SEQ ID NO: 793650 - protein, 187 aa, Homo sapiens; identical to SEQ ID NO: 793642

SEQ ID NO: 793651 - protein, 187 aa, Homo sapiens; identical to SEQ ID NO: 793642

SEQ ID NO: 793652 - protein, 206 aa, Homo sapiens
NSVTGPGAMRVLVSPPAAVMVGSLNCIVAVSQNMGIGKNGDLPWPPLRNEFRYFQRMTTTSSVEGKQNLVIMGKKTWFSIPEKNRPLKGRINLVLSRELKEPPQGAHFLSRSLDDALKLTEQPELANKVDMVWIVGGSSVYKEAMNHPGHLKLFVTRIMQDFESDTFFPEIDLEKYKLLPEYPGVLSDVQEEKGIKYKFEVYEKND

SEQ ID NO: 793653 - protein, 187 aa, Homo sapiens; identical to SEQ ID NO: 793642

SEQ ID NO: 793654 - protein, 168 aa, Homo sapiens
FFQLSDWIKIGDLTSKNCHLFVNLQSKGLKGGGRFGQTTPPLVDFLKDILRRYPEGGQILKELIQNAEDAGATEVKFLYDETQYGTETLWSKDMAPYQGPALYVYNNAVFTPEDWHGIQEIARSRKKDDPLKVGRFGIGFNSVYHITDVPCIFSGDQIGMLDPHQTLF

SEQ ID NO: 793655 - protein, 119 aa, Homo sapiens
FFQLSDWIKIGDLTSKNCHLFVNLQSKGLKGGGRFGQTTPPLVDFLKDILRRYPEGGQILKELIQNAEDAGATEVKFLYDETQYGTETLWSKDMAPYQDVPCIFSGDQIGMLDPHQTLF

SEQ ID NO: 793656 - protein, 96 aa, Homo sapiens
KWQVLIRPCSKVTVRFLTVMVKHGHIGEFEITDYHRAGKIVVNLTDRPNNCGVISPKCDVHLKDPEKSQNNLLPSCQFGFIVLTTSAGIMDHEKGS

SEQ ID NO: 793657 - protein, 118 aa, Homo sapiens
PVSQDSTVSQEENSKEDKMVTVCPNTESCESITLKDVAVNFSRGEWKKLEPFQKELYKEVLLENLRNLEFLDFPVSKLELISQLKWVELPWLLEEVSKSSRLDIHGAVKKMQMFSEAE

SEQ ID NO: 793658 - protein, 109 aa, Homo sapiens
AAGETLRREALGALVPGRGGSRAGRRRRGPRPCARGWQLPKLWASRTPSPSWSSRIRGSEAGGPRSSFLLPGAMPRAGGRACPRRSRRGPPLAWALTGVVNGVGICGSR

SEQ ID NO: 793659 - protein, 111 aa, Homo sapiens
SSWTISSFFLLEGAPLMCFMKIAHLYPEAKSLTSTCSLLSHLTYPMGQQVLIVLPPKRLSINSFQGRKRKRERKRERRKDGRKERKKEERKREKERKERKKRKKERKKERE

SEQ ID NO: 793660 - protein, 75 aa, Homo sapiens
QAAGLLSLRAPTPLNPQRKMQVCSLPGLPGLLSLRWGHPSTSSPGATLGPIQALRAQRLPGSSVTNIFPRQAGPK

SEQ ID NO: 793661 - protein, 859 aa, Homo sapiens
MGYIRPSSGTRASFFVAQQTAEVTPGCGSTSRGTKAGLLSCLQGRPFQTKWPAAPRTQLAPGCDSTSRGRCLATGQRGPATPDFLSRSPKDRAATAGQRRLHSSGEMAAGSTTLHAVEKLQVRLATKTEPKKLEKYLQKLSALPMTADILAETGIRKTVKRLRKHQHVGDFARDLAARWKKLVLVDRNTRPGPQDPEESASRQRFGEALQDQEKAWGFPENATAPRSPSHSPEHRRTARRTPPGQQRPHPRSHSREPRAERKCPRIAPADSGRYRASPTRTAPLPMPEGPEPAAPGKQPGRGHTHAAQGGPLLCPGCQGQPQGKAVVSHSKGHKSSRQEKRLLCAQGDWHSPTLIREKSFGACLREETPRMPSWASARDRQPSDFKTDKEGGQAGSGQRVPALEEAPDSHQKRPQHSHSNKKRPSLDGRDPGNGTHGLSPEEKEQLSNDRETQEGKPPTAHLDRTSVSSLSEVEEVDMAEEFEQPTLSCEKYLTYDQLRKQKKKTGKSSTTALGDKQRKANESKGTRESWDSAKKLPPVQESQSERLQAAGTDSAGPKTVPSHVFSELWDLSEAWMQANYDPLSDSDSMTSQAKPEALSSPKFREEAAFPGRRVNAKMPVYSGSRPACQLQVPTLRQQCAQVLRNNPDALSDVGEVPYWVLEPVLEGWRPDQLYRRKKDNHALVRETDELRRNHCFQDFKEEKPQENKTWREQYLRLPDAPEQRLRVMTTNIRSARGNNPNGREAKMICFKSVAKTPYDTSRRQEKSAGDADPENGEIKPASKPAGSSHTPSSQSSSGGGRDSSSSILRWLPEKRANPCLSSSNEHAAPAAKTRKQAAKKVAPLMAKAIRDYKRRFSRR

SEQ ID NO: 793662 - protein, 247 aa, Homo sapiens
DPRKQPRDSNTRTALLRALRRHACVRLTLKHREIRLQGRAAAFTPKDYVSRKTLRRRPYHGAASVCFVLSAPSSGCARRIHRYRGGSAPWAAGGAAAVALGPEEAAALPSQDSALPQERNQKEDLSALEILKVMSLGSELFRDVAIVFSQEEWQWLAPAQRDLYRDVMLETYSNLVSLGLAVSKPDVISFLEQGKEPWMVERVVSGGLCPGAKGQRGRDAGCACCKRTEQNPGQLWKMTESGLFFMH

SEQ ID NO: 793663 - protein, 179 aa, Homo sapiens
DPRKQPRDSNTRTALLRALRRHACVRLTLKHREIRLQGRAAAFTPKDYVSRKTLRRRPYHGAASVCFVRLRHLPAAHGESTGTVVEARPGLPGARPRWHLDPRRRQVRGSGAFQALWGPAGAGARAGWVSGLRRTQTSRLIVALWLYRRETTFPAGPRGVRFLAPPFCFQPHSPGAWTP

SEQ ID NO: 793664 - protein, 305 aa, Homo sapiens
DPRKQPRDSNTRTALLRALRRHACVRLTLKHREIRLQGRAAAFTPKDYVSRKTLRRRPYHGAASVCFVLSAPSSGCARRIHRYRGGSAPWAAGGAAAVALGPEEAAALPSQDSALPQERNQKEDLSALEILKVMSLGSELFRDVAIVFSQEEWQWLAPAQRDLYRDVMLETYSNLVSLGLAVSKPDVISFLEQGKEPWMVERVVSGGLCPVLESRYDTKELFPKQHVYEVESPQWEIMESLTSYGLECSSFQDDWECRNQFDRQQGNPDRHFHQMIIRHEEMPTFDQHASLTFYQKIHTREKPFG

SEQ ID NO: 793665 - protein, 179 aa, Homo sapiens; identical to SEQ ID NO: 793663

SEQ ID NO: 793666 - protein, 219 aa, Homo sapiens
SSLREEQQNSVVLEDLLENMEADTFATLCSQELRLASYLARMAMVPGATLRRLLSVVLPTASQPQLLALLDSATERHVDHAAESDGGAEQADVGRRRKHQSWWQALDGKLRGDLISRGLEKMLWARKRKQSILKKTCLPLRERMIFSGKGSWPHLSLEPIGELAPVPIVGAETIDLLNTGEKLFIFRNPKEPEISLHVPPRKKKNFLNAKKAMRALGMD

SEQ ID NO: 793667 - protein, 97 aa, Homo sapiens
SGPGRWKSYSLLKNPQGIRPDPLQVTESKALSSWESGWKEGHCRAAQVSGEATQEHLNPCPEKKRLQLSCTFLGTGSPSAQGFCSDRQREETRMVAS

SEQ ID NO: 793668 - protein, 111 aa, Homo sapiens
MRRLLLLVMSGRGKGGKGLGKGGAKRHRKVLRDNIQGITKPAIRRLARRGGVKRISGLIYEETRGVLKVFLENVIRDAVTYTEHAKRKTVTAMDVVYALKRQGRTLYGFGG

SEQ ID NO: 793669 - protein, 111 aa, Homo sapiens; identical to SEQ ID NO: 793668

SEQ ID NO: 793670 - protein, 62 aa, Homo sapiens
MLGSAVSSSFPLSGSGGCKPRFKASAGVVSSEASPRGLQMAAFFLHPHVVPPLHSSILNVSL

SEQ ID NO: 793671 - protein, 134 aa, Homo sapiens
VLLKHGAKGSPLPAMGAGAEAALTAAEGCTRKALSLDVHSSRSEPQAALRLRPQSAPVREGKEGQESKERASSASIHARLPGYCLLVSMSPGVAFPAYKSRDSLKRRKGRNVFTRFDCHVIELYHLRNKCHWFS

SEQ ID NO: 793672 - protein, 101 aa, Homo sapiens
GLHLRPSFSQMLPPVIYPKLLPHGLFGPVTTFSFVFLCLYTSYSDHNVLSSLSSTGKIPSHPCRTSSLFHSLLKLPHILRAPHPPSAFGPHLHFRTPSTVF

SEQ ID NO: 793673 - protein, 153 aa, Homo sapiens
LLFWGRHESAELRDEEELEPAEAVHSPASVAQWAEARECLTILQMPTLWPAARPPPPQWPYGHRRPFMGLWPWQDPGPPDVRAAHALGTSCLQDRGAWSVCPSSARTQHCPRGWDHCKLETLLGDMCHFGHHPQSVTTWLGNFWSHSRHHGVT

SEQ ID NO: 793674 - protein, 229 aa, Homo sapiens
AAALPGGQGAMALSWLQRVELALFAAAFLCGAVAAAAMTRTQGSFSGRCPLYGVATLNGSSLALSRPSAPSLCYFVAGASGLLALYCLLLLLFWIYSSCIEDSHRGAIGLRIALAISAIAVFLVLVSACILRFGTRSLCNSIISLNTTISCSEAQKIPWTPPGTALQFYSNLHNAETSSWVNLVLWCVVLVLQVVQWKSEATPYRPLERGDPEWSSETDALVGSRLSHS

SEQ ID NO: 793675 - protein, 86 aa, Homo sapiens
AAALPGGQGAMALSWLQRVELALFAAAFLCGAVAAAAMTRTQRCYRAAHCTGHLSYSRLPGLGVCLYPSIWHQVSLQLHHLLEHYN

SEQ ID NO: 793676 - protein, 165 aa, Homo sapiens
AAALPGGQGAMALSWLQRVELALFAAAFLCGAVAAAAMTRTQGSFSGRCPLYGVATLNGSSLALSRPSAPSLCYFVAGASGLLALYCLLLLLFWIYSSCIEDSHRGAIGLRIALAISAIAVFLVLVSACILRFGTRSLCNSIISLNTTISCSEAQKFHDTQRHLH

SEQ ID NO: 793677 - protein, 195 aa, Homo sapiens
GSGASWWSGRHGAVLAAARRACALCCRLPVRGRGGRGDDSDPAGASGLLALYCLLLLLFWIYSSCIEDSHRGAIGLRIALAISAIAVFLVLVSACILRFGTRSLCNSIISLNTTISCSEAQKIPWTPPGTALQFYSNLHNAETSSWVNLVLWCVVLVLQVVQWKSEATPYRPLERGDPEWSSETDALVGSRLSHS

SEQ ID NO: 793678 - protein, 150 aa, Homo sapiens
AAALPGGQGAMALSWLQRVELALFAAAFLCGAVAAAAMTRTQGSFSGRCPLYGVATLNGSSLALSRPSAPSLCYFVAGASGLLALYCLLLLLFWIYSSCIEDSHRGAIGLRIALAISAIAVFLVLVSACILRFGTRSLCNSIISLNTTIR

SEQ ID NO: 793679 - protein, 150 aa, Homo sapiens; identical to SEQ ID NO: 793678

SEQ ID NO: 793680 - protein, 154 aa, Homo sapiens
AAALPGGQGAMALSWLQRVELALFAAAFLCGAVAAAAMTRTQGSFSGRCPLYGVATLNGSSLALSRPSAPSLCYFVAGASGLLALYCLLLLLFWIYSSCIEDSHRGAIGLRIALAISAIAVFLVLVSACILRFGTRSLCNSIISLNTTIRPLLG

SEQ ID NO: 793681 - protein, 229 aa, Homo sapiens; identical to SEQ ID NO: 793674

SEQ ID NO: 793682 - protein, 215 aa, Homo sapiens
AAALPGGQGAMALSWLQRVELALFAAAFLCGAVAAAAMTRTQGSFSGRCPLYGVATLNGSSLALSRPSAPSLCYFVAGASGLLALYCLLLLLFWIYSSCIEDSHRGAIGLRIALAISAIAVFLVLVSACILRFGTSCSEAQKIPWTPPGTALQFYSNLHNAETSSWVNLVLWCVVLVLQVVQWKSEATPYRPLERGDPEWSSETDALVGSRLSHS

SEQ ID NO: 793683 - protein, 185 aa, Homo sapiens
AAALPGGQGAMALSWLQRVELALFAAAFLCGAVAAAAMTRTQGSFSGRCPLYGVATLNGSSLALSRPSAPSLCYFVAGASGLLALYCLLLLLFWIYSSCIEDSHRGAIGLRIALAISAIAVFLVLVSACILRFGTRSLCNSIISLNTTISCSEAQKIPWTPPGTALQFYSNLHNAEVRPKDRRKN

SEQ ID NO: 793684 - protein, 67 aa, Homo sapiens
GEKEINIYFGDHHITHSNCIQFLLEALEEDPSCLSQLLGAPGIPGLVATSLQSLPLSTRGLLLCVCV

SEQ ID NO: 793685 - protein, 143 aa, Homo sapiens
TFVQHYECDDCGMAFGHVSQLTGHQKIHKVGETHEYGENTRGFRHRSSFTMLQRICTLYKHFECNQCGETFNRPSKVIQHQSMHSGLKPYKCDVCQKAFRFLSSLSIHQRFHVGNRVNLTRHQKTHTQRKPFSCNFCGKTFHR

SEQ ID NO: 793686 - protein, 145 aa, Homo sapiens
SDSTPSSKGASPPKQEIWLSAFTLLSCVTLSKWPTLSGLPESVATQRKVRCLLRDSPAVTGQGFDPSHFCSVVGDLSGGAGRGELSRTKSPQDTGHPGGLCFHSLFTPSCTRLPLPTALLPTLPTPQPPPLSRAESKRLPWGLAR

SEQ ID NO: 793687 - protein, 117 aa, Homo sapiens
AAVIIQDTKHLAQCLHVESGLYLCPDARAALSQCGSSPCTPWGPPTPQQSELVVGQRSGEEVWPCGMAAEPLSVPGPILRVVGSGLYPFLGLEQPRRPSPEAETLCPSGRNLRTLDP

SEQ ID NO: 793688 - protein, 81 aa, Homo sapiens
PPAAVSSRYYYPHFADEKTMSERSGDSRTNPGLCGSKAQALSWAEKTALSQGKAAPPNMETAGMLLRLSSGELQGSCNPVL

SEQ ID NO: 793689 - protein, 77 aa, Homo sapiens
IFMIHVHPVLLAKALYRKAPWPSQKVQGQEPGHLDSRSACGRFGTLLVGGGLKFSVMWQVPSVEDFTILHTSSHLAF

SEQ ID NO: 793690 - protein, 337 aa, Homo sapiens
TIIIVGLTLVEVLGYMSLLRFQTSYKVVITLWIVYLWVSLLKTIFWSRNGHDGSTDVQQRAWRSNRRRQEGLRSICMHTKKRVSSFRGNKIGLKDVITLRRHVETKVRAKIRKRKVTTKINHHDKINGKRKTARKQKMFQRAQELRRRAEDYHKCKIPPSARKALCNWVRMAAAEHRHSSGLPYWPYLTAETLQNRMGHQPPPPTQQHSITDNSLSLKTPPECLVTPLPPSADDNLKTPPECLVTPLPPSADDNLKTPPECLVTPLPPSADDNLKTPPECLFTPLPPSADDNLKTPPECLVTPLPPSADDNFHPQRMIISRHVPSVCSIPFHPQRMI

SEQ ID NO: 793691 - protein, 87 aa, Homo sapiens
KGEKSHTLIFAKSKPWKTALFLTAPELPAGHLLQLPADLNQQPPRPHLKSSSPRFTLGRPPLGLSLRLQLTLVQLVSLPHSTRKCFP

SEQ ID NO: 793692 - protein, 71 aa, Homo sapiens
RETAKVPPPSLALCPGRPAGISSPARSAAPGASQTFQARGHPDVHTRPGPRGETQGPGLRRLSSLGGSERK

SEQ ID NO: 793693 - protein, 108 aa, Homo sapiens
MTRKIFTNTRERWRQQNVNSAFAKLRKLIPTHPPDKKLSKNETLRLAMRYINFLVKVLGEQSLQQTGVAAQGNILGLFPQGPHLPGLEDRTLLENYQVPSPGPSHHIP

SEQ ID NO: 793694 - protein, 197 aa, Homo sapiens
DPDTKLIGNIALLPIRSQFKGPAPRETKDTDIVDEANYYFKANVFFKNYEIKNEADRTLIYLTLYISECLKKLQKCNSKSQGEKEMYTLGIISFPIPGEPGFPLHAIYTKPANKQEDEVMRAYLQQLRQETGLRLCEEVFDPKNDKPSTWWTCFVKRQFMNKSLSGPGQRREPGQPPSPEPWAAFSSKMYTIFCLYS

SEQ ID NO: 793695 - protein, 172 aa, Homo sapiens
RIHTGEKPYACKECGKAFSQSSALIQHQRIHTGEKPYKCNECGKAFSWISRLNIHHRIHTGEKPYNCKECGKAFSSHSGVNTHRKIHTGEKPYKCNDCEKAFNQSSALIQHQRIHTGEKPYNCKVCGKAFRQSSSLMTHMRIHTGEKPYICKECGKAFSQSSSLTKHQRTHN

SEQ ID NO: 793696 - protein, 151 aa, Homo sapiens
GARRGSRRLDAGEKPYKCNECGKAFSWISRLNIHHRIHTGEKPYNCKECGKAFSSHSGVNTHRKIHTGEKPYKCNDCEKAFNQSSALIQHQRIHTGEKPYNCKVCGKAFRQSSSLMTHMRIHTGEKPYICKECGKAFSQSSSLTKHQRTHN

SEQ ID NO: 793697 - protein, 80 aa, Homo sapiens
TAHLTGGQEEVKSSRGESTTDLPESTMDLESPTDVYLENTQAFQNEANSPLAVMITAIHYFLRRFYAFEHAYHYTIGDLL

SEQ ID NO: 793698 - protein, 108 aa, Homo sapiens
LGISPSLYEAGLQSLLGPAPSPQSTPLCAGPLTSQPPPGTAPPRTSSQTASDSVLKTRGLVPSFEKVPLSGGQLPGFSGLLRPQDSGTAQPALVSSTLRGLSVHRCPH

SEQ ID NO: 793699 - protein, 163 aa, Homo sapiens
AAGEVEQYKLVESADTPKASKGSYMEVRTGDPPERRDCELGRPGPDSQSSVAEISTIAKEVDKVNQIINNCIDALKSESTSFQGVKSGPVSVAEPPLVLLSEPLAAKHGFLAPGYKDAFGHSLQRHHSVEAAGPPRASTSSSGSVRSPRAFRAEAVGVHKAAA

SEQ ID NO: 793700 - protein, 74 aa, Homo sapiens
GRVQECPGLSEDHVCNPRIPRAPHGEGDQKDPKQFSKKKEAIKSGSKGPLRTERPHGSTVAGGSFSMIENPASQ

SEQ ID NO: 793701 - protein, 214 aa, Homo sapiens
VLTILSTLRSRVSPQGAMEQGSGRLEDFPVNVFSVTPYTPSTADIQVSDDDKAGATLLFSGIFLGLVGITFTVMGWIKYQGVSHFEWTQLLGPVLLSVGVTFILIAVCKFKMLSCQLCKESEERVPDSEQTPGGPSFVFTGINQPITFHGATVVQYIPPPYGSPEPMGINTSYLQSVEQDRAELPCQHMGNDMIETIFMTKRNSSSSLKKLWCP

SEQ ID NO: 793702 - protein, 260 aa, Homo sapiens
VLTILSTLRSRVSPQGAMEQGSGRLEDFPVNVFSVTPYTPSTADIQVSDDDKAGATLLFSGIFLGLVGITFTVMGWIKYQGVSHFEWTQLLGPVLLSVGVTFILIAVCKFKMLSCQLCKESEERVPDSEQTPGGPSFVFTGINQPITFHGATVVQYIPPPYGSPEPMGINTSYLQSVVSPCGLITSGGAAAAMSSPPQYYTIYPQDNSAFVVDEGCLSFTDGGNHRPNPDVDQLEETQLEEEACACFSPPPYEEIYSLPR

SEQ ID NO: 793703 - protein, 260 aa, Homo sapiens; identical to SEQ ID NO: 793702

SEQ ID NO: 793704 - protein, 260 aa, Homo sapiens; identical to SEQ ID NO: 793702

SEQ ID NO: 793705 - protein, 80 aa, Homo sapiens
IRYKNKCGILDGILQQKKDNWIKTEDIMNKAWMLVNNDNMGQAWWLTPVILALWEAKVCGLLEVQEFKTSLANMVKPRLY

SEQ ID NO: 793706 - protein, 78 aa, Homo sapiens
TPLSLFHDRDSWEGPNLAGVGVFLDTAVFPGARSPRSLWTRGLSRESLINACSQSGARQEMHATVLRERFPKAVSGPP

SEQ ID NO: 793707 - protein, 140 aa, Homo sapiens
ASGYSNNIFTIDQMLKKKQTCTVADATAIKQHVKRATDTYNLGIALEHRKEMLNLWQKIRGDLIGMDSRNESFYDTFSTYTWSWNVCQELLSPKDLRLYDAYVNRNSSHNSRSSSSSDTSECYTDSGRKRKRKGLKGFQQ

SEQ ID NO: 793708 - protein, 85 aa, Homo sapiens
EGWKSAVGLRKRKQELVDSKRKLTSSRKEHGTKESAVARFNRVKTELPYKKRGPKGGHQLDEYVFESCSFIVEMWEDSSKYAPWH

SEQ ID NO: 793709 - protein, 183 aa, Homo sapiens
RGAGYNVGQSVTFECLPGYQLTGHPVLTCQHGTNRNWDHPLPKCEVPCGGNITSSNGTVYSPGFPSPYSSSQDCVWLITVPIGHGVRLNLSLLQTEPSGDFITIWDGPQQTAPRLGVFTRSMAKKTVQSSSNQVLLKFHRDAATGGIFAIAFSGQYGSLAWWEGPGFQVKAELDSRLHHLRIM

SEQ ID NO: 793710 - protein, 162 aa, Homo sapiens
RGAGYNVGQSVTFECLPGYQLTGHPVLTCQHGTNRNWDHPLPKCEVPCGGNITSSNGTVYSPGFPSPYSSSQDCVWLITVPIGHGVRLNLSLLQTEPSGDFITIWDGPQQTAPRLGVFTRSMAKKTVQSSSNQVLLKFHRDAATGGIFAIAFSGHLAAVCTL

SEQ ID NO: 793711 - protein, 121 aa, Homo sapiens
MSVRFNGSLRELAPRPKFGRAPTDQAALPAPTQVPGALCPQVPTPSAVPDVQAEVSPGHVIRGEPPGKTEHEVPSGPASYTPQAKQSPAHQCFWMQPHFTLAGEAAPGWQLAASSSSTLLN

SEQ ID NO: 793712 - protein, 100 aa, Homo sapiens
VTPPVAGGFPWRPQAVQALGRGDGSLWSTKARESSAPGCPRPVQVGKGLTSILGRQSQAEERDLQKRKKRWDSMKACFRWAGWWDDGGDNDSINHGSLHM

SEQ ID NO: 793713 - protein, 99 aa, Homo sapiens
CRDRVLQCTQAGRELLSSSNLPAWASQSARNTGVSHHTQPTIVTGSGAGIAMVSGNLIIHYAISPSLKEQLFYAILDFALSEAMGLFCLTVTFLILFAM

SEQ ID NO: 793714 - protein, 110 aa, Homo sapiens
FPVMPARGEGLSSPCCKVLCSLGLPGCTIMVISKYHISHILRKAHIVTRLFLTQRIIHCKKNKNQIKELRGGQMLSAQVLALFVPPVSDRQNTWSKKTLETVIYEDQGLL

SEQ ID NO: 793715 - protein, 345 aa, Homo sapiens
MLMFDPVPVKQEAMDPVSVSYPSNYMESMKPNKYGVIYSTPLPEKFFQTPEGLSHGIQMEPVDLTVNKRSSPPSAGNSPSSLKFPSSHRRASPGLSMPSSSPPIKKYSPPSPGVQPFGVPLSMPPVMAAALSRHGIRSPGILPVIQPVVVQPVPFMYTSHLQQPLMVSLSEEMENSSSSMQVPVIESYEKPISQKKIKIEPGIEPQRTDYYPEEMSPPLMNSVSPPQALLQENHPSVIVQPGKRPLPVESPDTQRKRRIHRCDYDGCNKVYTKSSHLKAHRRTHTGEKPYKCTWEGCTWKFARSDELTRHFRKHTGIKPFQCPDCDRSFSRSDHLALHRKRHMLV

SEQ ID NO: 793716 - protein, 345 aa, Homo sapiens; identical to SEQ ID NO: 793715

SEQ ID NO: 793717 - protein, 345 aa, Homo sapiens; identical to SEQ ID NO: 793715

SEQ ID NO: 793718 - protein, 345 aa, Homo sapiens; identical to SEQ ID NO: 793715

SEQ ID NO: 793719 - protein, 232 aa, Homo sapiens
MLMFDPVPVKQEAMDPVSVSYPSNYMESMKPNKYGVIYSTPLPEKFFQTPEGLSHGIQMEPVDLTVNKRSSPPSAGNSPSSLKFPSSHRRASPGLSMPSSSPPIKKYSPPSPGVQPFGVPLSMPPVMAAALSRHGIRSPGILPVIQPVVVQPVPFMYTSHLQQPLMVSLSEEMENSSSSMQVPVIESYEKPISQKKIKIEPGIEPQRTDYYPEEMSPPLMNSVSPPQALLQE

SEQ ID NO: 793720 - protein, 345 aa, Homo sapiens; identical to SEQ ID NO: 793715

SEQ ID NO: 793721 - protein, 345 aa, Homo sapiens; identical to SEQ ID NO: 793715

SEQ ID NO: 793722 - protein, 345 aa, Homo sapiens; identical to SEQ ID NO: 793715

SEQ ID NO: 793723 - protein, 345 aa, Homo sapiens; identical to SEQ ID NO: 793715

SEQ ID NO: 793724 - protein, 101 aa, Homo sapiens
RLAERAAPASCDCPELVPGARGEPGAEPRGAGARAGAQRERPPHARPSPSPAAANAARTGALTLLRSGGSRQPVSGPLFLVGGALHRASQSQTPEHPRRFN

SEQ ID NO: 793725 - protein, 119 aa, Homo sapiens
SQPLCLTIPLSVPSPTQPPTLLLSLIFSFPYEAILMKSGTGRSLGTDKCQLSLAVSLPHGCSREGGQRAEVTVAKPETEAQLWLGKKQGNKITWGQRAWGHQSGQRLPRSCKSEPLPAL

SEQ ID NO: 793726 - protein, 154 aa, Homo sapiens
SCPRVMGSARFIPTKPRTVAIKPSAFSRRNPGREKDGSASLEGARRQRRVGSRQRTPGPDGQDASPRAREEDGGRERRGGLSHSKDCNAARNARGKHLRRTRRRRTLGSHWKIQPGVQRLPRPTPSVQPRHAPVAPPCSHTPPRRAPRPARAPP

SEQ ID NO: 793727 - protein, 194 aa, Homo sapiens
ASLKDEVLKIMPVQKQTRAGQRTRFKAFVAIGDYNGHVGLGVKCSKEVATAICGAIILAKLSIVPVHRGYWGNKIGKPHTVPCKVTGRCGSVLVHLIPAPRGTGIVSAPVPKKLLMMAGIDDCYTPAQGCTATLGNFAKATFDAISKTYSYLTPDLWKETVFTKSPYQDFTDHLVKTHTRVSMQRTQAPAVATT

SEQ ID NO: 793728 - protein, 194 aa, Homo sapiens; identical to SEQ ID NO: 793727

SEQ ID NO: 793729 - protein, 71 aa, Homo sapiens
EAAIKVSSRDGVSSEGSTETARPTLPLRRRMKEAEEKEDFYDDPLPPNQYCSKAFIIHSYYFTFIFLKKGL

SEQ ID NO: 793730 - protein, 92 aa, Homo sapiens
QVPLSTQSSGAGPHGENRLVSGRNSQKLELQTEVRDSGQRKAHWTELTSVLSGVSPRSFFLEAHHPYSLWGENSFAKPAQMSQQARPPERWM

SEQ ID NO: 793731 - protein, 420 aa, Homo sapiens
MSPKDKLCVIHHPARAPKQYLCRPPKGPPNGKVLVASPKQAPRLGLGPSGSSCSQGTRLPPTGFQMAPCGCFFDPRIYRIEWTTPDLGQSALYKLAASSGGPAGVPSAPGSYLLEPQPYLKAPGLPPYPHYQQAPGGPQFLLPYFPPEGPGPEALGFVGDAGPAAFVELPLPPLEEGPAPLPPPPPKENKPPPVLITLPAEPTLPPDAYSHLQGHLGHFPGPEPLAFPVKELQGSGARPGVPLYPPGLSELKVAEVKEGALLGAGKAKAPKTARALALPDKVLLEDAMKLFDCLPGASEPEGTLCEVPGPALPDSSGGNSADDIRSLCLPEELLSFDYSVPEILDTVSNVDYFFNFKALDEEQPPHPGPPATNDPGPHSVWQEKGLDGQEGKAGKEGQAAGRPSQRHSPGAQGGPGSHPD

SEQ ID NO: 793732 - protein, 420 aa, Homo sapiens
MSPKDKLCVIHHPARAPKQYLCRPPKGPPNGKVLVASPKQAPRLGLGPSGSSCSQGTRLPPTGFQMAPCGCFFDPRIYRIEWTTPDLGQSALYKLAASSGGPAGVPSAPGSYLLEPQPYLKAPGLPPYPHYQQAPGGPQFLLPYFPPEGPGPEALGFVGDAGPAAFVELPLPPLEEGPAPLPPPPPKENKPPPVLITLPAEPTLPPDAYSHLQGHLGHFPGPEPLAFPVKELQGSGARPGVPLYPPGLSELKVAEVKEGALLGAGKAKAPKTARALALPDKVLLEDAMKLFDCLPGASEPEGTLCEVPGPALPDSSGGNSADDIRSLCLPEELLSFDYSVPEILDTVSNVDYFFNFKALDEEQPPHPGPPATNTPAPILSGKRKASTAKKGKPGRKARQPAGPASATPPGPREDLGATPH

SEQ ID NO: 793733 - protein, 121 aa, Homo sapiens
EQVQELGQVSHEETWSIWRRFLKTFRREGEFSAEKLNLPYSSGPIWDLSLLTAPEGTAVIFCTACTPRNTLLNQRMSARLSSADRAGSTRAVGFHPSPPPPHAHSHGPSRLRGTLIKCGKQ

SEQ ID NO: 793734 - protein, 112 aa, Homo sapiens
KKEKRNSKYFFLTFLEAEKSRIQVRHGWVLGRSCFWAADRRLLTVSVVERVGEGESFLWGLFDEGTKPIHEGSTHLPSLWALGFQHMNFGGGHVQTIALPFPNYDNKISSNI

SEQ ID NO: 793735 - protein, 106 aa, Homo sapiens
SKKKKKKEKPPFPFPARCHLSIDSRSQKQPSQGEATRDLRVANVRKPSRDRVAKWLARPRTRTVPAQVPTLNTELRTLLVTGLAEWLLDPFSCCRSRKSQLSDTPW

SEQ ID NO: 793736 - protein, 68 aa, Homo sapiens
GRAVPGLHPGCVSPPRGAPESVKKTPEGKEQEGQPLKGKMRQSGKKLPTENSACPADPGPGFGKSWSP

SEQ ID NO: 793737 - protein, 71 aa, Homo sapiens
PACSLGVPSAVHAEMSFNLTAPCKPSRSPAVRRQATVPPTCVSCDNKAEEEREGLSLSRGGGGLRHNSAQS

SEQ ID NO: 793738 - protein, 114 aa, Homo sapiens
GVVHKPQCLHFWFLAFLKSPEPLLSGFIFPSASPGLPCTLNFTIILSFQLWAFATMVPSTWNALALLVLKSNTSSKGSGPPPPLLPLGQLCLPSMVFRDYLCHFLHFSTHVAWH

SEQ ID NO: 793739 - protein, 188 aa, Homo sapiens
FVDPTIKVDSGYRVHEDLRNLGLYVKTREGIPVMRPLWVQYPQDVTTFNIDDQYLLGDALLVHPVSDSGAHGVQVYLPGQGEVWYDIQSYQKHHGPQTLYLPVTLSSIPVFQRGGTIVPRWMRVRRSSECMKDDPITLFVALSPQGTAQGELFLDDGHTFNYQTRQEFLLRRFSFLWPYYQGIHHRNS

SEQ ID NO: 793740 - protein, 206 aa, Homo sapiens
CCVTASSGNATCNWRESMAVTSQHNDIIEMLVQDIFVPSGNLYIMPWKGFCHEPLWVQYPQDVTTFNIDDQYLLGDALLVHPVSDSGAHGVQVYLPGQGEVWYDIQSYQKHHGPQTLYLPVTLSSIPVFQRGGTIVPRWMRVRRSSECMKDDPITLFVALSPQGTAQGELFLDDGHTFNYQTRQEFLLRRFSFLWPYYQGIHHRNS

SEQ ID NO: 793741 - protein, 103 aa, Homo sapiens
PYPVPPCYVEVTQQTDTQSPSGDHLPCLPTSRATVGSTAIPSVTGPWEPQGCPARLVCSGYILAKLPLPADLHVYCCHLQLSAPRPPWAVRKGPGGEVGRKDS

SEQ ID NO: 793742 - protein, 91 aa, Homo sapiens
MLCQRGKSAGTIQGLSHMTQPGKPIPTAQEGVMVAHQVLSEGVQGPKALIKDTPRPKDNPCEAVEPQDHDQQGQGSGWTEVGGSCTAGFQL

SEQ ID NO: 793743 - protein, 112 aa, Homo sapiens
FFLGVDAGWAEGRGLGQDRALKNDSDPGLSSGRDGGGGRGGTAAPEAGARRWLCACAAAHGQDARGVVAAGLQEALQPTLEARGPLVPNSARESKNYDGNMNILKAPCMIHM

SEQ ID NO: 793744 - protein, 126 aa, Homo sapiens
MKGQLPPQAMVAETKAMGRCRRLRNQQEVPAGNTERIWRKLLFCPYSFGDPDGISGTPCLLYNWDPWKSDRIWQQMSKKGHFLADLRYIGDIKKRIIHQSLQILQAKLKQARQVLFVFLRDLESLT

SEQ ID NO: 793745 - protein, 615 aa, Homo sapiens
MAVYVGMLRLGRLCAGSSGVLGARAALSRSWQEARLQGVRFLSSREVDRMVSTPIGGLSYVQGCTKKHLNSKTVGQCLETTAQRVPEREALVVLHEDVRLTFAQLKEEVDKAASGLLSIGLCKGDRLGMWGPNSYAWVLMQLATAQAGIILVSVNPAYQAMELEYVLKKVGCKALVFPKQFKTQQYYNVLKQICPEVENAQPGALKSQRLPDLTTVISVDAPLPGTLLLDEVVAAGSTRQHLDQLQYNQQFLSCHDPINIQFTSGTTGSPKGATLSHYNIVNNSNILGERLKLHEKTPEQLRMILPNPLYHCLGSVAGTMMCLMYGATLILASPIFNGKKALEAISRERGTFLYGTPTMFVDILNQPDFSSYDISTMCGGVIAGSPAPPELIRAIINKINMKDLVVAYGTTENSPVTFAHFPEDTVEQKAESVGRIMPHTEARIMNMEAGTLAKLNTPGELCIRGYCVMLGYWGEPQKTEEAVDQDKWYWTGDVATMNEQGFCKIVGRSKDMIIRGGENIYPAELEDFFHTHPKVQEVQVVGVKDDRMGEEICACIRLKDGEETTVEEIKAFCKGKISHFKIPKYIVFVTNYPLTISGKIQKFKLREQMERHLNL

SEQ ID NO: 793746 - protein, 517 aa, Homo sapiens
TRAGTQGKASHGCLRRDAAPGEAVRRELGGAGGPGRPLSELAGSQVAGCPLPQVSVNPAYQAMELEYVLKKVGCKALVFPKQFKTQQYYNVLKQICPEVENAQPGALKSQRLPDLTTVISVDAPLPGTLLLDEVVAAGSTRQHLDQLQYNQQFLSCHDPINIQFTSGTTGSPKGATLSHYNIVNNSNILGERLKLHEKTPEQLRMILPNPLYHCLGSVAGTMMCLMYGATLILASPIFNGKKALEAISRERGTFLYGTPTMFVDILNQPDFSSYDISTMCGGVIAGSPAPPELIRAIINKINMKDLVVAYGTTENSPVTFAHFPEDTVEQKAESVGRIMPHTEARIMNMEAGTLAKLNTPGELCIRGYCVMLGYWGEPQKTEEAVDQDKWYWTGDVATMNEQGFCKIVGRSKDMIIRGGENIYPAELEDFFHTHPKVQEVQVVGVKDDRMGEEICACIRLKDGEETTVEEIKAFCKGKISHFKIPKYIVFVTNYPLTISGKIQKFKLREQMERHLNL

SEQ ID NO: 793747 - protein, 252 aa, Homo sapiens
EPTLNQTPAVPEPEQLIWGKLGAGRRMDEIWYPLIKGDLGYGVAYGTTENSPVTFAHFPEDTVEQKAESVGRIMPHTEARIMNMEAGTLAKLNTPGELCIRGYCVMLGYWGEPQKTEEAVDQDKWYWTGDVATMNEQGFCKIVGRSKDMIIRGGENIYPAELEDFFHTHPKVQEVQVVGVKDDRMGEEICACIRLKDGEETTVEEIKAFCKGKISHFKIPKYIVFVTNYPLTISGKIQKFKLREQMERHLNL

SEQ ID NO: 793748 - protein, 179 aa, Homo sapiens
MPHTEARIMNMEAGTLAKLNTPGELCIRGYCVMLGYWGEPQKTEEAVDQDKWYWTGDVATMNEQGFCKIVGRSKDMIIRGGENIYPAELEDFFHTHPKVQEVQVVGVKDDRMGEEICACIRLKDGEETTVEEIKAFCKGKISHFKIPKYIVFVTNYPLTISGKIQKFKLREQMERHLNL

SEQ ID NO: 793749 - protein, 89 aa, Homo sapiens
LTHSSANQPRVGIALPLTKLTPGQASPWSPTHTPVSLRSLTPYLPPSGLQISHFKIPKYIVFVTNYPLTISGKIQKFKLREQMERHLNL

SEQ ID NO: 793750 - protein, 295 aa, Homo sapiens
MAVYVGMLRLGRLCAGSSGVLGARAALSRSWQEARLQGVRFLSSREVDRMVSTPIGGLSYVQGCTKKHLNSKTVGQCLETTAQRVPEREALVVLHEDVRLTFAQLKEEVDKAASGLLSIGLCKGDRLGMWGPNSYAWVLMQLATAQAGIILVSVNPAYQAMELEYVLKKVGCKALVFPKQFKTQQYYNVLKQICPEVENAQPGALKSQRLPDLTTVISVDAPLPGTLLLDEVVAAGSTRQHLDQLQYNQQFLSCHDPINIQFTSVGQRSPGPKPRWTHAPCPCDTSAGMGRQQRR

SEQ ID NO: 793751 - protein, 155 aa, Homo sapiens
QVLGSLEGACAQLTDLVVVELQDEEVDQRGEQPPGQLSDLVVVQVEVGQLGQVVEGTCAQHADVVMGQVQVDKLLEAAEGTGGHLADLAVLQVNDTRFGMARNELAASTGKLLRCRLSSLVFSDTLGIFCSPTLSQMTCCRSLWQWQFWGQAASA

SEQ ID NO: 793752 - protein, 86 aa, Homo sapiens
SMGRWTAKHRCPARTSWQVAYGTTENSPVTFAHFPEDTVEQKTEEAVDQDKWYWTGTVLAARGPEESKMRRILLFGGRQMMPNIDK

SEQ ID NO: 793753 - protein, 179 aa, Homo sapiens; identical to SEQ ID NO: 793748

SEQ ID NO: 793754 - protein, 119 aa, Homo sapiens [sequence omitted]

SEQ ID NO: 793755 - protein, 90 aa, Homo sapiens
LAGCAMPLVPGRLIWDSQTHSSSPYSSREVDRMVSTPIGGLSYVQGCTKKHLNSKTVGQCLETTAQRVPEREALVVLHEDVRLTFAQLKE

SEQ ID NO: 793756 - protein, 673 aa, Homo sapiens
MASQFCLPESPCLSPLKPLKPHFGDIQEGIYVAIQRSDKRIHLAVVTEINRENYWVTVEWVEKAVKKGKKIDLETILLLNPALDSAEHPMPPPPLSPLALAPSSAIRDQRTVTKWVAMIPQKNQTASGDSLDVRVPSKPCLMKQKKSPCLWEIQKLQEQREKRRRLQQEIRARRALDVNTRNPNYEIMHMIEEYRRHLDSSKISVLEPPQEHRICVCVRKRPLNQRETTLKDLDIITVPSDNVVMVHESKQKVDLTRYLQNQTFCFDHAFDDKASNELVYQFTAQPLVESIFRKGMATCFAYGQTRSGKTYTVGGDFSGTAQDCSKGIYALVAQDVFLLLRNSTYEKLDLKVYGTFFEIYGGKVYDLLNWKKKLQVLEDGNQQIQVVGLQEKEVCCVEEVLNLVEIGNSCRTSRQTSVNAHSSRSHAVFQIILKSGGIMHGKFSLVDLAGNERGADTTKASRKRQLEGAEINKSLLALKECILALGQNKPHTPFRASKLTLVLRDSFIGQNSSTCMIATISPGMTSCENTLNTLRYANRVKKLNVDVRPYHRGHYPIGHEAPRMLKSHIGNSEMSLQRDEFIKIPYVQSEEQKEIEEVETLPTLLGKDTTISGKGSSQWLENIQERAGGVHHDIDFCIARSLSILEQKIDALTEIQKKLKLLLADLHVKSKVE

SEQ ID NO: 793757 - protein, 105 aa, Homo sapiens
HHCFHSHHPHHLPRPFHLHLARSHQPKDRCGLIEDHGGPRSSPYTNPLFLIWEHLRTCPMHGTVLSAKGTDQPFLEEMEKKHFLPAPTPASKFQTCKACFIPWAA

SEQ ID NO: 793758 - protein, 403 aa, Homo sapiens
MASKKFAVKCGNFAVLVDLHILPQGSNKDTSWFSEQKKEEVCLLLKETIDSRVQEYLEVRKQHRPSNAEFTRSNPLSLKGYGFQITAYFLKRGIRLRCIRSTQNAELCVFPDRFVVCVSQLAFSRDLLASQNEDLTERVLHGVSDYFAECAESSLPPSAKLRRNALKEIVKRTETKSSVTSKSQTRRDTVETSSDSVIAEIARRRNDGQASSSPPSESMGQAKDSIKAAESHWGLPVQKLEKVNQTQPEDTSGQQKPHPGERLKTGLLSRSPVCSCESASPCPKQSPRVAKTQQKRRNCSSAEDFDHHGRVSLGSDRLVPREIIVEKSKAVRVLPASELSDPGLLLKQDLAKTTSKEELHVLESLSSRHLMKNNPGQAQQTGLATNTERLSTIQNSPTKKRKK

SEQ ID NO: 793759 - protein, 150 aa, Homo sapiens [sequence omitted]

SEQ ID NO: 793760 - protein, 218 aa, Homo sapiens
MASKKFAVKCGNFAVLVDLHILPQGSNKDTSWFSEQKKEEVCLLLKETIDSRVQEYLEVRKQHRPSNAEFTRSNPLSLKGYGFQITAYFLKRGIRLRCIRSTQNAELCVFPDRFVVCVSQLAFSRDLLASQNEDLDNQSTIACFLLPEGRGNPPFTIKVLALSHIQRRLIYALPIPGVSQTEASGSYPRNSGVLQNPSLQTTRTRFCFRIVFDSTAAK

SEQ ID NO: 793761 - protein, 194 aa, Homo sapiens
MASKKFAVKCGNFAVLVDLHILPQGSNKDTSWFSEQKKEEVCLLLKETIDSRVQEYLEVRKQHRPSNAEFTRSNPLSLKGYGFQITAYFLKRGIRLRCIRSTQNAELCVFPDRFVVCVSQLAFSRDLLASQNEDLDNQSTIACFLLPEGRGDLCPPNTRGVPDRSIWQLPKEFWGPAESKFTNHQNKVLLQDSV

SEQ ID NO: 793762 - protein, 189 aa, Homo sapiens
VGQAGLELPTSGDPPASASQIAGITGVRQLARQPSAASHMSLAPWPSLTRHLGGPSCQYASPTAEPKAVSSPAPCLGSPGAPFPRLKPGQPQATSLPDHSTTWPHATLLSTADTAWPQRLKPLPWVLLSAEPRAQSQGLGESPVHGQWDSPDENPSHVRLASPGSLRPVSPGLAGGKAPGPLKPLIMFP

SEQ ID NO: 793763 - protein, 107 aa, Homo sapiens
VGQAGLELPTSGDPPASASQIAGITGVRQLARQPSAASHMSLAPWPSLTRHLGGPSCQYASPTAEPKAVSSPAPCLGSPGAPFPRLKPGQPQATSLPPRPNPGHGLG

SEQ ID NO: 793764 - protein, 150 aa, Homo sapiens
CVQMRKAGRVTWFGKKKVTFKVIGHVMIRDACEPHEAIKCAVRYMNLKTDSPDYKWCISFTYAVTNYHKIRVFKTTTNWPGAVVHACNPSTLEGRGGRNHKGEEIETILGNRVTLRLKKKEKYCEAKQIIHGLSIYIYFTKNSKCSIWQY

SEQ ID NO: 793765 - protein, 116 aa, Homo sapiens
LVRELEKKFGEKHVVFIAQRRILPKPTRKSCTKNKQKHPRSRTLKAMHDSIPEDLVFPSEIVGKRIHVKLDGSRLIKAHLDKAQQNNVERNVETFSGVYMKLTGKDINVEFPEFQL

SEQ ID NO: 793766 - protein, 130 aa, Homo sapiens [sequence omitted]

SEQ ID NO: 793767 - protein, 178 aa, Homo sapiens
GISRYEGILANGVLSRDGSLSDKRFLFTSNGCSRSLSFEPDGQIRASSSWQSVNESGDQVHWSPGQARLQDQGPSWASGDSSNNHKPREWLEIDLGEKKKITGIRTTGSTQSNFNFYVKSFVMNFKNNNSKWKTYKGIVNNEEKVFQGNSNFRDPVQNNFIPPIVARYVRVVPQTWHQ

SEQ ID NO: 793768 - protein, 122 aa, Homo sapiens
GISRYEGILANGVLSRDGSLSDKRFLFTSNGCSRSLSFEPDGQIRASSSWQSVNESGDQVHWSPGQARLQDQGPSWASGDSSNNHKPREWLEIDLGEKKKITGAENNTSAKCRSSFMTVNDS

SEQ ID NO: 793769 - protein, 629 aa, Homo sapiens
KALCKCSLPSRLLPLGENLPLLDRGFRKEPRSRGSRERDNMLHLHHSCLCFRSWLPAMLAVLLSLAPSASSDISASRPNILLLMADDLGIGDIGCYGNNTMRTPNIDRLAEDGVKLTQHISAASLCTPSRAAFLTGRYPVRSGMVSSIGYRVLQWTGASGGLPTNETTFAKILKEKGYATGLIGKWHLGLNCESASDHCHHPLHHGFDHFYGMPFSLMGDCARWELSEKRVNLEQKLNFLFQVLALVALTLVAGKLTHLIPVSWMPVIWSALSAVLLLASSYFVGALIVHADCFLMRNHTITEQPMCFQRTTPLILQEVASFLKRNKHGPFLLFVSFLHVHIPLITMENFLGKSLHGLYGDNVEEMDWMVGRILDTLDVEGLSNSTLIYFTSDHGGSLENQLGNTQYGGWNGIYKGGKGMGGWEGGIRVPGIFRWPGVLPAGRVIGEPTSLMDVFPTVVRLAGSEVPQDRVIDGQDLLPLLLGTAQHSDHEFLMHYCERFLHAARWHQRDRGTMWKVHFVTPVFQPEGAGACYGRKVCPCFGEKVVHHDPPLLFDLSRDPSETHILTPASEPVFYQVMERVQQAVWEHQRTLSPVPLQLDRLGNIWRPWLQPCCGPFPLCWCLREDDPQ

SEQ ID NO: 793770 - protein, 416 aa, Homo sapiens
KALCKCSLPSRLLPLGENLPLLDRGFRKEPRSRGSRERDNMLHLHHSWTPNIDRLAEDGVKLTQHISAASLCTPSRAAFLTGRYPVRSGMVSSIGYRVLQWTGASGGLPTNETTFAKILKEKGYATGLIGKWHLGLNCESASDHCHHPLHHGFDHFYGMPFSLMGDCARWELSEKRVNLEQKLNFLFQVLALVALTLVAGKLTHLIPVSWMPVIWSALSAVLLLASSYFVGALIVHADCFLMRNHTITEQPMCFQRTTPLILQEVASFLKRNKHGPFLLFVSFLHVHIPLITMENFLGKSLHGLYGDNVEEMDWMVGRILDTLDVEGLSNSTLIYFTSDHGGSLENQLGNTQYGGWNGIYKGGKGMGGWEGGIRVPGIFRWPGVLPAGRVIGEPTSLMDVFPTVVRLAGARCPRTE

SEQ ID NO: 793771 - protein, 455 aa, Homo sapiens
MRPVINRCAPGSLDLMLPQAASEGIVFHSLQISLCFRSWLPAMLAVLLSLAPSASSDISASRPNILLLMADDLGIGDIGCYGNNTMRTPNIDRLAEDGVKLTQHISAASLCTPSRAAFLTGRYPVRSGMVSSIGYRVLQWTGASGGLPTNETTFAKILKEKGYATGLIGKWHLGLNCESASDHCHHPLHHGFDHFYGMPFSLMGDCARWELSEKRVNLEQKLNFLFQVLALVALTLVAGKLTHLIPVSWMPVIWSALSAVLLLASSYFVGALIVHADCFLMRNHTITEQPMCFQRTTPLILQEVASFLKRNKHGPFLLFVSFLHVHIPLITMENFLGKSLHGLYGDNVEEMDWMVGRILDTLDVEGLSNSTLIYFTSDHGGSLENQLGNTQYGGWNGIYKGGKGMGGWEGGIRVPGIFRWPGVLPAGRVIGEPTSLMDVFPTVVRLAGARCPRTE

SEQ ID NO: 793772 - protein, 575 aa, Homo sapiens
KALCKCSLPSRLLPLGENLPLLDRGFRKEPRSRGSRERDNMLHLHHSWTPNIDRLAEDGVKLTQHISAASLCTPSRAAFLTGRYPVRSGMVSSIGYRVLQWTGASGGLPTNETTFAKILKEKGYATGLIGKWHLGLNCESASDHCHHPLHHGFDHFYGMPFSLMGDCARWELSEKRVNLEQKLNFLFQVLALVALTLVAGKLTHLIPVSWMPVIWSALSAVLLLASSYFVGALIVHADCFLMRNHTITEQPMCFQRTTPLILQEVASFLKRNKHGPFLLFVSFLHVHIPLITMENFLGKSLHGLYGDNVEEMDWMVGRILDTLDVEGLSNSTLIYFTSDHGGSLENQLGNTQYGGWNGIYKGGKGMGGWEGGIRVPGIFRWPGVLPAGRVIGEPTSLMDVFPTVVRLAGSEVPQDRVIDGQDLLPLLLGTAQHSDHEFLMHYCERFLHAARWHQRDRGTMWKVHFVTPVFQPEGAGACYGRKVCPCFGEKVVHHDPPLLFDLSRDPSETHILTPASEPVFYQVMERVQQAVWEHQRTLSPVPLQLDRLGNIWRPWLQPCCGPFPLCWCLREDDPQ

SEQ ID NO: 793773 - protein, 340 aa, Homo sapiens
KALCKCSLPSRLLPLGENLPLLDRGFRKEPRSRGSRERDNMLHLHHSWTPNIDRLAEDGVKLTQHISAASLCTPSRAAFLTGRYPVRSGMVSSIGYRVLQWTGASGGLPTNETTFAKILKEKGYATGLIGKWHLGLNCESASDHCHHPLHHGFDHFYGMPFSLMGDCARWELSEKRVNLEQKLNFLFQVLALVALTLVAGKLTHLIPVSWMPVIWSALSAVLLLASSYFVGALIVHADCFLMRNHTITEQPMCFQRTTPLILQEVASFLKRNKHGPFLLFVSFLHVHIPLITMENFLGKSLHGLYGDNVEEMDWMVGRILDTLDVEGLALLCSHNKSWVM

SEQ ID NO: 793774 - protein, 131 aa, Homo sapiens
VSISSSYLTQPLPHLLKRNLKCRDGQCLAGGTMGWGSVVGQKPGRWSLQLGTIPLCADDLGTEAGLNCRRGGVRLRGGVGLGLLNTRAKGWNTRNWEWRWGIPERMTSESQPQPALLSMLPVRAGDLPECL

SEQ ID NO: 793775 - protein, 125 aa, Homo sapiens
  misc_feature (87)..(87): Xaa can be any naturally occurring amino acid
  misc_feature (96)..(96): Xaa can be any naturally occurring amino acid
MGGLRSVKHIYLALRKMQLNVGFLSSVPLSIAAPKGKLFPLYSPTTLNSSNNRCGLFSPPSQPRPLTNEWSALNFSLSLLFMSRYSXHSSYTFSHXGHYNLCAVREVINIVLSYPSCQRPSLVPS

SEQ ID NO: 793776 - protein, 127 aa, Homo sapiens
LGASVLLRALATNPNLTALDISGNAMGDAGAKLLAKALRVNSRLRSVVWDRNHTSALGLLDVAQALEQNHSLKAMPLPLNDVAQAQRSRPELTARAVHQIQACLLRNNRADPASSDHTTRLQPLGLV

SEQ ID NO: 793777 - protein, 60 aa, Homo sapiens
KRGFAFVTFDEHDTVDKIVVQKYHTINGHNCEVKKALSKQEMQSAGSQRGRGGGSGNFMG

SEQ ID NO: 793778 - protein, 111 aa, Homo sapiens
KLREDAKIPACEESLSQTPPRVTGTSPAQDQDHPSEEQGGQGSCREPGVNPCLSRLGRLQQKMLLACRAPSLRTRVQKEGLSPRRAQKTRSLKLYLETLKVPSLAELHSRL

SEQ ID NO: 793779 - protein, 281 aa, Homo sapiens
ENAGPASGRRSARLPCSAGKMGKVRGLRARVHQAAVRPKGEAAPGPAPPAPEATPPPASAAGKDWAFINTNIFARTKIDPSALVQKLELDVRSVTSVRRGEAGSSARSVPSIRRGAEAKTVLPKKEKMKLRREQWLQKIEAIKLAEQKHREERRRRATVVVGDLHPLRDALPELLGLEAGSRRQARSEEGKDPVSGAAGQSGLQKPDPCVAIGQTLAGRCSWKWRQALSRAAGHATTPQDTCGPSRERRPLKDHGLSLVDALPSGRLWGSINGSVNFPCKK

SEQ ID NO: 793780 - protein, 224 aa, Homo sapiens
ENAGPASGRRSARLPCSAGKMGKVRGLRARVHQAAVRPKGEAAPGPAPPAPEATPPPASAAGKDWAFINTNIFARTKIDPSALVQKLELDVRSVTSVRRGAEAKTVLPKKEKMKLRREQWLQKIEAIKLAEQKHREERRRRATVVVGDLHPLRDALPELLGLEAGSRRQARRKQGLCAVVQTWGPSFHGPAAQARGWQVTRCRPRQLQAGIPRRRHQSTGSRIG

SEQ ID NO: 793781 - protein, 188 aa, Homo sapiens
ENAGPASGRRSARLPCSAGKMGKVRGLRARVHQAAVRPKGEAAPGPAPPAPEATPPPASAAGKDWAFINTNIFARTKIDPSALVQKLELDVRSVTSVRRGAEAKTVLPKKEKMKLRREQWLQKIEAIKLAEQKHREERRRRATTPQDTCGPSRERRPLKDHGLSLVDALPSGRLWGSINGSVNFPCKK

SEQ ID NO: 793782 - protein, 305 aa, Homo sapiens
ENAGPASGRRSARLPCSAGKMGKVRGLRARVHQAAVRPKGEAAPGPAPPAPEATPPPASAAGKDWAFINTNIFARTKIDPSALVQKLELDVRSVTSVRRGEAGSSARSVPSIRRGAEAKTVLPKKEKMKLRREQWLQKIEAIKLAEQKHREERRRRATVVVGDLHPLRDALPELLGLEAGSRRQARSRESNKPRPSELSRDERRPKRQQLLEEGKDPVSGAAGQSGLQKPDPCVAIGQTLAGRCSWKWRQALSRAAGHATTPQDTCGPSRERRPLKDHGLSLVDALPSGRLWGSINGSVNFPCKK

SEQ ID NO: 793783 - protein, 132 aa, Homo sapiens
PLPPCVARQPWPGNQVLRYLLSLRCLSAVHRAPDGVAHVRNERSHNRQDLRECVGAGGHVCQHKLLETVPYRRQTAKHGGLRIMCYLPIHGAPASVPESTTPAPLSDIVHVIVLFSLEVYIHFRPQASWGQE

SEQ ID NO: 793784 - protein, 32 aa, Homo sapiens
LSLCAEPLGAAGGLTQHPYGYHHLDCTGSDLK

SEQ ID NO: 793785 - protein, 77 aa, Homo sapiens
PQSVSGLDPRPFPPGRFRSNLLSERAAVSGAHIRRCPVEWGKEFLCSEEGLAMVLDPILVSDLPPRNIGGLYALASL

SEQ ID NO: 793786 - protein, 92 aa, Homo sapiens
GKIEGLSSKVWNKTKMPTFTAFISSTLLSLGGLPPLTGFLPKWAIIEEFTKNNSLIIPTIIATITLLNLYFYLRLIYSTSFTQKENQLRRCH

SEQ ID NO: 793787 - protein, 132 aa, Homo sapiens
MFGESTGQRLAQVPSWESPTGVYCPNFGACTEHPPLVGETSPLGHRTCRGRHEKGVDWGMVVLVTPPCSVPCPPPRLPAPSQPVSFPGAQESMSSTQALCDNSTPGPVFPSSPTLCDVESHFTDGETEESSK

SEQ ID NO: 793788 - protein, 391 aa, Homo sapiens
MGPEASFFDVLDRHRESLLAALRRGGREPPTGGSRLASSSEVLASIENIIQDIITSLARNEAPAFTIDNRSSWENIKFEDSVGLQMVSHCTTRKIKSDSPKSAQKFSLILKILSMIYKLVQSNTYATKRDIYYTDSQLFGNQTVVDNIINDISCMLKVSRRSLHILSTSKGLIAGNLRYIEEDGTKVNCTCGATAVAVPSNIQGIRNLVTDAKFVLIVEKDATFQRLLDDNFCNKLSPCIMITGKGVPDLNTRLLVKKLWDTFHVPVFTLVDADPHGIEIMCIYKYGSMSMSFEAHHLTVPAIRWLGLLPSDLKRLNVPKDSLIPLTKRDQMKLDSILRRPYVTCQPFWRKEMEIMADSKMKAEIQALTFLSSDYLSRVYLPNKLKFGGWI

SEQ ID NO: 793789 - protein, 353 aa, Homo sapiens
MGPEASFFDVLDRHRESLLAALRRGGREPPTGGSRLASRFEDSVGLQMVSHCTTRKIKSDSPKSAQKFSLILKILSMIYKLVQSNTYATKRDIYYTDSQLFGNQTVVDNIINDISCMLKVSRRSLHILSTSKGLIAGNLRYIEEDGTKVNCTCGATAVAVPSNIQGIRNLVTDAKFVLIVEKDATFQRLLDDNFCNKLSPCIMITGKGVPDLNTRLLVKKLWDTFHVPVFTLVDADPHGIEIMCIYKYGSMSMSFEAHHLTVPAIRWLGLLPSDLKRLNVPKDSLIPLTKRDQMKLDSILRRPYVTCQPFWRKEMEIMADSKMKAEIQALTFLSSDYLSRVYLPNKLKFGGWI

SEQ ID NO: 793790 - protein, 288 aa, Homo sapiens
MGPEASFFDVLDRHRESLLAALRRGGREPPTGGSRLASSSEVLASIENIIQDIITSLARNEAPAFTIDNRSSWENIKFEDSVGLQMVSHCTTRKIKSDSPKSAQKFSLILKILSMIYKLVQSNTYATKRDIYYTDSQLFGNQTVVDNIINDISCMLKVSRRSLHILSTSKGLIAGNLRYIEEDGTKVNCTCGATAVAVPSNIQGIRNLVTDAKFVLIVEKDATFQRLLDDNFCNKLSPCIMITSTPVFQHLKSKGKGVPDLNTRLLVKKLWDTFHVPVFTLVDADPHD

SEQ ID NO: 793791 - protein, 178 aa, Homo sapiens
MGPEASFFDVLDRHRESLLAALRRGGREPPTGGSRLASSSEVLASIENIIQDIITSLARNEAPAFTIDNRSSWENIKFEDSVGLQMVSHCTTRKIKSDSPKSAQKFSLILKILSMIYKLVQSNTYATKRDIYYTDSQLFGNQTVVDNIINDISCMLKVSRRSLHILSTSKGLIAGNLR

SEQ ID NO: 793792 - protein, 77 aa, Homo sapiens
RRHGDRSKRLESLMEGATSREVQAASRNWKGMQPDVPPAIPKPPEGMQLYWHLNFSSIKSSFWTCALYNIHQNGTHS

SEQ ID NO: 793793 - protein, 86 aa, Homo sapiens
RRHGDRSKRLESLMEGATSREVQAASRNWKGMQPDVPPAIPKPPEGMQLYWHLNFSSIKSSFWTCALYNSKRLDFYYFKPLLVVIG

SEQ ID NO: 793794 - protein, 78 aa, Homo sapiens
HCFSTRKLIFVINHFYNERAAWTHCHTFPILQLFLGDGEVISAWAGTEICLRVLVILEVLDFHLVMKYCHGQRGLLKG

SEQ ID NO: 793795 - protein, 114 aa, Homo sapiens
MKWKPPLVWQIINSVSTFAGFGTFVFFRGSGLTPAIAVASGEPLPSGGSRREPPSPPSSQQGFPKRPGQEGWALLSTKSLRRSQSHMIGLIGSAPVKGRLKTRHPNSLNQEEKS

SEQ ID NO: 793796 - protein, 119 aa, Homo sapiens
VKEEGGVAVSVGTGLLSVSVFICLGYCNTAPQTVTQHPWVCRQGFTVPQLWRLEAKIKMCARLFPAESCEGSFCSGPLSPACLWPSSHSLFASSSLYAIECKMSYQERNITANYVVPSN

SEQ ID NO: 793797 - protein, 95 aa, Homo sapiens
FCPLPRGQGCPESASEISLGFTVPQLWRLEAKIKMCARLFPAESCEGSFCSGPLSPACLWPSSHSLFASSSLYAIECKMSYQERNITANYVVPSN

SEQ ID NO: 793798 - protein, 191 aa, Homo sapiens
LSARGPGISDEALDPRAAKLRRGAPWRPRDPWPVRAGAAGSQGAAGSSAGMALSAEDRALVRALWKKLGSNVGVYTTEALERTFLAFPATKTYFSHLDLSPGSSQVRAHGQKVADALSLAVERLDDLPHALSALSHLHACQLRVDPASFQPGHCLLVTLARHYPGDFSPALQASLDKFLSHVISALVSEYR

SEQ ID NO: 793799 - protein, 177 aa, Homo sapiens
LSARGPGISDEALDPRAAKLRRGAPWRPRDPWPVRAGAAGSQGAAGSSAGMALSAEDRALVRALWKKLGSNVGVYTTEALERTFLAFPATKTYFSHLDLSPGSSQVRAHGQKVADALSLAVERLDDLPHALSALSHPGHCLLVTLARHYPGDFSPALQASLDKFLSHVISALVSEYR

SEQ ID NO: 793800 - protein, 106 aa, Homo sapiens
GFKRFLCLSLLSSWNYRRLPPCPTNFCIFSRDGVSPCWPGWSQTPELRISTCLSLGITGVSYRAQQQSSRIHSHGFNHLHEYLCPRFPKLYNCISKCYLYIYTSPI

SEQ ID NO: 793801 - protein, 123 aa, Homo sapiens
MKTWKTQKGSDFPKVTKLKAMRPGDTLVASHHSVKKTGVYSVNQCNKNEKYAFSNPFLKELAPGYGNSTALIHLLLVTQKLAIRYLEIMPKAFIVTERTTLPLLLVNNHSVQELCIQESVFLL

SEQ ID NO: 793802 - protein, 211 aa, Homo sapiens
MAPLAEVGGFLGGLEGLGQQVGSHFLLPPAGERPPLLGERRSAAERSARGGPGAAQLAHLHGILRRRQLYCRTGFHLQILPDGSVQGTRQDHSLFGILEFISVAVGLVSIRGVDSGLYLGMNDKGELYGSEKLTSECIFREQFEENWYNTYSSNIYKHGDTGRRYFVALNKDGTPRDGARSKRHQKFTHFLPRPVDPERVPELYKDLLMYT

SEQ ID NO: 793803 - protein, 171 aa, Homo sapiens
LLASSSPGLTLRLLSRLSPTCFPASQTPVSLHSQLFSLHVSPPLSPTPRTPIPRLLSPALLLPLSSLQLFIRFHLRLCAHPIQSPAPVRLLEAMAGPGGWRDREVTDLGHLPDPTGIFSLDKTIGHGTYGRIYLGLHEKTGAFTAVKVMNARKTPLPEIGRRVRVNKYQKS

SEQ ID NO: 793804 - protein, 76 aa, Homo sapiens
SCAVCHKAPGAAKVAHVLPGLEGGPGEGELLLWTVDFDITHRHPLSHPCIPDSVPQGHAGRDTQPPCALPQVPVCK

SEQ ID NO: 793805 - protein, 105 aa, Homo sapiens
FLHPLTHVPVNKGTLGIHQVKLVVQASPGLSNGCGVAQHAHSSLYLGKVFPSKNCGKVVLDANCKATGALMHILIAAIGVCNWVSTGSINHRLGNNVPTGACKAG

SEQ ID NO: 793806 - protein, 111 aa, Homo sapiens
MELCSWSGWGPPAQPALTPQHTCSSTFQPAGFCARSSLCCGCSGLLNFTPNHPLPCFPREVTPLPPFAQVKATYRPRFRPLPPPYSMSCQLTPQSSALPLHGHHLRHHHLL

SEQ ID NO: 793807 - protein, 209 aa, Homo sapiens
WAAHRDLILDLDKMEIISSKLFILLTLATSSLLTSNIFCADELVMSNLHSKENYDKYSEPRGYPKGERSLNFEELKDWGPKNVIKMSTPAVNKMPHSFANLPLRFGRNVQEERSAGATANLPLRSGRNMEVSLVRRVPNLPQRFGRTTTAKSVCRMLSDLCQGSMHSPCANDLFYSMTCQHQEIQNPDQKQSRRLLFKKIDDAELKQEK

SEQ ID NO: 793808 - protein, 207 aa, Homo sapiens
PAPGALGTDSLKNLTLRDLSLRGNSETSSDTPEMSLSAETLSPSTPSDVNFLLPPEDAGEEAEAKNELSPMDRGLGVRAAFPEVSTPDGSSQGATQMPLYSSPIVKNPFMSPLLAPDSMLKSLPPVHIVACALDPMLDDSVMLARRLRNLGQPVTLRVVEDLPHGFLTLEALCRRDAPGRRAVRGAIRLVLTPPPEPGRAGRRGLRG

SEQ ID NO: 793809 - protein, 174 aa, Homo sapiens
MTHCCSPCCQPTCCRTTCCRTTCWKPTTVTTCSSTPCCQPACCVSSCCQPCCRPTCCQNTCCRTTCCQPTCVTSCCQPSCCSTPCCQPTCCGSSCCGQTSCGSSCGQSSSCAPVYCRRTCYYPTTVCLPGCLNQSCGSNCCQPCCRPACCETTCCRTTCFQPTCVSSCCQPSCC

SEQ ID NO: 793810 - protein, 154 aa, Homo sapiens
MTHCCSPCCQPTCCRTTCCRTTCWKPTTVTTCSSTPCCQPACCVSSCCQPCCRPTCCQNTCCRTTCCQPTCVTSCCGQTSCGSSCGQSSSCAPVYCRRTCYYPTTVCLPGCLNQSCGSSCCQPCCRPACCETTCCRTTCFQPTCVSSCCQPSCC

SEQ ID NO: 793811 - protein, 89 aa, Homo sapiens
EELAVARPEDTVGALKSKYFPGQESQMKLIYQGRLLQDPARTLRSLNITDNCVIHCHRSPPGSAVPGPSASLAPSATEPPSLGVNVGRP

SEQ ID NO: 793812 - protein, 326 aa, Homo sapiens
  misc_feature (52)..(52): Xaa can be any naturally occurring amino acid
  misc_feature (59)..(59): Xaa can be any naturally occurring amino acid
  misc_feature (85)..(85): Xaa can be any naturally occurring amino acid
VLLRRLGPGSPSVRVGPWTPVQRRGNRTIQKRNLRLRKRVRDPSSPCGHGTXRVDHRLXDRAKTPEAGHLGSCRAPPHESSLCLXQSFSSFFAAVSFPVNHGYDINLLTIRGSVVVVINNYYRYKQLQFAVCQALCQVFCFDDFTSSSKQPHVGLGQLEPKQTRDLVATPQALLMLSPFVPAAWTLPAARPWSSLMSPSLRVWVMSKYFPGQESQMKLIYQGRLLQDPARTLRSLNITDNCVIHCHRSPPGSAVPGPSASLAPSATEPPSLGVNVGSLMVPVFVVLLGVVWYFRINYRQFFTAPATVSLVGVTVFFSFLVFGMYGR

SEQ ID NO: 793813 - protein, 101 aa, Homo sapiens
PLEPPTSPAQLSQPQRPRSGSQKQTMPQMNMGTVSCEALGCRPPPTPGALTTPSPSSDHLAQRAEGGPISTPSTCRYPQRSSQRGCPHPAPPSSRLLCPSS

SEQ ID NO: 793814 - protein, 75 aa, Homo sapiens
TIPTAQGGDHIARNCGQPLEAESRIQPMARSQAPQSCSHKEMNPASNPRRLRNGSFPSRASDETIVLVDTKTVTL

SEQ ID NO: 793815 - protein, 282 aa, Homo sapiens
CKRKRRETHTHCLKQPIKKKKSGRGSWVKSQLPSQACWPPLVLRANVRAGWRCRTPRQLLSPEGRLLPTVTPQDSEARRNRALRRAAEERHQAGRREVEALRLWTQLQELRREHARLQRRLKRLEPCARLLEQALELLPGFQEVPELVARFDGLAETQAALRLREREQLAELEAARARLQQLRDAWPDEVLAQGQRRAQLQERLEAARERTLQWESKWIQIQNTAAEKTLLLGRSRMAVLNLFQLVCQHQGQPPTLDIEDTEGQLEHDQTISFQNQLSALRG

SEQ ID NO: 793816 - protein, 299 aa, Homo sapiens
CKRKRRETHTHCLKQPIKKKKSGRGSWVKSQLPSQACWPPLVLRANVRAGWRCRTPRQLLSPEGRLLPTVTPQDSEARRNRALRRAAEERHQAGRREVEALRLWTQLQELRREHARLQRRLKRLEPCARLLEQALELLPGFQEVPELVARFDGLAETQAALRLREREQLAELEAARARLQQLRDAWPDEVLAQGQRRAQLQERLEAARERTLQWESKWIQIQNTAAEKTLLLGRSRMAVLNLFQLVCQHQGQPPTLDIEDTEGQLEHVRTPLYGTSSPQTLPLWKNEPKTPQLVTPSLG

SEQ ID NO: 793817 - protein, 166 aa, Homo sapiens
PRPSRRPLAHPLPCESVSPCAWPACFGPSGLPQRWPKGRLPSAEQVTNHFGGHGIDTAALEIRDKGPERGESRLRSESGSRENPPSPLPAALESQKPNSAQLSVWRARPGLQAQIHVPTPEHTQTPPESETASGRLRSSGLRGGTGAGAASRGNRTVVTGNVPRTE

SEQ ID NO: 793818 - protein, 187 aa, Homo sapiens
MEQSVYGQCKSCCSNLTAVLCLAETWDTEKQQIQIMDEIYKITSTERVQLLEKKLAVQLTELKSEIEEQGALQGTANRVYSSIQMPKDIYYFRRERELALKKTLQVAESKPLVVQADAVQRELESCLRREYTPENLPLLLLQYYTERIAQLAQSKYLHMLRWKRFCQHSKIMEQLYPLYKKQVGYIM

SEQ ID NO: 793819 - protein, 189 aa, Homo sapiens
PPNSSSSDVRTVSYTNLKFMATQIASGMKYLSSLNFVHRDLATRNCLVGKNYTIKIADFGMSRNLYSGDYYRIQGRAVLPIRWMSWESILLGKFTTASDVWAFGVTLWETFTFCQEQPYSQLSDEQVIENTGEFFRDQGRQTYLPQPAICPALCVEADAQLLQKRYEEPSLIQESTFCSSTATSVPLCG

SEQ ID NO: 793820 - protein, 326 aa, Homo sapiens
LREGEGAGRSSAPQYVGYHTAWIEHVHVIQPRADRAAIELPSLEVLSDQEEDREQCGVKNDESSSSSIIFAEPTPEKEKRFGESDTENQNNKSVKYTTNLVIRESGELESTLELQENGLAGLSASSIVEQQLPLRRNSHLEESFTSTEESSEENVNFLGQTEAQYHLMLHIQMQLCELSLWDWIVERNKRGREYVDESACPYVMANVATKIFQELVEGVFYIHNMGIVHRDLKPRNIFLHGPDQQVKIGDFGLACTDILQKNTDWTNRNGKRTPTHTSRSGYLSGTLQPEQWEGSEYDAKSDMYSLGVVLLELFQPLEQKWSEQKF

SEQ ID NO: 793821 - protein, 241 aa, Homo sapiens
QVLKNPYNSQPSLCSCKPTLLVSLLESLSHVHEPNPLRSRQVYKLLCQTFIKMGLLSSFTSTEESSEENVNFLGQTEAQYHLMLHIQMQLCELSLWDWIVERNKRGREYVDESACPYVMANVATKIFQELVEGVFYIHNMGIVHRDLKPRNIFLHGPDQQVKIGDFGLACTDILQKNTDWTNRNGKRTPTHTSRSGYLSGTLQPEQWEGSEYDAKSDMYSLGVVLLELFQPLEQKWSEQKF

SEQ ID NO: 793822 - protein, 219 aa, Homo sapiens
LREGEGAGRSSAPQYVGYHTAWIEHVHVIQPRADRAAIELPSLEVLSDQEEDREQCGVKNDESSSSSIIFAEPTPEKEKRFGESDTENQNNKSVKYTTNLVIRESGELESTLELQENGLAGLSASSIVEQQLPLRRNSHLEESFTSTEESSEENVNFLGQTEAQYHLMLHIQMQLCELSLWDWIVERNKRGREYVDESACPYVMANVATKIFQELVDGV

SEQ ID NO: 793823 - protein, 118 aa, Homo sapiens [sequence omitted]

SEQ ID NO: 793824 - protein, 43 aa, Homo sapiens
CRILILLIHVTFSGIRALAVPFRLPMPICLPFRQAKVFFRHQA

SEQ ID NO: 793825 - protein, 90 aa, Homo sapiens
VLSGAVLPLWSALPQYKKKITDRCFHHSECYSGCCLMDLDSGGAFCAPRARITMICLPQTKGATNIICPCRMGLTCISKDLMCSRRCHMI

SEQ ID NO: 793826 - protein, 110 aa, Homo sapiens
  misc_feature (15)..(15): Xaa can be any naturally occurring amino acid
KLHAPQVCVPVLSSXRSLVTTKLLPVSMALPLWTSLVNGITQGSSMPQLLFFFFSFFFFFFFFEMESCSVAQAGVQWRDLGSLQPPPPGFMPFSCLSLLNSWDYRLPPPR

SEQ ID NO: 793827 - protein, 91 aa, Homo sapiens
NGGRLLLAGIQCFLVLGSIWKTCAPVVKMGCSSIPGTAPAATPSRPLTLTVRPLGVCYRRGTCGGPCAPGSAQALLHSTRRGQAGALEKSF

SEQ ID NO: 793828 - protein, 398 aa, Homo sapiens
MASPANSFVGTPYWMAPEVILAMDEGQYDGKVDVWSLGITCIELAERKPPLFNMNAMSALYHIAQNESPTLQSNEWSDYFRNFVDSCLQKIPQDRPTSEELLKHIFVLRERPETVLIDLIQRTKDAVRELDNLQYRKMKKLLFQEAHNGPAVEAQEEEEEQDHGVGRTGTVNSVGSNQSIPSMSISASSQSSSVNSLPDVSDDKSELDMMEGDHTVMSNSSVIHLKPEEENYREEGDPRTRASDPQSPPQVSRHKSHYRNREHFATIRTASLVTRQMQEHEQDSELREQMSGYKRMRRQHQKQLMTLENKLKAEMDEHRLRLDKDLETQRNNFAAEMEKLIKKHQAAMEKEAKVMSNEEKKFQQHIQAQQKKELNSFLESQKREYKLRKEQLKEVLMS

SEQ ID NO: 793829 - protein, 87 aa, Homo sapiens
YFYLSCFLCCQELNENQSTPKKEKQEWLSKQKENIQHFQAEEEANLLRRQRQYLELECRRFKRRMLLGRHNLEQDLVREVSLSDEKF

SEQ ID NO: 793830 - protein, 53 aa, Homo sapiens
MPSTNRAGSLKDPEIAELFFKEDPEKLFTDLREIGHGSFGAVYFVSVSGLMSV

SEQ ID NO: 793831 - protein, 1001 aa, Homo sapiens
MPSTNRAGSLKDPEIAELFFKEDPEKLFTDLREIGHGSFGAVYFARDVRTNEVVAIKKMSYSGKQSTEKWQDIIKEVKFLQRIKHPNSIEYKGCYLREHTAWLVMEYCLGSASDLLEVHKKPLQEVEIAAITHGALQGLAYLHSHTMIHRDIKAGNILLTEPGQVKLADFGSASMASPANSFVGTPYWMAPEVILAMDEGQYDGKVDVWSLGITCIELAERKPPLFNMNAMSALYHIAQNESPTLQSNEWSDYFRNFVDSCLQKIPQDRPTSEELLKHIFVLRERPETVLIDLIQRTKDAVRELDNLQYRKMKKLLFQEAHNGPAVEAQEEEEEQDHGVGRTGTVNSVGSNQSIPSMSISASSQSSSVNSLPDVSDDKSELDMMEGDHTVMSNSSVIHLKPEEENYREEGDPRTRASDPQSPPQVSRHKSHYRNREHFATIRTASLVTRQMQEHEQDSELREQMSGYKRMRRQHQKQLMTLENKLKAEMDEHRLRLDKDLETQRNNFAAEMEKLIKKHQAAMEKEAKVMSNEEKKFQQHIQAQQKKELNSFLESQKREYKLRKEQLKEELNENQSTPKKEKQEWLSKQKENIQHFQAEEEANLLRRQRQYLELECRRFKRRMLLGRHNLEQDLVREELNKRQTQKDLEHAMLLRQHESMQELEFRHLNTIQKMRCELIRLQHQTELTNQLEYNKRRERELRRKHVMEVRQQPKSLKSKELQIKKQFQDTCKIQTRQYKALRNHLLETTPKSEHKAVLKRLKEEQTRKLAILAEQYDHSINEMLSTQALRLDEAQEAECQVLKMQLQQELELLNAYQSKIKMQAEAQHDRELRELEQRVSLRRALLEQKIEEEMLALQNERTERIRSLLERQAREIEAFDSESMRLGFSNMVLSNLSPEAFSHSYPGASGWSHNPTGGPGPHWGHPMGGPPQAWGHPMQGGPQPWGHPSGPMQGVPRGSSMGVRNSPQALRRTASGGRTEQGMSRSTSVTSQISNGSHMSYT

SEQ ID NO: 793832 - protein, 633 aa, Homo sapiens
MASPANSFVGTPYWMAPEVILAMDEGQYDGKVDVWSLGITCIELAERKPPLFNMNAMSALYHIAQNESPTLQSNEWSDYFRNFVDSCLQKIPQDRPTSEELLKHIFVLRERPETVLIDLIQRTKDAVRELDNLQYRKMKKLLFQEAHNGPAVEAQEEEEEQDHGVGRTGTVNSVGSNQSIPSMSISASSQSSSVNSLPDVSDDKSELDMMEGDHTVMSNSSVIHLKPEEENYREEGDPRTRASDPQSPPQVSRHKSHYRNREHFATIRTASLVTRQMQEHEQDSELREQMSGYKRMRRQHQKQLMTLENKLKAEMDEHRLRLDKDLETQRNNFAAEMEKLIKKHQAAMEKEAKVMSNEEKKFQQHIQAQQKKELNSFLESQKREYKLRKEQLKEELNENQSTPKKEKQEWLSKQKENIQHFQAEEEANLLRRQRQYLELECRRFKRRMLLGRHNLEQDLVREELNKRQTQKDLEHAMLLRQHESMQELEFRHLNTIQKMRCELIRLQHQTELTNQLEYNKRRERELRRKHVMEVRQQPKSLKSKELQIKKQFQDTCKIQTRQYKALRNHLLETTPKSEHKAVLKRLKEEQTRKLAILAEQYDHSINEMLSTQAVSLLFLGQNKFSAPFLPPPE

SEQ ID NO: 793833 - protein, 749 aa, Homo sapiens
MSYSGKQSTEKWQDIIKEVKFLQRIKHPNSIEYKGCYLREHTAWLVMEYCLGSASDLLEVHKKPLQEVEIAAITHGALQGLAYLHSHTMIHRDIKAGNILLTEPGQVKLADFGSASMASPANSFVGTPYWMAPEVILAMDEGQYDGKVDVWSLGITCIELAERKPPLFNMNAMSALYHIAQNESPTLQSNEWSDYFRNFVDSCLQKIPQDRPTSEELLKHIFVLRERPETVLIDLIQRTKDAVRELDNLQYRKMKKLLFQEAHNGPAVEAQEEEEEQDHGVGRTGTVNSVGSNQSIPSMSISASSQSSSVNSLPDVSDDKSELDMMEGDHTVMSNSSVIHLKPEEENYREEGDPRTRASDPQSPPQVSRHKSHYRNREHFATIRTASLVTRQMQEHEQDSELREQMSGYKRMRRQHQKQLMTLENKLKAEMDEHRLRLDKDLETQRNNFAAEMEKLIKKHQAAMEKEAKVMSNEEKKFQQHIQAQQKKELNSFLESQKREYKLRKEQLKEELNENQSTPKKEKQEWLSKQKENIQHFQAEEEANLLRRQRQYLELECRRFKRRMLLGRHNLEQDLVREELNKRQTQKDLEHAMLLRQHESMQELEFRHLNTIQKMRCELIRLQHQTELTNQLEYNKRRERELRRKHVMEVRQQPKSLKSKELQIKKQFQDTCKIQTRQYKALRNHLLETTPKSEHKAVLKRLKEEQTRKLAILAEQYDHSINEMLSTQAVSLLFLGQNKFSAPFLPPPE

SEQ ID NO: 793834 - protein, 470 aa, Homo sapiens
MASPANSFVGTPYWMAPEVILAMDEGQYDGKVDVWSLGITCIELAERKPPLFNMNAMSALYHIAQNESPTLQSNEWSDYFRNFVDSCLQKIPQDRPTSEELLKHIFVLRERPETVLIDLIQRTKDAVRELDNLQYRKMKKLLFQEAHNGPAVEAQEEEEEQDHGVGRTGTVNSVGSNQSIPSMSISASSQSSSVNSLPDVSDDKSELDMMEGDHTVMSNSSVIHLKPEEENYREEGDPRTRASDPQSPPQVSRHKSHYRNREHFATIRTASLVTRQMQEHEQDSELREQMSGYKRMRRQHQKQLMTLENKLKAEMDEHRLRLDKDLETQRNNFAAEMEKLIKKHQAAMEKEAKVMSNEEKKFQQHIQAQQKKELNSFLESQKREYKLRKEQLKEELNENQSTPKKEKQEWLSKQKENIQHFQAEEEANLLRRQRQYLELECRRFKRRMLLGRHNLEQDLVREVSLSDEKF

SEQ ID NO: 793835 - protein, 36 aa, Homo sapiens
LLLYSGDIYFPFEKKILEEKPDGGISGTVAGSKKDV

SEQ ID NO: 793836 - protein, 103 aa, Homo sapiens
LLSNYNNLEGYILAEREHQEDRKEAEDISVKSSSVSVMCPTCVVLNATVSQLASYQDLSPVETATCRAPFQGQQGVGKMESLSLRKVFPIYAFEEGRSGTIIH

SEQ ID NO: 793837 - protein, 104 aa, Homo sapiens
VREVRGASARPPLLGGDIWTQTQTCSEGRLHEETRKMPFGGRGLSDTSTSQVLPRLPANHQKPGKGHGTDILLHSPHKEPTPLTPGFWTSSLPNCETINVCYFK

SEQ ID NO: 793838 - protein, 130 aa, Homo sapiens
PLLSPLASPPLGRCEKQPHLVNKWHVGEVGECLVRTLQGFSQEPSVHKVSGVFTRASPARAVPLLRCAPRLPKGERREERAGRAGWRIWTGPGGLGWGGLWPRLVLGPATSSRPRLRRGLRSWNGAARTQ

SEQ ID NO: 793839 - protein, 108 aa, Homo sapiens
MPGVTVKDVNQQEFIRALAAFLRKSGKLKVPEWVDTVKLLAKHKELAPYDENWLYTRAASTAWHLYLWGGAGVGSMTKIYGGCQRSGGMPGHFSRGSKNVAHRVLQRL

SEQ ID NO: 793840 - protein, 108 aa, Homo sapiens
IPDLTFQLNDKHLKTLSKTVFSETWLKGSTVVANDGFYVILKGLARPQTNVYKNLIEGSDSPDSFISQSFHSFIWSEEFKNSTLAEMYLPSYDSMVRDEYLLFPQATR

SEQ ID NO: 793841 - protein, 112 aa, Homo sapiens [sequence omitted]

SEQ ID NO: 793842 - protein, 111 aa, Homo sapiens
CEKREQHQQCTCKEERPCKDAKNEDGHPPTKERSIRRNKPANTLILDFQPPELSAAWATFQHKVTKDVPGMMKEESDYMLKEMVRGLASTYWQDLGNFGGCLIMGTGIKTG

SEQ ID NO: 793843 - protein, 77 aa, Homo sapiens
LKEEISPEGIIMLLNCLLQLPFPRAFPVLLRAEDGIFVITTVSSARLGRPGMHSYNMCDFEPGVHHIATRSLRETVL

SEQ ID NO: 793844 - protein, 131 aa, Homo sapiens
PDVEIKGPKMDIDAPDVEVQGPDWHLKMPKMKMPKFSMPGFKGEGREVDVNLPKADIDVSGPKVDVEVPDVSLEGPEGKLKGPKFKMPEMHFKAPKISMPDVDLNLKGPKLKGDVDVSLPEVEGEMKVPDV

SEQ ID NO: 793845 - protein, 104 aa, Homo sapiens
VILIPWPNLSSSGQRVQSGNLPERRRSGRETFLKDGAPARLACSPPADFLTLHTEGAGTASVQLAWSYPSGLAGPVAVSHSCYGLSCSLTPRRTPLGSERRELT

SEQ ID NO: 793846 - protein, 235 aa, Homo sapiens
THPSLWPDIISKCAKVTFTYTEFCPTPDNWFSIEPWLKVSNENLDYAILKLKENGNAFPPGLWRQISPQPSTGLIYLIGHPEGQIKKIDGCTVIPLNERLKKYPNDCQDGLVDLYDTTSNVYCMFTQRSFLSEVWNTHTLSYDTCFSDGSSGSPVFNASGKLVALHTFGLFYQRGFNVHALIEFGYSMDSILCDIKKTNESLYKSLNDEKLETYDEEKGKQESSLQDHQIEPMEC

SEQ ID NO: 793847 - protein, 110 aa, Homo sapiens
MCTVDLGWNSDQPLGRPRSWGLASLQSCTGGRGHSFCPRGRWREASCSSRGRDLLPTLPGWPLEHPGCAASYCDVAPVASSWRLYHMWVLIDILLFMLKFECRYKNTKSL

SEQ ID NO: 793848 - protein, 106 aa, Homo sapiens
LLPSKDVQSLSLPIMLAEILTTKVLKPVVELLSNPDYINQMLLAQLEYREQMNEHHKRAYTYSPSYEDFIKLINSNSDVEFLKQLRSVEGTVEKSGRRCVLVVFNN

SEQ ID NO: 793849 - protein, 141 aa, Homo sapiens
MLRFYLFISLLCLSRSDAEETCPSFTRLSFHSAVVGTGLNVRLMLYTRKNLTCAQTINSSAFGNLNVTKKTTFIVHGFRPTGSPPVWMDDLVKGLLSVEDMNVVVVDWNRGATTLIYTHASSKTRKVAMVLKEFIDQMLVR

SEQ ID NO: 793850 - protein, 80 aa, Homo sapiens
LLQRAFYSWVSSPAFPQAALLFALEIAPEAEVWRGTKNKLRRGSLPPGSGDLEEQVCLGGKGEVKETHTLFQQNQLLIYF

SEQ ID NO: 793851 - protein, 97 aa, Homo sapiens
KMNVLIYLLELGYTLPLPSLDNNSRLLGLWIPGLTSVAPLPEFSGLWARPESYTLGLPGSEAFRLGLSHATSIPGSPACIWLIVGLFAYHNHMSQFL

SEQ ID NO: 793852 - protein, 72 aa, Homo sapiens
GKRWQRGDITQSSHAPPVPEVEPKLQQERHLGSNVTFAAGEHRNLRPVTPPHSASLLLYRNHPCPRADGKVQ

SEQ ID NO: 793853 - protein, 247 aa, Homo sapiens
ALHADWAEPANPYADSHWRAAERFLQFEIAWFAEPLFKTGDYPAAMREYIASKHRRGLSSSALPRLTEAERRLLKGTVDFCALNHFTTRFVMHEQLAGSRYDSDRDIQFLQDITRLSSPTRLAVIPWGVRKLLRWVRRNYGDMDIYITASGIDDQALEDDRLRKYYLGKYLQEVLKAYLIDKVRIKGYYAFKLAEEKSKPRFGFFTSDFKAKSSIQFYNKVISSRGFPFENSSSRCSQTQENTECTV

SEQ ID NO: 793854 - protein, 86 aa, Homo sapiens
RKAELDGQGVRLQVSITLPVPRAWDNVLMVPPLCKEDDHSQCVHVLSANVTAQNVQKINTYARVGGLRRFCILLTDNLYKSSSQIL

SEQ ID NO: 793855 - protein, 88 aa, Homo sapiens
KAPVLLSRQRVGTAPHHGHGQRTTSPYRERLPSQPQFTRKCTSARSEITSLGMAWVAPPPHGPTHRDLNFWARDFFPIQQHFNHMSSS

SEQ ID NO: 793856 - protein, 71 aa, Homo sapiens
MPNSRGQKELGIKRNFKGTALTWAESACAIQLESQVLRQDVQMPQCRVLLINTCSPVLISNLTHPTLKAHL

SEQ ID NO: 793857 - protein, 67 aa, Homo sapiens
IPKEMSISSRAQTWLNIRVTCRSCPKPTQTSGFRRPTVGPPNLYLKQGTTLLEHGVSPECVMTENLR

SEQ ID NO: 793858 - protein, 95 aa, Homo sapiens
LEAYSDHTVRDISCVLATNTYLRCCLRSAMPTMASVKLSTLHPIVNHPHYEDADLRPGCSMLEIWDVEDPSNAANPPLRSILLEDARLEDASISE

SEQ ID NO: 793859 - protein, 84 aa, Homo sapiens
LDQNISHQQAIALLQQTTGSLRLIVAREPVHTKSSTSSSLNDTTLPETVCWGHVEEVELINDGSGLGFGIVGGKTSGVVVRTIV

SEQ ID NO: 793860 - protein, 102 aa, Homo sapiens
MSSAARSRQTAAGRVPRKTEPRESSGAHLPRCTAPSFHCGDSELWDWSAHRQTCAQVGVGAHPRQPGSGVYALVPRALKASLGKCFKAGKFTIHLCRRSLGF

SEQ ID NO: 793861 - protein, 112 aa, Homo sapiens
ALFLFLSLELESCYLALYLRARRERAGCLFEKTLVLRAKVSMCCLFLSGYKTKLYFKTEPSSSCIPVYLNILSTWCLNILILPCSFGLKVSILAGLYFLTKLAVHKLKNFHL

SEQ ID NO: 793862 - protein, 139 aa, Homo sapiens
NQIRKTSYAQHQQVRQIRKNRMEEWGACYNAENIPEGYNKGTEETKSPENPSKMPFPYKVLKALDPEIYRNVEFDVWLDSRKELQKSDYMEYAGRQYYLGDKCQVCLESEGRYYNAHIQEVGNENNSVTATFRYRARFD

SEQ ID NO: 793863 - protein, 191 aa, Homo sapiens
IFSSAVLYEILYKDVFVVDEEELKTAIKLFRSGSKKNRNNAVTGSEDAHTDYKSSNQNRMEEWGACYNAENIPEGYNKGTEETKSPENPSKMPFPYKVLKALDPEIYRNVEFDVWLDSRKELQKSDYMEYAGRQYYLGDKCQVCLESEGRYYNAHIQEVGNENNSVTVFIEELAEKHVVPLAIHRFYSATQ

SEQ ID NO: 793864 - protein, 176 aa, Homo sapiens
IFSSAVLYEILYKDVFVVDEEELKTAIKLFRSGSKKNRNNAVTGSEDAHTDYKSSNQNRMEEWGACYNAENIPEGYNKGTEETKSPENPSKMPFPYKVLKALDPEIYRNVEFDVWLDSRKELQKSDYMEYAGRQYYLGDKCQVCLESEGRYYNAHIQEVGNENNSVTVFIEELAEK

SEQ ID NO: 793865 - protein, 130 aa, Homo sapiens
IFSSAVLYEILYKDVFVVDEEELKTAIKLFRSGSKKNRNNAVTGSEDAHTDYKSSNQNRMEEWGACYNAENIPEGYNKGTEETKSPENPSKMPFPYKVLKALDPEIYRNVEFDVWLDSRKGLLGIRRKIL

SEQ ID NO: 793866 - protein, 72 aa, Homo sapiens
FNVAEGNEVLLLVHNLPQHLFGYSWYKGERVDGNRQIIGYVIGTQHAPPPRPANFFGLLVESGFHHVGQASL

SEQ ID NO: 793867 - protein, 137 aa, Homo sapiens
NASLPAHCSRQKFMGFKIALDDEGTAGGWLFWDDGQSIDTYGKGLYYLASFSASQNTMQSHIIFNNYITGTNPLKLGYIEIWGVGSVPVTSVSISVSGMVITPSFNNDPTTQVLSIDVTDRNISLHNFTSLTWISTL

SEQ ID NO: 793868 - protein, 96 aa, Homo sapiens
LQKEDTPPAKKEYLNTMQSHIIFNNYITGTNPLKLGYIEIWGVGSVPVTSVSISVSGMVITPSFNNDPTTQVLSIDVTDRNISLHNFTSLTWISTL

SEQ ID NO: 793869 - protein, 148 aa, Homo sapiens
MCSTHKSRDRGKGAIQEAITVLKTCGRVRRPPHRDAHSRRPSKTPNTHIPHLLPSPGSGTPSRGPRPLGWAQIALHPNKVSLLLSAANSKLTEKWAALGQRAPPSSRPLDGDAGVSYGCPAKAPVAEQEGCQRRHSALNNLGAWVSTR

SEQ ID NO: 793870 - protein, 91 aa, Homo sapiens
MEQKVNPSEVFRDNQHPSWGKGDSMNHHCPPPHRGNAEESMSLPHAGRKGHLHAQSTHPARSSQGPSYSQLQGRGPVGFISISPCLTWGLR

SEQ ID NO: 793871 - protein, 249 aa, Homo sapiens
TPGGPGRVNMAAQGSPSSSPSDDSTTSGSLPELPPTSTATSRSPPESKGSSRSSLLQWTCPEDSLPLAVFYGPLDAKNPLLASCEKEIQELLGFMRKKKALATTEEEKHEFRRRCATSLFNIWTKYAPRLPADYYNEKLLKVGDSLCQMKEYKLALLQCYGRYLQQFNTNFDENKVDVTQFKATFFPKGFKDKTAGLTFHALSGKNMCNYQLVCDSDENLKNKESVVQCLHILSSLRLIMQVALPQEHL

SEQ ID NO: 793872 - protein, 152 aa, Homo sapiens
SHPLSSPQQEENVREPLRPCFLTRRKVADTAMITPNLEAQTRVAPNPWGQGQKVDVATQTGKGHLGGEVRSRRCCATHPNSKDRDIHMDVPQIIRRPHALSPGRGDSSSDLPLSSQKLKSTKDMHGTRACTHTRLTHTSSSLSLQLGKEVER

SEQ ID NO: 793873 - protein, 70 aa, Homo sapiens
CSVIVLLVAALWAPRTGVPESHPALGPAAAVGPSSGSEDEQVHRPPAEPHLHASTRGLFIRLLLWSSVDC

SEQ ID NO: 793874 - protein, 75 aa, Homo sapiens
MPLQLDGLVESAFEGFPSPSSHHGLLPACPCRPRHLALGRYQVAAPGSHLPSTFISPPTDHRDRFLILLSCKCCT

SEQ ID NO: 793875 - protein, 190 aa, Homo sapiens [sequence omitted]

SEQ ID NO: 793876 - protein, 157 aa, Homo sapiens
MLRGTMTAWRGMRPEVTLACLLLATAGCFADLNEVPQVTVQPASTVQKPGGTVILGCVVEPPRMNVTWRLNGKELNGSDDALGVLITHGTLVITALNNHTVGRYQCVARMPAGAVASVPATVTLASESAPLPPCHGAVPPHLSHPEAPTIHAASCYS

SEQ ID NO: 793877 - protein, 1114 aa, Homo sapiens
MLRGTMTAWRGMRPEVTLACLLLATAGCFADLNEVPQVTVQPASTVQKPGGTVILGCVVEPPRMNVTWRLNGKELNGSDDALGVLITHGTLVITALNNHTVGRYQCVARMPAGAVASVPATVTLANLQDFKLDVQHVIEVDEGNTAVIACHLPESHPKAQVRYSVKQEWLEASRGNYLIMPSGNLQIVNASQEDEGMYKCAAYNPVTQEVKTSGSSDRLRVRRSTAEAARIIYPPEAQTIIVTKGQSLILECVASGIPPPRVTWAKDGSSVTGYNKTRFLLSNLLIDTTSEEDSGTYRCMADNGVGQPGAAVILYNVQVFEPPEVTMELSQLVIPWGQSAKLTCEVRGNPPPSVLWLRNAVPLISSQRLRLSRRALRVLSMGPEDEGVYQCMAENEVGSAHAVVQLRTSRPSITPRLWQDAELATGTPPVSPSKLGNPEQMLRGQPALPRPPTSVGPASPQCPGEKGQGAPAEAPIILSSPRTSKTDSYELVWRPRHEGSGRAPILYYVVKHRKVTNSSDDWTISGIPANQHRLTLTRLDPGSLYEVEMAAYNCAGEGQTAMVTFRTGRRPKPEIMASKEQQIQRDDPGASPQSSSQPDHGRLSPPEAPDRPTISTASETSVYVTWIPRGNGGFPIQSFRVEYKKLKKVGDWILATSAIPPSRLSVEITGLEKGTSYKFRVRALNMLGESEPSAPSRPYVVSGYSGRVYERPVAGPYITFTDAVNETTIMLKWMYIPASNNNTPIHGFYIYYRPTDSDNDSDYKKDMVEGDKYWHSISHLQPETSYDIKMQCFNEGGESEFSNVMICETKARKSSGQPGRLPPPTLAPPQPPLPETIERPVGTGAMVARSSDLPYLIVGVVLGSIVLIIVTFIPFCLWRAWSKQKHTTDLGFPRSALPPSCPYTMVPLGGLPGHQASGQPYLSGISGRACANGIHMNRGCPSAAVGYPGMKPQQHCPGELQQQSDTSSLLRQTHLGNGYDPQSHQITRGPKSSPDEGSFLYTLPDDSTHQLLQPHHDCCQRQEQPAAVGQSGVRRAPDSPVLEAVWDPPFHSGPPCCLGLVPVEEVDSPDSCQVSGGDWCPQHPVGAYVGQEPGMQLSPGPLVRVSFETPPLTI

SEQ ID NO: 793878 - protein, 1114 aa, Homo sapiens; identical to SEQ ID NO: 793877

SEQ ID NO: 793879 - protein, 1114 aa, Homo sapiens; identical to SEQ ID NO: 793877

SEQ ID NO: 793880 - protein, 1010 aa, Homo sapiens
MLRGTMTAWRGMRPEVTLACLLLATAGCFADLNEVPQVTVQPASTVQKPGGTVILGCVVEPPRMNVTWRLNGKELNGSDDALGVLITHGTLVITALNNHTVGRYQCVARMPAGAVASVPATVTLANLQDFKLDVQHVIEVDEGNTAVIACHLPESHPKAQVRYSVKQEWLEASRGNYLIMPSGNLQIVNASQEDEGMYKCAAYNPVTQEVKTSGSSDRLRVRRSTAEAARIIYPPEAQTIIVTKGQSLILECVASGIPPPRVTWAKDGSSVTGYNKTRFLLSNLLIDTTSEEDSGTYRCMADNGVGQPGAAVILYNVQVFEPPEVTMELSQLVIPWGQSAKLTCEVRGNPPPSVLWLRNAVPLISSQRLRLSRRALRVLSMGPEDEGVYQCMAENEVGSAHAVVQLRTSRPSITPRLWQDAELATGTPPVSPSKLGNPEQMLRGQPALPRPPTSVGPASPQCPGEKGQGAPAEAPIILSSPRTSKTDSYELVWRPRHEGSGRAPILYYVVKHRKVTNSSDDWTISGIPANQHRLTLTRLDPGSLYEVEMAAYNCAGEGQTAMVTFRTGRRPKPEIMASKEQQIQRDDPGASPQSSSQPDHGRLSPPEAPDRPTISTASETSVYVTWIPRGNGGFPIQSFRVEYKKLKKVGDWILATSAIPPSRLSVEITGLEKGTSYKFRVRALNMLGESEPSAPSRPYVVSGYSGRVYERPVAGPYITFTDAVNETTIMLKWMYIPASNNNTPIHGFYIYYRPTDSDNDSDYKKDMVEGDKYWHSISHLQPETSYDIKMQCFNEGGESEFSNVMICETKARKSSGQPGRLPPPTLAPPQPPLPETIERPVGTGAMVARSSDLPYLIVGVVLGSIVLIIVTFIPFCLWRAWSKQKHTTDLGFPRSALPPSCPYTMVPLGGLPGHQASGQPYLSGISGRACANGIHMNRGCPSAAVGYPGMKPQQHCPGELQQQSDTSSLLRQTHLGNGYDPQSHQITSCCSPITTAANARSSLLLWASQG

SEQ ID NO: 793881 - protein, 998 aa, Homo sapiens
MLRGTMTAWRGMRPEVTLACLLLATAGCFADLNEVPQVTVQPASTVQKPGGTVILGCVVEPPRMNVTWRLNGKELNGSDDALGVLITHGTLVITALNNHTVGRYQCVARMPAGAVASVPATVTLANLQDFKLDVQHVIEVDEGNTAVIACHLPESHPKAQVRYSVKQEWLEASRGNYLIMPSGNLQIVNASQEDEGMYKCAAYNPVTQEVKTSGSSDRLRVRRSTAEAARIIYPPEAQTIIVTKGQSLILECVASGIPPPRVTWAKDGSSVTGYNKTRFLLSNLLIDTTSEEDSGTYRCMADNGVGQPGAAVILYNVQVFEPPEVTMELSQLVIPWGQSAKLTCEVRGNPPPSVLWLRNAVPLISSQRLRLSRRALRVLSMGPEDEGVYQCMAENEVGSAHAVVQLRTSRPSITPRLWQDAELATGTPPVSPSKLGNPEQMLRGQPALPRPPTSVGPASPQCPGEKGQGAPAEAPIILSSPRTSKTDSYELVWRPRHEGSGRAPILYYVVKHRKVTNSSDDWTISGIPANQHRLTLTRLDPGSLYEVEMAAYNCAGEGQTAMVTFRTGRRPKPEIMASKEQQIQRDDPGASPQSSSQPDHGRLSPPEAPDRPTISTASETSVYVTWIPRGNGGFPIQSFRVEYKKLKKVGDWILATSAIPPSRLSVEITGLEKGTSYKFRVRALNMLGESEPSAPSRPYVVSGYSGRVYERPVAGPYITFTDAVNETTIMLKWMYIPASNNNTPIHGFYIYYRPTDSDNDSDYKKDMVEGDKYWHSISHLQPETSYDIKMQCFNEGGESEFSNVMICETKARKSSGQPGRLPPPTLAPPQPPLPETIERPVGTGAMVARSSDLPYLIVGVVLGSIVLIIVTFIPFCLWRAWSKQKHTTDLGFPRSALPPSCPYTMVPLGGLPGHQASGQPYLSGISGRACANGIHMNRGCPSAAVGYPGMKPQQHCPGELQQQSDTSSLLRQTHLGNGYDPQSHQITRAPMLLGPCAS

SEQ ID NO: 793882 - protein, 1114 aa, Homo sapiens; identical to SEQ ID NO: 793877

SEQ ID NO: 793883 - protein, 1092 aa, Homo sapiens
MLRGTMTAWRGMRPEVTLACLLLATAGCFADLNEVPQVTVQPASTVQKPGGTVILGCVVEPPRMNVTWRLNGKELNGSDDALGVLITHGTLVITALNNHTVGRYQCVARMPAGAVASVPATVTLANLQDFKLDVQHVIEVDEGNTAVIACHLPESHPKAQVRYSVKQEWLEASRGNYLIMPSGNLQIVNASQEDEGMYKCAAYNPVTQEVKTSGSSDRLRVRRSTAEAARIIYPPEAQTIIVTKGQSLILECVASGIPPPRVTWAKDGSSVTGYNKTRFLLSNLLIDTTSEEDSGTYRCMADNGVGQPGAAVILYNVQVFEPPEVTMELSQLVIPWGQSAKLTCEVRGNPPPSVLWLRNAVPLISSQRLRLSRRALRVLSMGPEDEGVYQCMAENEVGSAHAVVQLRTSRPSITPRLWQDAELATGTPPVSPSKLGNPEQMLRGQPALPRPPTSVGPASPQCPGEKGQGAPAEAPIILSSPRTSKTDSYELVWRPRHEGSGRAPILYYVVKHRKVTNSSDDWTISGIPANQHRLTLTRLDPGSLYEVEMAAYNCAGEGQTAMVTFRTGRRPKPEIMASKEQQIQRDDPGASPQSSSQPDHGRLSPPEAPDRPTISTASETSVYVTWIPRGNGGFPIQSFRVEYKKLKKVGDWILATSAIPPSRLSVEITGLEKGTSYKFRVRALNMLGESEPSAPSRPYVVSGYSGRVYERPVAGPYITFTDAVNETTIMLKWMYIPASNNNTPIHGFYIYYRPTDSDNDSDYKKDMVEGDKYWHSISHLQPETSYDIKMQCFNEGGESEFSNVMICETKARKSSGQPGRLPPPTLAPPQPPLPETIERPVGTGAMVARSSDLPYLIVGVVLGSIVLIIVTFIPFCLWRAWSKQKHTTDLGFPRSALPPSCPYTMVPLGGLPGHQASGQPYLSGISGRACANGIHMNRGCPSAAVGYPGMKPQQHCPGELQQQSDTSSLLRQTHLGNGYDPQSHQITRGPKSSPDEGSFLYTLPDDSTHQLLQPHHDCCQRQEQPAAVGQSGVRRAPDSPVLEAVWDPPFHSGPPCCLGLVPVEEVDSPDSCQRHKESYPLRLERENKEAAT

SEQ ID NO: 793884 - protein, 157 aa, Homo sapiens; identical to SEQ ID NO: 793876

SEQ ID NO: 793885 - protein, 870 aa, Homo sapiens
MLRGTMTAWRGMRPEVTLACLLLATAGCFADLNEVPQVTVQPASTVQKPGGTVILGCVVEPPRMNVTWRLNGKELNGSDDALGVLITHGTLVITALNNHTVGRYQCVARMPAGAVASVPATVTLANLQDFKLDVQHVIEVDEGNTAVIACHLPESHPKAQVRYSVKQEWLEASRGNYLIMPSGNLQIVNASQEDEGMYKCAAYNPVTQEVKTSGSSDRLRVRRSTAEAARIIYPPEAQTIIVTKGQSLILECVASGIPPPRVTWAKDGSSVTGYNKTRFLLSNLLIDTTSEEDSGTYRCMADNGVGQPGAAVILYNVQVFEPPEVTMELSQLVIPWGQSAKLTCEVRGNPPPSVLWLRNAVPLISSQRLRLSRRALRVLSMGPEDEGVYQCMAENEVGSAHAVVQLRTSRPSITPRLWQDAELATGTPPVSPSKLGNPEQMLRGQPALPRPPTSVGPASPQCPGEKGQGAPAEAPIILSSPRTSKTDSYELVWRPRHEGSGRAPILYYVVKHRKVTNSSDDWTISGIPANQHRLTLTRLDPGSLYEVEMAAYNCAGEGQTAMVTFRTGRRPKPEIMASKEQQIQRDDPGASPQSSSQPDHGRLSPPEAPDRPTISTASETSVYVTWIPRGNGGFPIQSFRVEYKKLKKVGDWILATSAIPPSRLSVEITGLEKGTSYKFRVRALNMLGESEPSAPSRPYVVSGYSGRVYERPVAGPYITFTDAVNETTIMLKWMYIPASNNNTPIHGFYIYYRPTDSDNDSDYKKDMVEGDKYWHSISHLQPETSYDIKMQCFNEGGESEFSNVMICETKGEALWVLSPVLVFPAREGRVTIPCACAVLGLFPRKTLCFPNTLRLGHVSLSTHLSVPNTK

SEQ ID NO: 793886 - protein, 787 aa, Homo sapiens
MLRGTMTAWRGMRPEVTLACLLLATAGCFADLNEVPQVTVQPASTVQKPGGTVILGCVVEPPRMNVTWRLNGKELNGSDDALGVLITHGTLVITALNNHTVGRYQCVARMPAGAVASVPATVTLANLQDFKLDVQHVIEVDEGNTAVIACHLPESHPKAQVRYSVKQEWLEASRGNYLIMPSGNLQIVNASQEDEGMYKCAAYNPVTQEVKTSGSSDRLRVRRSTAEAARIIYPPEAQTIIVTKGQSLILECVASGIPPPRVTWAKDGSSVTGYNKTRFLLSNLLIDTTSEEDSGTYRCMADNGVGQPGAAVILYNVQVFEPPEVTMELSQLVIPWGQSAKLTCEVRGNPPPSVLWLRNAVPLISSQRLRLSRRALRVLSMGPEDEGVYQCMAENEVGSAHAVVQLRTSRPSITPRLWQDAELATGTPPVSPSKLGNPEQMLRGQPALPRPPTSVGPASPQCPGEKGQGAPAEAPIILSSPRTSKTDSYELVWRPRHEGSGRAPILYYVVKHRKVTNSSDDWTISGIPANQHRLTLTRLDPGSLYEVEMAAYNCAGEGQTAMVTFRTGRRPKPEIMASKEQQIQRDDPGASPQSSSQPDHGRLSPPEAPDRPTISTASETSVYVTWIPRGNGGFPIQSFRVEYKKLKKVGDWILATSAIPPSRLSVEITGLEKGTSYKFRVRALNMLGESEPSAPSRPYVVSGYSGRVYERPVAGPYITFTDAVNETTIMLKWMYIPASNNNTPIHVPGTWFITSMREQQGARYHSLETPTQMAGSGATGNIFLRCP

SEQ ID NO: 793887 - protein, 123 aa, Homo sapiens [sequence omitted]

SEQ ID NO: 793888 - protein, 122 aa, Homo sapiens
TNNDASMTNFLLATMSAGYISIIICASNISTCRRSSCHNNSSVHSISTFRERSGHNGKTVASSVNTSICKRRNSCNWNSIIRNSIISTCMRGSSYISNISTSASISSICLNRSTYIINSSTS

SEQ ID NO: 793889 - protein, 182 aa, Homo sapiens
YLRVLKEMIRGDLAGHFPGAKINVYTPGMLLGGTKRLTYMFCQIGEVNNPLGCQDTLFYSEVNFVSVEATVEVKWKPPLGTGCLCSCSTISVYCNEWGRRAAGYPECWNPSERKMESGGISSTTKTSSENGSCCFEKAARQVLILLLRLEYSGTIMANCSLELLGSGNPSVSASSEAGTSGG

SEQ ID NO: 793890 - protein, 235 aa, Homo sapiens
MSGGGEQLDILSVGILVKERWKVLRKIGGGGFGEIYDALDMLTRENVALKVESAQQPKQVLKMEVAVLKKLQGKDHVCRFIGCGRNDRFNYVVMQLQGRNLADLRRSQSRGTFTISTTLRLGRQILESIESIHSVGFLHRDIKPSNFAMGRFPSTCRKCYMLDFGLARQFTNSCGDVRPPRAVAGFRGTVRYASINAHRNREMGRHDDLWSLFYMLVEFVVGQLPWRKIKDKVIL

SEQ ID NO: 793891 - protein, 200 aa, Homo sapiens
MSGGGEQLDILSVGILVKERWKVLRKIGGGGFGEIYDALDMLTRENVALKVESAQQPKQVLKMEVAVLKKLQGKDHVCRFIGCGRNDRFNYVVMQLQGRNLADLRRSQSRGTFTISTTLRLGRQILESIESIHSVGFLHRDIKPPRAVAGFRGTVRYASINAHRNREMGRHDDLWSLFYMLVEFVVGQLPWRKIKDKVIL

SEQ ID NO: 793892 - protein, 183 aa, Homo sapiens
MSGGGEQLDILSVGILVKERWKVGKCCTEGGISSTTKTSSENGSCCFEKAARVGIWQIFAVASPEAHSPLVPLSGWVDRFWSLLKAFILWDSCIETSNRRTSLWVAFLVHVGNVTCLILAWLDNLPIPVVTSDHLELWQVFEGQFVMHQSTHIGTGKWEDMMTFGPYSTCWWSLWLVSCPGEK

SEQ ID NO: 793893 - protein, 288 aa, Homo sapiens
MGAVGTRRRRRQEGDWTRALLQKPLRPPRPRLNGNHPWELDACVAVLPYQCIAMSGGGEQLDILSVGILVKERWKVLRKIGGGGFGEIYDALDMLTRENVALKVESAQQPKQVLKMEVAVLKKLQGKDHVCRFIGCGRNDRFNYVVMQLQGRNLADLRRSQSRGTFTISTTLRLGRQILESIESIHSVGFLHRDIKPSNFAMGRFPSTCRKCYMLDFGLARQFTNSCGDVRPPRAVAGFRGTVRYASINAHRNREMGRHDDLWSLFYMLVEFVVGQLPWRKIKDKVIL

SEQ ID NO: 793894 - protein, 705 aa, Homo sapiens
MSDKLKKDLCYHNSDSPEYQDSSFSLIVAFTDAKYVFLGVSVRVLPKESSELGKADPPQCGWATSNRLPARINQAGEDGRADLLNLPAFIFLVCWMLPALKHQTPGSSSFGLSDLHQWFTRCSQAFSHTLKAEIVGFPTFEILKLGLSYCWLPCFSTYRWDFTYRSSKVDFESWTNQNSCPPVVPRLDLGSLVDSDDEDQNIIPENLPAPTDKCKLKYQQCKTEIKEGYKQYSQRNAENTKSNVTHKQSPRNKIDEKCVQDEEANTDDLTTLDRKAILQQGYADNSCDKQQRARKFDAEVVSIFTYLEIVAAEKKKQIVAEQVMIDHLSRAVISDPEQNLAIEQKESDHILPDSKMTPLRFRKRTLHETKIRTHSTLTENVLSHKLQFDGRIVSRNGRDACRELIGFFFTHDQSLTIYEYRQFGKNRTNVLPFIQKSIYSHQCGRRKGKQYRLGDFYVGATLTFLSSDHLSLPESIKENTLLKLRITNIDQIALDSLKTASMEQEDDIIIQETNDRLVFKAIQDVLKEKLHKRGVRILTGLGKYFQQLDKEGNGLLDKADFKQALKVFHLEVSEKDFESAWLILNDNGNGKVDYGEFKRGIIGEMNEYRKSYVRKAFMKLDFNKSGSVPIINIRKCYCAKKHSQVISGHSTEEEIKSSFLETLKVACSKSDEVSYGEFEDYYEGLSIGIVDDEDFVNILRTPWGI

SEQ ID NO: 793895 - protein, 128 aa, Homo sapiens
APASWHIPGSALQEEGQERSQMSLTIRKAHHLQDHSQAQGRLDLLPNCMLHAKEVKPPNDTDFLPLRALSLRTWSCWSPWKQKLLFTTSSSLFLAPHPSSFLPLLTPTCPPLYFLSSIFIPNFLSHLP

SEQ ID NO: 793896 - protein, 151 aa, Homo sapiens
TARRKSPCRTESCGTSAVALLTQVRSSDTVTPARRSPALVRSSDTVTPARRSPALVRSSDTVTPARRSPALGWVRAGTWASHSLRCGPASNSSLLGVMLKGVLDTSEVSVSSRSHPAYRIVLLWIKQDTAVLPYPWFCFPWPKILNRKFQK

SEQ ID NO: 793897 - protein, 82 aa, Homo sapiens
KIQKPSEDSQDNPEGKRESLREFQEKSHSRKTAASRKPEEGRGPTLSSHSDQLNEELNQKEPQQDQESEETSTISSVSLDSQ

SEQ ID NO: 793898 - protein, 76 aa, Homo sapiens
RCLLEAKAEASITWGVVSVWLKNGSRGPRECDCGNDGEAGRAGWRGKLEGTASRFQFVKNHLKDVSLKGKWASVKG

SEQ ID NO: 793899 - protein, 89 aa, Homo sapiens
KNPVEQLLFAYKLLDRAIGGINLNCMLTSLPNGSSVIDHCYAKRTHHIDGDTYKPLASNSFMMDLHLELIQAQHRIAVVLLDKLQGSSH

SEQ ID NO: 793900 - protein, 159 aa, Homo sapiens
KNPVEQLLFAYKLLDRAIGGINLNCMLTSLPNGSSVIDHCYAKRTHHIDGDTYKPLASNSFMMDLHLELIQAQHRIAVVLLDKLQVLQTPTVSKDISTKGPEKLKQSGSTDCFTELNIMNKIKKNTLSKAIYLMQKALLIFEKDATSTSSWELLMIHYI

SEQ ID NO: 793901 - protein, 155 aa, Homo sapiens
  misc_feature (1)..(1): Xaa can be any naturally occurring amino acid
XYKNSRKVAREHTISKKCRGVVIFSFLRMHSNQWKNADIMQDFIIFGKSILIILSLHSINSDIHFVESAIETSKTRPSFRSFNSRNNYGEIGVLQIAWALSSKKQRGIVCILRYWQDEKINLTYRMDWGRGELKTHKIIMGLLLIISTVKMERKK

SEQ ID NO: 793902 - protein, 155 aa, Homo sapiens; identical to SEQ ID NO: 793901
  misc_feature (1)..(1): Xaa can be any naturally occurring amino acid

SEQ ID NO: 793903 - protein, 86 aa, Homo sapiens
LGLLDGQKVTVSTERPWAPSKPAASHRAAASIGAAGWARGLHALLLRGALDALGVKHMLGFLGFRSSTIKSVKWLNRKFASDDRFK

SEQ ID NO: 793904 - protein, 116 aa, Homo sapiens
RARALAGALRLPGSPCSLLGPRAQGPLRAELKPRRAAHGGSDPRASAFPLRRPPDPHLFSKLHSRLFFPAPGKLWKPAPPALRSGLAGVIHPFQVCGANTDAKISPRVCNNFQAER

SEQ ID NO: 793905 - protein, 107 aa, Homo sapiens
KARTPGDAHRPAHAGASEKGRRERARGLTRLGSAERMLSPAALPAGRGSRRSEAGGGALKQPPLTGAGSAAAAALSARALLKPGLACAAAPRRRRRLLCSSLSSSGR

SEQ ID NO: 793906 - protein, 121 aa, Homo sapiens
HIWMRRGVREPRAGREAFCILSWAVVTQVRTDTDKEGREGAACRGRSLPYRAGRSLHRCAQIWMRRGVREPRAGQQVLYILSWVVIAQVRTDTKIYQVVHSRFVNFILCKLYLKKEKKRKS

SEQ ID NO: 793907 - protein, 80 aa, Homo sapiens
ADEPVPFKAEMLQDNTKSSAQPENLIPMWSSDIVTGEKNEPVKPLQPLIKEQKPKDQSLALSPKLECSGTILAHSISALE

SEQ ID NO: 793908 - protein, 134 aa, Homo sapiens
TSILRKMHNMSKVTEVLETKWDARSQTQPQIWCSNHTRSSPHHSLSSTSPQLDKEEVHPSVTVVIGADLLEKNLAEIQNLRQRLEESISLNDRLRERLQHVLSNGDQGKGTAQSTVAPHSYTQSHSSGCGEDIL

SEQ ID NO: 793909 - protein, 102 aa, Homo sapiens
NSVLSATAANCYMCWISLVFPSSSTLLLPTKLTRMDHSSGLLCLLASEWVWPRSVLARDQRMVGCLFSALLLGLGGCLSSQRSLLPNSFPAFQVASPCTLPF

SEQ ID NO: 793910 - protein, 99 aa, Homo sapiens
MLEVNEENVSWGLLTNCSPHPNPPDGQGCVQGSGHKAPLAGQQLAHETALSAPPLNGSSMGSWKNTGAFSVSLLRSLAELQKYTTGNFSGTEMGPPPNT

SEQ ID NO: 793911 - protein, 67 aa, Homo sapiens
RTVGKPQALSEGFCRQSRRREEDIPTSPSLSPRFRTSTLQRAFGFCFSISEDWARHPPGSPRRRCSS

SEQ ID NO: 793912 - protein, 104 aa, Homo sapiens
MVVFVSVRRLDANHITSVPEDSFEGLVQLRHLWLDDNSLTEVPVHPLSNLPTLQALTLALNKISSIPDFAFTNLSSLVVLHLHNNKIRSLSQHCFDGLDNLETL

SEQ ID NO: 793913 - protein, 951 aa, Homo sapiens
MPGPLGLLCFLALGLLGSAGPSGAAPPLCAAPCSCDGDRRVDCSGKGLTAVPEGLSAFTQALDISMNNITQLPEDAFKNFPFLEELQLAGNDLSFIHPKALSGLKELKVLTLQNNQLKTVPSEAIRGLSALQSLRLDANHITSVPEDSFEGLVQLRHLWLDDNSLTEVPVHPLSNLPTLQALTLALNKISSIPDFAFTNLSSLVVLHLHNNKIRSLSQHCFDGLDNLETLDLSYNNLGEFPQAIKARPSLKELGFHSNSISVIPDGAFDGNPLLRTIHLYDNPLSFVGNSAFHNLSDLHSLVIRGASMVQQFPNLTGTVHLESLTLTGTKISSIPNNLCQEQKMLRTLDLSYNNIRDLPSFNGCHALEEISLQRNQIYQIKEGTFQGLISLRILDLSRNLIHEIHSRAFATLGPITNLDVSFNELTSFPTEGLNGLNQLKLVGNFKLKEALAAKDFVNLRSLSVPYAYQCCAFWGCDSYANLNTEDNSLQDHSVAQEKGTADAANVTSTLENEEHSQIIIHCTPSTGAFKPCEYLLGSWMIRLTVWFIFLVALFFNLLVILTTFASCTSLPSSKLFIGLISVSNLFMGIYTGILTFLDAVSWGRFAEFGIWWETGSGCKVAGFLAVFSSESAIFLLMLATVERSLSAKDIMKNGKSNHLKQFRVAALLAFLGATVAGCFPLFHRGEYSASPLCLPFPTGETPSLGFTVTLVLLNSLAFLLMAVIYTKLYCNLEKEDLSENSQSSMIKHVAWLIFTNCIFFCPVAFFSFAPLITAISISPEIMKSVTLIFFPLPACLNPVLYVFFNPKFKEDWKLLKRRVTKKSGSVSVSISSQGGCLEQDFYYDCGMYSHLQGNLTVCDCCESFLLTKPVSCKHLIKSHSCPALAVASCQRPEGYWSDCGTQSAHSDYADEEDSFVSDSSDQVQACGRACFYQSRGFPLVRYAYNLPRVKD

SEQ ID NO: 793914 - protein, 951 aa, Homo sapiens; identical to SEQ ID NO: 793913

SEQ ID NO: 793915 - protein, 903 aa, Homo sapiens
MPGPLGLLCFLALGLLGSAGPSGAAPPLCAAPCSCDGDRRVDCSGKGLTAVPEGLSAFTQALDISMNNITQLPEDAFKNFPFLEELRLDANHITSVPEDSFEGLVQLRHLWLDDNSLTEVPVHPLSNLPTLQALTLALNKISSIPDFAFTNLSSLVVLHLHNNKIRSLSQHCFDGLDNLETLDLSYNNLGEFPQAIKARPSLKELGFHSNSISVIPDGAFDGNPLLRTIHLYDNPLSFVGNSAFHNLSDLHSLVIRGASMVQQFPNLTGTVHLESLTLTGTKISSIPNNLCQEQKMLRTLDLSYNNIRDLPSFNGCHALEEISLQRNQIYQIKEGTFQGLISLRILDLSRNLIHEIHSRAFATLGPITNLDVSFNELTSFPTEGLNGLNQLKLVGNFKLKEALAAKDFVNLRSLSVPYAYQCCAFWGCDSYANLNTEDNSLQDHSVAQEKGTADAANVTSTLENEEHSQIIIHCTPSTGAFKPCEYLLGSWMIRLTVWFIFLVALFFNLLVILTTFASCTSLPSSKLFIGLISVSNLFMGIYTGILTFLDAVSWGRFAEFGIWWETGSGCKVAGFLAVFSSESAIFLLMLATVERSLSAKDIMKNGKSNHLKQFRVAALLAFLGATVAGCFPLFHRGEYSASPLCLPFPTGETPSLGFTVTLVLLNSLAFLLMAVIYTKLYCNLEKEDLSENSQSSMIKHVAWLIFTNCIFFCPVAFFSFAPLITAISISPEIMKSVTLIFFPLPACLNPVLYVFFNPKFKEDWKLLKRRVTKKSGSVSVSISSQGGCLEQDFYYDCGMYSHLQGNLTVCDCCESFLLTKPVSCKHLIKSHSCPALAVASCQRPEGYWSDCGTQSAHSDYADEEDSFVSDSSDQVQACGRACFYQSRGFPLVRYAYNLPRVKD

SEQ ID NO: 793916 - protein, 933 aa, Homo sapiens
MPGPLGLLCFLALGLLGSAGPSGAAPPLCAAPCSCDGDRRVDCSGKGLTAVPEGLSAFTQALDISMNNITQLPEDAFKNFPFLEELQLAGNDLSFIHPKALSGLKELKVLTLQNNQLKTVPSEAIRGLSALQSLRLDANHITSVPEDSFEGLVQLRHLWLDDNSLTEVPVHPLSNLPTLQALTLALNKISSIPDFAFTNLSSLVVLHLHNNKIRSLSQHCFDGLDNLETLDLSYNNLGEFPQAIKARPSLKELGFHSNSISVIPDGAFDGNPLLRTIHLYDNPLSFVGNSAFHNLSDLHSLVIRGASMVQQFPNLTGTVHLESLTLTGTKISSIPNNLCQEQKMLRTLDLSYNNIRDLPSFNGCHALEEISLQRNQIYQIKEGTFQGLISLRILDLSRNLIHEIHSRAFATLGPITNLDVSFNELTSFPTEGLNGLNQLKLVGNFKLKEALAAKDFVNLRSLSVPYAYQCCAFWGCDSYANLNTEDNSLQDHSVAQEKGTADAANVTSTLENEEHSQIIIHCTPSTGAFKPCEYLLGSWMIRLTVWFIFLVALFFNLLVILTTFASCTSLPSSKLFIGLISVSNLFMGIYTGILTFLDAVSWGRFAEFGIWWETGSGCKVAGFLAVFSSESAIFLLMLATVERSLSAKDIMKNGKSNHLKQFRVAALLAFLGATVAGCFPLFHRGEYSASPLCLPFPTGETPSLGFTVTLVLLNSLAFLLMAVIYTKLYCNLEKEDLSENSQSSMIKHVAWLIFTNCIFFCPVAFFSFAPLITAISISPEIMKSVTLIFFPLPACLNPVLYVFFNPKFKEDWKLLKRRVTKDFYYDCGMYSHLQGNLTVCDCCESFLLTKPVSCKHLIKSHSCPALAVASCQRPEGYWSDCGTQSAHSDYADEEDSFVSDSSDQVQACGRACFYQSRGFPLVRYAYNLPRVKD

SEQ ID NO: 793917 - protein, 951 aa, Homo sapiens; identical to SEQ ID NO: 793913

SEQ ID NO: 793918 - protein, 951 aa, Homo sapiens; identical to SEQ ID NO: 793913

SEQ ID NO: 793919 - protein, 951 aa, Homo sapiens; identical to SEQ ID NO: 793913

SEQ ID NO: 793920 - protein, 288 aa, Homo sapiens
SIDPLPRCRATVAGCFPLFHRGEYSASPLCLPFPTGETPSLGFTVTLVLLNSLAFLLMAVIYTKLYCNLEKEDLSENSQSSMIKHVAWLIFTNCIFFCPVAFFSFAPLITAISISPEIMKSVTLIFFPLPACLNPVLYVFFNPKFKEDWKLLKRRVTKKSGSVSVSISSQGGCLEQDFYYDCGMYSHLQGNLTVCDCCESFLLTKPVSCKHLIKSHSCPALAVASCQRPEGYWSDCGTQSAHSDYADEEDSFVSDSSDQVQACGRACFYQSRGFPLVRYAYNLPRVKD

SEQ ID NO: 793921 - protein, 951 aa, Homo sapiens; identical to SEQ ID NO: 793913

SEQ ID NO: 793922 - protein, 951 aa, Homo sapiens; identical to SEQ ID NO: 793913

SEQ ID NO: 793923 - protein, 951 aa, Homo sapiens; identical to SEQ ID NO: 793913

SEQ ID NO: 793924 - protein, 951 aa, Homo sapiens; identical to SEQ ID NO: 793913

SEQ ID NO: 793925 - protein, 230 aa, Homo sapiens [sequence omitted]

SEQ ID NO: 793926 - protein, 110 aa, Homo sapiens
MPGPLGLLCFLALGLLGSAGPSGAAPPLCAAPCSCDGDRRVDCSGKGLTAVPEGLSAFTQALDISMNNITQLPEDAFKNFPFLEELQLAGNDLSFIHPKALSGLKELKVL

SEQ ID NO: 793927 - protein, 115 aa, Homo sapiens
FLDIFTDICMIILCLLWGTQHFTIYLIFIPCKYVNLKTNLDIYTVVLVENKNLLLELQKTKSLKFFSPLGRIYNCSYFCEYFATLSYFQVHSRDETSFIFSYSCTVILNCLKHKI

SEQ ID NO: 793928 - protein, 87 aa, Homo sapiens
MKVLRAWLLCLLMLGLALRGAASRTHRHSMEIRTPDINPAWYASRGIRPVGRFGRRRATLGDVPKPGLRPRLTCFPLEGGAMSSQDG

SEQ ID NO: 793929 - protein, 243 aa, Homo sapiens
MESSAKIKREPPEIHRAGMVPSRSCPSITHGPRLSSVPRTRRRAVHISIMEGLESLRDSAHSTPVRSTSHGDTFLPHVRSSRTDSNERVAVIADEAYSPADSVLPTPVAEHSLELMLLSRQINGATCSIEEEKESEASTPTATEVEALGGELRALCQGHSGPEEEQVNKFVLSVLRLLLVTMGLLFVLLLLLIILTESDLDIAFFRDIRQTPEFEQFHYQYFCPLRRWFACKIRSVVSLLIDT

SEQ ID NO: 793930 - protein, 574 aa, Homo sapiens
MLSRLMSGSSRSLEREYSCTVRLLDDSEYTCTIQRDAKGQYLFDLLCHHLNLLEKDYFGIRFVDPDKQRHWLEFTKSVVKQLRSQPPFTMCFRVKFYPADPAALKEEITRYLVFLQIKRDLYHGRLLCKTSDAALLAAYILQAEIGDYDSGKHPEGYSSKFQFFPKHSEKLERKIAEIHKTELSGQTPATSELNFLRKAQTLETYGVDPHPCKDVSGNAAFLAFTPFGFVVLQGNKRVHFIKWNEVTKLKFEGKTFYLYVSQKEEKKIILTYFAPTPEACKHLWKCGIENQAFYKLEKSSQVRTVSSSNLFFKGSRFRYREIVTGRVAKEVMESSAKIKREPPEIHRAGMVPSRSCPSITHGPRLSSVPRTRRRAVHISIMEGLESLRDSAHSTPVRSTSHGDTFLPHVRSSRTDSNERVAVIADEAYSPADSVLPTPVAEHSLELMLLSRQINGATCSIEEEKESEASTPTATEVEALGGELRALCQGHSGPEEEQVNKFVLSVLRLLLVTMGLLFVLLLLLIILTESDLDIAFFRDIRQTPEFEQFHYQYFCPLRRWFACKIRSVVSLLIDT

SEQ ID NO: 793931 - protein, 574 aa, Homo sapiens
MVQVLMSGSSRSLEREYSCTVRLLDDSEYTCTIQRDAKGQYLFDLLCHHLNLLEKDYFGIRFVDPDKQRHWLEFTKSVVKQLRSQPPFTMCFRVKFYPADPAALKEEITRYLVFLQIKRDLYHGRLLCKTSDAALLAAYILQAEIGDYDSGKHPEGYSSKFQFFPKHSEKLERKIAEIHKTELSGQTPATSELNFLRKAQTLETYGVDPHPCKDVSGNAAFLAFTPFGFVVLQGNKRVHFIKWNEVTKLKFEGKTFYLYVSQKEEKKIILTYFAPTPEACKHLWKCGIENQAFYKLEKSSQVRTVSSSNLFFKGSRFRYRKIVTGRVAKEVMESSAKIKREPPEIHRAGMVPSRSCPSITHGPRLSSVPRTRRRAVHISIMEGLESLRDSAHSTPVRSTSHGDTFLPHVRSSRTDSNERVAVIADEAYSPADSVLPTPVAEHSLELMLLSRQINGATCSIEEEKESEASTPTATEVEALGGELRALCQGHSGPEEEQVNKFVLSVLRLLLVTMGLLFVLLLLLIILTESDLDIAFFRDIRQTPEFEQFHYQYFCPLRRWFACKIRSVVSLLIDT

SEQ ID NO: 793932 - protein, 301 aa, Homo sapiens
MLSRLMSGSSRSLEREYSCTVRLLDDSEYTCTIQRDAKGQYLFDLLCHHLNLLEKDYFGIRFVDPDKQRHWLEFTKSVVKQLRSQPPFTMCFRVKFYPADPAALKEEITRYLVFLQIKRDLYHGRLLCKTSDAALLAAYILQAEIGDYDSGKHPEGYSSKFQFFPKHSEKLERKIAEIHKTELSGQTPATSELNFLRKAQTLETYGVDPHPCKVRPPGWRLHDLSSSRRHQEQEPPCLRSEAPFNVYMAGTFSEISEKMPALKTPLDHMLHNFVVPHQCQRNRGKVNLNNKSKARAPQWVI

SEQ ID NO: 793933 - protein, 51 aa, Homo sapiens
MLSRLMSGSSRSLEREYSCTVRLLDDSEYTCTIQVSAAPPRPARGTPLSPK

SEQ ID NO: 793934 - protein, 54 aa, Homo sapiens
MCQCLVLRLGEREGSAGEMVMGHSLGDKRVGMICGADIEVQGKRVTPSCSVLRK

SEQ ID NO: 793935 - protein, 109 aa, Homo sapiens
LVVVHCSAGIGHTGRFIVINSLIDIIREKGINCNIDLLKTIHTVQSQRSGMAQTEAQYRFIYMAVQHYIETLQHKIEEEQKSKRKGHEYKNIKYSLADQTSGAQSPLPP

SEQ ID NO: 793936 - protein, 109 aa, Homo sapiens
KRSISVEVTRFSRCRLSPLSLTRKGNSLNPCASRVRQCLTLFGSRSVLHPLSCAHSLALPSEMNPVPQMEMQKSPVFCVTHAGSCRPELFLFGHLGCPQKIKILRKGHC

SEQ ID NO: 793937 - protein, 129 aa, Homo sapiens
VAGWKRLPQITGQLPASLSLLRPRERAGGREASPISTLNWGCFLVTHLPDFLQQTTLNSSVPPSSRGDIPVGKGRRLEGGCPARAVQGDPRTGDAGCTAQGRTNRTFCLQAFVIKEIGVSQGNSSSDEQ

SEQ ID NO: 793938 - protein, 83 aa, Homo sapiens
AVAQATHCILCILCSSHFPTSVSLVAGTAGMHPYAQLIFVETEYRLVAQGGLNSWAQGDLPTSASQSAGLAWEGNFQNVSFGK

SEQ ID NO: 793939 - protein, 924 aa, Homo sapiens
MNFIKDNSRALIQRMGMTVIKQITDDLFVWNVLNREEVNIICCEKVEQDAARGIIHMILKKGSESCNLFLKSLKEWNYPLFQDLNGQSLFHQTSEGDLDDLAQDLKDLYHTPSFLNFYPLGEDIDIIFNLKSTFTEPVLWRKDQHHHRVEQLTLNGLLQALQSPCIIEGESGKGKSTLLQRIAMLWGSGKCKALTKFKFVFFLRLSRAQGGLFETLCDQLLDIPGTIRKQTFMAMLLKLRQRVLFLLDGYNEFKPQNCPEIEALIKENHRFKNMVIVTTTTECLRHIRQFGALTAEVGDMTEDSAQALIREVLIKELAEGLLLQIQKSRCLRNLMKTPLFVVITCAIQMGESEFHSHTQTTLFHTFYDLLIQKNKHKHKGVAASDFIRSLDHCGDLALEGVFSHKFDFELQDVSSVNEDVLLTTGLLCKYTAQRFKPKYKFFHKSFQEYTAGRRLSSLLTSHEPEEVTKGNGYLQKMVSISDITSTYSSLLRYTCGSSVEATRAVMKHLAAVYQHGCLLGLSIAKRPLWRQESLQSVKNTTEQEILKAININSFVECGIHLYQESTSKSALSQEFEAFFQGKSLYINSGNIPDYLFDFFEHLPNCASALDFIKLDFYGGAMASWEKAAEDTGGIHMEEAPETYIPSRAVSLFFNWKQEFRTLEVTLRDFSKLNKQDIRYLGKIFSSATSLRLQIKRCAGVAGSLSLVLSTCKNIYSLMVEASPLTIEDERHITSVTNLKTLSIHDLQNQRLPGGLTDSLGNLKNLTKLIMDNIKMNEEDAIKLAEGLKNLKKMCLFHLTHLSDIGEGMDYIVKSLSSEPCDLEEIQLVSCCLSANAVKILAQNLHNLVKLSILDLSENYLEKDGNEALHELIDRMNVLEQLTALMLPWGCDVQGSLSSLLKHLEEVTTTRQAWVEKLETHRYRD

SEQ ID NO: 793940 - protein, 92 aa, Homo sapiens
MNFIKDNSRALIQRMGMTVIKQITDDLFVWNVLNREEVNIICCEKVEQDAARGIIHMILKKGSESCNLFLKSLKEWNYPLFQDLNGQSLLTA

SEQ ID NO: 793941 - protein, 1024 aa, Homo sapiens
MNFIKDNSRALIQRMGMTVIKQITDDLFVWNVLNREEVNIICCEKVEQDAARGIIHMILKKGSESCNLFLKSLKEWNYPLFQDLNGQSLFHQTSEGDLDDLAQDLKDLYHTPSFLNFYPLGEDIDIIFNLKSTFTEPVLWRKDQHHHRVEQLTLNGLLQALQSPCIIEGESGKGKSTLLQRIAMLWGSGKCKALTKFKFVFFLRLSRAQGGLFETLCDQLLDIPGTIRKQTFMAMLLKLRQRVLFLLDGYNEFKPQNCPEIEALIKENHRFKNMVIVTTTTECLRHIRQFGALTAEVGDMTEDSAQALIREVLIKELAEGLLLQIQKSRCLRNLMKTPLFVVITCAIQMGESEFHSHTQTTLFHTFYDLLIQKNKHKHKGVAASDFIRSLDHCGDLALEGVFSHKFDFELQDVSSVNEDVLLTTGLLCKYTAQRFKPKYKFFHKSFQEYTAGRRLSSLLTSHEPEEVTKGNGYLQKMVSISDITSTYSSLLRYTCGSSVEATRAVMKHLAAVYQHGCLLGLSIAKRPLWRQESLQSVKNTTEQEILKAININSFVECGIHLYQESTSKSALSQEFEAFFQGKSLYINSGNIPDYLFDFFEHLPNCASALDFIKLDFYGGAMASWEKAAEDTGGIHMEEAPETYIPSRAVSLFFNWKQEFRTLEVTLRDFSKLNKQDIRYLGKIFSSATSLRLQIKRCAGVAGSLSLVLSTCKNIYSLMVEASPLTIEDERHITSVTNLKTLSIHDLQNQRLPGGLTDSLGNLKNLTKLIMDNIKMNEEDAIKLAEGLKNLKKMCLFHLTHLSDIGEGMDYIVKSLSSEPCDLEEIQLVSCCLSANAVKILAQNLHNLVKLSILDLSENYLEKDGNEALHELIDRMNVLEQLTALMLPWGCDVQGSLSSLLKHLEEVPQLVKLGLKNWRLTDTEIRILGAFFGKNPLKNFQQLNLAGNRVSSDGWLAFMGVFENLKQLVFFDFSTKEFLPDPALVRKLSQVLSKLTFLQEARLVGWQFDDDDLSVITGAFKLVTA

SEQ ID NO: 793942 - protein, 1024 aa, Homo sapiens; identical to SEQ ID NO: 793941

SEQ ID NO: 793943 - protein, 924 aa, Homo sapiens
MNFIKDNSRALIQRMGMTVIKQITDDLFVWNVLNREEVNIICCEKVEQDAARGIIHMILKKGSESCNLFLKSLKEWNYPLFQDLNGQSLFHQTSEGDLDDLAQDLKDLYHTPSFLNFYPLGEDIDIIFNLKSTFTEPVLWRKDQHHHRVEQLTLNGLLQALQSPCIIEGESGKGKSTLLQRIAMLWGSGKCKALTKFKFVFFLRLSRAQGGLFETLCDQLLDIPGTIRKQTFMAMLLKLRQRVLFLLDGYNEFKPQNCPEIEALIKENHRFKNMVIVTTTTECLRHIRQFGALTAEVGDMTEDSAQALIREVLIKELAEGLLLQIQKSRCLRNLMKTPLFVVITCAIQMGESEFHSHTQTTLFHTFYDLLIQKNKHKHKGVAASDFIRSLDHCGDLALEGVFSHKFDFELQDVSSVNEDVLLTTGLLCKYTAQRFKPKYKFFHKSFQEYTAGRRLSSLLTSHEPEEVTKGNGYLQKMVSISDITSTYSSLLRYTCGSSVEATRAVMKHLAAVYQHGCLLGLSIAKRPLWRQESLQSVKNTTEQEILKAININSFVECGIHLYQESTSKSALSQEFEAFFQGKSLYINSGNIPDYLFDFFEHLPNCASALDFIKLDFYGGAMASWEKAAEDTGGIHMEEAPETYIPSRAVSLFFNWKQEFRTLEVTLRDFSKLNKQDIRYLGKIFSSATSLRLQIKRCAGVAGSLSLVLSTCKNIYSLMVEASPLTIEDERHITSVTNLKTLSIHDLQNQRLPGGLTDSLGNLKNLTKLIMDNIKMNEEDAIKLAEGLKNLKKMCLFHLTHLSDIGEGMDYIVKSLSSEPCDLEEIQLVSCCLSANAVKILAQNLHNLVKLSILDLSENYLEKDGNEALHELIDRMNVLEQLTALMLPWGCDVQGSLSSLLKHLEEVPQLVKLGLKNWRLTDTEI

SEQ ID NO: 793944 - protein, 156 aa, Homo sapiens
MNFIKDNSRALIQRMGMTVIKQITDDLFVWNVLNREEVNIICCEKVEQDAARGIIHMILKKGSESCNLFLKSLKEWNYPLFQDLNGQSLFHQTSEGDLDDLAQDLKDLYHTPSFLNFYPLGEDIDIIFNLKSTFTEPVLWRKDQHHHRVEQLTLVL

SEQ ID NO: 793945 - protein, 841 aa, Homo sapiens
MLWGSGKCKALTKFKFVFFLRLSRAQGGLFETLCDQLLDIPGTIRKQTFMAMLLKLRQRVLFLLDGYNEFKPQNCPEIEALIKENHRFKNMVIVTTTTECLRHIRQFGALTAEVGDMTEDSAQALIREVLIKELAEGLLLQIQKSRCLRNLMKTPLFVVITCAIQMGESEFHSHTQTTLFHTFYDLLIQKNKHKHKGVAASDFIRSLDHCGDLALEGVFSHKFDFELQDVSSVNEDVLLTTGLLCKYTAQRFKPKYKFFHKSFQEYTAGRRLSSLLTSHEPEEVTKGNGYLQKMVSISDITSTYSSLLRYTCGSSVEATRAVMKHLAAVYQHGCLLGLSIAKRPLWRQESLQSVKNTTEQEILKAININSFVECGIHLYQESTSKSALSQEFEAFFQGKSLYINSGNIPDYLFDFFEHLPNCASALDFIKLDFYGGAMASWEKAAEDTGGIHMEEAPETYIPSRAVSLFFNWKQEFRTLEVTLRDFSKLNKQDIRYLGKIFSSATSLRLQIKRCAGVAGSLSLVLSTCKNIYSLMVEASPLTIEDERHITSVTNLKTLSIHDLQNQRLPGGLTDSLGNLKNLTKLIMDNIKMNEEDAIKLAEGLKNLKKMCLFHLTHLSDIGEGMDYIVKSLSSEPCDLEEIQLVSCCLSANAVKILAQNLHNLVKLSILDLSENYLEKDGNEALHELIDRMNVLEQLTALMLPWGCDVQGSLSSLLKHLEEVPQLVKLGLKNWRLTDTEIRILGAFFGKNPLKNFQQLNLAGNRVSSDGWLAFMGVFENLKQLVFFDFSTKEFLPDPALVRKLSQVLSKLTFLQEARLVGWQFDDDDLSVITGAFKLVTA

SEQ ID NO: 793946 - protein, 359 aa, Homo sapiens
MNFIKDNSRALIQRMGMTVIKQITDDLFVWNVLNREEVNIICCEKVEQDAARGIIHMILKKGSESCNLFLKSLKEWNYPLFQDLNGQSGLTDSLGNLKNLTKLIMDNIKMNEEDAIKLAEGLKNLKKMCLFHLTHLSDIGEGMDYIVKSLSSEPCDLEEIQLVSCCLSANAVKILAQNLHNLVKLSILDLSENYLEKDGNEALHELIDRMNVLEQLTALMLPWGCDVQGSLSSLLKHLEEVPQLVKLGLKNWRLTDTEIRILGAFFGKNPLKNFQQLNLAGNRVSSDGWLAFMGVFENLKQLVFFDFSTKEFLPDPALVRKLSQVLSKLTFLQEARLVGWQFDDDDLSVITGAFKLVTA

SEQ ID NO: 793947 - protein, 245 aa, Homo sapiens
RLRPLVQAELSVLVDVLHRPELLFPENTDARRKCESGGFICKLIKHTKQLLEENEEKLCIKVLQTLREMMTKDRGYGEKGEALRQVLVNRYYGNVRPSGRRESLTSFGNGPLSAGGPGKPGGGGGGSGSSSMSRGEMSLAEVQCHLDKEGASNLVIDLIMNASSDRVFHESILLAIALLEGGNTTIQHSFFCRLTEDKKSEKFFKVFYDRMKVAQQEIKATVTVNTSDLGNKKKDDEVDRDAPSR

SEQ ID NO: 793948 - protein, 544 aa, Homo sapiens
MDSRYLQLQLYLPSCSLLQGSGDSSLEKEFLGAPVGPSVSTPNSQHSSPSRSLSANSIKVEMYSDEESSRLLGPDERLLEKDDSVIVEDSLSEPLGYCDGSGPEPHSPGGIRLPNGKLKCDVCGMVCIGPNVLMVHKRSHTGERPFHCNQCGASFTQKGNLLRHIKLHSGEKPFKCPFCNYACRRRDALTGHLRTHSVSSPTVGKPYKCNYCGRSYKQQSTLEEHKERCHNYLQSLSTEAQALAGQPGDEIRDLEMVPDSMLHSSSERPTFIDRLANSLTKRKRSTPQKFVGEKQMRFSLSDLPYDVNSGGYEKDVELVAHHSLEPGFGSSLAFVGAEHLRPLRLPPTNCISELTPVISSVYTQMQPLPGRLELPGSREAGEGPEDLADGGPLLYRPRGPLTDPGASPSNGCQDSTDTESNHEDRVAGVVSLPQGPPPQPPPTIVVGRHSPAYAKEDPKPQEGLLRGTPGPSKEVLRVVGESGEPVKAFKCEHCRILFLDHVMFTIHMGCHGFRDPFECNICGYHSQDRYEFSSHIVRGEHKVG

SEQ ID NO: 793949 - protein, 483 aa, Homo sapiens
MYSDEESSRLLGPDERLLEKDDSVIVEDSLSEPLGYCDGSGPEPHSPGGIRLPNGKLKCDVCGMVCIGPNVLMVHKRSHTGERPFHCNQCGASFTQKGNLLRHIKLHSGEKPFKCPFCNYACRRRDALTGHLRTHSVSSPTVGKPYKCNYCGRSYKQQSTLEEHKERCHNYLQSLSTEAQALAGQPGDEIRDLEMVPDSMLHSSSERPTFIDRLANSLTKRKRSTPQKFVGEKQMRFSLSDLPYDVNSGGYEKDVELVAHHSLEPGFGSSLAFVGAEHLRPLRLPPTNCISELTPVISSVYTQMQPLPGRLELPGSREAGEGPEDLADGGPLLYRPRGPLTDPGASPSNGCQDSTDTESNHEDRVAGVVSLPQGPPPQPPPTIVVGRHSPAYAKEDPKPQEGLLRGTPGPSKEVLRVVGESGEPVKAFKCEHCRILFLDHVMFTIHMGCHGFRDPFECNICGYHSQDRYEFSSHIVRGEHKVG

SEQ ID NO: 793950 - protein, 532 aa, Homo sapiens
MESLFCESSGDSSLEKEFLGAPVGPSVSTPNSQHSSPSRSLSANSIKVEMYSDEESSRLLGPDERLLEKDDSVIVEDSLSEPLGYCDGSGPEPHSPGGIRLPNGKLKCDVCGMVCIGPNVLMVHKRSHTGERPFHCNQCGASFTQKGNLLRHIKLHSGEKPFKCPFCNYACRRRDALTGHLRTHSVSSPTVGKPYKCNYCGRSYKQQSTLEEHKERCHNYLQSLSTEAQALAGQPGDEIRDLEMVPDSMLHSSSERPTFIDRLANSLTKRKRSTPQKFVGEKQMRFSLSDLPYDVNSGGYEKDVELVAHHSLEPGFGSSLAFVGAEHLRPLRLPPTNCISELTPVISSVYTQMQPLPGRLELPGSREAGEGPEDLADGGPLLYRPRGPLTDPGASPSNGCQDSTDTESNHEDRVAGVVSLPQGPPPQPPPTIVVGRHSPAYAKEDPKPQEGLLRGTPGPSKEVLRVVGESGEPVKAFKCEHCRILFLDHVMFTIHMGCHGFRDPFECNICGYHSQDRYEFSSHIVRGEHKVG

SEQ ID NO: 793951 - protein, 532 aa, Homo sapiens; identical to SEQ ID NO: 793950

SEQ ID NO: 793952 - protein, 199 aa, Homo sapiens
MEASPASGPRHLMDPHIFTSNFNNGIGRHKTYLCYEVERLDNGTSVKMDQHRGFLHNQAKNLLCGFYGRHAELRFLDLVPSLQLDPAQIYRVTWFISWSPCFSWGCAGEVRAFLQENTHVRLRIFAARIYDYDPLYKEALQMLRDAGAQVSIMTYDEFKHCWDTFVDHQGCPFQPWDGLDEHSQALSGRLRAILQNQGN

SEQ ID NO: 793953 - protein, 77 aa, Homo sapiens
PVIGTECEHLLPGRPNEGCFHSKTHSHQMLLGRCMEQLPRHSHGALTTWLFGKAVWPHQAQFRKNKYINDSIAQEEK

SEQ ID NO: 793954 - protein, 146 aa, Homo sapiens
MVCACLIASEIFLTAEERLYYFGERRTDKTNGTKYQGVETPSQNRYVGYFAQVKHSYNWNLPPRKTLFIKRLVIYSIHGVGTGDGYDLKVQIVMKKKIVFSCTSLNSCRVFHDTETDRVIIDVFNCPPLYDDVKVQASSSALSTKK

SEQ ID NO: 793955 - protein, 119 aa, Homo sapiens
ASQHCSSACYSSEGTCLLARTLSGPRNLASVCPRVSTLPPAGAPRAPKPGRRPLRAGRFQTAPVQRHPSFGFLHPASASAPESDKQKRFSATQGLVCYTQNVPGTGTKVFYKIINFYGL

SEQ ID NO: 793956 - protein, 103 aa, Homo sapiens
ASQHCSSACYSSEGTCLLARTLSGPRNLASVCPRVSTLPPAGAPRAPKPGRRPLRAGRFQTAPVQRHPSFGFLHPASASAPESDKQKRFSATQGLLPPWDDTA

SEQ ID NO: 793957 - protein, 114 aa, Homo sapiens
HFFPSLFHLALPSMAHLIHLCHLHVQVQGQQWYVMLAAVPKHQQSVYCCPSTKPGAVKGEGEGSLGHLTLVSTQNETPGCSPPTYIQDCCLQSLFETSEMSSFPYASPNKVTSI

SEQ ID NO: 793958 - protein, 140 aa, Homo sapiens
MGLDAINDAMLLEVCIYHLLKLYFLEQPYYLDLIELFLQSSYQTEIGQTLDLITAPQGNVDLGRFTEKRYKSIVKYKAAFYSYLPELQPCTAGIDGDKEHANGKKILLEMGEFFQIQDDYLDLFGDPSVTSKVGTDIQDN

SEQ ID NO: 793959 - protein, 75 aa, Homo sapiens
LEQVDQFLKNRKLPELLAEKSQEMLHKLDNVTFTHYLHAPGICDAKNHLQPVNSLCYFNEPVWELAPSFFLSNPL

SEQ ID NO: 793960 - protein, 406 aa, Homo sapiens
MAKYVSLTEANEELKVLMDENQTSRPVAVHTSTVNPLGKQLLPKTFGQSSVNIDQQVVIGYASETSSIKHPCGRKPKPTQHSLCLSEPAFLLLTSLGRAAQQERREEWHGPVPSFHEGLGDGAEERDHFLPRQVVGELVAKFRAASNHASPNESAYDVKNIKRRTYDALNVLMAMNIISREKKKIKWIGLTTNSAQNCQNLRVERQKRLERIKQKQSELQQLILQQIAFKNLVLRNQYVEEQVSQRPLPNSVIHVPFIIISSSKKTVINCSISDDKSEYLFKFNSSFEIHDDTEVLMWMGMTFGLESGSCSAEDLKMARNLVPKALEPYVTEMAQGTFGGVFTTAGSRSNGTWLSASDLTNIAIGMLATSSGGSQYSGSRVETPAVEEEEEEDNNDDDLSENDEDD

SEQ ID NO: 793961 - protein, 111 aa, Homo sapiens
ITFIRFLSSMNSLMFSKGRVHPEGLPTFITFKGFLSSVNSLMLKETCTLIKGFSTFIAFIGFLSTVDILVFGKVCPAHKGFFTNVTFKRFLSSMYSMMMGKVYISDKSFST

SEQ ID NO: 793962 - protein, 83 aa, Homo sapiens
MLVSSSERFFLLLGLKNLLVVVNSRVLGRPPMPHREENFFTHLLILEMSFNQRQVLYFTVRGSMQDPQKRAHGHNSTLVEGLE

SEQ ID NO: 793963 - protein, 50 aa, Homo sapiens
KTHIPMSTNTLTLTSSLIHRHLFPSDAHLLTHLQLLTHACMRGPLHPSVS

SEQ ID NO: 793964 - protein, 52 aa, Homo sapiens
RRRHAPKSPSRDLKEKKEVVEEAENGRDAPANGNANEENGEQEADDVKEMKK

SEQ ID NO: 793965 - protein, 59 aa, Homo sapiens
  misc_feature (42)..(42): Xaa can be any naturally occurring amino acid
RRRHAPKSPSRDLKEKKEVVEEAENGRDAPANGNANEENALXMTSSLMKRRLRPLLEML

SEQ ID NO: 793966 - protein, 150 aa, Homo sapiens
LHLPGSSSPPTSASLVVGTTGTHYHAQLIFCIYGRDAVSPCCPGWSQSNPELKRSACFGLPKCWDYKHEPPCLVLGGIFYNVIRVRLYGNMTCEQSLEGSEIMKPCEYEKNILGQGNNRSKDSKLEEYLLEEQGGLGSWAIVNEWDCSER

SEQ ID NO: 793967 - protein, 171 aa, Homo sapiens
GIGGSCKQKSVVGGRQVSKENVSVKEAQGTGGGFVRQLEPKEGRPSPRKAYVGEGYDGRMSELQPGTTTPWKVQLEKKVSEAVDMGIGCWRNPLLLLIALVLSAKLGHFQRWEGFQQKLMSKKNMNSTLNFFIQSYNNASNDTYLYRVQRLIRSQMQMEFRSCCPRWSAMA

SEQ ID NO: 793968 - protein, 75 aa, Homo sapiens
LLQKSLKWQMLQVGFQSMSVILTCHTAKLTSCPMQEEHTSVACGSMGKTVGCIILCCLDLTAELPFLSPVTHIQE

SEQ ID NO: 793969 - protein, 113 aa, Homo sapiens
LSEGIQYNSLPTRILNSQQRGKKKLMVLLCICLNFYRNVKGVNLLQVQSCAFTKGQERSPKARHDSTGSSLCLPFYTMSDKEAVLSSWASVSCVNSEVSEATMMSLLLKTTVG

SEQ ID NO: 793970 - protein, 68 aa, Homo sapiens
ETPLKPPLSSRTGPLPPYLDSHPPTPAFFCLGSPKVESELTLLGERFFMVFSFIKPNYSLLSRNGNAS

SEQ ID NO: 793971 - protein, 75 aa, Homo sapiens
LKSLVLDAITLTLLQRLYQILRREILPQKRPGNLTSGRISSLWECGIGVIEVNDKDVVFLKLTPDELGEMKPDIL

SEQ ID NO: 793972 - protein, 129 aa, Homo sapiens
MATFPGQVSTYFLAAWTGPGPATHWPLYAQLMPHSGLSRPSSCPGTSSPGPKLPQVGLSRPSCCLPAFSPGLALPPGCIYKTNSCLTTTFYGSAPAQLLPAFVGPKLPQVKLFRPTFCLAVACTDPALA

SEQ ID NO: 793973 - protein, 101 aa, Homo sapiens
  misc_feature (1)..(1): Xaa can be any naturally occurring amino acid
  misc_feature (11)..(12): Xaa can be any naturally occurring amino acid
  misc_feature (15)..(15): Xaa can be any naturally occurring amino acid
  misc_feature (19)..(19): Xaa can be any naturally occurring amino acid
  misc_feature (22)..(22): Xaa can be any naturally occurring amino acid
  misc_feature (24)..(24): Xaa can be any naturally occurring amino acid
XRILSVAHSIXXQLXNVAXHAXRXAWHLSELARSLTHSLENSRILAALRVHPVPTRSWVPCALDTDVLRPDSGITAKFKSQLFQGPGQSAWLLCASISSSV

SEQ ID NO: 793974 - protein, 45 aa, Homo sapiens
GQRSEGVGQGKVVLHVTVPVPTHGWGEGAASKPTVLPPPPPTRCS

SEQ ID NO: 793975 - protein, 49 aa, Homo sapiens
KLPIIDDQIRWTLLHSLHVPQPLSSICTVDPPFLKNSQSGVVGHACNSG

SEQ ID NO: 793976 - protein, 202 aa, Homo sapiens
MSASTSSHRPIKGILKNKSSSGSSVATSGQQSGGTIQDVKRKKSQKWDESSILAAHRATYRDYDLMKANEPGTSYMSVQDNGEDSVRDVEGEDSVRGVEGKEATDASDHSCEVDEQESSEAYMRKILLHKQEKKRQFEMRRRLHYNEELNIKLARQLMWKELQSEDNENEETPQGTNEEKTAAEESEEAPLTGGLQTQSCDP

SEQ ID NO: 793977 - protein, 202 aa, Homo sapiens; identical to SEQ ID NO: 793976

SEQ ID NO: 793978 - protein, 113 aa, Homo sapiens
MSRLMLRRNPSCQRETTVEQQTTSWRQIKKLSQMMDENLRNADKHQNESWYYDSGITIAGVFHYKTGLTQDKHVLLIRPIHTNLGRAIQPACNNPQTQYNDRPDHRLSIQTPH

SEQ ID NO: 793979 - protein, 113 aa, Homo sapiens
MSRLMLRRNPSCQRETTVEQQTTSWRQIKKLSQMMDENLRNADKHQNESWSYDSGITIAGVFHYKTGLTQDKHVLLIRPIHTNLGRAIQPACNNPQTQYNDRPDHRLSIQTPH

SEQ ID NO: 793980 - protein, 72 aa, Homo sapiens
MAGLEHFTIAFQDDSPSQEALTFTGSRHTPAQTQRLWSSRVSSPCLQSEGAGGLLVAARRSSSSPFSARGAC

SEQ ID NO: 793981 - protein, 77 aa, Homo sapiens
QVAYVRARELHTLEVTGLETVAQSKAHVASLEGLIPEDKVVLLAGSPLQNEATLGQCGVEALTTLEVVGRRLGVHNV

SEQ ID NO: 793982 - protein, 151 aa, Homo sapiens
WRSEPSRAAPRRASPKTGRNAAGTCGLARSARACLPAGAQRLRRLRAGVPIKRHPTPSRGPRPAPGCQLPPKRSCLREMHGAGGKARGAPGGSQTLRGREVAPQSQPLEPTQWVGSALTLGLPQSVLSLYYSNYGIFNFLKKIRNRKAQKA

SEQ ID NO: 793983 - protein, 105 aa, Homo sapiens
MLIRPLRWKSIPEDREERRGDLWLSALRPGLSARGGAAAEAAPGRSSNQAPPNSQSGAEASAGMPASPKKILPQGNAWSRRKSPRRPRRIADPKGAGGGAPVPTS

SEQ ID NO: 793984 - protein, 110 aa, Homo sapiens
PFWGRRGWSRVTAGQDPGSRRPEHLLGSARKQPPASRLLQGNRRPGPFLSFTYLCRNQNALSSLSAENISVVPRRQSLLHLSSSPFSLTRTRTLILDSLLSCGLRNHFAA

SEQ ID NO: 793985 - protein, 117 aa, Homo sapiens
GVLRPVAPCPFSRSGRGRQPLRDSTYSQPSLECRGPGRGLQSCDDTCIPGVMEGKGRLWRGWELGYLQACLLTHVLAELVRGGEPPLQPSVGALGSCCWAPAAPGHTSGRRASSHTA

SEQ ID NO: 793986 - protein, 107 aa, Homo sapiens
LKKKEKNNFPVHKRSAFTECKNRFSLLVCKVLSHLTLSAKRALPAPFLPVWAPLPGEAAPWCCPVLPACLPSGSRPEAFGGSVGAPHVPSAQPSAGAEMVLRKDLEK

SEQ ID NO: 793987 - protein, 82 aa, Homo sapiens
YSACCKALPAQAWERGVPYTAVSPEWTQTARGSSPQPRLHSAAQPVPAATIGVLLGTQTTVKVEKLRPSSKKCLVEGHEGRK

SEQ ID NO: 793988 - protein, 107 aa, Homo sapiens
MVGKTFTYLLGSDAAALLFNSKNEDLNAEDVYSRLTTPVFGKGVAYDVPNPVFLEQKKMLKSGLNIAHFKQHVSIIEKETKEYFESWGESGEKNVFEALSEAHNFNS

SEQ ID NO: 793989 - protein, 212 aa, Homo sapiens
MAAAAGMLLLGLLQAGGSVLGQAMEKVTGGNLLSMLLIACAFTLSLVYLIRLAAGHLVQLPAGVKSPPYIFSPIPFLGHAIAFGKSPIEFLENAYEKYGPVFSFTMVGKTFTYLLGSDAAALLFNSKNEDLNAEDVYSRLTTPVFGKGVAYDVPNPVFLEQKKMLKSGLNIAHFKQHVSIIEKETKEYFESWGESGEKNVFEALSEAHNFNS

SEQ ID NO: 793990 - protein, 235 aa, Homo sapiens
  misc_feature (10)..(10): Xaa can be any naturally occurring amino acid
RGGGDERGAXVGIGREAREGSDDWGRGNLLSMLLIACAFTLSLVYLIRLAAGHLVQLPAGVKSPPYIFSPIPFLGHAIAFGKSPIEFLENAYEKYGPVFSFTMVGKTFTYLLGSDAAALLFNSKNEDLNAEDVYSRLTTPVFGKGVAYDVPNPVFLEQKKMLKSGLNIAHFKQHVSIISEQLMKVAVMQLMSQHQLSTSVLASNQTTIESVFIDRRTLEMCFNTSISALLDISLC

SEQ ID NO: 793991 - protein, 269 aa, Homo sapiens
  misc_feature (10)..(10): Xaa can be any naturally occurring amino acid
RGGGDERGAXVGIGREAREGSDDWGRGNLLSMLLIACAFTLSLVYLIRLAAGHLVQLPAGVKSPPYIFSPIPFLGHAIAFGKSPIEFLENAYEKYGPVFSFTMVGKTFTYLLGSDAAALLFNSKNEDLNAEDVYSRLTTPVFGKGVAYDVPNPVFLEQKKMLKSGLNIAHFKQHVSIIEKETKEYFESWGESGEKMHGKEIRSQLNEKVAQLYADLDGGFSHAAWLLPGWLPLPSFRRRDRAHREIKDISIRQSRNADSLQKKFDHILQ

SEQ ID NO: 793992 - protein, 74 aa, Homo sapiens
AWPSGNCSFQLAERSALGGVTLGAPRPRQRGRRAEYAGSHAATGRTPKLLERHSHALLLLPSSKVVQEQFPPIL

SEQ ID NO: 793993 - protein, 33 aa, Homo sapiens
MGKDFMSKTPKAMATKAKIDKWDLIKLKSFCTA

SEQ ID NO: 793994 - protein, 458 aa, Homo sapiens
ERGLETNSCSEEELSSPGRGGGGGGRLLLQPPGPELPPVPFPLQDLVPLGRLSRGEQQQQQQQQPPPPPPPPGPLRPLAGPSRKGSFKIRLSRLFRTKSCNGGSGGGDGTGKRPSGELAASAASLTDMGGSAGRELDAGRKPKLTRTQSAFSPVSFSPLFTGETVSLVDVDISQRGLTSPHPPTPPPPPRRSLSLLDDISGTLPTSVLVAPMGSSLQSFPLPPPPPPHAPDAFPRIAPIRAAESLHSQPPQHLQCPLYRPDSSSFAASLRELEKCGWYWGPMNWEDAEMKLKGKPDGSFLVRDSSDPRYILSLSFRSQGITHHTRMEHYRGTFSLWCHPKFEDRCQSVVEFIKRAIMHSKNGKFLYFLRSRVPGLPPTPVQLLYPVSRFSNVKSLQHLCRFRIRQLVRIDHIPDLPLPKPLISYIRKFYYYDPQEEVYLSLKEAQLISKQKQEVEPST

SEQ ID NO: 793995 - protein, 106 aa, Homo sapiens
WPGSHALLAATRPPMRQRPEASRCWSPTSKVHRPLQATEPKKTGHVKAQEAGSLCLPFLAGAFHAGSKSGKVMPLTAKKAPSRDQSHRHRSPTPETTSLWRTRTPS

SEQ ID NO: 793996 - protein, 87 aa, Homo sapiens
PDVSRSLSARQLARMSESSPESREELESEDSYNGRGQGELSSEDIVESSSPRKRENTVQAKKTGAKPSQARKVNKRKSPPGSNPNLS

SEQ ID NO: 793997 - protein, 68 aa, Homo sapiens
  misc_feature (18)..(18): Xaa can be any naturally occurring amino acid
MALSQTRRTPATQFYPVXRMIRGLGRTSLTYSQTLNGVRSRLLGYKSEVNRIRCCAVVAITPERGGSR

SEQ ID NO: 793998 - protein, 73 aa, Homo sapiens
SSSIKTGQTKGHFPNGWVFLVHLMLPTELPPGDGNAPCQESPLDPASSQSQSPCQTGPRVTLEGDRPNLEISC

SEQ ID NO: 793999 - protein, 161 aa, Homo sapiens
DEFEDLEWSEEVQKLQEQQLRSDLLDQYRSLLVERNRSQRYNLYLQHKIFEALRRKKGLEAAEVADRGAEAEAPEKEQAYLRHLGMLEELKKQQADDLQWYHQELGQLKRQCQEKLTRVEKEWRRFQALKKQVVMQAMGSCRMRGGRQAALREVEQIQALE

SEQ ID NO: 794000 - protein, 41 aa, Homo sapiens
PAYSLPSASLVQTACKETYVGSMHCPDVTPGPKNPWTHCRD

SEQ ID NO: 794001 - protein, 40 aa, Homo sapiens
GTWGAALGYLTLQQTRRTHPTLHIRKSFFFSSPTPTHPTP

SEQ ID NO: 794002 - protein, 114 aa, Homo sapiens
GSRQKHRTPAPASASALHSQHTLRFLSGCSLLSLVMGSLSVQSHAPVSLCVTFKLSPCVCLCENMCVWVCHRRKTFILAANIWKHLENKQYLLKNIKGSKKQDKKQTVVKFQLL

SEQ ID NO: 794003 - protein, 370 aa, Homo sapiens
MASSTTRGPRVSDLFSGLPPAVTTPANQSAEASAGNGSVAGADAPAVTPFQSLQLVHQLKGLIVLLYSVVVVVGLVGNCLLVLVIARVRRLHNVTNFLIGNLALSDVLMCTACVPLTLAYAFEPRGWVFGGGLCHLVFFLQPVTVYVSVFTLTTIAVDRYVVLVHPLRRRISLRLSAYAVLAIWALSAVLALPAAVHTYHVELKPHDVRLCEEFWGSQERQRQLYAWGLLLVTYLLPLLVILLSYVRVSVKLRNRVVPGCVTQSQADWDRARRRRTFCLLVVVVVVFAVCWLPLHVFNLLRDLDPHAIDPYAFGLVQLLCHWLAMSSACYNPFIYAWLHDSFREELRKLLVAWPRKIAPHGQNMTVSVVI

SEQ ID NO: 794004 - protein, 105 aa, Homo sapiens
AAPLQRGASSWKGCVCAPRPCPRGGDNPRLQPGVPLLLGPQPRLRPAEAPGPGREREAPPCRLNPLGKGPGGRGWDVPGPTKASAPPLRAACRGDRAGRPPPPRP

SEQ ID NO: 794005 - protein, 654 aa, Homo sapiens
ENSDKTIGDGDIFTHLNSHTEVTACECNQCGKPLHHKQALIQQQKIHTRESLYLFSDYVNVFSPKSHAFAHESICAEEKQHECHECEAVFTQKSQLDGSQRVYAGICTEYEKDFSLKSNRQKTPYEGNYYKCSDYGRAFIQKSDLFRCQRIHSGEKPYEYSECEKNLPQNSNLNIHKKIHTGGKHFECTECGKAFTRKSTLSMHQKIHTGEKPYVCTECGKAFIRKSHFITHERIHTGEKPYECSDCGKSFIKKSQLHVHQRIHTGENPFICSECGKVFTHKTNLIIHQKIHTGERPYICTVCGKAFTDRSNLIKHQKIHTGEKPYKCSDCGKSFTWKSRLRIHQKCHTGERHYECSECGKAFIQKSTLSMHQRIHRGEKPYVCTECGKAFFHKSHFITHERIHTGEKPYECSICGKSFTKKSQLHVHQQIHTGEKPYRCAECGKAFTDRSNLFTHQKIHTGEKPYKCSDCGKAFTRKSGLHIHQQSHTGERHYECSECGKAFARKSTLIMHQRIHTGEKPYICNECGKSFIQKSHLNRHRRIHTGEKPYECSDCGKSFIKKSQLHEHHRIHTGEKPYICAECGKAFTIRSNLIKHQKIHTKQKPYKCSDLGKALNWKPQLSMPQKSDNGEVECSMPQLWCGDSEGDQGQLSSI

SEQ ID NO: 794006 - protein, 191 aa, Homo sapiens
AGVCLRTDAQALATGLVVRNCSSFPCFKMKSKNYSTEPNNLRARNSFRYNGLIHRKTVGVEPAADGKGVVVVIKRRSGQRKPATSYVRTTINKNARATLSSIRHMARDIATMCVPCVPCWPGWSRTPDLVISPPRPPALSRTCSSPSSQGHQAQVSPAQRTPRQRTLTLCHKAAPQLLLQAISHATALCPG

SEQ ID NO: 794007 - protein, 115 aa, Homo sapiens
FRKCHSKICQFGIWVNSSQRHLKNNKCKEKLSLNSPYLPKDRSSKRSSVVINPLPGNFINRGRLTLSQEKRLEVDTTPRQTSSKTIISSSEDPIIFPKNYFSPKLPISHLLSPVK

SEQ ID NO: 794008 - protein, 124 aa, Homo sapiens
EIDMATEGDVELELETETSGPERPPEKPRKHDSGAADLERVTDYAEEKEIQSSNLETAMSVIGDRRSREQKAKQEREKELAKVTIKKEDLELIMTEMEISRAAAERSLREHMGNVVEALIALTN

SEQ ID NO: 794009 - protein, 124 aa, Homo sapiens; identical to SEQ ID NO: 794008

SEQ ID NO: 794010 - protein, 99 aa, Homo sapiens
EIDMATEGDVELELETETSGPERPPEKPRKHDSGAADLERVTDYAEEKEIQSSNLETAMSVIGDRRSREQKAKQEREKELAKVTIKKEDLELIEIKWDS

SEQ ID NO: 794011 - protein, 121 aa, Homo sapiens
EIDMATEGDVELELETETSGPERPPEKPRKHDSGAADLERVTDYAEEKEIQSSNLETAMSVIGDRRSREQKAKQEREKELAKVTIKKEDLELIMTEPIRRALAPNRHHPAKSPRSPTPKHI

SEQ ID NO: 794012 - protein, 751 aa, Homo sapiens
MIHKHLNKLQIVCLSNYLSIYEPNPYGLIFNHLSIPYCFPEKRARCSASCPIPAKPVIPTFWEVEVSGSLEIQEFETSLSNMVKHHLYKNKPPKSKNWSSMLLCVCSPDYQEAEVGGLIEIREVKAAVSHDRTTVLHPGDRMRPIFLFYFNFFFFIETVSLCHPGWSAVALSRLTASSASWVHAILLPQPPEELGLQAPPTTPGYFFVFLVEMGFHHVSQVGLDLLTSCSTRLGLPKCWDYRREPLRLAETLILKKKKKNYFRSVIVLTPVIPALWETEAGGLLETRSLKPPGQYSETPSLQKNFFKISQTWWRAPAVLAIWEAEVEESLEAQKFEITVSCDPAPLHSSLGKRVRSCLCVLFFWTGSLLFRLECRGTVVAHCSLGQQAYTTGTHNQMLSPCVAQVGLQLQLSSNPPTLTPTKCWDYRHNPLSLAYFNFKENNFLSLLVCSRMTTLFQVLNLYNKVGCRMSASVYQQGLANEIQGCPYFLSEWAELNAIRKMLFLVPLTLEGSVQMALPKSAKGSTFLVYLHPVQASGASACYAQILHDGVGCTLLYEILRKETDDIEVIGTLDLFATIRIGGHLKGGDEQLTQNEVVSFRFLRMWGIIFIYSYEYFYYDCGIKCDIVEKAQALISGQPVFELWLYLYHLCSFFIYEIVHISNSHGDEMSHRSSTSTQGQHNVRAKHIRVLISFFFFLRWESCCVTQAGVQWCDLGSLHALPPGFQRLSCLSLPSSWDYRCPPPRPANFLYF

SEQ ID NO: 794013 - protein, 67 aa, Homo sapiens
FTWRAPWCPEREPELSVLQMDTGEPQHGSRWCPERERVKLLTLKARQSLPCSCRCRGDRSRRAGANG

SEQ ID NO: 794014 - protein, 121 aa, Homo sapiens
GFLASPQYCPTSPLYFSHPGNQDNNRIYSQQCCEDLEHCVRESPLLSAWHVGKSGWKNMLPLITVPPSESFQDIKNSRGDEVHAANTITLYLKTQSLEEKNNFRWIYDYVRNQAGRGGSCM

SEQ ID NO: 794015 - protein, 525 aa, Homo sapiens
MSCSSRASSSRAGGSSSARVSAGGSSFSSGSRCGLGGSSAQGFRGGASSCSLSGGSSGAFGGSFGGGFGSCSVGGGFGGASGSGTGFGGGSSFGGVSGFGRGSGFCGSSRFSSGATGGFYSYGGGMGGGVGDGGLFSGGEKQTMQNLNDRLANYLDKVRALEEANTDLENKIKEWYDKYGPGSGDGGSGRDYSKYYSIIEDLRNQIIAATVENAGIILHIDNARLAADDFRLKYENELCLRQSVEADINGLRKVLDDLTMTRSDLEMQIESFTEELAYLRKNHEEEMKNMQGSSGGEVTVEMNAAPGTDLTKLLNDMRAQYEELAEQNRREAEERFNKQSASLQAQISTDAGAATSAKNEITELKRTLQALEIELQSQLAMKSSLEGTLADTEAGYVAQLSEIQTQISALEEEICQIWGETKCQNAEYKQLLDIKTRLEVEIETYRRLLDGEGGGSSFAEFGGRNSGSVNMGSRDLVSGDSRSGSCSGQGRDSSKTRVTKTIVEELVDGKVVSSQVSSISEVKVK

SEQ ID NO: 794016 - protein, 587 aa, Homo sapiens
DGRAHSRRGGPTAPPGPEAKRGAASVPGPTASAPAPGPRAHPMATDAALRRLLRLHRTEIAVAVDSAFPLLHALADHDVVPEDKFQETLHLKEKEGCPQAFHALLSWLLTQDSTAILDFWRVLFKDYNLERYGRLQPILDSFPKDVDLSQPRKGRKPPAVPKALVPPPRLPTKRKASEEARAAAPAALTPRGTASPGSQLKAKPPKKPESSAEQQRLPLGNGIQTMSASVQRAVAMSSGDVPGARGAVEGILIQQVFESGGSKKCIQVGGEFYTPSKFEDSGSGKNKARSSSGPKPLVRAKGAQGAAPGGGEARLGQQGSVPAPLALPSDPQLHQKNEDECAVCRDGGELICCDGCPRAFHLACLSPPLREIPSGTWRCSSCLQATVQEVQPRAEEPRPQEPPVETPLPPGLRSAGEEVRGPPGEPLAGMDTTLVYKHLPAPPSAAPLPGLDSSALHPLLCVGPEGQQNLAPGARCGVCGDGTDVLRCTHCAAAFHWRCHFPAGTSRPGTGLRCRSCSGDVTPAPVEGVLAPSPARLAPGPAKDDTASHEPALHRDDLESLLSEHTFDGILQWAIQSMARPAAPFPS

SEQ ID NO: 794017 - protein, 348 aa, Homo sapiens
MWLVYSSGAPGTQQPARNRVFFPIGMAPGGVCWRPDGWGTGGQGRISGPGSMGAGQRLGSSGTQRCCWGSCFGKEVALRRVLHPSPVCMGVSCLCQKNEDECAVCRDGGELICCDGCPRAFHLACLSPPLREIPSGTWRCSSCLQATVQEVQPRAEEPRPQEPPVETPLPPGLRSAGEEVRGPPGEPLAGMDTTLVYKHLPAPPSAAPLPGLDSSALHPLLCVGPEGQQNLAPGARCGVCGDGTDVLRCTHCAAAFHWRCHFPAGTSRPGTGLRCRSCSGDVTPAPVEGVLAPSPARLAPGPAKDDTASHEPALHRDDLESLLSEHTFDGILQWAIQSMARPAAPFPS

SEQ ID NO: 794018 - protein, 254 aa, Homo sapiens
MWLVYSSGAPGTQQPARNRVFFPIGMAPGGVCWRPDGWGTGGQGRISGPGSMGAGQRLGSSGTQRCCWGSCFGKEVALRRVLHPSPVCMGVSCLCQKNEDECAVCRDGGELICCDGCPRAFHLACLSPPLREIPSGTWRCSSCLQATVQEVQPRAEEPRPQEPPVETPLPPGLRSAGEEPRCQGWTPRPCTPYCVWVLRVSRTWLLVRVAGCAEMVRTCCGVLTAPLPSTGAATSQPAPPGPGRACAADPAQET

SEQ ID NO: 794019 - protein, 245 aa, Homo sapiens
MLEGQLEAREPKEGTHPEDPCPGAGAAMEKTPAAAEVPREDSNAGEMPSLQQQITSLHQELGRQQSLWADIHRKLQSHMDALRKQNRELREELRGLQRQQWEAGKKPAASPHAGRESHTLALEPAFGKISPLSADEETTPKYAGRKSQSATLLGQRWSSNHLAPPKPMSLKTERINSGKTPPQEDREKSPPGRRQDRSPAPTGRPTPGAERREVSEDGKIMHPSSRSLQNSGGRKSPVQASQAAT

SEQ ID NO: 794020 - protein, 77 aa, Homo sapiens
EMRREDLGTAVGTRPRCSGPSRSDWRGPGCWRVSSRPGSPRRAPTQRTRARELGLPWRRHLQQPRSPGRTAMPGRCR

SEQ ID NO: 794021 - protein, 238 aa, Homo sapiens
MLEGQLEAREPKEGTHPEDPCPGAGAAMEKTPAAAEVPREDSNAGEMPSLQQQITSLHQELGRQQSLWADIHRKLQSHMDALRKQNRELREELRGLQRQQWEAGKKPAASPHAGRESHTLALEPAFGKISPLSADEETTPKYAGRKSQSATLLGQRWSSNHLAPPKPMSLKTERINSGKTPPQEDREKSPPGRRQDRSPAPTGRPTPGAERREVSEDGKVTSETWVTLHWQHGKFRFR

SEQ ID NO: 794022 - protein, 109 aa, Homo sapiens
  misc_feature (50)..(50): Xaa can be any naturally occurring amino acid
NFLESASPGPAPPASQWPLSAQPSSWLSAVFPGPAFDFWWPLQAQNLTSXSALAGPASCLSKAYTGPASASQWTLHAQLSSRLTAASPVQSSCVSATSAGPAPAGQWPL

SEQ ID NO: 794023 - protein, 231 aa, Homo sapiens
MGPPLWPDLQEPPPPGTSSQIRSPLLCDVIKPAPHHDVTVRVVPPPRFLPLLLRPLPSDGDIAMRRDRGPKPALGGAGEVEPGGMAASPTGRPRRLQRYLQSGEFDQFRDFPIFESNFVQVTRLGEVANEVTMGVAASSPALELPDLLLLAGPAKENGHLQLFGLFPLKFVQLFVHDKSRCQLEVKLNTSRTFYLQLRAPLKTRDREFGQWVRLLYRLRFLSASAVPFTQE

SEQ ID NO: 794024 - protein, 247 aa, Homo sapiens
MGPPLWPDLQEPPPPGTSSQIRSPLLCDVIKPAPHHDVTVRVVPPPRFLPLLLRPLPSDGDIAMRRDRGPKPALGGAGEVEPGGMAASPTGRPRRLQRYLQSGEFDQFRDFPIFESNFVQFCPDIYPAPTSDLWPQVTRLGEVANEVTMGVAASSPALELPDLLLLAGPAKENGHLQLFGLFPLKFVQLFVHDKSRCQLEVKLNTSRTFYLQLRAPLKTRDREFGQWVRLLYRLRFLSASAVPFTQE

SEQ ID NO: 794025 - protein, 247 aa, Homo sapiens; identical to SEQ ID NO: 794024

SEQ ID NO: 794026 - protein, 215 aa, Homo sapiens
MGPPLWPDLQEPPPPGTSSQIRSPLLCDVIKPAPHHDVTVRVVPPPRFLPLLLRPLPSDGDIAMRRDRGPKPALGGAGEVEPGGMAASPTGRPRRLQRYLQSGEFDQFRDFPIFESNFVQFCPDIYPAPTSDLLAPGDSVGRSCQRGHHGGGSLQSSPGAPGPIASGRPCQGERTPATLRLRAPLKTRDREFGQWVRLLYRLRFLSASAVPFTQE

SEQ ID NO: 794027 - protein, 247 aa, Homo sapiens; identical to SEQ ID NO: 794024

SEQ ID NO: 794028 - protein, 82 aa, Homo sapiens
SPAQPPSVCNSPKDPRPATSVDRARYAQLKSTHPSRTSPGPAAAAPGSTGRCYRHQQEQEQPGCPSAGCRHLGFFPPAKGRL

SEQ ID NO: 794029 - protein, 129 aa, Homo sapiens
ALTHFQLLLCAALFLFSVFCQPENCFPTVGQAVQQCLQILASFVDIFCSFSRERERDWVRLRHPTTCVFKANLAAKGSWKLLGLQLLLHVSKSKTQLVSINRLSTSDVCKVKVGRWKLHLLTIQRLVDA

SEQ ID NO: 794030 - protein, 138 aa, Homo sapiens
WWGLVLQFRQPLAPGSAGGIPSLREGRPGLGVCPGKGRWKPLCLSWLPLLAQLCPHWGRQPLHSPLEEPGRVWVGAGVEEGSRRLAAGSPCCSQPLGRSAGWGTISQGGGPSVRIGGLLFFPLPPHSSLGDRARLCPP

SEQ ID NO: 794031 - protein, 235 aa, Homo sapiens
MLKNKGHSSKKDNLAVNAVALQDHILHDLQLRNLSVADHSKTQVQKKENKSLKRDTKAIIDTGLKKTTQCPKLEDSEKEYVLDPKPPPLTLAQKLGLIGPPPPPLSSDEWEKVKQRSLLQGDSVQPCPICKEEFELRPQVLLSCSHVFHKACLQAFEKFTNKKTCPLCRKNQYQTRVIHDGARLFRIKCVTRIQAYWRGCVVRKWYRNLRKTVPPTDAKLRKKFFEKKTQDWKPA

SEQ ID NO: 794032 - protein, 362 aa, Homo sapiens
MLKNKGHSSKKDNLAVNAVALQDHILHDLQLRNLSVADHSKTQVQKKENKSLKRDTKAIIDTGLKKTTQCPKLEDSEKEYVLDPKPPPLTLAQKLGLIGPPPPPLSSDEWEKVKQRSLLQGDSVQPCPICKEEFELRPQVLLSCSHVFHKACLQAFEKFTNKKTCPLCRKNQYQTRVIHDGARLFRIKCVTRIQAYWRGCVVRKWYRNLRKTVPPTDAKLRKKFFEKKFTEISHRILCSYNTNIEELFAEIDQCLAINRSVLQQLEEKCGHEITEEEWEKIQVQALRRETHECSICLAPLSAAGGQRVGAGRRSREMALLSCSHVFHHACLLALEEFSVGDRPPFHACPLCRSCYQKKILEC

SEQ ID NO: 794033 - protein, 362 aa, Homo sapiens; identical to SEQ ID NO: 794032

SEQ ID NO: 794034 - protein, 362 aa, Homo sapiens; identical to SEQ ID NO: 794032

SEQ ID NO: 794035 - protein, 140 aa, Homo sapiens
MLKNKGHSSKKDNLAVNAVALQDHILHDLQLRNLSVADHSKTQVQKKENKSLKRDTKAIIDTGLKKTTQCPKLEDSEKEYVLDPKPPPLTLAQKLGLIGPPPPPLSSDEWEKVKQRSLLQGDSVQPCPICKEEFELRPQV

SEQ ID NO: 794036 - protein, 149 aa, Homo sapiens
MLKNKGHSSKKDNLAVNAVALQDHILHDLQLRNLSVADHSKTQVQKKENKSLKRDTKAIIDTGLKKTTQCPKLEDSEKEYVLDPKPPPLTLAQKLGLIGPPPPPLSSDEWEKVKQRSLLQGDSVQPCPICKEEFELRPQNPSLLERMCC

SEQ ID NO: 794037 - protein, 362 aa, Homo sapiens; identical to SEQ ID NO: 794032

SEQ ID NO: 794038 - protein, 140 aa, Homo sapiens; identical to SEQ ID NO: 794035

SEQ ID NO: 794039 - protein, 198 aa, Homo sapiens
MCSTKKNQYQTRVIHDGARLFRIKCVTRIQAYWRGCVVRKWYRNLRKTVPPTDAKLRKKFFEKKFTEISHRILCSYNTNIEELFAEIDQCLAINRSVLQQLEEKCGHEITEEEWEKIQVQALRRETHECSICLAPLSAAGGQRVGAGRRSREMALLSCSHVFHHACLLALEEFSVGDRPPFHACPLCRSCYQKKILEC

SEQ ID NO: 794040 - protein, 251 aa, Homo sapiens [sequence omitted]

SEQ ID NO: 794041 - protein, 192 aa, Homo sapiens [sequence omitted]

SEQ ID NO: 794042 - protein, 105 aa, Homo sapiens
MLKNKGHSSKKDNLAVNAVALQDHILHDLQLRNLSVADHSKTQVQKKENKSLKRDTKAIIDTGLKKTTQCPKLEDSEKEYVLDPKPPPLTLGYQFIGCTANFKPV

SEQ ID NO: 794043 - protein, 139 aa, Homo sapiens
ETRKVTKIDGQARERFPATSTELRCELYPPPPPPQFTEISHRILCSYNTNIEELFAEIDQCLAINRSVLQQLEEKCGHEITEEEWEKIQVQVGLAGSLATSRLSCSCRGCGEWHVGGGRGLTLGSLGVSGPGCSRGGCG

SEQ ID NO: 794044 - protein, 1297 aa, Homo sapiens
HPLDKRTGERELGGKSGEDRRGAPAGATSFPAAPSPLPLHTHARSLAGARTPPAPDPHLGGRHTLGSPSRGSRSGMEAARTERPAGRPGAPLVRTGLLLLSTWVLAGAEITWDATGGPGRPAAPASRPPALSPLSPRAVASQWPEELASARRAAVLGRRAGPELLPQQGGGRGGEMQVEAGGTSPAGERRGRGIPAPAKLGGARRSRRAQPPITQERGDAWATAPADGSRGSRPLAKGSREEVKAPRAGGSAAEDLRLPSTSFALTGDSAHNQAMVHWSGHNSSVILILTKLYDFNLGSVTESSLWRSTDYGTTYEKLNDKVGLKTVLSYLYVNPTNKRKIMLLSDPEMESSILISSDEGATYQKYRLTFYIQSLLFHPKQEDWVLAYSLDQKLYSSMDFGRRWQLMHERITPNRFYWSVAGLDKEADLVHMEVRTTDGYAHYLTCRIQECAETTRSGPFARSIDISSLVVQDEYIFIQVTTSGRASYYVSYRREAFAQIKLPKYSLPKDMHIISTDENQVFAAVQEWNQNDTYNLYISDTRGIYFTLAMENIKSSRGLMGNIIIELYEVAGIKGIFLANKKVDDQVKTYITYNKGRDWRLLQAPDVDLRGSPVHCLLPFCSLHLHLQLSENPYSSGRISSKETAPGLVVATGNIGPELSYTDIGVFISSDGGNTWRQIFDEEYNVWFLDWGGALVAMKHTPLPVRHLWVSFDEGHSWDKYGFTSVPLFVDGALVEAGMETHIMTVFGHFSLRSEWQLVKVDYKSIFSRHCTKEDYQTWHLLNQGEPCVMGERKIFKKRKPGAQCALGRDHSGSVVSEPCVCANWDFECDYGYERHGESQCVPAFWYNPASPSKDCSLGQSYLNSTGYRRIVSNNCTDGLREKYTAKAQMCPGKAPRGLHVVTTDGRLVAEQGHNATFIILMEEGDLQRTNIQLDFGDGIAVSYANFSPIEDGIKHVYKSAGIFQVTAYAENNLGSDTAVLFLHVVCPVEHVHLRVPFVAIRNKEVNISAVVWPSQLGTLTYFWWFGNSTKPLITLDSSISFTFLAEGTDTITVQVAAGNALIQDTKEIAVHEYFQSQLLSFSPNLDYHNPDIPEWRKDIGNVIKRALVKVTSVPEDQILIAVFPGLPTSAELFILPPKNLTERRKGNEGDLEQIVETLFNALNQNLVQFELKPGVQVIVYVTQLTLAPLVDSSAGHSSSAMLMLLSVVFVGLAVFLIYKFKRKIPWINIYAQVQHDKEQEMIGSVSQSENAPKITLSDFTEPEELLDKELDTRVIGGIATIANSESTKEIPNCTSV

SEQ ID NO: 794045 - protein, 123 aa, Homo sapiens
AHSLAQSRPQMHAGQMCWYPLHPYGQHDPSRNPVELSRELDSSSQNTPRTLVKHQELWGVPPEKSGGHCRASDTALGEIPHGWAAACIWHCGGGRAAMEDGETHLSRLLLGTAFPPASRSRPK

SEQ ID NO: 794046 - protein, 626 aa, Homo sapiens
MCSTLKKCGTYRTEVAECHDHGSTFQGRKKGGSSFRDNFDKRSCHYEHGGYERPPSHCQENDGSVEMRDVHKDQQLRHTPYSIRCERRMKWHSEDEIRITTWRNRKPPERKMSQNTQDGYTRNWFKVTIPYGIKYDKAWLMNSIQSHCSDRFTPVDFHYVRNRACFFVQDASAASALKDVSYKIYDDENQKICIFVNHSTAPYSVKNKLKPGQMEMLKLTMNKRYNVSQQALDLQNLRFDPDLMGRDIDIILNRRNCMAATLKIIERNFPELLSLNLCNNKLYQLDGLSDITEKAPKVKTLNLSKNKLESAWELGKVKGLKLEELWLEGNPLCSTFSDQSAYVSAIRDCFPKLLRLDGRELSAPVIVDIDSSETMKPCKENFTGSETLKHLVLQFLQQYYSIYDSGDRQGLLGAYHDEACFSLAIPFDPKDSAPSSLCKYFEDSRNMKTLKDPYLKGELLRRTKRDIVDSLSALPKTQHDLSSILVDVWCQTERMLCFSVNGVFKEVEGQSQGSVLAFTRTFIATPGSSSSLCIVNDELFVRDASPQETQSAFSIPVSTLSSSSEPSLSQEQQEMVQAFSAQSGMKLEWSQKCLQDNEWNYTRAGQAFTMLQTEGKIPAEAFKQIS

SEQ ID NO: 794047 - protein, 148 aa, Homo sapiens
MILASGARGPGFKSRTSPPLPFTETRVSSRNMLPDQRCRRLDCKSSMYSKLFCGTAVAESISIPRPAWHVRKRRGTPRLGQVPPFLLPDFLPGVSTRPPQPGFALIDTRQSIVVDDSVRESPGTVKTWFSAVLKALCLFRSLHLTIGA

SEQ ID NO: 794048 - protein, 117 aa, Homo sapiens
QGDGGMGHGASWSSLEAGKPQPSVMSTVETQASLIRAGAGSACWHRAGPCTESLGRGMQVKAGRACLEGHWAPPPGWRGAEGWAGGAAGRWSFLKVIQIEGSAQTPRTHRVTPSVHV

SEQ ID NO: 794049 - protein, 157 aa, Homo sapiens
ACGRSSLTRLASHMAEYECFQIELSKNYGMSEWRDDVKKVLLKAGLQNLPITFLFSDTQIKNESFLEDINNVLNSGDIPNLYTADEQDQIVSTMRPYIQEQGLQPTKANLMAAYTGRVRSNIHMVLCMSPIGEVFRARLRQFPSLVNCCTIDWFNEW

SEQ ID NO: 794050 - protein, 127 aa, Homo sapiens
EYLLSLSCPCVTIVHWACGLVFLAHRSLSEEEPPLRSCTQGDSATARPTAHFEIMVLEPDVVIGCFGKGGCILQVGGQSIFRSREQTVVECHINALSQSCLFHTDSGLAIRHVLANRSSANVVQAIS

SEQ ID NO: 794051 - protein, 76 aa, Homo sapiens
MAAVGEETARAAVTAKSSEREKKDQCFTGLWGGSYHQGYKTLQRNPCTSKFVVKGKTLGSWAGFYFLRQSLALLPG

SEQ ID NO: 794052 - protein, 132 aa, Homo sapiens
RFQTLQCTFSSQEKCKLSSGPKNLYMNYPCITSGEASPSTTLPSFFSILIAPFNGPDRIPFSHRPLANAALTAQVIFPGSCLLRIKVTPPESVPNQSELTKSLLHTLKLHEMSFIALIPVIISLHLFTQWLY

SEQ ID NO: 794053 - protein, 510 aa, Homo sapiens
TRPIIKKLEDGGSSKQLAVIYGIGETTVRDIRKNKEKIITYASSSDSTSLLAKRKSMKPSMYEELDRAMLEWFNQQRAKGNPISGPICAKRAEFFFYALGMDGDFNPSAGWLTRFKQRHSIREINIRNERLNGDETAVEDFCNNFRDFIERENLQPEQIYNADETGLFWKCLPSRISVIKGKCTVPGHKSIEERVTIMCCANATGLHKLKLCVVGKAKKPRSFKSTDTLNLPVSYFSQKGAWMDLSIFRQWFDKIFVPQVREYLRSKGLQEKAVLLLDNSPTHPNENVLRSDDGQIFAKYLPPNVASLIQPSDQGVIATMKRNYRAGLLQNNLEEGNDLKSFWKKLTLLDALYEIAMAWNLVKPVTISRAWKKILPMVEEKESLDFDVEDISVATVAAILQHTKGLENVTTENLEKWLEVDSTEPGYEVLTDSEIIRRAQGQADESSENEEEEIELIPEKHINHAAALQWTENLLDYLEQQGDMILPDRLVIRKLRATIRNKQKMTKSSQ

SEQ ID NO: 794054 - protein, 111 aa, Homo sapiens
MWVEVDCFLVACEYALHKRCLLGGKLTGVWLDAVCPALSSWAQHPGTQDIVVEHPNLKLCLSVETQKDGVWVKECGVWLLLSRKRFPLVTDGIGLLVLLKFCCQKINVNRL

SEQ ID NO: 794055 - protein, 154 aa, Homo sapiens
MWVEVDCFLVACEYALHKRCLLGGKLTGVWLDAVCPALSSWAQHPGTQDIVVEHPNLKLCLSVETQKDGVWVKECGVWLLLSRKRFPLVTDGIGLLVLLALFASGLIHRVCVTTCFIFSMVGLYYINKISSTLYQAAAPVLTPAKVTGKSKKRN

SEQ ID NO: 794056 - protein, 112 aa, Homo sapiens
FVTSGRERIILLAISQGVYTPCDIACSICWGEDVIPRNISVRILTGILEVISSGDITPNFTVGVHPVILFVISLGYVTPHVTAGVHPVILFVSFLGGVTPNVQGVFTLGYYW

SEQ ID NO: 794057 - protein, 90 aa, Homo sapiens
DDETLFPSKIGVPFPKNFMSVAKTILNAFFRVYAHIYHQHFDPVIQLQEEAHLNTSFKHFIFFVQEFNLIDRRELAPLQELIEKLTSKDR

SEQ ID NO: 794058 - protein, 96 aa, Homo sapiens
MSGKKRTQAVCCVPTPIPISAPRTRALLRRLQPLHPRGEAEVSRKQCPTVAPQSVQCELRPFPQVWSFLIQLRPPSLYSLSASHPIFCHPTSIFDG

SEQ ID NO: 794059 - protein, 720 aa, Homo sapiens
MVDSLTACTVCLEKLQTLNANPVKGARRGFKPTGVELWPFFPKAMGAHLLHQHDLHVRHGIKGDHFGALRFDCPTGFWACMGPEPLCFDNFLPFGMTVFTQCLYPHCIQEVTNLFLILHAHRQKGFALSHMDFGLWTFELMLNLVKTLGDCWEGMIGFECEDMRFGKGQGQNDTVWLCPHPSLILNSHMLWEGPGGKKLSHGGRSFPCCSHDSEYVSQGVMVLKRVVSLQKLYLLIAAIHVRHDLLLLAFQRDSQASSAMWKCKSIKPLSFVNCPVSVRYVFISSVKTDLIHLCSFFLSLFMVAVWWVSLVVMFESFLLCVSELLVSFILSCIFMMVDIVLLLPNVGLPETFLVGPQQTRHKQTVFCLSGKYFFLFYYYYFFFSNGDLTLPPRLEYSGMIIAHCSLELLGSNGPPASAFLSLWNCRCEPLCQASSFVKDSFAGYSIFGLHFFIFILLVVYIPFSPEPVRFLLRNPLLPDGDSLISDLMPFFAVFSIFSLSFDNFTIMCLGEDLFELYLFGNLLSFLHLEAFRKFSVIILLNRFSMPLPISSPSRTPRISVFGDICVPYVMEPCFILFSFFLSDWIILKDSLQVQKFFVLLDLVYCYKLSIIFCIYFNDLFSSRICVWFFVMLSISVEFVVQILNCFPVWFFFFVFFFLYSLSVFSCISLSFFNNIILNFFQAFHRFSFHWICCWRIIVLLWRCYVSFFIFLASLCDYLCL

SEQ ID NO: 794060 - protein, 354 aa, Homo sapiens
MGSGASAEDKELAKRSKELEKKLQEDADKEAKTVKLLLLGAGESGKSTIVKQMKIIHQDGYSPEECLEFKAIIYGNVLQSILAIIRAMTTLGIDYAEPSCADDGRQLNNLADSIEEGTMPPELVEVIRRLWKDGGVQACFERAAEYQLNDSASYYLNQLERITDPEYLPSEQDVLRSRVKTTGIIETKFSVKDLNFRMFDVGGQRSERKKWIHCFEGVTCIIFCAALSAYDMVLVEDDEVNRMHESLHLFNSICNHKFFAATSIVLFLNKKDLFEEKIKKVHLSICFPEYDGNNSYDDAGNYIKSQFLDLNMRKDVKEIYSHMTCATDTQNVKFVFDAVTDIIIKENLKDCGLF

SEQ ID NO: 794061 - protein, 140 aa, Homo sapiens
MGSGASAEDKELAKRSKELEKKLQEDADKEAKTVKLLLLGAGESGKSTIVKQMKIIHQDGYSPEECLEFKAIIYGNVLQSILAIIRAMTTLGIDYAEPSCADDGRQLNNLADSIEEGTMPPELVEVIRRLWKDGGVQACF

SEQ ID NO: 794062 - protein, 354 aa, Homo sapiens; identical to SEQ ID NO: 794060

SEQ ID NO: 794063 - protein, 354 aa, Homo sapiens; identical to SEQ ID NO: 794060

SEQ ID NO: 794064 - protein, 181 aa, Homo sapiens
MGDIFKNNGVLQGRLRAVACAPHRFGPRLRCLHHDQGLTELAWGTWPHSHPVRHQPQMPSARECCSIVCMAAKEVSAPKAPGSPWMVPGDVAMSGHRVGALDERGHPNPQTGHCRGGSVSVTWSSVSCCRGRLAAVRVMIARDPSTCHLAKGCSPAWGFLPQARGPAGTRTPQRRCSSHEA

SEQ ID NO: 794065 - protein, 93 aa, Homo sapiens
MAKQNWKDAEAWFTSWTEELNQEVTGHIEQLQISRSEVTDLQCTLQGLEIELHSQLSVKAPLEGTLAETEACFGAQLVQIQALISSIEAQLGD

SEQ ID NO: 794066 - protein, 648 aa, Homo sapiens
MSHHGGAPKASTWVVASRRSSTVSRAPERRPAEELNRTGPEGYSVGRGGRWRGTSRPPEAVAAGHEELPLCFALKSHFVGAVIGRGGSKIKNIQSTTNTTIQIIQEQPESLVKIFGSKAMQTKAKAVIDNFVKKLEENYNSECGIDTAFQPSVGKDGSTDNNVVAGDRPLIDWDQIREEGLKWQKTKWADLPPIKKNFYKESTATSAMSKVEADSWRKENFNITWDDLKDGEKRPIPNPTCTFDDAFQCYPEVMENIKKAGFQKPTPIQSQAWPIVLQGIDLIGVAQTGTGKTLCYLMPGFIHLVLQPSLKGQRNRPGMLVLTPTRELALQVEGECCKYSYKGLRSVCVYGGGNRDEQIEELKKGVDIIIATPGRLNDLQMSNFVNLKNITYLVLDEADKMLDMGFEPQIMKILLDVRPDRQTVMTSATWPHSVHRLAQSYLKEPMIVYVGTLDLVAVSSVKQNIIVTTEEEKWSHMQTFLQSMSSTDKVIVFVSRKAVADHLSSDLILGNISVESLHGDREQRDREKALENFKTGKVRILIATDLASRGLDVHDVTHVYNFDFPRNIEEYVHRIGRTGRAGRTGVSITTLTRNDWRVASELINILERANQSIPEELVSMAERFEAHQRKREMERKMERPQGRPKKFH

SEQ ID NO: 794067 - protein, 59 aa, Homo sapiens
MGRPRNMGSCPSECCTGSCSHLFLPGDHSMRVKFFPFQEPKCLFVYPILVSNRAKWTSM

SEQ ID NO: 794068 - protein, 754 aa, Homo sapiens
QSVSGRRSRESGSRSSPWPQAGRLEGEELPPFFGIRTHHDGCDLRPSGSPGVMAQKHPGERGLYGAHHSGGASLRTLGPSVDPEIPSFSGLRDSAGTAPNGTRCLTEHSGPKHTQHPNPAHWLDPSHGPPGGPGPPRDAEDPDQSETSSEEESGVDQELSKENETGNQKDGNSFLSIPSACNCQGTPGIPEGPYSEGGNGSSSNFCHHCTSPALGEDELEEEYDDEESLKFPSDFSRVSSGKKPPSRRQRHRFPTKEDTREGGRRDPRSPGRHRLGRKRSQADKRKGLGLWGAEELCQLGQAGFWWLIELLVLVGEYVETCGHLIYACRQLKSSDLDLFRVWMGVWTGRLGGWAQVMFQFLSQGFYCGVGLFTRFLKLLGALLLLALALFLGFLQLGWRFLVGLGDRLGWRDKATWLFSWLDSPALQRCLTLLRDSRPWQRLVRIVQWGWLELPWVKQNINRQGNAPVASGRYCQPEEEVARLLTMAGVPEDELNPFHVLGVEATASDVELKKAYRQLAVMVHPDKNHHPRAEEAFKVLRAAWDIVSNAEKRKEYEMKRMAENELSRSVNEFLSKLQDDLKEAMNTMMCSRCQGKHRRFEMDREPKSARYCAECNRLHPAEEGDFWAESSMLGLKITYFALMDGKVYDITEWAGCQRVGISPDTHRVPYHISFGSRIPGTRGRQRATPDAPPADLQDFLSRIFQVPPGQMPNGNFFAAPQPAPGAAAASKPNSTVPKGEAKPKRRKKVRRPFQR

SEQ ID NO: 794069 - protein, 702 aa, Homo sapiens
MAQKHPGERGLYGAHHSGGASLRTLGPSVDPEIPSFSGLRDSAGTAPNGTRCLTEHSGPKHTQHPNPAHWLDPSHGPPGGPGPPRDAEDPDQSETSSEEESGVDQELSKENETGNQKDGNSFLSIPSACNCQGTPGIPEGPYSEGGNGSSSNFCHHCTSPALGEDELEEEYDDEESLKFPSDFSRVSSGKKPPSRRQRHRFPTKEDTREGGRRDPRSPGRHRLGRKRSQADKRKGLGLWGAEELCQLGQAGFWWLIELLVLVGEYVETCGHLIYACRQLKSSDLDLFRVWMGVWTGRLGGWAQVMFQFLSQGFYCGVGLFTRFLKLLGALLLLALALFLGFLQLGWRFLVGLGDRLGWRDKATWLFSWLDSPALQRCLTLLRDSRPWQRLVRIVQWGWLELPWVKQNINRQGNAPVASGRYCQPEEEVARLLTMAGVPEDELNPFHVLGVEATASDVELKKAYRQLAVMVHPDKNHHPRAEEAFKVLRAAWDIVSNAEKRKEYEMKRMAENELSRSVNEFLSKLQDDLKEAMNTMMCSRCQGKHRRFEMDREPKSARYCAECNRLHPAEEGDFWAESSMLGLKITYFALMDGKVYDITEWAGCQRVGISPDTHRVPYHISFGSRIPGTRGRQRATPDAPPADLQDFLSRIFQVPPGQMPNGNFFAAPQPAPGAAAASKPNSTVPKGEAKPKRRKKVRRPFQR

SEQ ID NO: 794070 - protein, 154 aa, Homo sapiens [sequence omitted]

SEQ ID NO: 794071 - protein, 120 aa, Homo sapiens
GFPILFGLFPPSVHCEFFCLFLWLRMVFHPEPLVFFSFYFSYVPLALPPPPGLVLAVVFAALFFPLFVSPSLSTGCLVLLVISTTSLQPSSSCRHLLLSVRLCGMAHPRHYDFLISDPSL

SEQ ID NO: 794072 - protein, 357 aa, Homo sapiens
QSVSGRRSRESGSRSSPWPQAGRLEGEELPPFFGIRTHHDGCDLRPSGSPGVMAQKHPGERGLYGAHHSGGASLRTLGPSVDPEIPSFSGLRDSAGTAPNGTRCLTEHSGPKHTQHPNPAHWLDPSHGPPGGPGPPRDAEDPDQSETSSEEESGVDQELSKENETGNQKDGNSFLSIPSACNCQGTPGIPEGPYSEGGNGSSSNFCHHCTSPALGEDELEEEYDDEESLKFPSDFSRVSSGKKPPSRRQRHRFPTKEDTREGGRRDPRSPGRHRLGRKRSQADKRKGLGLWGAEELCQLGQAGFWWLIELLVLVGEYVETCGHLIYACRQLKSSDLDLFRVWMGIPVGIRDPLDHLG

SEQ ID NO: 794073 - protein, 754 aa, Homo sapiens; identical to SEQ ID NO: 794068

SEQ ID NO: 794074 - protein, 754 aa, Homo sapiens; identical to SEQ ID NO: 794068

SEQ ID NO: 794075 - protein, 124 aa, Homo sapiens
MSILKITYFALMDGKVYDITEWAGCQRVGISPDTHRVPYHISFGSRIPGTRGRQRATPDAPPADLQDFLSRIFQVPPGQMPNGNFFAAPQPAPGAAAASKPNSTVPKGEAKPKRRKKVRRPFQR

SEQ ID NO: 794076 - protein, 390 aa, Homo sapiens
MPDTNSTINLSLSTRVTLAFFMSLVAFAIMLGNALVILAFVVDKNLRHRSSYFFLNLAISDFFVGVISIPLYIPHTLFEWDFGKEICVFWLTTDYLLCTASVYNIVLISYDRYLSVSNAVSYRTQHTGVLKIVTLMVAVWVLAFLVNGPMILVSESWKDEGSECEPGFFSEWYILAITSFLEFVIPVILVAYFNMNIYWSLWKRDHLSRCQSHPGLTAVSSNICGHSFRGRLSSRRSLSASTEVPASFHSERQRRKSSLMFSSRTKMNSNTIASKMGSFSQSDSVALHQREHVELLRARRLAKSLAILLGVFAVCWAPYSLFTIVLSFYSSATGPKSVWYRIAFWLQWFNSFVNPLLYPLCHKRFQKAFLKIFCIKKQPLPSQHSRSVSS

SEQ ID NO: 794077 - protein, 965 aa, Homo sapiens
VEYMRLGENIIEYSRDFKLYITTRLRNPHYLPEVAVKVCLLNFMITPLGLQDQLLGIVAAKEKPELEEKKNQLIVESAKNKKHLKEIEDKILEVLSMSKGNILEDETAIKVLSSSKVLSEEISEKQKVASMTETQIDETRMGYKPVAVHSATIFFCISDLANIEPMYQYSLTWFINLYMHSLTHSTKSEELNLRIKYIIDHFTLSIYNNVCRSLFEKDKLLFSLLLTIGIMKQKKEITEEVWYFLLTGGIALDNPYPNPAPQWLSEKAWAEIVRASALPKLHGLMEHLEQNLGEWKLIYDSAWPHEEQLPGSWKFSQGLEKMVILRCLRPDKMVPAVREFIAEHMGKLYIEAPTFDLQGSYNDSSCCAPLIFVLSPSADPMAGLLKFADDLGMGGTRTQTISLGQGQGPIAAKMINNAIKDGTWVVLQNCHLAASWMPTLEKICEEVIVPESTNARFRLWLTSYPSEKFPVSILQNGIKMTNEPPKGLRANLLRSYLNDPISDPVFFQSCAKAVMWQKMLFGLCFFHAVVQERRNFGPLGWNIPYEFNESDLRISMWQIQMFLNDYKEVPFDALTYLTGECNYGGRVTDDKDRRLLLSLLSMFYCKEIEEDYYSLAPGDTYYIPPHGSYQSYIDYLRNLPITAHPEVFGLHENADITKDNQETNQLFEGVLLTLPRQSGGSGKSPQEVVEELAQDILSKLPRDFDLEEVMKLYPVVYEESMNTVLRQELIRFNRLTKVVRRSLINLGRAIKGQVLMSSELEEVFNSMLVGKVPAMWAAKSYPSLKPLGGYVADLLARLTFFQEWIDKGPPVVFWISGFYFTQSFLTGVSQNYARKYTIPIDHIGFEFEVTPQETVMENNPEDGAYIKGLFLEGARWDRKTMQIGESLPKILYDPLPIIWLKPGESAMFLHQDIYVCPVYKTSARRGTLSTTGHSTNYVLSIELPTDMPQKHWINRGVASLCQLDN

SEQ ID NO: 794078 - protein, 126 aa, Homo sapiens
GAHSFLFFQVTPQETVMENNPEDGAYIKGLFLEGARWDRKTMQIGESLPKILYDPLPIIWLKPGESAMFLHQDIYVCPVYKTSARRGTLSTTGHSTNYVLSIELPTDMPQKHWINRGVASLCQLDN

SEQ ID NO: 794079 - protein, 104 aa, Homo sapiens
VAQPEMSGLMLVLGVDWDKVRLIGPSSGSLLSSSTHVSMTVIQRNRGERVWREVSRGKKEGREEGSRLLTNHTIRALLVPSSWEATVISNSKTNQGYLSHFASL

SEQ ID NO: 794080 - protein, 248 aa, Homo sapiens
MGLSIFLLLCVLGLSQAATPKIFNGTECGRNSQPWQVGLFEGTSLRCGGVLIDHRWVLTAAHCSGSRYWVRLGEHSLSQLDWTEQIRHSGFSVTHPGYLGASTSHEHDLRLLRLRLPVRVTSSVQPLPLPNDCATAGTECHVSGWGITNHPRNPFPDLLQCLNLSIVSHATCHGVYPGRITSNMVCAGGVPGQDACQGDSGGPLVCGGVLQGLVSWGSVGPCGQDGIPGVYTYICKYVDWIRMIMRNN

SEQ ID NO: 794081 - protein, 226 aa, Homo sapiens
MQGSKPWQVGLFEGTSLRCGGVLIDHRWVLTAAHCSGSRYWVRLGEHSLSQLDWTEQIRHSGFSVTHPGYLGASTSHEHDLRLLRLRLPVRVTSSVQPLPLPNDCATAGTECHVSGWGITNHPRNPFPDLLQCLNLSIVSHATCHGVYPGRITSNMVCAGGVPGQDACQGDSGGPLVCGGVLQGLVSWGSVGPCGQDGIPGVYTYICNSTLVGLGTSWNFNSCQPF

SEQ ID NO: 794082 - protein, 119 aa, Homo sapiens
PKKNWIAIYELLFKEGVMVAKKDVHMPKHPELADKNVPNLHVMKAMQSLKSRGYVKEQFAWRHFYWYLTNEGIQYLRDYLHLPPEIVPATLRRSRPETGSLGLKVWRVSDLRDSQEGKL

SEQ ID NO: 794083 - protein, 221 aa, Homo sapiens
MAAVGPRTGPGTGAEALALAAELQGEATCSICLELFREPVSVECGHSFCRACIGRCWERPGAGSVGAATRAPPFPLPCPQCREPARPSQLRPNRQLAAVATLLRRFSLPAAAPGEHGSQAAAARAAAARCGQHGEPFKLYCQDDGRAICVVCDRAREHREHAVLPLDEAVQEAKELLESRLRVLKKELEDCEVFRSTEKKESKELLVSQAPAGPPWDITEA

SEQ ID NO: 794084 - protein, 511 aa, Homo sapiens
MAAVGPRTGPGTGAEALALAAELQGEATCSICLELFREPVSVECGHSFCRACIGRCWERPGAGSVGAATRAPPFPLPCPQCREPARPSQLRPNRQLAAVATLLRRFSLPAAAPGEHGSQAAAARAAAARCGQHGEPFKLYCQDDGRAICVVCDRAREHREHAVLPLDEAVQEAKELLESRLRVLKKELEDCEVFRSTEKKESKELLKQMAAEQEKVGAEFQALRAFLVEQEGRLLGRLEELSREVAQKQNENLAQLGVEITQLSKLSSQIQETAQKPDLDFLQEFKSTLSRCSNVPGPKPTTVSSEMKNKVWNVSLKTFVLKGMLKKFKEDLRGELEKEEKVELTLDPDTANPRLILSLDLKGVRLGERAQDLPNHPCRFDTNTRVLASCGFSSGRHHWEVEVGSKDGWAFGVARESVRRKGLTPFTPEEGVWALQLNGGQYWAVTSPERSPLSCGHLSRVRVALDLEVGAVSFYAVEDMRHLYTFRVNFQERVFPLFSVCSTGTYLRIWP

SEQ ID NO: 794085 - protein, 329 aa, Homo sapiens
MTQATGQMLCLHVQVPLQLLLLGQKQMAAEQEKVGAEFQALRAFLVEQEGRLLGRLEELSREVAQKQNENLAQLGVEITQLSKLSSQIQETAQKPDLDFLQEFKSTLSRCSNVPGPKPTTVSSEMKNKVWNVSLKTFVLKGMLKKFKEDLRGELEKEEKVELTLDPDTANPRLILSLDLKGVRLGERAQDLPNHPCRFDTNTRVLASCGFSSGRHHWEVEVGSKDGWAFGVARESVRRKGLTPFTPEEGVWALQLNGGQYWAVTSPERSPLSCGHLSRVRVALDLEVGAVSFYAVEDMRHLYTFRVNFQERVFPLFSVCSTGTYLRIWP

SEQ ID NO: 794086 - protein, 303 aa, Homo sapiens
MAAEQEKVGAEFQALRAFLVEQEGRLLGRLEELSREVAQKQNENLAQLGVEITQLSKLSSQIQETAQKPDLDFLQEFKSTLSRCSNVPGPKPTTVSSEMKNKVWNVSLKTFVLKGMLKKFKEDLRGELEKEEKVELTLDPDTANPRLILSLDLKGVRLGERAQDLPNHPCRFDTNTRVLASCGFSSGRHHWEVEVGSKDGWAFGVARESVRRKGLTPFTPEEGVWALQLNGGQYWAVTSPERSPLSCGHLSRVRVALDLEVGAVSFYAVEDMRHLYTFRVNFQERVFPLFSVCSTGTYLRIWP

SEQ ID NO: 794087 - protein, 369 aa, Homo sapiens
MLLGKQDPETFRVTSQCNLVACRDDFYPASPSELLESRLRVLKKELEDCEVFRSTEKKESKELLKQMAAEQEKVGAEFQALRAFLVEQEGRLLGRLEELSREVAQKQNENLAQLGVEITQLSKLSSQIQETAQKPDLDFLQEFKSTLSRCSNVPGPKPTTVSSEMKNKVWNVSLKTFVLKGMLKKFKEDLRGELEKEEKVELTLDPDTANPRLILSLDLKGVRLGERAQDLPNHPCRFDTNTRVLASCGFSSGRHHWEVEVGSKDGWAFGVARESVRRKGLTPFTPEEGVWALQLNGGQYWAVTSPERSPLSCGHLSRVRVALDLEVGAVSFYAVEDMRHLYTFRVNFQERVFPLFSVCSTGTYLRIWP

SEQ ID NO: 794088 - protein, 303 aa, Homo sapiens; identical to SEQ ID NO: 794086

SEQ ID NO: 794089 - protein, 104 aa, Homo sapiens
MEHPVTSHTEYPVTHHTEHPITRHTEHPVTHHTEHPVTRSCPCPFVASSPPGSSLLEFHVHESQRVFSLLWNSFTQHNVCVTHPPAASVGAGLPSILLSSPFFR

SEQ ID NO: 794090 - protein, 115 aa, Homo sapiens
MLIVHYVPDTVLSIGKTALSLVEESPASMVFKAQWEIDASFEGGRGYYLSLALTELGVTPCALSFLSYRILTSTLRSKMKIHFVDEETEAAERLGDFAKAAESLNGKQEFRYRAL

SEQ ID NO: 794091 - protein, 1283 aa, Homo sapiens
GQGSSPTLPFVNSPSSSLTLKPSCITMASCSFTRDQATRRLRGAAAAAAAALAAVVTTPLLSSGTPTALIGTGSSCPGAMWLSTATGSRSDSESEEEDLPVGEEVCKRGYLRKQKHGHRRYFVLKLETADAPARLEYYENARKFRHSVRAAAAAAAAAASGAAIPPLIPPRRVITLYQCFSVSQRADARYRHLIALFTQDEYFAMVAENESEQESWYLLLSRLILESKRRRCGTLGAQPDGEPAALAAAAAAEPPFYKDVWQVIVKPRGLGHRKELSGVFRLCLTDEEVVFVRLNTEVASVVVQLLSIRRCGHSEQYFFLEVGRSTVIGPGELWMQVDDCVVAQNMHELFLEKMRALCADEYRARCRSYSISIGAHLLTLLSARRHLGLVPLEPGGWLRRSRFEQFCHLRAIGDGEDEMLFTRRFVTPSEPVAHSRRGRLHLPRGRRSRRAVSVPASFFRRLAPSPARPRHPAEAPNNGARLSSEVSGSGSGNFGEEGNPQGKEDQEGSGGDYMPMNNWGSGNGRGSGGGQGSNGQGSSSHSSGGNQCSGEGQGSRGGQGSNGQGSGGNQCSRDGQGTAGGHGSGGGQRPGGGHGSGGGQGPGDGHGSGGGKNSGGGKGSGSGKGSDGDGERGKSLKKRSYFGKLTQSKQQQMPPPPPPPPPPPPAGGTGGKGKSGGRFRLYFCVDRGATKECKEAKEVKDAEIPEGAARGPHRARAFDEDEDDPYVPMRPGVATPLVSSSDYMPMAPQNVSASKKRHSRSPFEDSRGYMMMFPRVSPPPAPSPPKAPDTNKEDDSKDNDSESDYMFMAPGAGAIPKNPRNPQGGSSSKSWSSYFSLPNPFRSSPLGQNDNSEYVPMLPGKFLGRGLDKEVSYNWDPKDAASKPSGEGSFSKPGDGGSPSKPSDHEPPKNKAKRPNRLSFITKGYKIKPKPQKPTHEQREADSSSDYVNMDFTKRESNTPAPSTQGLPDSWGIIAEPRQSAFSNYVNVEFGVPFPNPANDLSDLLRAIPRANPLSLDSARWPLPPLPLSATGSNAIEEEGDYIEVIFNSAMTPAMALADSAIRYDAETGRIYVVDPFSECCMDISLSPSRCSEPPPVARLLQEEEQERRRPQSRSQSFFAAARAAVSAFPTDSLERDLSPSSAPAVASAAEPTLALSQVVAAASALAAAPGIGAAAAAAGFDSASARWFQPVANAADAEAVRGAQDVAGGSNPGAHNPSANLARGDNQAGGAAAAAAAPEPPPRSRRVPRPPEREDSDNDDDTHVRMDFARRDNQFDSPKRGR

SEQ ID NO: 794092 - protein, 180 aa, Homo sapiens
MRTRVCVERENGIKRMRARVCGERERNQANENTSVCGERERNQANENTSVCGERERNQANESACVWRENGIKRMRTRVCVERENGIRRMRTRVCVERENGIKRMTARELCVEGENGIKRMRTRVCVEGENGIKRMRTRVCVEGENGIKRMRARECVWRERERNQANESVSVCGERTESSE

SEQ ID NO: 794093 - protein, 180 aa, Homo sapiens; identical to SEQ ID NO: 794092

SEQ ID NO: 794094 - protein, 133 aa, Homo sapiens
MRTRVCVERENGIKRMRARVCGERERNQANENTSVCGERERNQANENTSVCGERERNQANESACVWRENGIKRMRTRVCVERENGIRRMRTRVCVERENGIKRMTARELCGENGIKRMRARECVWRERTESSE

SEQ ID NO: 794095 - protein, 109 aa, Homo sapiens
EFWISLGHESETKKRRRNGALSIKESEAEAMVWKRLRDFLGTELYTLELLHCCHRKPRFPTPTARASIPTTLSVSTPVSWSVTPGWSAVMQSQLTVTCPPLEDPNSSNL

SEQ ID NO: 794096 - protein, 109 aa, Homo sapiens [sequence omitted]

SEQ ID NO: 794097 - protein, 179 aa, Homo sapiens [sequence omitted]

SEQ ID NO: 794098 - protein, 148 aa, Homo sapiens
FDFITAAWLIFLFMVLCGSSLALLVRILCGSRGLPLTRLYLTILLTVLVFLLCGLPFGIQWFLILWIWKDSDVLFCHIHPVSVVLSSLNSSANPIIYFFVGSFRKQWRLQQPILKLALQRALQDIAEVDHSEGCFRQGTPEMSRSSLV

SEQ ID NO: 794099 - protein, 137 aa, Homo sapiens
GTQPVLSGTGEETVRLGFPVDPRKVLIVAGHHNWIVAAYAHFAVCYRIKESSGWQQVFTSPYLDWTIERVALLARARRTESFHSYRDFQTINLNRNVERAVPENGNLGPIQAEVKGATGECNISERKSPGVEIKSLR

SEQ ID NO: 794100 - protein, 210 aa, Homo sapiens
QLPQRLLPGALRAGIEAVLLSLHPGFRVGFNSLGGLASVNHLHLHGYYLAHRLPVEQAPSEPLDPGGHLHLLQDLPAPGFLFYTRGPGPDLESLISRVCRATDYLTDHEIAHNLFVTRGAPPGKTSPSSALTGVRVILWARKSSFGIKDGEAFNVALCELAGHLPVKTSQDFSSLTEAAAVALIQDCRLPPSQAEDVQAALVALMSQEEQ

SEQ ID NO: 794101 - protein, 148 aa, Homo sapiens
TGCAVYVWCLISCLGTSGHPCPLSPGQLGELCPEGCLSPTAGVDAGLVWVGGHRAPEAHPGLLLLAQGSSTEPPQAQLHRYNGLFRPSSCLPAFSPGPELSEVNLTRSSSCFFAASPGPAPASWWPLQAQPLPPVGLYSPNICLIADS

SEQ ID NO: 794102 - protein, 163 aa, Homo sapiens
MESSRAGCVLWPVLLTALDPGCAVSTTTKDSQSSPGGPGPTVTPSVISLKCHQPVNAAPSSAWQPRRMVPGDVAMSGHRVGALDERGHPNPQTGHCRGGSVSVTWSSVSCCRGRLAAVRVMIARDPSTCHLAKGCSPAWGFLPQARGPAGTRTPQRRCSSHEA

SEQ ID NO: 794103 - protein, 135 aa, Homo sapiens [sequence omitted]

SEQ ID NO: 794104 - protein, 1000 aa, Homo sapiens
MHPCGHLPSPCSDAVLAVEWECDEATKKACYSKGKSKEECQNYIRVLLVGGDRLFTCGTNAFTPVCTNRSLSNLAEIHDQISGMARCPYSPQHNSTALLTAGGELYAATAMDFPGRDPAIYRSLGILPPLRTAQYNSKWLNEPNFVSSYDIGNFTYFFFRENAVEHDCGKTVFSRAARVCKNDIGGRFLLEDTWTTFMKARLNCSRPGEVPFYYNELQSTFFLPELDLIYGIFTTNVNSIAASAVCVFNLSAIAQAFSGPFKYQENSRSAWLPYPNPNPHFQCGTVDQGLYVNLTERNLQDAQKFILVHEVVQPVTTVPSFMEDNSRFSHVAVDVVQGREALVHIIYLATDYGTIKKVRVPLNQTSSSCLLEEIELFPERRREPIRSLQILHSQSVLFVGLREHVVKIPLKRCQFYRTRSTCIGAQDPYCGWDVVMKKCTSLEESLSMTQWEQSISACPTRNLTVDGHFGVWSPWTPCTHTDGSAVGSCLCRTRSCDSPAPQCGGWQCEGPGMEIANCSRNGGWTPWTSWSPCSTTCGIGFQVRQRSCSNPTPRHGGRVCVGQNREERYCNEHLLCPPHMFWTGWGPWERCTAQCGGGIQARRRICENGPDCAGCNVEYQSCNTNPCPELKKTTPWTPWTPVNISDNGDHYEQRFRYTCKARLADPNLLEVGRQRIEMRYCSSDGTSGCSTDGLSGDFLRAGRYSAHTVNGAWSAWTSWSQCSRDCSRGIRNRKRVCNNPEPKYGGMPCLGPSLEYQECNTLPCPVDGVWSCWSPWTKCSATCGGGHYMRTRSCSNPAPAYGGDICLGLHTEEALCNTQPCPESWSEWSDWSECEASGVQVRARQCILLFPMGSQCSGNTTESRPCVFDSNFIPEVSVARSSSVEEKRCGEFNMFHMIAVGLSSSILGCLLTLLVYTYCQRYQQQSHDATVIHPVSPAPLNTSITNHINKLDKYDSVEAIKAFNKNNLILEERNKYFNPHLTGKTYSNAYFTDLNNYDEY

SEQ ID NO: 794105 - protein, 157 aa, Homo sapiens
ALPEPAPERCFPAAGGLRSLRPAAALGPLQPRPSTFPVQGRPGQCRSSRDAPFSHPGLPRGAGLDTQLCHLEGRLCWARTCPPTGWPRARGPCSWPPSRCPHSGTQRVGGGSGEVAGGGCSCCLHFPSQVLKRILGAALAPRRWMTGTSAPRTCVGV

SEQ ID NO: 794106 - protein, 1074 aa, Homo sapiens
MKGTCVIAWLFSSLGLWRLAHPEAQGTTQCQRTEHPVISYKEIGPWLREFRAKNAVDFSQLTFDPGQKELVVGARNYLFRLQLEDLSLIQAVEWECDEATKKACYSKGKSKEECQNYIRVLLVGGDRLFTCGTNAFTPVCTNRSLSNLAEIHDQISGMARCPYSPQHNSTALLTAGGELYAATAMDFPGRDPAIYRSLGILPPLRTAQYNSKWLNEPNFVSSYDIGNFTYFFFRENAVEHDCGKTVFSRAARVCKNDIGGRFLLEDTWTTFMKARLNCSRPGEVPFYYNELQSTFFLPELDLIYGIFTTNVNSIAASAVCVFNLSAIAQAFSGPFKYQENSRSAWLPYPNPNPHFQCGTVDQGLYVNLTERNLQDAQKFILVHEVVQPVTTVPSFMEDNSRFSHVAVDVVQGREALVHIIYLATDYGTIKKVRVPLNQTSSSCLLEEIELFPERRREPIRSLQILHSQSVLFVGLREHVVKIPLKRCQFYRTRSTCIGAQDPYCGWDVVMKKCTSLEESLSMTQWEQSISACPTRNLTVDGHFGVWSPWTPCTHTDGSAVGSCLCRTRSCDSPAPQCGGWQCEGPGMEIANCSRNGGWTPWTSWSPCSTTCGIGFQVRQRSCSNPTPRHGGRVCVGQNREERYCNEHLLCPPHMFWTGWGPWERCTAQCGGGIQARRRICENGPDCAGCNVEYQSCNTNPCPELKKTTPWTPWTPVNISDNGDHYEQRFRYTCKARLADPNLLEVGRQRIEMRYCSSDGTSGCSTDGLSGDFLRAGRYSAHTVNGAWSAWTSWSQCSRDCSRGIRNRKRVCNNPEPKYGGMPCLGPSLEYQECNTLPCPVDGVWSCWSPWTKCSATCGGGHYMRTRSCSNPAPAYGGDICLGLHTEEALCNTQPCPESWSEWSDWSECEASGVQVRARQCILLFPMGSQCSGNTTESRPCVFDSNFIPEVSVARSSSVEEKRCGEFNMFHMIAVGLSSSILGCLLTLLVYTYCQRYQQQSHDATVIHPVSPAPLNTSITNHINKLDKYDSVEAIKAFNKNNLILEERNKYFNPHLTGKTYSNAYFTDLNNYDEY

SEQ ID NO: 794107 - protein, 88 aa, Homo sapiens
TGLPRRSGSVSLQPLNREDLRKSQSESLGPEFQGLWEWLPENRKKGRIKERRKERRKEGRKEEQKEGMKDKNKDKERENEKVIQEFKM

SEQ ID NO: 794108 - protein, 92 aa, Homo sapiens
SEGRPGRGRAPGPGPPSLGELRLHGGQAQAGRDQVRELAHGAGAEAGAACAAAGESELAARRLVQRQRQMKRKLSHRMKRKLKHKMTACFWP

SEQ ID NO: 794109 - protein, 119 aa, Homo sapiens
KWQMLIKPSDLMRTYYHENSMGETAPMIQLPPPGSFLNTWGLWGLQFKMRFGQGSESLTISDGKDMRVDKICIGYNVHCLSDGSTRSPNFTIMQCTIYTQCNKPVHVPLQSEIKVVFFF

SEQ ID NO: 794110 - protein, 66 aa, Homo sapiens
PSGDTGRRDSSGHRAASSGQHPATHRHRIKALKNDHRQPPVHRQDDTVSSSVGLAGPLPITVRHST

SEQ ID NO: 794111 - protein, 889 aa, Homo sapiens
YFILIKQVYAATRTMESTLTLATEQPVKKNTLKKYKIACIVLLALLVIMSLGLGLGLGLRKLEKQGSCRKKCFDASFRGLENCRCDVACKDRGDCCWDFEDTCVESTRIWMCNKFRCGETRLEASLCSCSDDCLQKKDCCADYKSVCQGETSWLEENCDTAQQSQCPEGFDLPPVILFSMDGFRAEYLYTWDTLMPNINKLKTCGIHSKYMRAMYPTKTFPNHYTIVTGLYPESHGIIDNNMYDVNLNKNFSLSSKEQNNPAWWHGQPMWLTAMYQGLKAATYFWPGSEVAINGSFPSIYMPYNGSVPFEERISTLLKWLDLPKAERPRFYTMYFEEPDSSGHAGGPVSARVIKALQVVDHAFGMLMEGLKQRNLHNCVNIILLADHGMDQTYCNKMEYMTDYFPRINFFYMYEGPAPRIRAHNIPHDFFSFNSEEIVRNLSCRKPDQHFKPYLTPDLPKRLHYAKNVRIDKVHLFVDQQWLAVRSKSNTNCGGGNHGYNNEFRSMEAIFLAHGPSFKEKTEVEPFENIEVYNLMCDLLRIQPAPNNGTHGSLNHLLKVPFYEPSHAEEVSKFSVCGFANPLPTESLDCFCPHLQNSTQLEQVNQMLNLTQEEITATVKVNLPFGRPRVLQKNVDHCLLYHREYVSGFGKAMRMPMWSSYTVPQLGDTSPLPPTVPDCLRADVRVPPSESQKCSFYLADKNITHGFLYPPASNRTSDSQYDALITSNLVPMYEEFRKMWDYFHSVLLIKHATERNGVNVVSGPIFDYNYDGHFDAPDEITKHLANTDVPIPTHYFVVLTSCKNKSHTPENCPGWLDVLPFIIPHRPTNVESCPEGKPEALWVEERFTAHIARVRDVELLTGLDFYQDKVQPVSEILQLKTYLPTFETTI

SEQ ID NO: 794112 - protein, 75 aa, Homo sapiens
LHPSSKHKALQEGPVVPTLDYTTKEMKTQPTEAWPLWGFPSPAPSARQGTCIVGPSFHVNGNPGPWQKYSCFGCI

SEQ ID NO: 794113 - protein, 77 aa, Homo sapiens
DRLSPGVLGCSALCRSGVRTKFGINMVTSRERGTTRFLGLPKCWDHRREPPRPAFILFLVQMGFHHLGQAGLELLTS

SEQ ID NO: 794114 - protein, 108 aa, Homo sapiens
MGSSSEASFRSAQASCSGARRQGLGRGDQNLSVMPPNGRAQTHTPGWVSPCSENRDGLLPATAPGRLCSHRGADIPSFQTHQDPVTASGSSELHADCPQFRALDRAGN

SEQ ID NO: 794115 - protein, 108 aa, Homo sapiens; identical to SEQ ID NO: 794114

SEQ ID NO: 794116 - protein, 40 aa, Homo sapiens
MARSDTTLSIFNPLSPLYSPLYCPSFLIHTPDPNSSTEFV

SEQ ID NO: 794117 - protein, 199 aa, Homo sapiens
MLFLPHVPQVSARKRRELGTPATLFLGSVDGKRPNTLASNTQLYKWISQNDLLGHPKTKSFMTHGETSGIYEAIYHGIPMVGIPLFADQPDNIAHMKALNVDIRTMSSTDLLNALKTVINDPVYKENAMKLSIIRHDLPIKPLDQAAFWIEFVMQHKGAKHLRVAAHDLTWFQYHNLHVIRFLLAYVSTVIFIITRCCL

SEQ ID NO: 794118 - protein, 158 aa, Homo sapiens
YAIPHILKGGREKNGLGATPGWGRGSGQCIPFPRHSVCSCSCQPPLEMQTCLTSPLENMPGRRQPLEARSLVKLASGWLQMERTWFLAPRKNLSQLIIYLLRQRGSKQTWIHAGLVPACSLQLSPGTRPLSSRFWNSAATDAINIYGASTMCQTLAPD

SEQ ID NO: 794119 - protein, 690 aa, Homo sapiens
KRRLGSGRSAGPPRAPGARGEWERARQDHAGALLRLALGRRAAREQPAARLPRPRQPPGSPQPPVRSSPSAARAGRRPGRARGGGGGGTAPSAPSRLRPLAAGAGRAGAPRRRLEQRPRPRRGLAPGRSPREAARAAEGTERRRGTLPGGGAAAAAAAAAAQGAEAGGAPSQDAAVPAPDLWPPLHAALRAGRGGARGRRAGGRARWGPRGGPAAAASSSALPAAPGGSVFPAGGGPLLTGGAAVHISAAGAAKATLYCRVFLLDGTEVSVDLPKHAKGQDLFDQIVYHLDLVETDYFGLQFLDSAQVAHWLDHAKPIKKQMKIGPAYALHFRVKYYSSEPNNLREEFTRYLFVLQLRHDILSGKLKCPYETAVELAALCLQAELGECELPEHTPELVSEFRFIPNQTEAMEFDIFQRWKECRGKSPAQAELSYLNKAKWLEMYGVDMHVVRGRDGCEYSLGLTPTGILIFEGANKIGLFFWPKITKMDFKKSKLTLVVVEDDDQGREQEHTFVFRLDSARTCKHLWKCAVEHHAFFRLRTPGNSKSNRSDFIRLGSRFRFSGRTEYQATHGSRLRRTSTFERKPSKRYPSRRHSTFKASNPVIAAQLCSKTNPEVHNYQPQYHPNIHPSQPRWHPHSPNVRPSFQDDRSHWKASASGDDSHFDYVHDQNQKNLGGMQSMMYRDKLMTAL

SEQ ID NO: 794120 - protein, 1099 aa, Homo sapiens
KRRLGSGRSAGPPRAPGARGEWERARQDHAGALLRLALGRRAAREQPAARLPRPRQPPGSPQPPVRSSPSAARAGRRPGRARGGGGGGTAPSAPSRLRPLAAGAGRAGAPRRRLEQRPRPRRGLAPGRSPREAARAAEGTERRRGTLPGGGAAAAAAAAAAQGAEAGGAPSQDAAVPAPDLWPPLHAALRAGRGGARGRRAGGRARWGPRGGPAAAASSSALPAAPGGSVFPAGGGPLLTGGAAVHISAAGAAKATLYCRVFLLDGTEVSVDLPKHAKGQDLFDQIVYHLDLVETDYFGLQFLDSAQVAHWLDHAKPIKKQMKIGPAYALHFRVKYYSSEPNNLREEFTRYLFVLQLRHDILSGKLKCPYETAVELAALCLQAELGECELPEHTPELVSEFRFIPNQTEAMEFDIFQRWKECRGKSPAQAELSYLNKAKWLEMYGVDMHVVRGRDGCEYSLGLTPTGILIFEGANKIGLFFWPKITKMDFKKSKLTLVVVEDDDQGREQEHTFVFRLDSARTCKHLWKCAVEHHAFFRLRTPGNSKSNRSDFIRLGSRFRFSGRTEYQATHGSRLRRTSTFERKPSKRYPSRRHSTFKASNPVIAAQLCSKTNPEVHNYQPQYHPNIHPSQPRWHPHSPNVSYPLPSPVLSSSDRLPFGIEENGGTPFLTAASGRHHHQHQHQHQHQHHSNYSLSLTLENKEGPLRSPNSSSKSLTKLSPGTPALFSEAAAHLKKLELETVKAAGPWPPLHININKAEEKKVSEKTLQTPLLPSPVADHVKCNILKAQLENASRVNIQGGKEESPFVNINKKSSLQDASVRSPIPIRVETAQPAVEKPEIKPPRVRKLTRQYSFDEDDLPPDLAEAVGVTTSTTTNTTTAATQVSVPLPSPKVQNVSSPHKSEGKGLLSPGAKSPSDRGGAFTLEPGDLLMDFTEATPLAEPASNPHCAHSRCSPPLSLPMKEETTGVCMYPPIKTRLIKTFPVDTMTPFPDTFTTGPQFTADFRDSKLQCCPGPTSPLIPAATLRPLTETVSTVQTIYTTPETCFSGSQCRDTPAGTGEREDDEKTVDDQTVKFSPCHLEDGMVPSVHLLSSGFVCSL

SEQ ID NO: 794121 - protein, 243 aa, Homo sapiens
SFSPLLETIEPVNILDVKDDCGLQLRVSEDTCPLNVHSYDPQGEGRVDPDLSKPKNLAPLQESQESYTTGTPKATSSHQGLGSTLPRRGTRNAIVPRETSVSKTHRSADRAKGKEKKKKEAEEEDEELSNFAYLLASKLSLSPREHPLSPHHASGGQGSQRASHLLPAGAKGPSKLPYPVAKSGKRALAGGPAPTEKTPHSGAQLGVPREKPLALGVVRPSQPRKRRCDSFVTGRRKKRRRSQ

SEQ ID NO: 794122 - protein, 205 aa, Homo sapiens
SFSPLLETIEPVNILDVKDDCGLQLRVSEDTCPLNVHSYDPQGEGRVDPDLSKPKNLAPLQESQESYTTGTPKATSSHQGLGSTLPRRGTRNAIVPRETSVSKTHRSADRAKGKEKKKKEAEEEDEELSNFAYLLASKLSLSPREHPLSPHHASGGQGSQRASHLLPAGAKGPSKLPYPVAKSGKRALAGGPAPTSGSSSTLTAS

SEQ ID NO: 794123 - protein, 111 aa, Homo sapiens
  misc_feature (9)..(9): Xaa can be any naturally occurring amino acid
NAGCTVWEXGSPTEPAAEIAAAQLLPPPAFPSSFLTSFPSLGFPLLPHSQRLPSPLSADSAAGCSQLDFNPTPLSPSPHCLPDAPLPRPAPLSPLPPLPLSAALTLLSPSF

SEQ ID NO: 794124 - protein, 84 aa, Homo sapiens
  misc_feature (9)..(9): Xaa can be any naturally occurring amino acid
NAGCTVWEXGSPTEPAAEIAAAQLLPPPAFPSSFLTSFPSLGFPLLPHSQRLPSPLSADSAAGCSQLDFNPTPLSPLTLLSPSF

SEQ ID NO: 794125 - protein, 111 aa, Homo sapiens; identical to SEQ ID NO: 794123
  misc_feature (9)..(9): Xaa can be any naturally occurring amino acid

SEQ ID NO: 794126 - protein, 111 aa, Homo sapiens; identical to SEQ ID NO: 794123
  misc_feature (9)..(9): Xaa can be any naturally occurring amino acid

SEQ ID NO: 794127 - protein, 70 aa, Homo sapiens
TVQGNKRWIHTCQPLRTVGAHLWERHSDLGHIIHFRFRESLNNWEQTGKQRLTSFFPSKGDVLGGIILSK

SEQ ID NO: 794128 - protein, 87 aa, Homo sapiens
SVNSREKQLSHTPQAEPERDAHAQGGRAQHLRSQHHLCTGHHLAGTEWVLRGGAGTPGRVSTQRKLQTPHTSTSASPDLDLTGLGLT

SEQ ID NO: 794129 - protein, 102 aa, Homo sapiens
MRSFKSLIFSSRPHSLPGRDVGTSCSCQAGNRSLSMSTGSALTPRKDCDKHGLTCGSTQPAVSTLLFSRMQHLMFCQEAVELHIEVASVSSHSKMEISLSLF

SEQ ID NO: 794130 - protein, 101 aa, Homo sapiens
KSKLKKWKLQIHQAPEMLIDFFVERKIISFDGCIAQLFFLHFAGASEMFLLTVMAFDLYTAICRPLHYATIMNQRLCCILVALSWRGGFIHSIIQEPKGTD

SEQ ID NO: 794131 - protein, 120 aa, Homo sapiens
MPFTNNDFGKSLFLFKLQYSQLKSTERNPYPLKLLHTISTYKITLSGQAQWLMPVIPGLWEAEAGRSLEARSLRTAWQHGETSCTNITKISWAWWHTPVVPATWKPEVRGLLEPRRSRLQ

SEQ ID NO: 794132 - protein, 110 aa, Homo sapiens
PWVVALEMFAAAVFDPIFWVKHPKEGEALKSKEHLRIESQGKFDLCYDNVPSNLQFSNFLVSNLLNVENCLHGYFHQYLLYFKTEKNLGQGWWLAPIIPALWEAEAGGLL

SEQ ID NO: 794133 - protein, 106 aa, Homo sapiens
MLVNGHYQEFKTRFGIMTSGQTHMQNLPFGPFSRASSAASGSSSFSELSVCVLACPLTDIILLGTVAFTFDDVGKEDPATTTSCCFCNAAYKPRESEDTLTRKASK

SEQ ID NO: 794134 - protein, 137 aa, Homo sapiens
EIFCKSGNDTGQGLCSPGLRPPTGTFLHPSVNRPQAPPQVFLCELVGRPGPGPGFAAPCLPPPWRCGASGWAWEAGNTFGNSRLRQLWTEDPAQQPRELASPLSLPTPTRPSCCFHGSGTRRILSQELPRRALIFNP

SEQ ID NO: 794135 - protein, 136 aa, Homo sapiens
IAPSLLLFRRPGLCSPGLRPPTGTFLHPSVNRPQAPPQVFLCELVGRPGPGPGFAAPCLPPPWRCGASGWAWEAGNTFGNSRLRQLWTEDPAQQPRELASPLSLPTPTRPSCCFHGSGTRRILSQELPRRALIFNP

SEQ ID NO: 794136 - protein, 115 aa, Homo sapiens
THSGLPFGQAGASATGKERQAEVPTATLQLGCTQGVQAPGPVESCGRDCRKREAAPGPQAGGRGSGGRGVEAPSGWGRAWGPRVLKWRGFGQGHHAGQKLGEIHGVQVGSCPCRG

SEQ ID NO: 794137 - protein, 131 aa, Homo sapiens
RESCVPAGAPHPPCRGSWQWRCWLRSTDLRPRLGPEMPGASAWARWGDFGSPECKLYHFEGPRQAPQPPVHRGCRGDDAEGRSRWRTWGLTGSWLQTLRRHVQRPSCCFHGSGTRRILSQELPRRALIFNP

SEQ ID NO: 794138 - protein, 150 aa, Homo sapiens
EIFCKSGNDTGQGLCSPGLRPPTGTFLHPSVNRPQAPPQVFLCELVGRPGPGPGFAAPCLPPPWRCGASGWAWEAGNTFGNSRLRQLWTEDPAQQPRELASPLSLPTPTWPGSCLTRKGIKAGLGWRLENPETSAGLDPATHQAVLKATE

SEQ ID NO: 794139 - protein, 730 aa, Homo sapiens
MPGKFFAFLVEAEFHHVAQAGLELLTQVIRPPQPPKCWDYRCEPPHPAFFLFFLRKWSNVLVVMLSRDLEECALFTLKIVGDKISYGNTNSFFLIAFKGNIQRKGKLDAVVEGFPVSLSERFRNKEILTSCCNRQTLNLSGFSTTDMYFLFISQSNMNGGIFLHFAATLRASAIRVDKDGSGCIAHSCLGLEPAFSLLSQLHDPNLTVRCLGKVGEYLGVTNLTLTVFATRRKLVTDSVLISIVPGEIRTLKDGGGRRRWYCLWWRGRKLKYITGSDETHRSETGKAGLKWCAEEGNGCRFTISMEPTKTKVNSGTTNYAALNVITLLQIYYIKRTFLDIFPLTLNIFKIYRKIERIVQYERLYTHYLRSAVIHVLPYLLCIAICKYVNFFPNTLKICCRHNIYHNISYNCNAIIISKIILYSYYTHTHDEYNQFIFNLYSNFPNYLKMTFISLILSLFFKQSSQIVFMFISLVSFNLKIPLFLFYSIYFLKTWQDSCIVPHSGFVWFLLHAVVLLVLILFGFLINYNGSNGLIRFKLKFLARIFHEVIFLFHVTSQQKAYNARFFTENDVKFDHFVGMVITKSLHCEGLFFTLQLATNLLVNTLAPCEYLNNLSPKYFKMHCRSLPEIIISLGGIKSVIFLIYIIFSIFSSCHCSVKNNFASSTGTELHFFLKKQDIFIFKKIIGNFEYREKPKSSAVISTASELMLKMLCTISFHSFFNTDKDIYYKI

SEQ ID NO: 794140 - protein, 109 aa, Homo sapiens
RLIHPRPGEWKSTSRARGAGARRGAEKYRRRSRGENKDDATAVLRPSRPPTPADFNLLSLFKTSRRSASSSFSGCAFCTAMETGLAERLPFGQQARPLRKRPQWGARRS

SEQ ID NO: 794141 - protein, 156 aa, Homo sapiens
MASHLTLPVMSCLFICSHQRGCAVRDDRGCVSLRTVEAHSGFGDEAFPAPVSRPPSFHALPCFAVPCLTSSLGLPEQEGLQGALWSSLPHLDPRQGRRACLLSAGTRGGRMWPARQGGPWGPFQELSAAQASPLVQPGLCTPFCHPLTPQEVIHGS

SEQ ID NO: 794142 - protein, 142 aa, Homo sapiens
ALFQQVTTYVSFLLGYNSFSIENRSDLIFFLSFYKTINSSNKLTSLGRKKAWLRVWNYILHWLSECPNIDLINSQTNIKVKLCARKIEEQGKKGVGAWDFTVAATGRVETFVGNFSLFLSRVDNPLFHYRQTGFILLLPLEF

SEQ ID NO: 794143 - protein, 302 aa, Homo sapiens
SLEGGDRPLSWEESTEHSSLALNSGLPNGETSSGGQPRLAEPDIYQEKLSQVRDVRSKDLGSSTDLGTSLPLDSWVNITRFCDSQLKHGAPRPGMKSSPHDSHTCVTYPERNHILLHPHWNQDTEQETSELESLYQASLQASQAGCSGWGQQDTAWHPLSQTGSADGMGRRLHSAHDPGLSKTSTAEMEHGLHEARTVRTSQATPCRGLSRECGEDEQYSAENLRRISRSLSGTVVSEREEAPVSSHSFDSSNVRKPLETGHRCSSSSSLPVIHDPSVFLLGPQLYLPQPQFLSPDVLMPTM

SEQ ID NO: 794144 - protein, 184 aa, Homo sapiens
KAFSFYSSYLRHERTHTGEKPYECKQCSKAFPFYSSYLRHERTHTGEKPYKCKQCSKAFPDSSSCLIHERTHTGEKPYTCKQCGKAFSVSGSLQRHETTHSAEKPYACQQCGKAFHHLGSFQRHMIRHTGNGPHKCKICGKGFDCPSSLQSHERTHTGEKPYECKECGKAFASLSSLHRHKKTH

SEQ ID NO: 794145 - protein, 94 aa, Homo sapiens
MSSPEPPTEPPEPDNPTWSTQPTYSNLGQIRAHLLPSKACRLRTPGSLSTNPEPLPPPLPKKILTRTQSLPTRRTLHPSSIQVQPPRRPFLGSH

SEQ ID NO: 794146 - protein, 93 aa, Homo sapiens
MLPRPKAPASPRRPQTPTPSEQDADPGPASPRDTEAQRLRFRQFQYHVASGPHLALGQLWTLCRQWLRPEARSKEQMLELLVLEQFLGALPSK

SEQ ID NO: 794147 - protein, 93 aa, Homo sapiens; identical to SEQ ID NO: 794146

SEQ ID NO: 794148 - protein, 155 aa, Homo sapiens
QALMARCTVSSGSVCTSVLFLHFKPCELTCFLPQGICLLMVPAVKNQASGSARGATKVRRKCQAGCQNEHLGELDDGTDGKNQLNIRENGGRGQNCEQELEESVAEKDLSQTSRDLEKMMSKHIFLKPMLSISDLVNFLIVPNLANEKVLQGQVW

SEQ ID NO: 794149 - protein, 1007 aa, Homo sapiens
MEVFPLLLVLSVWWSRTWDSANADSIIHIGAIFDESAKKDDEVFRTAVGDLNQNEEILQTEKITFSVTFVDGNNPFQAVQEACELMNQGILALVSSIGCTSAGSLQSLADAMHIPHLFIQRSTAGTPRSGCGLTRSNRNDDYTLSVRPPVYLHDVILRVVTEYAWQKFIIFYDSEYDIRGIQEFLDKVSQQGMDVALQKVENNINKMITTLFDTMRIEELNRYRDTLRRAILVMNPATAKSFITEVVETNLVAFDCHWIIINEEINDVDVQELVRRSIGRLTIIRQTFPIPQNISQRCFRGNHRISSTLCDPKDPFAQNMEISNLYIYDTVLLLANAFHKKLEDRKWHSMASLSCIRKNSKPWQGGRSMLETIKKGGVSGLTGELEFGENGGNPNVHFEILGTNYGEELGRGVRKLGCWNPVTGLNGSLTDKKLENNMRGVVLRVVTVLEEPFVMVSENVLGKPKKYQGFSIDVLDALSNYLGFNYEIYVAPDHKYGSPQEDGTWNGLVGELVFKRADIGISALTITPDRENVVDFTTRYMDYSVGVLLRRAEKTVDMFACLAPFDLSLWACIAGTVLLVGLLVYLLNWLNPPRLQMGSMTSTTLYNSMWFVYGSFVQQGGEVPYTTLATRMMMGAWWLFALIVISSYTANLAAFLTITRIESSIQSLQDLSKQTEIPYGTVLDSAVYEHVRMKGLNPFERDSMYSQMWRMINRSNGSENNVLESQAGIQKVKYGNYAFVWDAAVLEYVAIYDPDCSFYTIGNTVADRGYGIALQHGSPYRDVFSQRILELQQNGDMDILKHKWWPKNGQCDLYSSVDTKQKGGALDIKSFAGVFCILAAGIVLSCFIAMLETWWNKRKGSRVPSKEDDKEIDLEHLHRRVNSLCTDDDSPHKQFSTSSIDLTPLDIDTLPTRQALEQISDFRNTHITTTTFIPEQIQTLSRTLSAKAASGFTFGNVPEHRTGPFRHRAPNGGFFRSPIKTMSSIPYQPTPTLGLNLGNDPDRGTSI

SEQ ID NO: 794150 - protein, 248 aa, Homo sapiens
MEVFPLLLVLSVWWSRTWDSANADSIIHIGAIFDESAKKDDEVFRTAVGDLNQNEEILQTEKITFSVTFVDGNNPFQAVQEACELMNQGILALVSSIGCTSAGSLQSLADAMHIPHLFIQRSTAGTPRSGCGLTRSNRNDDYTLSVRPPVYLHDVILRVVTEYAWQKFIIFYDSEYDIRGIQEFLDKVSQQGMDVALQKVENNINKMITTLFDTMRIEELNRYRDTLRRAILVMNPATAKSFITEMSF

SEQ ID NO: 794151 - protein, 152 aa, Homo sapiens
LVSAPDAMAIMAAGPHGLRPSGFSCFLLSITLPFATISGDTSTDPHGSGPPPPPTEPRVQVHDAKFRAQINQTNTFNMNMQTLCCDVRRGLTSYASACNRQDSTATNCKGEPMFICTGFAGKLLEVRPLTQASSHEVFVIAAAVVKCACFRQ

SEQ ID NO: 794152 - protein, 74 aa, Homo sapiens
KQLCSYGQIELLESVSSLVKWTILLKEIEGLTDSIQGIDKRSPRRLHRASSGGWKFNIKAQADQQIQCLFSPPE

SEQ ID NO: 794153 - protein, 197 aa, Homo sapiens
WQGGNQDNNYLLHKTKYDTDDSLLCDAGTAISGGKAEGEKGRRRSSPARSRIKQGRSSSFPGRRRPRGGAHGGRGRGRARLKSTASSIETLVVADIDSSPSKEEEEEDDDTMQNTVVLFSNTDKFVLMQDMCVVCGSFGRGAEGHLLACSQCSQCYHPYCVNSKITKVMLLKGWRCVECIVCEVCGQASDPSRLLLC

SEQ ID NO: 794154 - protein, 716 aa, Homo sapiens [sequence omitted]

SEQ ID NO: 794155 - protein, 583 aa, Homo sapiens
MKDVQTSTPAEQDLEMASEGEQKRLEEYENNQPQVKNQIHSRDDLDDIIQSSQTVSEDGDSLCCNCKNVILLIDQHEMKCKDCVHLLKIKNTFCLWKRLIKLKDNHCEQLRVKIRKLKNKASVLQKRISEKEEIKSQLKHEILELEKELCSLRFAIQQEKKKRRNVEELHQKVREKLRITEEQYRIEADVTKPIKPALKSAEVELKTGGNNSNQVSETDEKEDLLHENRLMQDEIARLRLEKDTIKNQNLEKKYLKDFEIVKRKHEDLQKALKRNGETLAKTIACYSGQLAALTDENTTLRSKLEKQRESRQRLETEMQSYHCRLNAARCDHDQSHSSKRDQELAFQGTVDKCRHLQENLNSHVLILSLQLSKAESKSRVLKTELHYTGEALKEKALVFEHVQSELKQKQSQMKDIEKMYKSGYNTMEKCIEKQERFCQLKKQNMLLQQQLDDARNKADNQEKAILNIQARCDARVQNLQAECRKHRLLLEEDNKMLVNELTHSKEKECQYEKEKAEREVAVRQLQQKRDDVLNKGSATKALLDASSRHCTYLENGMQDSRKKLDQMRSQVCMQLCTPTTVNL

SEQ ID NO: 794156 - protein, 67 aa, Homo sapiens
MEREVDDRLGLLYNSARPKPKEILSGRGIAVGHIKGHRPDLSPTCLQALPGPLIHVFTDNFGALIIF

SEQ ID NO: 794157 - protein, 433 aa, Homo sapiens
MAFVLILVLSFYELVSGQWQVTGPGKFVQALVGEDAVFSCSLFPETSAEAMEVRFFRNQFHAVVHLYRDGEDWESKQMPQYRGRTEFVKDSIAGGRVSLRLKNITPSDIGLYGCWFSSQIYDEEATWELRVAALGSLPLISIVGYVDGGIQLLCLSSLFQPSPWRLASILLGLLCGALCGVVMGMIIVFFKSKGKIQAELGMCHVLSLPHMVLPGPSLIHSLSLWTTLAAGWTGSTDWRRKHGQAELRDARKHAVEVTLDPETAHPKLCVSDLKTVTHRKAPQEVPHSEKRFTRKSVVASQGFQAGKHYWEVDVGQNVGWYVGVCRDDVDRGKNNVTLSPNNGYWVLRLTTEHLYFTFNPHFISLPPSTPPTRVGVFLDYEGGTISFFNTNDQSLIYTLLTCQFEGLLRPYIQHAMYDEEKGTPIFICPVSWG

SEQ ID NO: 794158 - protein, 464 aa, Homo sapiens
MAFVLILVLSFYELVSGQWQVTGPGKFVQALVGEDAVFSCSLFPETSAEAMEVRFFRNQFHAVVHLYRDGEDWESKQMPQYRGRTEFVKDSIAGGRVSLRLKNITPSDIGLYGCWFSSQIYDEEATWELRVAALGSLPLISIVGYVDGGIQLLCLSSGWFPQPTAKWKGPQGQDLSSDSRANADGYSLYDVEISIIVQENAGSILCSIHLAEQSHEVESKVLIGVFQPSPWRLASILLGLLCGALCGVVMGMIIVFFKSKGKIQAELDWRRKHGQAELRDARKHAVEVTLDPETAHPKLCVSDLKTVTHRKAPQEVPHSEKRFTRKSVVASQGFQAGKHYWEVDVGQNVGWYVGVCRDDVDRGKNNVTLSPNNGYWVLRLTTEHLYFTFNPHFISLPPSTPPTRVGVFLDYEGGTISFFNTNDQSLIYTLLTCQFEGLLRPYIQHAMYDEEKGTPIFICPVSWG

SEQ ID NO: 794159 - protein, 808 aa, Homo sapiens
MSLSGLGLKVMLTLKMNCEVFPLFYALVGVRLIFFKTYVVLKYLLEFTREVILACYFLFLSKFCFHSFFIVKYIELECIHKQMQHNLKSSSMNFDKCINLFNFHCKQNIVNFRQLKSPLVPIYLQYLSLPQPQATNDFHVLICHLYTSLVSFLFISFAHLFFYFFFFETESCYVTQAGLELLGLGDPPASASQVVGTTGTHYYFGLPIFKSGCLFSYYCVLYTVGYSTFPRISCKWTQTYCCVWPLLFSVMFLSFILACYVYQCLIQFLLLHSIGLYSYTTICLFILLLMEYWLFPVFSYYYYYFFFLRRSLALSPGWSAVVQSRLTATSASQVQTILLPQPPESAGTTGLCHHAQLIFIFLVETGFHHVGQDGLDLLTSCSAHLGLPKCWDYRCEPPRLVFFVCFVLFLDRVSLCEPRLECSGMISAHYKPAPLRFKRFLCPSLLSSWGYSVCHHAWLIFVLVVETGFCHVGQAGLELLTSSDLPALASQSVGITSVSHHTRPGMSFFITAINFSFEVKLFLASDSYLIFFVVLAHILIGLCYYGSLCILDLSFCIWCEASVKFNFFSTNILLFQYLLMIRLSFPPLNYLNALMKSNWPYVCGSTFGLYNSVPVIYMSTLMSIPHYFDYCCFIVSDIMLPEITFSTFILLLMVALAIRGPLHFRRHFRINLSIATKNAVIGIVVNLETNLGRMVILTVSSFRSMSIFSLSIGLLKFILAVFYGFYCRGLTHFVTFVAMCLTFFDTSVNGNFFFYVLVVHYYTKSSLGDYYNILLKICEWRETREVELAVSRDRTTALQPGRQSKTPS

SEQ ID NO: 794160 - protein, 147 aa, Homo sapiens
RRICCYQCKGQAEAGAENLLSPAAARLSPSEGSPSFAEMMNDWMPIAKEYDPLKAGSIDGTDEDPHDRAVWRAMLARYVPNKGVIGDPLLTLFVARLNLQTKEDKLKEVFSRYGDIRRLRLVRDLVTGFSKGYAFIEYKEERAVIKA

SEQ ID NO: 794161 - protein, 102 aa, Homo sapiens
GLRTSPPARPTQSPEPWRSHPKPPVPAAAVFFTCSREGLHLRAEVRPWAGARSQRGHSGSARLSRSPSSRREISETKARLGELLPFPPPASLKHSYTESSAL

SEQ ID NO: 794162 - protein, 124 aa, Homo sapiens
MGSSSEASFRSAQASCSGARRQGLGRGDQNLSVMPPNGRAQTHTPGWVSDPLVLGAQVHGGCRGIEALSVSSGSWSSATVWILTGLGLGLSRPFLPGATVLRDRPLGSAFELSYDQKKAPLRLQ

SEQ ID NO: 794163 - protein, 86 aa, Homo sapiens
MGSSSEASFRSAQASCSGARRQGLGRGDQNLSVMPPNGRAQTHTPGWVSDPLVLGAQVHGGCRGIEALSVSSGSWSSATVWILTVQ

SEQ ID NO: 794164 - protein, 355 aa, Homo sapiens
MDYTLDLSVTTVTDYYYPDIFSSPCDAELIQTNGKLLLAVFYCLLFVFSLLGNSLVILVLVVCKKLRSITDVYLLNLALSDLLFVFSFPFQTYYLLDQWVFGTVMCKVVSGFYYIGFYSSMFFITLMSVDRYLAVVHAVYALKVRTIRMGTTLCLAVWLTAIMATIPLLVFYQVASEDGVLQCYSFYNQQTLKWKIFTNFKMNILGLLIPFTIFMFCYIKILHQLKRCQNHNKTKAIRLVLIVVIASLLFWVPFNVVLFLTSLHSMHILDGCSISQQLTYATHVTEIISFTHCCVNPVIYAFVGEKFKKHLSEIFQKSCSQIFNYLGRQMPRESCEKSSSCQQHSSRSSSVDYIL

SEQ ID NO: 794165 - protein, 136 aa, Homo sapiens [sequence omitted]

SEQ ID NO: 794166 - protein, 152 aa, Homo sapiens
TRPCQTGGFCIDFTSEMSAGFRVSRAASAASMQNPPGPVKLVMESICIMKGMKPERKPDPSGSGKMIEDYWGVSKKILGDLKFLESLKTYDKDNIPPLTMKRIRERFINHPEFQPAVIKNVSSACEGLCKWVRAMEVYDRVAKVVAPKRERL

SEQ ID NO: 794167 - protein, 127 aa, Homo sapiens
QITPTCPALTVPSGWTLTGPVTELGPAWSHQCVSLNHPISSAVNRAGRGQVSCLPQGSRRPYLSDPIHSSQQTHEAGIVIFIVQSRKWVHTEVKRLAQVTQLGRGCDLNSVFWLQSPHRVTQGTTKS

SEQ ID NO: 794168 - protein, 419 aa, Homo sapiens
MVFSAVLTAFHTGTSNTTFVVYENTYMNITLPPPFQHPDLSPLLRYSFETMAPTGLSSLTVNSTAVPTTPAAFKSLNLPLQITLSAIMIFILFVSFLGNLVVCLMVYQKAAMRSAINILLASLAFADMLLAVLNMPFALVTILTTRWIFGKFFCRVSAMFFWLFVIEGVAILLIISIDRFLIIVQRQDKLNPYRAKVLIAVSWATSFCVAFPLAVGNPDLQIPSRAPQCVFGYTTNPGYQAYVILISLISFFIPFLVILYSFMGILNTLRHNALRIHSYPEGICLSQASKLGLMSLQRPFQMSIDMGFKTRAFTTILILFAVFIVCWAPFTTYSLVATFSKHFYYQHNFFEISTWLLWLCYLKSALNPLIYYWRIKKFHDACLDMMPKSFKFLPQLPGHTKRRIRPSAVYVCGEHRTVV

SEQ ID NO: 794169 - protein, 136 aa, Homo sapiens
SVYISVAPWGGWPQFQCRCKSGSLQHLQLIDSSRPPSPRTKPVLSSPVSEQSQNPHHPPPGLRKFCFKSLFLHCTMGNAVCGGHLPTNTAAVRHTRLLKIHGNCWVWWLMPVIPALWEAEAGGLLECRSSRPAWAT

SEQ ID NO: 794170 - protein, 499 aa, Homo sapiens
RATEGCELAQPQVTLAVGGPPAWSRDPPRHLQTELDGPMNTDLAAGKMASAACSMDPIDSFELLDLLFDRQDGILRHVELGEGWGHVKDQQVLPNPDSDDFLSSILGSGDSLPSSPLWSPEGSDSGISEDLPSDPQDTPPRSGPATSPAGCHPAQPGKGPCLSYHPGNSCSTTTPGPVIQVPEASVTIDLEMWSPGGRICAEKPADPVDLSPRCNLTVKDLLLSGSSGDLQQHHLGASYLLRPGAGHCQELVLTEDEKKLLAKEGITLPTQLPLTKYEERVLKKIRRKIRNKQSAQESRKKKKEYIDGLETRMSACTAQNQELQRKVLHLEKQNLSLLEQLKKLQAIVVQSTSKSAQTGTCVAVLLLSFALIILPSISPFGPNKTESPGDFAPVRVFSRTLHNDAASRVAADAVPGSEAPGPRPEADTTREESPGSPGADWGFQDTANLTNSTEELDNATLVLRNATEGLGQVALLDWVAPGPSTGSGRAGLEAAGDEL

SEQ ID NO: 794171 - protein, 38 aa, Homo sapiens
MIWPYALGFSKGRAWTSFPSFLEICTGNVSKISPAIVK

SEQ ID NO: 794172 - protein, 188 aa, Homo sapiens
MTPTAFFSSPNTAGGMTPTASSSQHTAGGMTPTVFSSQHTAGGMTPTVFSSQHTAGGMTPTASSSQHTAGGMTPTVFSSPHTAGGMTPTVFSSPHTAGGMTPTVFSSPHTAGGMTPTASSSQHTAGVMTPTASSSPHTAGGMTPTAFSSPNTAGGMTPTASCSPHTHCRGSDPHILMQWFLWSLTVQH

SEQ ID NO: 794173 - protein, 143 aa, Homo sapiens
WEGSSQGQTKPSIESTREEKERWIRSKYEHKLFLAPLPCTELSLGQHLLRATADEDLRTAILLLAHGSREEVNETCGEGDGCTALHLACRKGNVVLAQLLIWYGVDVMARDAHGNTALTYARQASSQECINVLLQYGCPDECV

SEQ ID NO: 794174 - protein, 86 aa, Homo sapiens
GVQWCDAPSRLSARCNLRNLRLPGSVDSLDSASCDWTTGMHHHTRLILVETGVSPCWAGLSRTPDLVTPDLVIRLPRPHEVLGLQA

SEQ ID NO: 794175 - protein, 343 aa, Homo sapiens
MNQLGGLFVNGRPLPLDTRQQIVRLAVSGMRPCDISRILKVSNGCVSKILGRYYRTGVLEPKGIGGSKPRLATPPVVARIAQLKGECPALFAWEIQRQLCAEGLCTQDKTPSVSSINRVLRALQEDQGLPCTRLRSPAVLAPAVLTPHSGSETPRGTHPGTGHRNRTIFSPSQAEALEKEFQRGQYPDSVARGKLATATSLPEDTVRVWFSNRRAKWRRQEKLKWEMQLPGASQGLTVPRVAPGIISAQQSPGSVPTAALPALEPLGPSCYQLCWATAPERCLSDTPPKACLKPCWGHLPPQPNSLDSGLLCLPCPSSHCPLASLSGSQALLWPGCPLLYGLE

SEQ ID NO: 794176 - protein, 342 aa, Homo sapiens
MNQLGGLFVNGRPLPLDTRQQIVRLAVSGMRPCDISRILKVSNGCVSKILGRYYRTGVLEPKGIGGSKPRLATPPVVARIAQLKGECPALFAWEIQRQLCAEGLCTQDKTPSVSSINRVLRALQEDQGLPCTRLRSPAVLAPAVLTPHSGSETPRGTHPGTGHRNRTIFSPSQAEALEKEFQRGQYPDSVARGKLATATSLPEDTVRVWFSNRRAKWRRQEKLKWEMQLPGASQGLTVPRVAPGIISAQQSPGSVPTAALPALEPLGPSCYQLCWATAPERCLSDTPPKACLKPCWDCGSFLLPVIAPSCVDVAWPCLDASLAHHLIGGAGKATPTHFSHWP

SEQ ID NO: 794177 - protein, 88 aa, Homo sapiens
NQSASSTGALQKKASKISSFLRSLRATPGSKTRVTSHDREVDIVAKMVEKQNIEAKVEKAQGGQELEMISGTMTSEKTEMIVFETKSI

SEQ ID NO: 794178 - protein, 239 aa, Homo sapiens
MASTAVQLLGFLLSFLGMVGTLITTILPHWRRTAHVGTNILTAVSYLKGLWMECVWHSTGIYQCQIYRSLLALPQDLQAARALMVISCLLSGIACACAVIGMKCTRCAKGTPAKTTFAILGGTLFILAGLLCMVAVSWTTNDVVQNFYNPLLPSGMKFEIGQALYLGFISSSLSLIGGTLLCLSCQDEAPYRPYQAPPRATTTTANTAPAYQPPAAYKDNRAPSVTSATHSGYRLNDYV

SEQ ID NO: 794179 - protein, 239 aa, Homo sapiens; identical to SEQ ID NO: 794178

SEQ ID NO: 794180 - protein, 174 aa, Homo sapiens
ESLCPWFALPPYTSCPLLGYYADNWKDHLRGKDPPMTKAFFDTAEESPFCMYHYFVDIITWNKNVRRGDITIKLRDKAGNTTESKINHEPTTFQKYHQVSLLARFNQDLDKVAAISLMFSTGSLIGPRYKLRILRMKLRSLAHPERPQLCRYDLVLMENVETVFQPILGPELQL

SEQ ID NO: 794181 - protein, 116 aa, Homo sapiens
CSEDPRSESQYRCHLLSYYADNWKDHLRGKDPPMTKAFFDTAEESPFCMYHYFVDIITWNKNVRRGDITIKLRDKAGNTTESKINQISNRPKVQAQDSPNEVKVPCPSGEASAVSV

SEQ ID NO: 794182 - protein, 141 aa, Homo sapiens
GIELGTEGDTGEESPFCMYHYFVDIITWNKNVRRGDITIKLRDKAGNTTESKINHEPTTFQKYHQVSLLARFNQDLDKVAAISLMFSTGSLIGPRYKLRILRMKLRSLAHPERPQLCRYDLVLMENVETVFQPILGPELQL

SEQ ID NO: 794183 - protein, 172 aa, Homo sapiens
CSEDPRSESQYRCHLLSYYADNWKDHLRGKDPPMTKAFFDTAEESPFCMYHYFVDIITWNKNVRRGDITIKLRDKAGNTTESKINHEPTTFQKYHQVSLLARFNQDLDKVAAISLMFSTGSLIGPRYKLRILRMKLRSLAHPERPQLCRYDLVLMENVETVFQPILGPELQL

SEQ ID NO: 794184 - protein, 85 aa, Homo sapiens
FIAKDSRHVAQTHLKLLDPDNPHTLASQNAEITAYLKLTSDDMIATPYPELISTYDVGIFHMEINTGKQLIILSGFIRNKWISET

SEQ ID NO: 794185 - protein, 70 aa, Homo sapiens
GAGLSSVMLMYTQAMLLSKSAPLGKCSSCIFKGCFFSAPSTLPTGEPSSGRAHEPHALYPELLCPGCGRS

SEQ ID NO: 794186 - protein, 77 aa, Homo sapiens
MKKSCYPRWNETFEFELQEGAVEALCVEAWDWDLVSRNDFLGKVVIDVQRLRVAQQEEGWFRLQPDQSKSRQHDEQV

SEQ ID NO: 794187 - protein, 183 aa, Homo sapiens
FPLRGLSSASRWPQFLVPRLSFSLRPEAQPRGLPAREQTFPLLDRDCGLFSVILREGGGYVATYQKAVILPPLAVGAHPIPPFVDIIGVSLGRVTSWSGWPLNFPFAPPSSGSDFAVTTLRQGEVPNVVHLTTHALLFSCTVACLIRYNKSVSLRAFASEFEHQSFPIDTSLLTIIFENFVSC

SEQ ID NO: 794188 - protein, 200 aa, Homo sapiens
AEPLEGHRGPQSPAHRKGRLELKGLHPPGPPGEAEGPAPEIPGEQQGAVEDRAPRASPPTACPSHRTPRTKRPGTCGPSPEPPAADGRAGDRGMSEGFLGEAGRGAHCPTERANKGRLLPRCRKALPLQGCWAGGALRQSQGARVQGASPGPPHNPGRGSSQRVLAGAGLGASAQALAKPLPPRGALAALGGLAGKERGC

SEQ ID NO: 794189 - protein, 161 aa, Homo sapiens
MPPEPGSSLGAAGDRWARGGLAERPSRVRGRPRWGHVALPPHQHQLSMHLLPGQLASQLCGLQVLLHIGGQLPSPAFLQAPLGVPRGWGHIDTLSGACPPLSPGPGRGAWLLAPEPPRRPWDRKMGCGHSATNTGSLPMATKMGVHSPRPPRQGFPPHGHS

SEQ ID NO: 794190 - protein, 174 aa, Homo sapiens
MVSIRVGVPCCPQALSPAELGLSHPQPEESHGGQDHSVPRRPTRHGFVKHEKATLRWGPDTLGTHHRGCPGKAPQPPPGPAGKQECRAGVPMHGEPGGLGRALGPCLHTNSCFPAALKGRGGGRRSRPHPCISYTQRVGRRHRPFISHGEAPPGKLPLHPSPCWPPAPQEVTLE

SEQ ID NO: 794191 - protein, 161 aa, Homo sapiens; identical to SEQ ID NO: 794189

SEQ ID NO: 794192 - protein, 393 aa, Homo sapiens
MPPEPGSSLGAAPALHASPAGPARQPAVRPPGSPAHRRPAPQPGFPPSAPWRPRLSPRPVGHGSATPGSAAQTWSAGPRQHPGPGTAPGGGSPHAAPAGPAGAPPSAPEASPTGSPARPAGCPPASAVSSPRPSFSVGRPHCQLQVCVWEGGQGRPAAGRLPPSPGPGSSSAGSRHSLASLFRKRRLTSSPSLVTWAWGGGTLSRVQPLLDTQPVPLLPMVSIRVGVPCCPQALSPAELGLSHPQPEESHGGQDHSVPRRPTRHGFVKHEKATLRWGPDTLGTHHRGCPGKAPQPPPGPAGKQECRAGVPMHGEPGGLGRALGPCLHTNSCFPAALKGRGGGRRSRPHPCISYTQRVGRRHRPFISHGEAPPGKLPLHPSPCWPPAPQEVTLE

SEQ ID NO: 794193 - protein, 170 aa, Homo sapiens
MPSEGQSQERGDRQMERRTRGALGSRRPPPPLPALRHLCTGLQAAGMAWPGTLWRHTCQGRAWAAEGPWGLFRPHRCPREAGQAPVGPSPETQGVAHVCSRARVSVDEREPGGGAYAMHVTPRWKGCHRHSGRTVRGSVSWKRPEQAAPETGRGPAVARGSGDGNECGWG

SEQ ID NO: 794194 - protein, 361 aa, Homo sapiens
WQYLFSNTDTLWRGYERIAGRAPAPRAHGPADPQEQTENGVEWQMLRHLVPGVVCFLPCMEQCVHSHGVIHMALFTPKWWANPSSVSDSHFGFAQHQLMQTDTFTIYAIDLGALTKIRIRHDNTGNRAGWFLDRIDITDMNNEITYYFPCQRWLAVEEDDGQLSRELLPVDESYVLPQSEEGGGGGDNNPLDNLALEQKDKSTTFSVTIKTGVKKNAGTDANVFITLFGTQDDTGMTLLKSSKTNSDKFERDSIEIFTVETLDLGDLWKVRLGHDNTGKAPGWFVDWVEVDAPSLGKCMTFPCGRWLAKNEDDGSIIRDLFHAELQTRLYTPCRNHTRQGQPFSGAPSPATPTQPQFFLQD

SEQ ID NO: 794195 - protein, 372 aa, Homo sapiens
ESSSEEEEMEEEEEEEEFGPGMQEVIEQHKFEAHRWLARGKEDNELVVELVPAGKPGPERNTYEVQVVTGNVPKAGTDANVYLTIYGEEYGDTGERPLKKSDKSNKFEQGQTDTFTIYAIDLGALTKIRIRHDNTGNRAGWFLDRIDITDMNNEITYYFPCQRWLAVEEDDGQLSRELLPVDESYVLPQSEEGGGGGDNNPLDNLALEQKDKSTTFSVTIKTGVKKNAGTDANVFITLFGTQDDTGMTLLKSSKTNSDKFERDSIEIFTVETLDLGDLWKVRLGHDNTGKAPGWFVDWVEVDAPSLGKCMTFPCGRWLAKNEDDGSIIRDLFHAELQTRLYTPCRNHTRQGQPFSGAPSPATPTQPQFFLQD

SEQ ID NO: 794196 - protein, 70 aa, Homo sapiens
MHVSINELTRTAMSRAQAPSDTGPKQGLHLCGGSGSDGEAPAPCNVHLTGGFWRATAPSFSGNKYQIWGN

SEQ ID NO: 794197 - protein, 79 aa, Homo sapiens
GSEACGGPWSLLSPPRSRLLNLRATGLYPSVPMLLASQPERLISGPGAPGSFSSAPAGGGALAAIPVRSFFGAAGPAEE

SEQ ID NO: 794198 - protein, 217 aa, Homo sapiens [sequence omitted]

SEQ ID NO: 794199 - protein, 217 aa, Homo sapiens [sequence omitted]

SEQ ID NO: 794200 - protein, 217 aa, Homo sapiens [sequence omitted]

SEQ ID NO: 794201 - protein, 73 aa, Homo sapiens
QVASSRSLHFSPRVFRPPLLPEGTLRGEEAEDSTETSVSGAGAPKAQRAHLPRQRIVRQSKSHTGLLRCAARA

SEQ ID NO: 794202 - protein, 139 aa, Homo sapiens
GQEVAVRVELDSGEEVEDQREGKGQGDGGRVGKSESQIIHGGRLRENRITALPELEDDDRNAREMTGAVAHTCNLSTSGGRSQWITRVQFETSLGSMVKPRLYKKCKKISWVPWHAPVVPATWEAKAGELLEAGRWTFQ

SEQ ID NO: 794203 - protein, 143 aa, Homo sapiens
QSPDTEALSCFLIPVLRSLARLKPTMTLEEGLPLAVQEWEHTSNFDRMIFYEMAERFMEFEAEEMQIQNTQLMNGSQGLSPATPLKLDPLGPLASEVCQQPVYIPKKAASKTRAPRRRQRKAQRPPAPEAPKEIPPEAVKEYV

SEQ ID NO: 794204 - protein, 660 aa, Homo sapiens; identical to SEQ ID NO: 753247

SEQ ID NO: 794205 - protein, 135 aa, Homo sapiens
IKRSEVSLLLSARGCRRRSIVKVSLLPAVMSKSESPKEPKQLRKLFTGRLSFETIDESLRSHFEQWGTLTNCAVMRNPNTRCSRGFGFVTYATVGEVDAAVNARPQKVDGRVVEPKRAVSREDSQRPVAYLTVKK

SEQ ID NO: 794206 - protein, 105 aa, Homo sapiens
CSYAVYTSLYSISVPVPSVGLVSRLCCKVSVLVLSVGLASLLCCKVLWLGEGVWSRVGREVEGGAHSQLYLDSWRKESCCYQEKSVLIRQEEDLLPSFGGWVLLG

SEQ ID NO: 794207 - protein, 302 aa, Homo sapiens
LTLSSAESNPRPIVKITERFFRNPAKPAEEDVAERVFLVAEERIQLRYHCREDHITASKREFLRRTEVDSKGNKIIMTPDMCISFEVEPMEHTKKLLYQYEAMMHLKREEKLSRHQVWESELEVLEILKLREEEEAAHTLTISIYDTKRNEKSKEYREAMERMMHEEHLRQVETQLDYLAPFLAQLPPGEKLTCWQAVRLKDECLSDFKQRLINKANLIQARFEKETQELQKKQQWYQENQVTLTPEDEDLYLSYCSQAMFRIRILEQRLNRHKELAPLKYLALEEKLYKDPRLGELQKIFA

SEQ ID NO: 794208 - protein, 302 aa, Homo sapiens; identical to SEQ ID NO: 794207

SEQ ID NO: 794209 - protein, 591 aa, Homo sapiens
ARIETESSWAGSAGQAAPGGLRTVANSSSGLRGPVSSGASDASLESQAGVRGGASRSTLLPNSPAATRGPSLARLCALVDLCLGCSRCTQRLNESTYVLRRVEHDCSREILLARFKQATKSKVWRVVGCRPTFPRPLCYQVCHYYSPGLGCRRHRNRCTFARSREEALVWTFERQHNLQRLWLKAEVQGSGAQGGAGRAADAILTEFGGRFELLCSLCFRRCPPCICRVDPQGQCPEHGACPSLLAHVSAEGRRKQQFVVVRPRPRAGQPPAYCRFVGRGQPCWRGESRCQFAHSAVEMAVWEAEQLGGLQRGDLLTPPAPDGDGRTAPLGQPPGAQLYCPACLVTCHSQEAFENHCASSEHAQMVAFDQALPWEHRSPPPGLSKFELCPKPDLCEYGDACTKAHSAQELQEWVRRTQAVELRGQAAWQDGLVPYQERLLAEYQRSSSEVLVLAETLDGVRVTCNQPLMYQAQERKTQYSWTFAVHSEVSGEQLRLGGGSPGEVVTSARADVNSLGHGANTEALPLSTCVTCSRSLSLSASVSSPRDRGPGQSHLGRVILWSIWVKTRIWPGAVVHACNPSTLGDRGRWIT

SEQ ID NO: 794210 - protein, 90 aa, Homo sapiens
FATIHPGFYGFHRDTFAYECQPQSQAHFPEGEGDFYYIGALFGGSVLEVYRLIMACHQVMMIDQANHIEALWHDESLLNKYLLNHKPTLP

SEQ ID NO: 794211 - protein, 105 aa, Homo sapiens
MRCVKSMAMDANSLCVSGFKQLYTLMLSYTQQQFVTSLGNSSYSFELQPNFLSITALGLTLPEEKGKTQPECPLKVKKCPHFYVQIGIYIQTSWRSQTNKILNLY

SEQ ID NO: 794212 - protein, 102 aa, Homo sapiens
MRCVKSMAMDANSLCVSGFKQLYTLMLSYTQQQFVTSLGNSSYSFELQPNFLSITALGLTLPEEKGKTQPECPLKVKKCPHFYVQIVDLWNLHSTFDTACDS

SEQ ID NO: 794213 - protein, 94 aa, Homo sapiens
LLLSHRPKAVEAHTRVVEEDGEEWSESGCVLKMGPAGLTSSLDEGSDRDRRVKAGFETLGSSTSKDSIATNSNVWRRLGRRVQNSDISVEVSSK

SEQ ID NO: 794214 - protein, 158 aa, Homo sapiens
LHWLLKSKQSKMSTQARVDTPLTHSQRPPGHSPKKQKQSGFVFSSPCGPLRPAPLSRNRELGAHAIWRDWAAFAFSCHSWGKAKGMQPSPCAQLPGNPRGRASGGTGVYQNHSGQSVHRAVSLAGAPRALLWKPQTPETVLILSSTPQNPASIFLSST

SEQ ID NO: 794215 - protein, 2292 aa, Homo sapiens
MTMAAAAVVARGAGARAATAAALRGGCGTAARGRPCAGPARPLCTAPGTAPDMKRYLWERYREAKRSTEELVPSIMSNLLNPDAIFSNNEMSLSDIEIYGFDYDYTLVFYSKHLHTLIFNAARDLLINEHRYPAEIRKYEYDPNFAIRGLHYDVQRAVLMKIDAFHYIQLGTVYRGLSVVPDEEVIEMYEGSHVPLEQMSDFYGKSSHGNTMKQFMDIFSLPEMTLLSCVNEYFLKNNIDYEPVHLYKDVKDSIRDVHIKGIMYRAIEADIEKYICYAEQTRAVLAKLADHGKKMFLITNSPSSFVDKGMSYIVGKDWRDLFDVVIVQAEKPNFFNDKRRPFRKMNEKGVLLWDKIHKLQKGQIYKQGNLYEFLKLTGWRGSRVLYFGDHIYSDLADLTLKHGWRTGAIIPELRSELKIMNTEQYIQTMTWLQTLTGLLEQMQVHRDAESQLVLQEWKKERKEMREMTKSFFNAQFGSLFRTDQNPTYFLRRLSRFADIYMASLSCLLNYDVSHTFYPRRTPLQHELPAWSERPPTFGTPLLQEAQAKSQGQKLETVTAPDWAGMMGLTSCGSELLLLEKIQISLLIFILYLTENNSPNDSRQELAAHPSSLSPHAGLKGKLHIGTLILPFCLLRSWNIRFPGIGRPLDAMSVFYQVKLETVLDSSMEHFLNIYGLCIGNCRGTVMGKDYCFQKADFVGSTMVKRCCEWQRGSPGDGQFPNHLVLKALTFWHITSNRTQPPWKDLSEKEQEKLQLLDPFVLSVWFLRPSPGQERGDESSGQNLPASGTAFYRAFCKKRVGLKNQNICGRSPRSLLNLETPPELVSSAHWKKENEPGKSIFVMKCYAMPPTQLNWNPVENMRFTRNSPLSRWKQTRSWLLSNELPTERCLDWPGEEEDGHHNLAMSSLLLDFTPVMFVRLFGSLYSLFFFFCFVLFFFRCLRWERAKDIEAKERYDLANQAFLISFCFVLLRWSFALIAQAGVQWHNLSSLQPLPPGFKRFSCLSLPSSWDYRHALPHPANFVFLVEMGFLHGGQAGLELLTSDNLPALASQIAGITGVATAPGLLFSFLSRGNASGMYSFCWREESLIAPGFVVSFNVKCIFTALSECYGNVCCYYYGAANTVLIAYAISILLFRLPDLVLLKLILSFCGNLYIFLNLKDGRNMRGACGECLLIQHFYCDKCMYPSIDEIQVWHSMGSLPDGRNLMSYIASFVMLLVIVGMYLGYLAVFNYNGEGDPLDPKGFSPSFLLHFVMNTVRHSSMFFFWNRVGILFIVCLLLGVFAIRVYWRLTLNGCVLRPELLGVGVLKECAGVLGFKFLLWRSRFRKKVLLKNNSWFLSNQIFIDYLPGASYRVFCLLKNEVELFLKPVSMSVHVGDLSFEGEKHFLGMNNEFCNQFPVEKNFSLWAIELGSVEISHVTEAWHLGHQGSLTVYLADCRPMSWRYRGQTQSFPCELMEAHPTLLLILVYTQSGQILTCRCHDFFFFFLRQGLALLPILECSGVISAHCNLLPPRFKQFSCLSLPSSWDYWYMPPGLAKFCSFNRDGVSPCWPGWSQTPSLKCSAHLSLPKCWDSGCEATVMPGLVMTLFSFFFFFFLRFSFALFAQAGVQWHDLGSLQPPPPGFKCFSCLSLPSSWDYRCPPPHPANFFVFLVETGFHHVGQAGLELLTLGNPPALASQGAGITGMSHRAQPIMTQLGSGTLHWVFCSLMCTLMNAYWYKGNESVFSHLKNCVVKQTKIAGTFKNYCLILFDRFSKNYVNNDESRAAAITNMTVQQGPWRSLWKGLAQLIFFFQFVFTGETWLLKYFSCLAESSHFPPNIVPVCFLKHFTLRHYFLLFPLILCNINHLLLIWAYYRLQLLVALNAIGTLNYCKGELKSSLVVLVNLALGKLSGFSSVLFSKGLLSSRDWAKYWNWIPLFCLLICCQRPLGAPCLECSKTKFGQTQGSLIVLFNYREPTFCLLNIDFLLYQVFLSFFFALGAELKVQLTFDTTSVIYVTVIFDTTSVIEELSSKFSYPLTLLVRSRKGREGSTLNAGSANFSCKRPDRKYFWLFGLFAFATTTVGMTMVMAVFQHNLIYQDKLWAVFGPQAVACCPCSNGLCWRQWQDSLAENMQMNNLIAGMQRGESSVGNKCTVFPLSYFLGISYMYGQCVYLSHQAQTLVEYTSHCIEFVIVLVLGAELSCPDDLFQTEGHTPLTAGSAAGWPFTSSPYEEFPLLKSPACPRSYPLPACNPYRLHMGYKGLASSPQLGKPSGAIPAPEPLVGSVRPHCGHITAQCLSLTSLYPAGSAHSTVL

SEQ ID NO: 794216 - protein, 158 aa, Homo sapiens
GSPLIVQDKLHVVPLVNGQLACRCLSVCSWRPLDVQPLVCSFASVFVSTSRSSKITEECAGMQHPEIWRNSLEQPHSVPFLPRNRMFFFMAYYAMRSPRYKTQFCPLSGVPQVCCKWGTAVRLYLPLADGVVGNQLIMNPRLLLSLASYLEVINQLHV

SEQ ID NO: 794217 - protein, 153 aa, Homo sapiens
VTVDDLDDGANGEIESVSIVAGDPLDQFFLAKEGKWLNEYKIKERKQIDWESFPYGYNLTLQAKDKGSPQKCSALKAVYIGNPTRDTVPIRFEKEVYDVSISEFSPPGVVVAIVKLSPEPIDVEYKLSPGEDAVYFKINPRSGLIVTARPLNT

SEQ ID NO: 794218 - protein, 134 aa, Homo sapiens
VTVDDLDDGANGEIESVSIVAGDPLDQFFLAKEGKWLNEYKIKERKQIDWESFPYGYNLTLQAKDKGSPQKCSALKAVYIGNPTRDTVPIRFEKEVYDVSISEFSPPGVVVAIVKLSPEPIDVEYKLSPGEDAV

SEQ ID NO: 794219 - protein, 551 aa, Homo sapiens
MAQFVQVLAEIGDFGRFQIQLLILLCVLNFLSPFYFFAHVFMVLDEPHHCAVAWVKNHTFNLSAAEQLVLSVPLDTAGHPEPCLMFRPPPANASLQDILSHRFNETQPCDMGWEYPENRLPSLKNEFNLVCDRKHLKDTTQSVFMGGLLVGTLMFGPLCDRIGRKATILAQLLLFTLIGLATAFVPSFELYMALRFAVATAVAGLSFSNVTLLTEWVGPSWRTQAVVLAQCNFSLGQMVLAGLAYGFRNWRLLQITGTAPGLLLFFYFWALPESARWLLTRGRMDEAIQLIQKAASVNRRKLSPELMNQLVPEKTGPSGNALDLFRHPQLRKVTLIIFCVWFVDSLGYYGLSLQVGDFGLDVYLTQLIFGAVEVPARCSSIFMMQRFGRKWSQLGTLVLGGLMCIIIIFIPADLPVVVTMLAVVGKMATAAAFTISYVYSAELFPTILRQTGMGLVGIFSRIGGILTPLVILLGEYHAALPMLIYGSLPIVAGLLCTLLPETHGQGLKDTLQDLELGPHPRSPKSVPSEKETEAKGRTSSPGVAFVSSTYF

SEQ ID NO: 794220 - protein, 70 aa, Homo sapiens
MVLDWLSLYTKAVSILVWPCSRKARVTTAPHLHGTQHRGGPGHDGGNRRLRQPGSNVQWLEASAPWSWRP

SEQ ID NO: 794221 - protein, 75 aa, Homo sapiens
EMTVFTYVAPGSPGMPVKSLGERHVPESHSLLSLDPRTKEASEAEPPVADKKPEWEGKLGCCDRPRLASCFGNTA

SEQ ID NO: 794222 - protein, 140 aa, Homo sapiens [sequence omitted]

SEQ ID NO: 794223 - protein, 151 aa, Homo sapiens
SGQPVATVLAIPQGQQQSYVSLRPDLLTVDSAHLYSATGTITSPTGETWTIPVYSAQPRGDPQQLSPALGSQMRWSRTGNDLVLLRFQLQTLPSRWSLVRFPVGKRKTILSGWLKKRLQQGAGKCVSKHSSSRHSRALSRPALRLQRHQRV

SEQ ID NO: 794224 - protein, 675 aa, Homo sapiens
MESGTSSPQPPQLDPLDAFPQKGLEPGDIAVLVLYFLFVLAVGLWSTVKTKRDTVKGYFLAGGDMVWWPVGASLFASNVGSGHFIGLAGSGAATGISVSAYELNGLFSVLMLAWIFLPIYIAGQVTTMPEYLRKRFGGIRIPIILAVLYLFIYIFTKISVDMYAGAIFIQQSLHLDLYLAIVGLLAITAVYTVAGGLAAVIYTDALQTLIMLIGALTLMGYSFAAVGGMEGLKEKYFLALASNRSENSSCGLPREDAFHIFRDPLTSDLPWPGVLFGMSIPSLWYWCTDQVIVQRTLAAKNLSHAKGGALMAAYLKVLPLFIMVFPGMVSRILFPDQVACADPEICQKICSNPSGCSDIAYPKLVLELLPTGLRGLMMAVMVAALMSSLTSIFNSASTIFTMDLWNHLRPRASEKELMIVGRVFVLLLVLVSILWIPVVQASQGGQLFIYIQSISSYLQPPVAVVFIMGCFWKRTNEKGAFWGLISGLLLGLVRLVLDFIYVQPRCDQPDERPVLVKSIHYLYFSMILSTVTLITVSTVSWFTEPPSKEMVSHLTWFTRHDPVVQKEQAPPAAPLSLTLSQNGMPEASSSSSVQFEMVQENTSKTHSCDMTPKQSKVVKAILWLCGIQEKGKEELPARAEAIIVSLEENPLVKTLLDVNLIFCVSCAIFIWGYFA

SEQ ID NO: 794225 - protein, 611 aa, Homo sapiens
MVWWPVGASLFASNVGSGHFIGLAGSGAATGISVSAYELNGLFSVLMLAWIFLPIYIAGQVTTMPEYLRKRFGGIRIPIILAVLYLFIYIFTKISVDMYAGAIFIQQSLHLDLYLAIVGLLAITAVYTVAGGLAAVIYTDALQTLIMLIGALTLMGYSFAAVGGMEGLKEKYFLALASNRSENSSCGLPREDAFHIFRDPLTSDLPWPGVLFGMSIPSLWYWCTDQVIVQRTLAAKNLSHAKGGALMAAYLKVLPLFIMVFPGMVSRILFPDQVACADPEICQKICSNPSGCSDIAYPKLVLELLPTGLRGLMMAVMVAALMSSLTSIFNSASTIFTMDLWNHLRPRASEKELMIVGRVFVLLLVLVSILWIPVVQASQGGQLFIYIQSISSYLQPPVAVVFIMGCFWKRTNEKGAFWGLISGLLLGLVRLVLDFIYVQPRCDQPDERPVLVKSIHYLYFSMILSTVTLITVSTVSWFTEPPSKEMVSHLTWFTRHDPVVQKEQAPPAAPLSLTLSQNGMPEASSSSSVQFEMVQENTSKTHSCDMTPKQSKVVKAILWLCGIQEKGKEELPARAEAIIVSLEENPLVKTLLDVNLIFCVSCAIFIWGYFA

SEQ ID NO: 794226 - protein, 514 aa, Homo sapiens
MYAGAIFIQQSLHLDLYLAIVGLLAITAVYTVAGGLAAVIYTDALQTLIMLIGALTLMGYSFAAVGGMEGLKEKYFLALASNRSENSSCGLPREDAFHIFRDPLTSDLPWPGVLFGMSIPSLWYWCTDQVIVQRTLAAKNLSHAKGGALMAAYLKVLPLFIMVFPGMVSRILFPDQVACADPEICQKICSNPSGCSDIAYPKLVLELLPTGLRGLMMAVMVAALMSSLTSIFNSASTIFTMDLWNHLRPRASEKELMIVGRVFVLLLVLVSILWIPVVQASQGGQLFIYIQSISSYLQPPVAVVFIMGCFWKRTNEKGAFWGLISGLLLGLVRLVLDFIYVQPRCDQPDERPVLVKSIHYLYFSMILSTVTLITVSTVSWFTEPPSKEMVSHLTWFTRHDPVVQKEQAPPAAPLSLTLSQNGMPEASSSSSVQFEMVQENTSKTHSCDMTPKQSKVVKAILWLCGIQEKGKEELPARAEAIIVSLEENPLVKTLLDVNLIFCVSCAIFIWGYFA

SEQ ID NO: 794227 - protein, 652 aa, Homo sapiens
MESGTSSPQPPQLDPLDAFPQKGLEPGDIAVLVLYFLFVLAVGLWSTVKTKRDTVKGYFLAGGDMVWWPVGASLFASNVGSGHFIGLAGSGAATGISVSAYELNGLFSVLMLAWIFLPIYIAGQVTTMPEYLRKRFGGIRIPIILAVLYLFIYIFTKISVDMYAGAIFIQQSLHLDLYLAIVGLLAITAVYTVAGGLAAVIYTDALQTLIMLIGALTLMGYSFAAVGGMEGLKEKYFLALASNRSENSSCGLPREDAFHIFRDPLTSDLPWPGVLFGMSIPSLWYWCTDQVIVQRTLAAKNLSHAKGGALMAAYLKVLPLFIMVFPGMVSRILFSRSSGLCRSRDLPEDLQQPLRLFGHRVSQTRAGTPAHSASTIFTMDLWNHLRPRASEKELMIVGRVFVLLLVLVSILWIPVVQASQGGQLFIYIQSISSYLQPPVAVVFIMGCFWKRTNEKGAFWGLISGLLLGLVRLVLDFIYVQPRCDQPDERPVLVKSIHYLYFSMILSTVTLITVSTVSWFTEPPSKEMVSHLTWFTRHDPVVQKEQAPPAAPLSLTLSQNGMPEASSSSSVQFEMVQENTSKTHSCDMTPKQSKVVKAILWLCGIQEKGKEELPARAEAIIVSLEENPLVKTLLDVNLIFCVSCAIFIWGYFA

SEQ ID NO: 794228 - protein, 331 aa, Homo sapiens
ILIYRLCYTKINNILSSGLCRSRDLPEDLQQPLRLFGHRVSQTRAGTPAHSASTIFTMDLWNHLRPRASEKELMIVGRVFVLLLVLVSILWIPVVQASQGGQLFIYIQSISSYLQPPVAVVFIMGCFWKRTNEKGAFWGLISGLLLGLVRLVLDFIYVQPRCDQPDERPVLVKSIHYLYFSMILSTVTLITVSTVSWFTEPPSKEMVSHLTWFTRHDPVVQKEQAPPAAPLSLTLSQNGMPEASSSSSVQFEMVQENTSKTHSCDMTPKQSKVVKAILWLCGIQEKGKEELPARAEAIIVSLEENPLVKTLLDVNLIFCVSCAIFIWGYFA

SEQ ID NO: 794229 - protein, 335 aa, Homo sapiens
DSHPHSHATSRATIYYNYRSSGLCRSRDLPEDLQQPLRLFGHRVSQTRAGTPAHSASTIFTMDLWNHLRPRASEKELMIVGRVFVLLLVLVSILWIPVVQASQGGQLFIYIQSISSYLQPPVAVVFIMGCFWKRTNEKGAFWGLISGLLLGLVRLVLDFIYVQPRCDQPDERPVLVKSIHYLYFSMILSTVTLITVSTVSWFTEPPSKEMVSHLTWFTRHDPVVQKEQAPPAAPLSLTLSQNGMPEASSSSSVQFEMVQENTSKTHSCDMTPKQSKVVKAILWLCGIQEKGKEELPARAEAIIVSLEENPLVKTLLDVNLIFCVSCAIFIWGYFA

SEQ ID NO: 794230 - protein, 597 aa, Homo sapiens
MESGTSSPQPPQLDPLDAFPQKGLEPGDIAVLVLYFLFVLAVGLWSTVKTKRDTVKGYFLAGGDMVWWPVGASLFASNVGSGHFIGLAGSGAATGISVSAYELNGLFSVLMLAWIFLPIYIAGQVTTMPEYLRKRFGGIRIPIILAVLYLFIYIFTKISVDMYAGAIFIQQSLHLDLYLAIVGLLAITAVYTVAGGLAAVIYTDALQTLIMLIGALTLMGYSFAAVGGMEGLKEKYFLALASNRSENSSCGLPREDAFHIFRDPLTSDLPWPGVLFGMSIPSLWYWCTDQVIVQRTLAAKNLSHAKGGALMAAYLKVLPLFIMVFPGMVSRILFSRSSGLCRSRDLPEDLQQPLRLFGHRVSQTRAGTPAHSASTIFTMDLWNHLRPRASEKELMIVGRVFVLLLVLVSILWIPVVQASQGGQLFIYIQSISSYLQPPVAVVFIMGCFWKRTNEKGAFWGLISGLLLGLVRLVLDFIYVQPRCDQPDERPVLVKSIHYLYFSMILSTVTLITVSTVSWFTEPPSKEMVSHLTWFTRHDPVVQKEQAPPAAPLSLTLSQNGMPEASSSSSVQFEMVQENTSKTHSCDMTPSLSQGAKA

SEQ ID NO: 794231 - protein, 181 aa, Homo sapiens
ISGLCRSRDLPEGTSTTSSSLGSYPLSILWIPVVQASQGGQLFIYIQSISSYLQPPVAVVFIMGCFWKRTNEKGAFWGLISGLLLGLVRLVLDFIYVQPRCDQPDERPVLVKSIHYLYFSMILSTVTLITVSTVSWFTEPPSKEMVSHLTWFTRHDPVVQKEQAPPQQQQRPVRDGSRKHV

SEQ ID NO: 794232 - protein, 391 aa, Homo sapiens
MESGTSSPQPPQLDPLDAFPQKGLEPGDIAVLVLYFLFVLAVGLWSTVKTKRDTVKGYFLAGGDMVWWPVGASLFASNVGSGHFIGLAGSGAATGISVSAYELNGLFSVLMLAWIFLPIYIAGQVTTMPEYLRKRFGGIRIPIILAVLYLFIYIFTKISVDMYAGAIFIQQSLHLDLYLAIVGLLAITAVYTVAGGLAAVIYTDALQTLIMLIGALTLMGYSFAAVGGMEGLKEKYFLALASNRSENSSCGLPREDAFHIFRDPLTSDLPWPGVLFGMSIPSLWYWCTDQVIVQRTLAAKNLSHAKGGALMAAYLKVLPLFIMVFPGMVSRILFPDQVACADPEICQKICSNPSGCSDIAYPKLVLELLPTVPAPSSPWTSGITRPEQKPS

SEQ ID NO: 794233 - protein, 449 aa, Homo sapiens
MESGTSSPQPPQLDPLDAFPQKGLEPGDIAVLVLYFLFVLAVGLWSTVKTKRDTVKGYFLAGGDMVWWPVGASLFASNVGSGHFIGLAGSGAATGISVSAYELNGLFSVLMLAWIFLPIYIAGQVTTMPEYLRKRFGGIRIPIILAVLYLFIYIFTKISVDMYAGAIFIQQSLHLDLYLAIVGLLAITAVYTVAGGLAAVIYTDALQTLIMLIGALTLMGYSFAAVGGMEGLKEKYFLALASNRSENSSCGLPREDAFHIFRDPLTSDLPWPGVLFGMSIPSLWYWCTDQVIVQRTLAAKNLSHAKGGALMAAYLKVLPLFIMVFPGMVSRILFPDQVACADPEICQKICSNPSGCSDIAYPKLVLELLPTVPAPSSPWTSGITGRKPLGEDPPGRQPHFLRELRHLYLGLFCLVWGEPRGPNSVSLQCSIFLMKEKIIKLLFTTRKKN

SEQ ID NO: 794234 - protein, 435 aa, Homo sapiens
MESGTSSPQPPQLDPLDAFPQKGLEPGDIAVLVLYFLFVLAVGLWSTVKTKRDTVKGYFLAGGDMVWWPVGASLFASNVGSGHFIGLAGSGAATGISVSAYELNGLFSVLMLAWIFLPIYIAGQVTTMPEYLRKRFGGIRIPIILAVLYLFIYIFTKISVDMYAGAIFIQQSLHLDLYLAIVGLLAITAVYTVAGGLAAVIYTDALQTLIMLIGALTLMGYSFAAVGGMEGLKEKYFLALASNRSENSSCGLPREDAFHIFRDPLTSDLPWPGVLFGMSIPSLWYWCTDQVIVQRTLAAKNLSHAKGGALMAAYLKVLPLFIMVFPGMVSRILFPDQVACADPEICQKICSNPSGCSDIAYPKLVLELLPTVPAPSSPWTSGITHFLRELRHLYLGLFCLVWGEPRGPNSVSLQCSIFLMKEKIIKLLFTTRKKN

SEQ ID NO: 794235 - protein, 722 aa, Homo sapiens
MEAHFLDEQFKCTVPLWQYFPKLQMFLYFHRQLCLPEFDSTDGLTRVQNDLFARFVIVALFLIAKDWRQLKCSFAGANEQTMARLNMGYRVAIIHKMDLNALCRIEQQGGLPREEAGLGGVSRSCHQCKREENQKCLCLSMPRGSLGRHRKSVIVMPLEGVLVMGDCLFAGDPMYLLIAEAGECTPFQEIKMGQVRWLTPVIPAVWEADVGGSLEVRGSRPPGQHDEDPISTKNTQISQTWWYMPVIPAALEAEAGESCEPYEAEFTVSQDHAIVLQPELQSETLSQIIKENKLKTYRTVTLPPAQCRKVKVLATSQVQEPHSGPRPLIKKYVLGSHKGAECEGLGVAVVNTTPGPGLGEMEPSLGPLDTLLLADFVIFNPCSDVAHVMISETFGGFPTDRKIHFNSALGIPGPLYWASSGAALGLSPLPLSALLTPHLRAFAHIVPFACLSVQSSLHVPRSCLTFKGQLSFHFCTAFCPPWLLCKLPRSSHTMVPAPKEAPWGPLLATRSSPVVTTHTLALSRGACRCLFGPPTHRVYRTDSSVSGCLPAALSDHPGCLQWPFGFFLCCVGVHQIYHYLFILLWTGIGLCPASSVNSFLSLGARVRSLLGIHPGWVDGLPDSECVCMNEIQVGDEKSRVSWLEPGFLITGTEQVQGSWFRQPAPMVVVALLGCRMLNLQGTYPLSAQWDFSWLERWSHVEGLNNPAKEAERWSIVLNLREN

SEQ ID NO: 794236 - protein, 1302 aa, Homo sapiens
MLGNSHGIPTEQSEDRLLIPLPSLERSGEWVNYSFIEMSFTCHSVYPLLVSNCIHRTTINSQNYSQRWYIFITPSKTPYPWSVTPAFLTPAVQGSHESTFYVRLTYSGHFIYLESCDISFVTGFFHWMFSRAVQVEDVSVLHSFVLLNNTSLYEIDHICLLIHQLMDICVFLLFGYSERCCYEHISTRFCVDIMFSFLLAIYIGVELLGLTVTPCFNFLRNCQTVFYEQLYHFTFPPAMYPGFNLSTSSSTLAIICLFAFSILMSMKCYLVVLICIPLMATDAECLFLLLTGHAYFFGERSIQVLCLFLIELSFFFKFSVFLTTRLPGMSLLFIIELGELFVYSRRQSFIRYMTGKNVLPFCGLFSVSCWCPLRHKTFNFDDFQDTYFFSIVTCAFGAISRKPLPNPRSRRLMPVFSSKNCIVLVLTMVFDPFRVYFYICCDVGVQLHSFACGSPLVPLLIIEKNILSPRNCLGILAKGLCFLLDLLSWDMVSLGSLPFFFLLSLCLVPPVLCCLSTLFLLSPSLPESTVLSPSLSDVPQSSLVHVLAPHTSPWRKVETNDFLFMSHEETESPEKWNNVLRVTIAHSVEGPGLDLYVFLRSSPLGCLSSLYPSDVTTKANDGGLNFNSQKCRRLILSSKFQKKMYIKVCYLKCAISRVFHFSGMPLASALLTFSWLQLKLIAYERIENNKYQKKVHMVIWYQNISAAKFSSSSLPQGSDELKLQVLFFILLTYRKAIALPTAVQGLSCESGGAGLLSQDSSSQGIPTNLWLLNCSFFLQGTPEGNKTDTCAQATILNWKPKAEFLTLRSSRFLRGICKVEINPFLFTRLSFLDEGTELLNGGIIGLLEEGHGMPVERTGWGGEVEALTWGPKQRSGVALVTFAQTAQSPLHRAINLGKALPAVDWSQPGSQVSKSSIASGAGLVTEDLKIINKSMKYTEKPLRLLSVEQREKVPRRSEGVRKQWMIGRGWGIRCSHCLGCRKRNREPRVRVLDPRPSLSMSLFASLGLYLLLLQIQAWGSLKMAPTCHEMNLRGFPFFPPSKSYKKLDVVAHASNPSILGGRGGRITGRQEFETSLGIVVRLHLCLFENKKSLKIAQQAGDLYVCPSWLYTVPPVLLQCKAACFLTWVRLCPSCLWESALAPNWADYFLRKLMGAPRYSLPARGQTQCRHSLCHWCNVRVYMCTWVPSLAHEFAMSTARSSLSLARCGDDCCSLRIWGKQAPSELDDPLLILCDLLEKWMKLVALAFLDSVSGTGQGPQSRARSLERVSHMTGFTQALPLGLHALCHLTGPGLQVGNVCTLF

SEQ ID NO: 794237 - protein, 1266 aa, Homo sapiens
MSFTCHSVYPLLVSNCIHRTTINSQNYSQRWYIFITPSKTPYPWSVTPAFLTPAVQGSHESTFYVRLTYSGHFIYLESCDISFVTGFFHWMFSRAVQVEDVSVLHSFVLLNNTSLYEIDHICLLIHQLMDICVFLLFGYSERCCYEHISTRFCVDIMFSFLLAIYIGVELLGLTVTPCFNFLRNCQTVFYEQLYHFTFPPAMYPGFNLSTSSSTLAIICLFAFSILMSMKCYLVVLICIPLMATDAECLFLLLTGHAYFFGERSIQVLCLFLIELSFFFKFSVFLTTRLPGMSLLFIIELGELFVYSRRQSFIRYMTGKNVLPFCGLFSVSCWCPLRHKTFNFDDFQDTYFFSIVTCAFGAISRKPLPNPRSRRLMPVFSSKNCIVLVLTMVFDPFRVYFYICCDVGVQLHSFACGSPLVPLLIIEKNILSPRNCLGILAKGLCFLLDLLSWDMVSLGSLPFFFLLSLCLVPPVLCCLSTLFLLSPSLPESTVLSPISLDVPQSSLVHVLAPHTSPWRKVETNDFLFMSHEETESPEKWNNVLRVTIAHSVEGPGLDTLSLLRSSPLGCLSSLYPSDVTTKANDGGLNFNSQKCRRLILSSKFQKKMLIKVCYLKCAISRVFHFSGMPWHLLFLPSRGCSYKLIAYERIENNKYQKKVHMVIWYQNISAAKFSSSSLPQGSDELKLQVLFFILLTYRKAIALPTAVQGLSCESGGAGLLSQDSSSQGIPTNLWLLNCSFFLQGTPEGNKTDTCAQATILNWKPKAEFLTLRSSRFLRGICKVEINPFLFTRLSFLDEGTEAVEWRNNRFAGGGAWYACGKDRMGWGGRGFDLGSKTKVRCCPSDLFAQTAQSPLHRAINLGKALPAVDWSQPGSQVSKSSIASGAGLVTEDLKIINKSMKYTEKPLRLLSVEQREKVPRRSEGVRKQWMIGRGWGIRCGHCLGCRKRNREPRVRVLDPRPSLSMSLFASLGLYLLLLQIQAWGSLKMAPTCHEMNLRGFPFFPPSKSYKKLDVVAHASNPSILGGRGGRITGRQEFETSLGIVVRLHLCLFENKKSLKIAQQAGDLYVCPSWLYTVPPVLLQCKAACFLTWVRLCPSCLWESALAPNWADYFLRKLMGAPRYSLPARGQTQCRHSLCHWCNVRVYMCTWVPSLAHEFAMSTARSSLSLARCGDDCCSLRIWGKQAPSELDDPLLILCDLLEKWMKLVALAFLDSVSGTGQGPQSRARSLERVSHMTGFTQALPLGLHALCHLTGPGLQVGNVCTLF

SEQ ID NO: 794238 - protein, 67 aa, Homo sapiens
MSRDDLVQICGPADGIRLFNAIKGRNVRPKMTIYVCQELEQNRVPLQQKRDGSGDSNLSVYHAIFVG

SEQ ID NO: 794239 - protein, 1038 aa, Homo sapiens
MKCYLVVLICIPLMATDAECLFLLLTGHAYFFGERSIQVLCLFLIELSFFFKFSVFLTTRLPGMSLLFIIELGELFVYSRRQSFIRYMTGKNVLPFCGLFSVSCWCPLRHKTFNFDDFQDTYFFSIVTCAFGAISRKPLPNPRSRRLMPVFSSKNLYSFSSHNGLLIHFEYIFIYDVMYGVQLHSFACGSPLVPLLIIEKISFLHGIVLASLLKASASYWIFFPGTWCRWEAYLFFFLLSLCLVPPVLCCLSTLFLLSPSLPESTVLSPSLSDVPQSSLVHVLAPHTSPWRKVETNDFLFMSHEETESPEKWNNVLRVTIAHSVEGPGPETFSLLRSSPLGCLSSLYPSDVTTKANDGGLNFNSQKCRRLILSSKFQKKMLIKVCYLKCAISRVFHFSGMPWHLLFLPSRGCSYKLIAYERIENNKYQKKVHMVIWYQNISAAKFSSSSLPQGSDELKLQVLFFILLTYRKAIALPTAVQGLSCESGGAGLLSQDSSSQGIPTNLWLLNCSFFLQGTPEGNKTDTCAQATILNWKPKAEFLTLRSSRFLRGICKVEINPFLFTRLSFLDEGTELLNGGIIGLLEEGHGMPVERTGWGGEVEALTWGPKQRSGVALVTFAQTAQSPLHRAINLGKALPAVDWSQPGSQVSKSSIASGAGLSNEDLKIINKSMKYTEKPLRLLSVEQREKVPRRSEGVRKQWMIGRGWGIRCSHCLGCRKRNREPRVRVLDPRPSLSMSLFASLGLYLLLLQIQAWGSLKMAPTCHEMNLRGFPFFPPSKSYKKLDVVAHASNPSILGGRGGRITGRQEFETSLGIVVRLHLCLFENKKSLKIAQQAGDLYVCPSWLYTVPPVLLQCKAACFLTWVRLCPSCLWESALAPNWADYFLRKLMGAPRYSLPARGQTQCRHSLCHWCNVRVYMCTWVPSLAHEFAMSTARSSLSLARCGDDCCSLRIWGKQAPSELDDPLLILCDLLEKWMKLVALAFLDSVSGTGQGPQSRARSLERVSHMTGFTQALPLGLHALCHLTGPGLQVGNVCTLF

SEQ ID NO: 794240 - protein, 74 aa, Homo sapiens
MEKRTAQEKEKYQPSYETTILTEVSRLGAGTEPPRVFHQEQGCWFRFLENRPSRVTTSESAYSVVVGSSVWSSC

SEQ ID NO: 794241 - protein, 235 aa, Homo sapiens
MAERLCECKDGQCGETFSLIPDGIMNKNTLPGVKPCESSVCGEGNVDHSSLNCYIRADTGHKPYECQEHGEKPHKCKQCVKTFSCLHSFQTHEKPHTGEKPYDCKEWEKTFDSPQTVRRYRVVHSGDGPYKCKFCGKAFDNLSLYLTHERSHTGQKPYECNECGKAFGFPSSFHRHERMHTGEKPYECKQCGKTFSCSSSIKKHERIHTGEKPYECKQCGKAFASSNSFQYHERT

SEQ ID NO: 794242 - protein, 184 aa, Homo sapiens
MIFEDVAVNFTQEEWALLDPSQKKLYRDVMWEIIRNLMSVGIKWEDRNIEDQYKNSRRNPRNHMAERLCECKDGQCGETFSLIPDGIMNKNTLPGVKPCESSVCGEGNVDHSSLNCYIRADTGHKPYECQEHGEKPHKCKQCVKTFSCLHSFQTHEKPHTGEKPYDCKECGKAFNCSSSLRKHA

SEQ ID NO: 794243 - protein, 133 aa, Homo sapiens
  misc_feature (3)..(3): Xaa can be any naturally occurring amino acid
FWXYPSIRPLWPCLEQCLTHSMLQETLARTSNASQDGVIGTQFTPLPRTTVISMTLDIRPQRTVIPKRQETNKVSPMTTPAHCLEESFKSWNRRGNSDGTKAVRIQRAGGREERAGQRELWRSGEGFKGSAEN

SEQ ID NO: 794244 - protein, 119 aa, Homo sapiens
GYKGSCFHRIIPGFMCQGGDFTRHNGTGGKSIYGEKFEDENFILKHTGPGILSMANAGPNTNGSQFFICTAKTEWLDGKHVVFGKVKEGMNIVEAMERFGSRNGKTSKKITIADCGQLE

SEQ ID NO: 794245 - protein, 119 aa, Homo sapiens; identical to SEQ ID NO: 794244

SEQ ID NO: 794246 - protein, 156 aa, Homo sapiens
ENWLNLGGGGCSEPRLRHCTPAWEMERDSISKRKERKEGRKEGRKEGRKEGRKEGRKEGRKEGREINLHAVKALDCEGYLLLQSNTTYPDSRMQQNGVEWIRKHSSHIVRLSPGQRTVHRPPFPGSTDAGHRASPLSFGLHQEFRLFQHKSQRLAG

SEQ ID NO: 794247 - protein, 185 aa, Homo sapiens
GCAAGRGRELEPELEPGPGPGSALEPGEEFEIVDRSQLPGPGDLRSATRPRAAEGWSAPILTLARRATGNLSASCGSALRAARGWAAGTAGTARRAQFKCQMMEERANLMHMMKLSIKVLLQSALSLGRSLDADHAPLQQFFVVMEHCLKHGLKVKKSFIGQNKSFFGPLELVEKLCPEASDIAT

SEQ ID NO: 794248 - protein, 118 aa, Homo sapiens
REYCKLTKNQEICLVGDWQKNRGAPSTAGVPSAWGWGDVGPPECLLEKGTGALAGGAVAIFFFFPGDGVLLFPGGVWWHNLGSLQLPPPGFKRFFCLSLLSSWDYRHEPTCPANFLYF

SEQ ID NO: 794249 - protein, 156 aa, Homo sapiens
MSGNFSGCETKEWRGGDIGIKYIEISRCCYTPYNEQNSPHNRERSSPQMLLVLILRNLAIRSLEPIFSDRGSHTEFKMEVFSERHSHSWSPYPSMNSPHLLCSGSFLAFFGPPRRPIPMSWSIVFQGPAQMPPLSIFPQQSQGGQTFLVLPLQSLF

SEQ ID NO: 794250 - protein, 152 aa, Homo sapiens
SLPPLGRRAPVQPAPLGLKFSGLQKLPAWLPPGLGWPGPGRRGVGGNPGEATEIRCAGRFKWNRKPGLGPQTRGSAGTASLLKKTGLGKAARVGPASAVCPPGSGEMARGPDHPPQPAAGLSTATGPREGRERGVLSRGPGAGLSAQVSVKM

SEQ ID NO: 794251 - protein, 210 aa, Homo sapiens
FYEEWWFLLVMALSSLIVILLVVFALVLHGQNKKYKNCSTGKGISTMEESVTLDNGGFAALELSSRHLNVKSTFSKKNGTRSPPRPSPGGLHYSDEDICNKYNGAVLTESVSLKEKSADASESEATDSDYEDALPKHSFVNHYMSDPTYYNSWKRRAQGRAPAPHRYEAVAGSEAGAQLHPVITTQSAGGVYTPAGPGARTPLTGFSSFV

SEQ ID NO: 794252 - protein, 300 aa, Homo sapiens
TFQKKIPLSQNSLRMTHRTPKVKKSPKFRKKSYLSRLMLANRPPFSAAKSLINSPSQGAFSSLGDLSPQENPFLEVSAPSEHFIETTNIKDTTARNALEENVFMENTNMPEVTISENTNYNHPPEADSAGTAFNLGPTVKQTETKWEYNNVGTDLSPEPKSFNYSIAQFEIQLTQQLQSLIPNNNVRRLISHVIRTLKMDCSGAHVQVTCAKLISRTGHLMKLLSGQQEVKASEIEWDTDQWKTENYINESTEAQSEQKEKSLELTKEVPGYGYTDKLILALIVTEILMILIILFCLIVV

SEQ ID NO: 794253 - protein, 334 aa, Homo sapiens
TFQKKIPLSQNSLRMTHRTPKVKKSPKFRKKSYLSRLMLANRPPFSAAKSLINSPSQGAFSSLGDLSPQENPFLEVSAPSEHFIETTNIKDTTARNALEENVFMENTNMPEVTISENTNYNHPPEADSAGTAFNLGPTVKQTETKWEYNNVGTDLSPEPKSFNYSIAQFEIQLTQQLQSLIPNNNVRRLISHVIRTLKMDCSGAHVQVTCAKLISRTGHLMKLLSGQQEVKASEIEWDTDQWKTENYINESTEAQSEQKEKSLELTKEVPGYGYTDKLILALIVTEILMILIILFCLIVVRTIINSGFQNAVLFLCGFRAHKLKTKATFPPAAT

SEQ ID NO: 794254 - protein, 124 aa, Homo sapiens
MLLPFIKLPTTGNSLAKIQTVGQNRQKVNRVLMGPMSIQKRHFKEVGRQSIRREQGAQASVENAAEEKRLGSPAPRELEQPHTQQGPEKLAGNAIYTKPSFSQEHKAAVSVLTPFSKGAPSTSS

SEQ ID NO: 794255 - protein, 359 aa, Homo sapiens
TFQKKIPLSQNSLRMTHRTPKVKKSPKFRKKSYLSRLMLANRPPFSAAKSLINSPSQGAFSSLGDLSPQENPFLEVSAPSEHFIETTNIKDTTARNALEENVFMENTNMPEVTISENTNYNHPPEADSAGTAFNLGPTVKQTETKWEYNNVGTDLSPEPKSFNYSIAQFEIQLTQQLQSLIPNNNVRRLISHVIRTLKMDCSGAHVQVTCAKLISRTGHLMKLLSGQQEVKASEIEWDTDQWKTENYINESTEAQSEQKEKSLELTKEVPGYGYTDKLILALIVTEILMILIILFCLIVMCCHRRSLQEDEEGFSRGIFRFLPRRRCSSRRESQVHWRIHCCGQGRQRTCKISISLSIF

SEQ ID NO: 794256 - protein, 381 aa, Homo sapiens
TFQKKIPLSQNSLRMTHRTPKVKKSPKFRKKSYLSRLMLANRPPFSAAKSLINSPSQGAFSSLGDLSPQENPFLEVSAPSEHFIETTNIKDTTARNALEENVFMENTNMPEVTISENTNYNHPPEADSAGTAFNLGPTVKQTETKWEYNNVGTDLSPEPKSFNYSIAQFEIQLTQQLQSLIPNNNVRRLISHVIRTLKMDCSGAHVQVTCAKLISRTGHLMKLLSGQQEVKASEIEWDTDQWKTENYINESTEAQSEQKEKSLELTKEVPGYGYTDKLILALIVTEILMILIILFCLIVMCCHRRSLQEDEEGFSRGIFRFLPRRRCSSRRESQDGLFSFRRPLWLKDMYKPLSATRVNNHAWKLHKKSSNEDEILNRDPG

SEQ ID NO: 794257 - protein, 324 aa, Homo sapiens
TFQKKIPLSQNSLRMTHRTPKVKKSPKFRKKSYLSRLMLANRPPFSAAKSLINSPSQGAFSSLGDLSPQENPFLEVSAPSEHFIETTNIKDTTARNALEENVFMENTNMPEVTISENTNYNHPPEADSAGTAFNLGPTVKQTETKWEYNNVGTDLSPEPKSFNYSIAQFEIQLTQQLQSLIPNNNVRRLISHVIRTLKMDCSGAHVQVTCAKLISRTGHLMKLLSGQQEVKASEIEWDTDQWKTENYINESTEAQSEQKEKSLEMCCHRRSLQEDEEGFSRGIFRFLPRRRCSSRRESQVHWRIHCCGQGRQRTCKISISLSIF

SEQ ID NO: 794258 - protein, 397 aa, Homo sapiens
TFQKKIPLSQNSLRMTHRTPKVKKSPKFRKKSYLSRLMLANRPPFSAAKSLINSPSQGAFSSLGDLSPQENPFLEVSAPSEHFIETTNIKDTTARNALEENVFMENTNMPEVTISENTNYNHPPEADSAGTAFNLGPTVKQTETKWEYNNVGTDLSPEPKSFNYSIAQFEIQLTQQLQSLIPNNNVRRLISHVIRTLKMDCSGAHVQVTCAKLISRTGHLMKLLSGQQEVKASEIEWDTDQWKTENYINESTEAQSEQKEKSLELTKEVPGYGYTDKLILALIVTEILMILIILFCLIVMCCHRRSLQEDEEGFSRGIFRFLPRRRCSSRRESQDGLFSFRRPLWLKDMYKPLSATRVNNHAWKLHKKSSNEDEILNRDPGDSEAPTEKGEESEALP

SEQ ID NO: 794259 - protein, 31 aa, Homo sapiens
LGVLIILLSTMVTSITGLSTSAIATNGFVRG

SEQ ID NO: 794260 - protein, 111 aa, Homo sapiens
APSPSSPASHQMLPPFLSSEAWLLLALCGLPCLLLSRHSGSPRGSLFDPTRADFVCGWQCTPRRGGEVPGPRCGREGAVQSKRLQRALAQQSWLDPSSDPSALKARVTEPS

SEQ ID NO: 794261 - protein, 81 aa, Homo sapiens
MSYYGSYYGGLGYGCGGFGGLGYGYGCGCGSFRRLGSGCGYGGYGYGSGFGGYGYGSGFGGYGYGCYRPSYYGGYGFSGFY

SEQ ID NO: 794262 - protein, 171 aa, Homo sapiens
MEPGPALAWLLLLSLLADCLKAAQSRDFTVKDIIYLHPSTTPYPGGFKCFTCEKAADNYECNRWAPDIYCPRETRYCYTQHTMEVTGNSISVTKRCVPLEECLSTGCRDSEHEGHKVCTSCCEGNICNLPLPRNETDATFATTSPINQTNGHPRCMSVIVSCLWLWLGLML

SEQ ID NO: 794263 - protein, 129 aa, Homo sapiens
MHIKNNLLEQSQARERRGFRAPAKQWEKTYPYLFLLIFKGTVNISRRKTPSLPLRNLQSYGRDTDGSAQLPNIIKKPEKKLCKSYCVSTEAVNLILSCRVSNKALFWKQRTALTRHGICWCPDLGIPTV

SEQ ID NO: 794264 - protein, 171 aa, Homo sapiens; identical to SEQ ID NO: 794262

SEQ ID NO: 794265 - protein, 127 aa, Homo sapiens
MEPGPALAWLLLLSLLADCLKAAQSRDFTVKDIIYLHPSTTPYPGGFKCFTCEKAADNYECNRWAPDIYCPRETRYCYTQHTMEVTGNSISVTKRCVPLEECLSTGCRDSEHEGHKVWATEQVTSTT

SEQ ID NO: 794266 - protein, 103 aa, Homo sapiens
MEDGNIRRWCRRGCVGECCAAEEPRVCSGGSKAALGGLERSHMQRQSRDMATEAERGLEALPQGAGELEMLLDRGVLGLDLRCTGITMETLRRIIIKPATPSI

SEQ ID NO: 794267 - protein, 139 aa, Homo sapiens
SSLMYVLPFPLLFPSCFVLLPTTCFHPFLFFHSLFCFFPLNSFLGFLLVFLSAYFPTIFSYFLGSPEAFLLLPPSTSSGDELHTPTPIAAVAPRPPKGPSARPPSPSCALVSVYLCVFGGVGIGPPFSQWRKVCCAPPL

SEQ ID NO: 794268 - protein, 1017 aa, Homo sapiens
MPVMKGLLAPQNTFLDTIATRFDGTHSNFLLANAQGTRGFPIVYCSDGFCELTGYGRTEVMQKTCSCRFLYGPETSEPALQRLHKALEGHQEHRAEICFYRKDGSAFWCLLDMMPIKNEMGEVVLFLFSFKDITQSGSPGLGPQGGRGDSNHENSLGRRGATWKFRSARRRSRTVLHRLTGHFGRRGQGGMKANNNVFEPKPSVPEYKVASVGGSRCLLLHYSVSKAIWDGLILLATFYVAVTVPYNVCFSGDDDTPITSRHTLVSDIAVEMLFILDIILNFRTTYVSQSGQVISAPRSIGLHYLATWFFIDLIAALPFDLLYIFNITVTSLVHLLKTVRLLRLLRLLQKLERYSQCSAVVLTLLMSVFALLAHWMACIWYVIGRREMEANDPLLWDIGWLHELGKRLEVPYVNGSVGGPSRRSAYIAALYFTLSSLTSVGFGNVCANTDAEKIFSICTMLIGALMHAVVFGNVTAIIQRMYSRRSLYHSRMKDLKDFIRVHRLPRPLKQRMLEYFQTTWAVNSGIDANELLRDFPDELRADIAMHLNREILQLPLFGAASRGCLRALSLHIKTSFCAPGEYLLRRGDALQAHYYVCSGSLEVLRDNMVLAILGKGDLIGADIPEPGQEPGLGADPNFVLKTSADVKALTYCGLQQLSSRGLAEVLRLYPEYGAAFRAGLPRDLTFNLRQGSDTSGLSRFSRSPRLSQPRSESLGSSSDKTLPSITEAESGAEPGGGPRPRRPLLLPNLSPARPRGSLVSLLGEELPPFSALVSSPSLSPSLSPALAGQGHSASPHGPPRCSAAWKPPQLLIPPLGTFGPPDLSPRIVDGIEDSGSTAEAPSFRFSRRPELPRPRSQAPPTGTRPSPELASEAEEVKEKVCRLNQEISRLNQEVSQLSRELRHIMGLLQARLGPPGHPAGSAWTPDPPCPQLRPPCLSPCASRPPPSLQDTTLAEVHCPASVGTMETGTALLDLRPSILPPYPSEPDPLGPSPVPEASPPTPSLLRHSFQSRSDTFH

SEQ ID NO: 794269 - protein, 70 aa, Homo sapiens
DALPIPGFHLRRMQGFLLELKTHWLLESPRSPPPPADLAVTVLACGAEGLPSSGATRDRQDGVGSGPSVC

SEQ ID NO: 794270 - protein, 69 aa, Homo sapiens
ALLPLSCRLLHRPHFRHNTKEQGFLLEGADPGINRTDDVALLKELTLQREGTNSEDKFRSVFPLPAHIH

SEQ ID NO: 794271 - protein, 37 aa, Homo sapiens
MLGSHRPGAPDSELLTVIFHDAFACAVLVCWALESGA

SEQ ID NO: 794272 - protein, 68 aa, Homo sapiens
GHAEGSILSTPPGAVCSAGTLTPVTPRVHSGSGPQGCNTLYWLQGGGQHGVEEGEADLDHCPQESSKK

SEQ ID NO: 794273 - protein, 115 aa, Homo sapiens
FRCDVCFELSPCARLKSRRQNYRKIPAGERRERRVSSGAGGAPALGTWGRKTRPNTRASAGAKNNPRGPGAHPGATRAHLRGPRHPPRGNGAPTSGARGALPRGSEQLGSEHPPR

SEQ ID NO: 794274 - protein, 108 aa, Homo sapiens
SACRGETVCPPLTSPRERALPGGFQSQLCMIVAVEETRRSCERPPSFTWKISESYGQEKSNRYRHGEERQRKKSCLRDLWSIGGRGEALAAGAVTIECTHTCTNKILM

SEQ ID NO: 794275 - protein, 112 aa, Homo sapiens
SKRPLPSAPPSPAGRPLPGEPREEWAGSSGARRRHPAPKAPGRKGSPDLAVPGPTLESVGGQRPDAPPAAASRKPSLARTVELAGSFQSAYGKLCPILEKLLMGLEIRGGDD

SEQ ID NO: 794276 - protein, 103 aa, Homo sapiens
ASGPFLRPRPAPPAARSLGNRGRNGRGPQVPGDVIQPPRLQDAKGPLIWQSLDLPWRAWGDKGRTRRPLPPPGSPPLPGQWSWPGVDSRKGRREGGVERATPG

SEQ ID NO: 794277 - protein, 75 aa, Homo sapiens
HGQDPLDLASIAPCQPGCQVQTPGLVTAQTVPESPGGSDPRGRQGASQERFKHCSTPKEWCEPRGFIPEDIMANN

SEQ ID NO: 794278 - protein, 573 aa, Homo sapiens
ACRFRLWRGGHVPRPVAPATAAVVLRPRPFSPCDAPTRRSAAVVRSRPRGPPSGRQWMTRGGGGGDTISKMPDVKESVPPKYPGDSEGRSCKPETSGPPQEDKSGSEDPPPFLSVTGLTETVNEVSKLSNKIGMNCDYYMEEKVLPPSSLEGKVKETVHNAFWDHLKEQLSATPPDFSCALELLKEIKEILLSLLLPRQNRLRIEIEEALDMDLLKQEAEHGALKVLYLSKYVLNMMALLCAPVRDEAVQKLENITDPVWLLRGIFQVLGRMKMDMVNYTIQSLQPHLQEHSIQYERAKFQELLNKQPSLLNHTTKWLTQAAGDLTMSPPTCPDTSDSSSVAGPSPNEAANNPEPLSPTMVLCQGFLNLLLWDLENEEFPETLLMDRTRLQELKSQLHQLTVMASVLLVASSFSGSVLFGSPQFVDKLKRITKSLLEDFHSRPEEAILTVSEQVSQEIHQSLKNMGLVALSSDNTASLMGQLQNIAKKENCVCSVIDQRIHLFLKCCLVLGVQRSLLDLPGGLTLIEAELAELGQKFVNLTHHNQQVFGPYYTEILKTLISPAQALETKVESV

SEQ ID NO: 794279 - protein, 507 aa, Homo sapiens
ACRFRLWRGGHVPRPVAPATAAVVLRPRPFSPCDAPTRRSAAVVRSRPRGPPSGRQWMTRGGGGGDTISKMPDVKESVPPKYPGDSEGRSCKPETSGPPQEDKSGSEDPPPFLSVTGLTETVNEVSKLSNKIGMNCDYYMEEKVLPPSSLEGKVKETVHNAFWDHLKEQLSATPPDFSCALELLKEIKEILLSLLLPRQNRLRIEIEEALDMDLLKQEAEHGALKVLYLSKYVLNMMALLCAPVRDEAVQKLENITDPVWLLRGIFQVLGRMKMDMVNYTIQSLQPHLQEHSIQYERAKFQELLNKQPSLLNHTTKWLTQAAGDLTMSPPTCPDTSDSSSVAGPSPNEAANNPEPLSPTMVLCQGFLNLLLWDLENEEFPETLLMDRTRLQELKSQLHQLTVMASVLLVASSFSGSVLFGSPQFVDKLKRITKSLLEDFHSRPEEAILTVSEQVSQEIHQSLKNMGLVALSSDNTASLMGQLQNIAKKENCVCSVIAQALETKVESV

SEQ ID NO: 794280 - protein, 441 aa, Homo sapiens
MAPKGILGSFPTAMNLSLEGKVKETVHNAFWDHLKEQLSATPPDFSCALELLKEIKEILLSLLLPRQNRLRIEIEEALDMDLLKQEAEHGALKVLYLSKYVLNMMALLCAPVRDEAVQKLENITDPVWLLRGIFQVLGRMKMDMVNYTIQSLQPHLQEHSIQYERAKFQELLNKQPSLLNHTTKWLTQAAGDLTMSPPTCPDTSDSSSVAGPSPNEAANNPEPLSPTMVLCQGFLNLLLWDLENEEFPETLLMDRTRLQELKSQLHQLTVMASVLLVASSFSGSVLFGSPQFVDKLKRITKSLLEDFHSRPEEAILTVSEQVSQEIHQSLKNMGLVALSSDNTASLMGQLQNIAKKENCVCSVIDQRIHLFLKCCLVLGVQRSLLDLPGGLTLIEAELAELGQKFVNLTHHNQQVFGPYYTEILKTLISPAQALETKVESV

SEQ ID NO: 794281 - protein, 490 aa, Homo sapiens
ACRFRLWRGGHVPRPVAPATAAVCSQAPAFLTVRRPNPPLRRGGTLQAARPTERTPVDDPRRGRRSLEGKVKETVHNAFWDHLKEQLSATPPDFSCALELLKEIKEILLSLLLPRQNRLRIEIEEALDMDLLKQEAEHGALKVLYLSKYVLNMMALLCAPVRDEAVQKLENITDPVWLLRGIFQVLGRMKMDMVNYTIQSLQPHLQEHSIQYERAKFQELLNKQPSLLNHTTKWLTQAAGDLTMSPPTCPDTSDSSSVAGPSPNEAANNPEPLSPTMVLCQGFLNLLLWDLENEEFPETLLMDRTRLQELKSQLHQLTVMASVLLVASSFSGSVLFGSPQFVDKLKRITKSLLEDFHSRPEEAILTVSEQVSQEIHQSLKNMGLVALSSDNTASLMGQLQNIAKKENCVCSVIDQRIHLFLKCCLVLGVQRSLLDLPGGLTLIEAELAELGQKFVNLTHHNQQVFGPYYTEILKTLISPAQALETKVESV

SEQ ID NO: 794282 - protein, 527 aa, Homo sapiens
ACRFRLWRGGHVPRPVAPATAAVVLRPRPFSPCDAPTRRSAAVVRSRPRGPPSGRQWMTRGGGGGVLSVTGLTETVNEVSKLSNKIGMNCDYYMEEKVLPPSSLEGKVKETVHNAFWDHLKEQLSATPPDFSCALELLKEIKEILLSLLLPRQNRLRIEIEEALDMDLLKQEAEHGALKVLYLSKYVLNMMALLCAPVRDEAVQKLENITDPVWLLRGIFQVLGRMKMDMVNYTIQSLQPHLQEHSIQYERAKFQELLNKQPSLLNHTTKWLTQAAGDLTMSPPTCPDTSDSSSVAGPSPNEAANNPEPLSPTMVLCQGFLNLLLWDLENEEFPETLLMDRTRLQELKSQLHQLTVMASVLLVASSFSGSVLFGSPQFVDKLKRITKSLLEDFHSRPEEAILTVSEQVSQEIHQSLKNMGLVALSSDNTASLMGQLQNIAKKENCVCSVIDQRIHLFLKCCLVLGVQRSLLDLPGGLTLIEAELAELGQKFVNLTHHNQQVFGPYYTEILKTLISPAQALETKVESV

SEQ ID NO: 794283 - protein, 362 aa, Homo sapiens
MDLLKQEAEHGALKVLYLSKYVLNMMALLCAPVRDEAVQKLENITDPVWLLRGIFQVLGRMKMDMVNYTIQSLQPHLQEHSIQYERAKFQELLNKQPSLLNHTTKWLTQAAGDLTMSPPTCPDTSDSSSVAGPSPNEAANNPEPLSPTMVLCQGFLNLLLWDLENEEFPETLLMDRTRLQELKSQLHQLTVMASVLLVASSFSGSVLFGSPQFVDKLKRITKSLLEDFHSRPEEAILTVSEQVSQEIHQSLKNMGLVALSSDNTASLMGQLQNIAKKENCVCSVIDQRIHLFLKCCLVLGVQRSLLDLPGGLTLIEAELAELGQKFVNLTHHNQQVFGPYYTEILKTLISPAQALETKVESV

SEQ ID NO: 794284 - protein, 362 aa, Homo sapiens; identical to SEQ ID NO: 794283

SEQ ID NO: 794285 - protein, 91 aa, Homo sapiens
SLPLPALAGGARAPSRCPGDRGGCSQAPAFLTVRRPNPPLRRGGTLQAARPTERTPVDDPRRGRRRYHQQNARRQGECAPEISWRLRGQVL

SEQ ID NO: 794286 - protein, 441 aa, Homo sapiens; identical to SEQ ID NO: 794280

SEQ ID NO: 794287 - protein, 362 aa, Homo sapiens; identical to SEQ ID NO: 794283

SEQ ID NO: 794288 - protein, 218 aa, Homo sapiens
MKVGVLWLISFFTFTDGHGGFLGKNDGIKTKKELIVNKKKHLGPVEEYQLLLQVTYRDSKEKRDLRNFLKLLKPPLLWSHGLIRIIRAKATTDCNSLNGVLQCTCEDSYTWFPPSCLDPQNCYLHTAGALPSCECHLNNLSQSVNFCERTKIWGTFKINERFTNDLLNSSSAIYSKYANGIEIQLKKAYERIQGFESVQVTQFRMSLLSPKLECNGTI

SEQ ID NO: 794289 - protein, 404 aa, Homo sapiens
MIVGNATEAAVSSFVQNLSVIIRQNPSTTVGNLASVVSILSNISSLSLASHFRVSNSTMEDVISIADNILNSASVTNWTVLLREEKYASSRLLETLENISTLVPPTALPLNFSRKFIDWKGIPVNKSQLKRGYSYQIKMCPQNTSIPIRGRVLIGSDQFQRSLPETIISMASLTLGNILPVSKNGNAQVNGPVISTVIQNYSINEVFLFFSKIESNLSQPHCVFWDFSHLQWNDAGCHLVNETQDIVTCQCTHLTSFSILMSPFVPSTIFPVVKWITYVGLGISIGSLILCLIIEALFWKQIKKSQTSHTRRICMVNIALSLLIADVWFIVGATVDTTVNPSGVCTAAVFFTHFFYLSLFFWMLMLGILLAYRIILVFHHMAQHLMMAVGFCLGYGCPLIISVI

SEQ ID NO: 794290 - protein, 716 aa, Homo sapiens
MKVGVLWLISFFTFTDGHGGFLGKNDGIKTKKELIVNKKKHLGPVEEYQLLLQVTYRDSKEKRDLRNFLKLLKPPLLWSHGLIRIIRAKATTDCNSLNGVLQCTCEDSYTWFPPSCLDPQNCYLHTAGALPSCECHLNNLSQSVNFCERTKIWGTFKINERFTNDLLNSSSAIYSKYANGIEIQLKKAYERIQGFESVQVTQFRNGSIVAGYEVVGSSSASELLSAIEHVAEKAKTALHKLFPLEDGSFRVFGKAQCNDIVFGFGSKDDEYTLPCSSGYRGNITAKCESSGWQVIRETCVLSLLEELNKNFSMIVGNATEAAVSSFVQNLSVIIRQNPSTTVGNLASVVSILSNISSLSLASHFRVSNSTMEDVISIADNILNSASVTNWTVLLREEKYASSRLLETLENISTLVPPTALPLNFSRKFIDWKGIPVNKSQLKRGYSYQIKMCPQNTSIPIRGRVLIGSDQFQRSLPETIISMASLTLGNILPVSKNGNAQVNGPVISTVIQNYSINEVFLFFSKIESNLSQPHCVFWDFSHLQWNDAGCHLVNETQDIVTCQCTHLTSFSILMSPFVPSTIFPVVKWITYVGLGISIGSLILCLIIEALFWKQIKKSQTSHTRRICMVNIALSLLIADVWFIVGATVDTTVNPSGVCTAAVFFTHFFYLSLFFWMLMLGILLAYRIILVFHHMAQHLMMAVGFCLGYGCPLIISVI

SEQ ID NO: 794291 - protein, 665 aa, Homo sapiens
MKVGVLWLISFFTFTDGHGGFLGKNDGIKTKKELIVNKKKHLGPVEEYQLLLQVTYRDSKEKRDLRNFLKLLKPPLLWSHGLIRIIRAKATTDCNSLNGVLQCTCEDSYTWFPPSCLDPQNCYLHTAGALPSCECHLNNLSQSVNFCERTKIWGTFKINERFTNDLLNSSSAIYSKYANGIEIQLKKAYERIQGFESVQVTQFRQCNDIVFGFGSKDDEYTLPCSSGYRGNITAKCESSGWQVIRETCVLSLLEELNKNFSMIVGNATEAAVSSFVQNLSVIIRQNPSTTVGNLASVVSILSNISSLSLASHFRVSNSTMEDVISIADNILNSASVTNWTVLLREEKYASSRLLETLENISTLVPPTALPLNFSRKFIDWKGIPVNKSQLKRGYSYQIKMCPQNTSIPIRGRVLIGSDQFQRSLPETIISMASLTLGNILPVSKNGNAQVNGPVISTVIQNYSINEVFLFFSKIESNLSQPHCVFWDFSHLQWNDAGCHLVNETQDIVTCQCTHLTSFSILMSPFVPSTIFPVVKWITYVGLGISIGSLILCLIIEALFWKQIKKSQTSHTRRICMVNIALSLLIADVWFIVGATVDTTVNPSGVCTAAVFFTHFFYLSLFFWMLMLGILLAYRIILVFHHMAQHLMMAVGFCLGYGCPLIISVI

SEQ ID NO: 794292 - protein, 346 aa, Homo sapiens
SPQPGMLLRPRRPPPLAPPAPPSPASPDPEPRTPGDAPGTPPRRPASPSALGELGLPVSPGSAQRTPWSARETELLLGTLLQPAVWRALLLDRRQALPTYRRVSAALAQQQVRRTPAQCRRRYKFLKDKFREAHGQPPGPFDEQIRKLMGLLGDNGRKRPRRRSPGSGRPQRARRPVPNAHAPAPSEPDATPLPTARDRDAEPHLELRFSPSPPKSADASRARGSPPAPAPTALATCIPEDRAPVRGPGSPPPPPAREDPDSPPGRPEDCAPPPAAPPSLNTALLQTLGHLGDIANILGPLRDQLLTLNQHVEQLRGAFDQTVSLAVGFILGSAAAERGVLRDPCQ

SEQ ID NO: 794293 - protein, 2041 aa, Homo sapiens
MVVSAGPWSSEKAEMNILEINEKLRPQLAENKQQFRNLKERCFLTQLAGFLANRQKKYKYEECKDLIKFMLRNERQFKEEKLAEQLKQAEELRQYKVLVHSQERELTQLREKLREGRDASRSLNEHLQALLTPDEPDKSQGQDLQEQLAEGCRLAQQLVQKLSPENDEDEDEDVQVEEDEKVLESSAPREVQKAEESKVPEDSLEECAITCSNSHGPCDSNQPHKNIKITFEEDKVNSTVVVDRKSSHDECQDALNILPVPGPTSSATNVSMVVSAGPLSSEKAEMNILEINEKLRPQLAEKKQQFRSLKEKCFVTQLAGFLAKQQNKYKYEECKDLIKSMLRNELQFKEEKLAEQLKQAEELRQYKVLVHSQERELTQLREKLREGRDASRSLNEHLQALLTPDEPDKSQGQDLQEQLAEGCRLAQHLVQKLSPENDEDEDEDVQVEEDEKVLESSSPREMQKAEESKVPEDSLEECAITCSNSHGPCDSNQPHKNIKITFEEDKVNSSLVVDRESSHDECQDALNILPVPGPTSSATNVSMVVSAGPLSSEKAEMNILEINEKLRPQLAEKKQQFRSLKEKCFVTQVACFLAKQQNKYKYEECKDLIKSMLRNELQFKEEKLAEQLKQAEELRQYKVLVHSQERELTQLREKLREGRDASRSLNEHLQALLTPDEPDKSQGQDLQEQLAEGCRLAQHLVQKLSPENDNDDDEDVQVEVAEKVQKSSSPREMQKAEEKEVPEDSLEECAITCSNSHGPYDSNQPHRKTKITFEEDKVDSTLIGSSSHVEWEDAVHIIPENESDDEEEEEKGPVSPRNLQESEEEEVPQESWDEVIRLSQFLLKGHRWDQVKKEDQEATGPRLSRELLAEKEPEVLQDSLDRCYSTPSVYLGLTDSCQPYRSAFYVLEQQRVGLAVDMDEIEKYQEVEEDQDPSCPRLSRELLAEKEPEVLQDSLDRCYSTPSGYLELPDLGQPYRSAVYSLEEQYLGLALDVDRIKKDQEEEEDQGPPCPRLSRELLEVVEPEVLQDSLDRCYSTPSSCLEQPDSCQPYRSSFYALEEKHVGFSLDVGEIEKKGKGKKRRGRRSKKKRRRGRKEGEEDQNPPCPRLSRELLAEKEPEVLQDSLDRWYSTPSVYLGLTDPCQPYRSAFYVLEQQRVGLAVDMDEIEKYQEVEEDQDPSCPRLSRELLAEKEPEVLQDSLDRWYSTPSVYLGLTDPCQPYRSAFYVLEQQRVGLAVDMDEIEKYQEVEEDQDPSCPRLSRELLAEKEPEVLQDSLDRCYSTPSGYLELPDLGQPYRSAAYSLEEQYLGLALDVDRIKKDQEEEEDQGPPCPRLSRELLEVVEPEVLQDSLDRCYSTPSSCLEQPDSCQPYRSSFYALEEKHVGFSLDVGEIEKKGKGKKRRGRRSKKKRRRGRKEGEEDQNPPCPRLSRELLAEKEPEVLQDSLDRWYSTPSVYLGLTDPCQPYRSAFYVLEQQRVGLAVDMDEIEKYQEVEEDQDPSCPRLSRELLAEKEPEVLQDSLDRWYSTPSVYLGLTDPCQPYRSAFYVLEQQRVGLAVDMDEIEKYQEVEEDQDPSCPRLSRELLAEKEPEVLQDSLDRCYSTPSGYLELPDLGQPYRSAVYSLEEQYLGLALDVDRIKKDQEEEEDQGPPCPRLSRELLEVVEPEVLQDSLDRCYSTPSSCLEQPDSCQPYRSSFYALEEKHVGFSLDVGEIEKKGKGKKRRGRRSKKKRRRGRKEGEEDQNPPCPRLSRELLAEKEPEVLQDSLDRWYSTPSVYLGLTDPCQPYRSAFYVLEQQRVGLAVDMDEIEKYQEVEEDQDPSCPRLSRELLAEKEPEVLQDSLDRWYSTPSVYLGLTDPCQPYRSAFYVLEQQRVGLAVDMDEIEKYQEVEEDQDPSCPRLSRELLAEKEPEVLQDSLDRCYSTPSGYLELPDLGQPYRSAVYSLEEQYLGLALDVDRIKKDQEEEEDQGPPCPRLSRELLEVVEPEVLQDSLDRCYSTPSSCLEQPDSCQPYRSSFYALEEKHVGFSLDVGEIEKKGKGKKRRGRR

SEQ ID NO: 794294 - protein, 77 aa, Homo sapiens
IKNFILERNFTNVKNVTKFTFANHTLKDIGGFIQERNLTSVVIVVKPLIHLHTLLGIRESILDRNLTNVISVARSLV

SEQ ID NO: 794295 - protein, 421 aa, Homo sapiens
MGRPTQWPSLLLLLLLPGPPPVAGLEDAAFPHLGESLQPLPRACPLRCSCPRVDTVDCDGLDLRVFPDNITRAAQHLSLQNNQLQELPYNELSRLSGLRTLNLHNNLISSEGLPDEAFESLTQLQHLCVAHNKNNLISKVPRGALSRQTQLRELYLQHNQLTDSGLDATTFSKLHSLEYLDLSHNQLTTVPAGLPRTLAILHLGRNRIRQVEAARLHGARGLRYLLLQHNQLGSSGLPAGALRPLRGLHTLHLYGNGLDRVPPALPRRLRALVLPHNHVAALGARDLVATPGLTELNLAYNRLASARVHHRAFRRLRALRSLDLAGNQLTRLPMGLPTGLRTLQLQRNQLRMLEPEPLAGLDQLRELSLAHNRLRVGDIGPGTWHELQALQVRHRLVSHTVPRAPPSPCLPCHVPNILVSW

SEQ ID NO: 794296 - protein, 67 aa, Homo sapiens
RDTEAHSWHTPGSQTTPAWRDTPYPKLPTQMEAATIKPNPSSTQHGPGTLWGLCPRTPPHNQSSWGN

SEQ ID NO: 794297 - protein, 411 aa, Homo sapiens
MEIFPLTFGEKPALRSVYLHNNQLSNAGLPPDAFRGSEAIATLSLSNNQLSYLPPSLPPSLERLHLQNNLISKVPRGALSRQTQLRELYLQHNQLTDSGLDATTFSKLHSLEYLDLSHNQLTTVPAGLPRTLAILHLGRNRIRQVEAARLHGARGLRYLLLQHNQLGSSGLPAGALRPLRGLHTLHLYGNGLDRVPPALPRRLRALVLPHNHVAALGARDLVATPGLTELNLAYNRLASARVHHRAFRRLRALRSLDLAGNQLTRLPMGLPTGLRTLQLQRNQLRMLEPEPLAGLDQLRELSLAHNRLRVGDIGPGTWHELQALQMLDLSHNELSFVPPDLPEALEELHLEGNRIGHVGPEAFLSTPRLRALFLRANRLHMTSIAAEAFLGLPNLRVVDTAGNPEQVLIRL

SEQ ID NO: 794298 - protein, 537 aa, Homo sapiens
KLPASRRRRSPCPQRHSLAPVTAHLQEIHISALQSSQTDGGERHHPPALGVSSLMEETEPASVTLTLRGKTQPYPGSSHTFNGEAHPVAEPAAAPAVAGAPARRRLGRRCLPPPGGELAAPAPGLSPALLLAPESTLWTVMAWTFECSRTTSPEPLSTSPCRTTSSRNSPTMSCPASVACEPSTSTTTSSPPKNNLISKVPRGALSRQTQLRELYLQHNQLTDSGLDATTFSKLHSLEYLDLSHNQLTTVPAGLPRTLAILHLGRNRIRQVEAARLHGARGLRYLLLQHNQLGSSGLPAGALRPLRGLHTLHLYGNGLDRVPPALPRRLRALVLPHNHVAALGARDLVATPGLTELNLAYNRLASARVHHRAFRRLRALRSLDLAGNQLTRLPMGLPTGLRTLQLQRNQLRMLEPEPLAGLDQLRELSLAHNRLRVGDIGPGTWHELQALQMLDLSHNELSFVPPDLPEALEELHLEGNRIGHVGPEAFLSTPRLRALFLRANRLHMTSIAAEAFLGLPNLRVVDTAGNPEQVLIRL

SEQ ID NO: 794299 - protein, 133 aa, Homo sapiens
MGRPTQWPSLLLLLLLPGPPPVAGLEDAAFPHLGESLQPLPRACPLRCSCPRVDTVDCDGLDLRVFPDNITRAAQHLSLQTTPAWRDTPYPKLPTQMEAATIKPNPSSTQHGPGTLWGLCPRTPPHNQSSWGN

SEQ ID NO: 794300 - protein, 40 aa, Homo sapiens
MTASLCRANRLHMTSIAAEAFLGLPNLRVVDTAGNPEQVL

SEQ ID NO: 794301 - protein, 766 aa, Homo sapiens
MLKMLQRCEDSRAKKRPQLLRALARVPSPVRNRALGWSWSTASNSNRSTPACSPILRKRSRSPTPQNQDGDTMVEKGSDHSSDKSPSTPEQGVQRSCSSQSGRSGGKNSKKSQSWYNVLSPTYKQRNEDFRKLFKQLPDTERLIVDYSCALQRDILLQGRLYLSENWICFYSNIFRWETLLTVRLKDICSMTKEKTARLIPNAIQVCTDSEKHFFTSFGARDRTYMMMFRLWQNALLEKPLCPKELWHFVHQCYGNELGLTSDDEDYVPPDDDFNTMGYCEEIPVEENEVNDSSSKSSIETKPDASPQLPKKSITNSTLTSTGSSEAPVSFDGLPLEEEALEGDGSLEKELAIDNIMGEKIEMIAPVNSPSLDFNDNEDIPTELSDSSDTHDEGEVQAFYEDLSGRQYVNEVFNFSVDKLYDLLFTNSPFQRDFMEQRRFSDIIFHPWKKEENGNQSRVILYTITLTNPLAPKTATVRETQTMYKASQESECYVIDAEVLTHDVPYHDYFYTINRYTLTRVARNKSRLRVSTELRYRKQPWGLVKTFIEKNFWSGLEDYFRHLESELAKTESTYLAEMHRQSPKEKASKTTTVRRRKRPHAHLRVPHLEEVMSPVTTPTDEDVGHRIKHVAGSTQTRHIPEDTPNGFHLQSVSKLLLVISCVLVLLVILNMMLFYKLWMLEYTTQTLTAWQGLRLQERLPQSQTEWAQLLESQQKYHDTELQKWREIIKSSVMLLDQMKDSLINLQNGIRSRDYTSESEEKRNRYH

SEQ ID NO: 794302 - protein, 359 aa, Homo sapiens
MTSTSKGILRPFLIVCIILGCFMACLLIYIKPTNSWIFSPMESASSVLKMKNFFSTKTDYFNETTILVWVWPFGQTFDLTSCQAMFNIQGCHLTTDRSLYNKSHAVLIHHRDISWDLTNLPQQARPPFQKWIWMNLESPTHTPQKSGIEHLFNLTLTYRRDSDIQVPYGFLTVSTNPFVFEVPSKEKLVCWVVSNWNPEHARVKYYNELSKSIEIHTYGQAFGEYVNDKNLIPTISACKFYLSFENSIHKDYITEKLYNAFLAGSVPVVLGPSRENYENYIPADSFIHVEDYNSPSELAKYLKEVDKNNKLYLSYFNWRKDFTVNLPRFWESHACLACDHVKRHQEYKSVGNLEKWFWN

SEQ ID NO: 794303 - protein, 73 aa, Homo sapiens
SFSEAGDGQRARAAQQLQIHCSPLQLPAPPPLSLPRCPPAPVALLGQRRHRRLALPASCAAQPSRAPRMALYP

SEQ ID NO: 794304 - protein, 359 aa, Homo sapiens; identical to SEQ ID NO: 794302

SEQ ID NO: 794305 - protein, 359 aa, Homo sapiens; identical to SEQ ID NO: 794302

SEQ ID NO: 794306 - protein, 81 aa, Homo sapiens
PRKCFLMLTLEICSNQGDFPICQNFKIHLMTVLLSPERDKELGHVVMKFEKSQDLQVGDRGELMMCCGMSPKDRALGEPMV

SEQ ID NO: 794307 - protein, 2770 aa, Homo sapiens
  misc_feature (1150)..(1150): Xaa can be any naturally occurring amino acid
  misc_feature (1572)..(1572): Xaa can be any naturally occurring amino acid
EEAGDLVQPGISFPGPAEEDLDPQYSWSPTQHFNEERYSPAPRSMKGLSGSRTQPPLCSGHTCGLAPPEDCEHLHHGPDARPPYLLSPADSCPGGRHRCSPRSSVHSECVMMPVVLGDHVSSSTFPRMHYSSHYDTRDDCAVAHAGAKINRIPANLLDQFEKQLPLHRDGFHTLQYQRTSAAAEQRSESPGRIRHLVHSVQKLFTKSHSLEGSSKSNANGTKADGRADDHHHAHHAKHSKRSKSKERKPEGKPRPGMSSWWSSDDNLDSDSTYRTPSVLNRHHLGPVAHCYPDALQSPFGDLSLKTSKSNNDVKCSACEGLALTPDAKYLKRSSWSTLTVSQAKEAYRKSSLNLDKPLLHQDAKPALRPCHYLQVPQDEWGGYPTGGKDEEIPCRRMRSGSYIKAMGDEESGESDSSPKTSPKSAILPEPLLKSIGQRPLGEHQTQTYLQAASDVPVGHSLDPAANYNSPKFRSRNQSYMRAVSTLSQASCVSQVSEAEINGQFESVCESVFSEVESQAMDALDLPGCFRTRSHSYLRAIQAGYSQDDECIPMMTPSDITSTIRSTAAVSYTNYKKTPPPVPPRTTSKPLISVTAQSSTESTQDAYQDSRAQRMSPWPQDSRGLYNSTDSLDSNKAMNLALETAAAQRHLPESQSSSVRTSDKAILVSKAEELLKSRCSSIGIQDSEFPEHQPYPRSDVETATDSDTESGGLREYHSVGVQVEDEKRHGRFKRSNSVTAAVQADLELEGFPGHITTEDKGLQFGSSFQRHSEPSTPTQYSAVRTVRTQGLFSYREDYRTQVDTSTLPPPDPWLEPAIDTVETGRMSPCRRDGSWFLKLLHAETKRMEGWCKEMEREAEENDLSEEILGKIRSAVGSAQLLMSQKFQQFYWLCQQNMDPSAMPRPTSQDLAGYWDMLQLSIEDVSMKFDELQRLRLNDWKMMESPERKEERKVPPPIPKKPPKGKFPITREKSLDLPDRQRQEARRRLMAAKRAASFRQNSASERADSIEIYIPEAQTRLWGRRPAPSPRRFRFPGRLCSAAPPWWFLSPPPAEHVLAPALPAPRTQRDAAGGLRVHGARGEDDFCFCCCCCCSRVAWLTLGSEGQVWRDLISPACSQRTARNASGAGTQLTFCYFYFYKLCDELEVRITXNYKRVHPTTPWRHETPKWKVLQPEAQERKAHSPRTAELLLPEHGPLRSPAPVCLGQKTRGSLCQASCDGKRPLQPPHSPPYSSPESQAMTSLNPRKYPAQHLHIQKKAECSHQEVTRREESLTEGWELKKENNVLTCKQLLYFLFLSNLKYDTQYFLEVSPFTLHVIFLMYVYIYILKLLYQLTFQGILKKKHTRKTKVCLFENDSCDVKSLRNMNVSGKYISVEMVKKKCSLHLYFSRILLSYAVLLKSRIYSLPVLDMKGKRGHILGFPAVAFKKKIGVHDSVVWCQRKIGTTLINRLSVYIIKFSCCNHCSDIDFCFTVQTGLQRKSLSDFSMGSSFRVLIITQSKSGLRFKMFPPQYLVFLPGLRSTMYLATGRIAFDDPIALCFFTLFALYNVPSPSAARGWQGVRCAVGPQRALQXCGVSLPHSPHPTEHGTIGSRADIKACLASKFYFFKAEELRIPCKNKTLEIEPHVWYIFYQTALKYIWKQKSVRMYLLEKCKKKKNPGISSIMNPNPPRVFKAFFLTNEYLNLEECTVMTLLPYIHSYYVKTNVFAEYWHFRTLKMLYDFQVNLLFRSNHRKAKSVYTLSERKCNVDKGPPPPHIGAIYWQLIRLTHFLELIQNIEKQTVKVVNNYLSQIPEFYDPCLKENVHCMEVDFLCFVDSLLFFNPQKSWPKPSLGEQINLPIHCTGLVTRRGECAHALPGPPCSKEDDLMVERIPAARPDGMLPVRVTESSAIYSVLMQVTFYHETQKISHVSVLYMERKIKLFMILVLVTRASLFQPLLADHAMELTTCDHFVIFKIELQEKSKHPLENTAENYCAVLENIILESVMFTITPYLHSLMIQPMTGETQTLSFRADRLILLCGRLWLIKHKYDKQDLAFSPGKENAACHLECFPCDASLASSRVVVFEVKLVVIDDNFYHEFSQQIYITILEVVYKKIELFMIPKKLQFCLKGNVDVFNSKSILKTSSTEWKGKWSDKNIITCKVYLVLKEKKKAYKLSDLLRRGNFSLLLLMKVARFIIRRHSGRAHMCTGSDYFSWSICPCLDFCLFDAILSSHRFHPFALEGPASVNSRISVFVEILVSIATRVQDGISQESEGILQACVCSACGNCGMSSVRDSCLVCAKPSRGEEGVGEVGPSLPSGRPFLSAAIPSSQASCGPEHEGARGPPGRCSFCFRCVSSVSLAWNSGRFPGVFQWTGGPRAVAESAWVPQSPAGPPLMTGPPTNLGKAAGNVGEGVRWYGHKSIVQNSAGSGRAPGYCLWPTLKTEIAPPVSTETRFSNTGRNNYNSTWFLPAHFPALFFSSLNFIFFFSCKFNRLIENCSFQTTAPGNVPGFSCFDLHVCLHFSVGVGVNTSFQNFKIENHELKGEKDDPFLIRICNSVGWVNAVCFIQGHVAAMTPPHKVSSEPMASLQEPHLVAISWELQYIVGHKQSAKGKGLLLHIRLNVPQCRVAAECSGNEGDIARNLWLLGNLAFIHPQPATHLKFMSQFFSSRKGITVPVPVFLQDTAVRINDILALKSFELLGTGGESVRYCKGLVLALLECRPPSSAGHAARIQAGRKHLRDNQGPPEAEAMRLSLERFGNAEITTRAILLSFWLSTVSRCFQEQEPSTNQN

SEQ ID NO: 794308 - protein, 2764 aa, Homo sapiens
  misc_feature (1146)..(1146): Xaa can be any naturally occurring amino acid
  misc_feature (1567)..(1567): Xaa can be any naturally occurring amino acid
FSGLNSRTFRGLAEEDLDPQYSWSPTQHFNEERYSPAPRSMKGLSGSRTQPPLCSGHTCGLAPPEDCEHLHHGPDARPPYLLSPADSCPGGRHRCSPRSSVHSECVMMPVVLGDHVSSSTFPRMHYSSHYDTRDDCAVAHAGAKINRIPANLLDQFEKQLPLHRDGFHTLQYQRTSAAAEQRSESPGRIRHLVHSVQKLFTKSHSLEGSSKSNANGTKADGRADDHHHAHHAKHSKRSKSKERKPEGKPRPGMSSWWSSDDNLDSDSTYRTPSVLNRHHLGPVAHCYPDALQSPFGDLSLKTSKSNNDVKCSACEGLALTPDAKYLKRSSWSTLTVSQAKEAYRKSSLNLDKPLLHQDAKPALRPCHYLQVPQDEWGGYPTGGKDEEIPCRRMRSGSYIKAMGDEESGESDSSPKTSPKSAILPEPLLKSIGQRPLGEHQTQTYLQAASDVPVGHSLDPAANYNSPKFRSRNQSYMRAVSTLSQASCVSQVSEAEINGQFESVCESVFSEVESQAMDALDLPGCFRTRSHSYLRAIQAGYSQDDECIPMMTPSDITSTIRSTAAVSYTNYKKTPPPVPPRTTSKPLISVTAQSSTESTQDAYQDSRAQRMSPWPQDSRGLYNSTDSLDSNKAMNLALETAAAQRHLPESQSSSVRTSDKAILVSKAEELLKSRCSSIGIQDSEFPEHQPYPRSDVETATDSDTESGGLREYHSVGVQVEDEKRHGRFKRSNSVTAAVQADLELEGFPGHITTEDKGLQFGSSFQRHSEPSTPTQYSAVRTVRTQGLFSYREDYRTQVDTSTLPPPDPWLEPAIDTVETGRMSPCRRDGSWFLKLLHAETKRMEGWCKEMEREAEENDLSEEILGKIRSAVGSAQLLMSQKFQQFYWLCQQNMDPSAMPRPTSQDLAGYWDMLQLSIEDVSMKFDELQRLRLNDWKMMESPERKEERKVPPPIPKKPPKGKFPITREKSLDLPDRQRQEARRRLMAAKRAASFRQNSASERADSIEIYIPEAQTRLWGRRPAPSPRRFRFPGRLCSAAPPWWFLSPPPAEHVLAPALPAPRTQRDAAGGLRVHGARGEDDFCFCCCCCCSRVAWLTLGSEGQVWRDLISPACSQRTARNASGAGTQLTFCYFYFYKLCDELEVRITXNYKRVHPTIPGGIRHPSGRCYNLKRRKERPIPLAQPSFYSLSTGRSAPLLLSVSDRKHEAPCVKLPVMESDLSNHHIPAVQFSRIPGDDKSEPTKIPSAASTHSKDKLSVPTRKSRAERRVLRRAGSLKENNVLTCKQLLYFLFLSNLKYDTQYFLEVSPFTLHVIFLMYVYIYILKLLYQLTFQGILKKKHTRKTKVCLFENDSCDVKSLRNMNVSGKYISVEMVKKKCSLHLYFSRILLSYAVLLKSRIYSLPVLDMKGKRGHILCFPAVAFKKKIGVHDSVVWCQRKIGTTLINRLSVYIIKFSCCNHCSDIDFCFTVQTGLQRKSLSDFSMGSSFRVLIITQSKSGLRFKMFPPQYLVFLPGLRSTMYLATGRIAFDDPIALCFFTLFALYNVPSPSAARGWQGVRCAVGPQRALQXCGVSLPHSPHPTEHGTIGSRADIKACLASKFYFFKAEELRIPCKNKTLEIEPHVWYIFYQTALKYIWKQKSVRMYLLEKCKKKKNPGISSIMNPNPPRVFKAFFLTNEYLNLEECTVMTLLPYIHSYYVKTNVFAEYWHFRTLKMLYDFQVTLLFRSNHRKAKSVYTLSERKCNVDKGPPPPHIGAIYWQLIRLTHFLELIQNIEKQTVKVVNNYLSQIPEFYDPCLKENVHCMEVDFLCFVDSLLFFNPQKSWPKPSLGEQINLPIHCTGLVTRRGECAHALPGPPCSKEDDLMVERIPAARPDGMLPVRVTESSAIYSVLMQVTFYHETQKISHVSVLYMERKIKLFMILVLVTRASLFQPLLADHAMELTTCDHFVIFKIELQEKSKHPLENTAENYCAVLENIILESVMFTITPYLHSLMIQPMTGETQTLSFRADRLILLCCRLWLIKHKYDKQDLAFSPGKENAACHLECFPCDASLASSRVVVFEVKLVVIDDNFYHSFLSKFISPSRMVYKKIELFMIPKKLQFCLKGNVDVFNSKSILKTSSTEWKGKWSDKNIITCKVYLVLKEKKKAYKLSDLLRRGNFSLLLLMKVARFIIRRHSGRAHMCTGSDYFSWSICPCLDFCLFDAILSSHRFHPFALEGPASVNSRISVFVEILVSIATRVQDGISQESEGILQACVCSACGNCGMSSVRDSCLVCAKPSRGEEGVGEVGPSLPSGRPFLSAAIPSSQASCGPEHEGARGPPGRCSFCFRCVSSVSLAWNSGRFPGVFQWTGGPRAVAESAWVPQSPAGPPLMTGPPTNLGKAAGNVGEGVRWYGHKSIVQNSAGSGRAPGYCLWPTLKTEIAPPVSTETRFSNTGRNNYNSTWFLPAHFPALFFSSLNFIFFFSCKFNRLIENCSFQTTAPGNVPGFSCFDLHVCLHFSVGVGVNTSFQNFKIENHELKGEKDDPFLIRICNSVGWVNAVCFIQGHVAAMTPPHKVSSEPMASLQEPHLVAISWELQYIVGHKQSAKGKGLLLHIRLNVPQCRVAAECSGNEGDIARNLWLLGNLAFIHPQPATHLKFMSQFFSSRKGITVPVPVFLQDTAVRINDILALKSFELLGTGGESVRYCKGLVLALLECRPPSSAGHAARIQAGRKHLRDNQGPPEAEAMRLSLERFGNAEITTRAILLSFWLSTVSRCFQEQEPSTNQN

SEQ ID NO: 794309 - protein, 2751 aa, Homo sapiens
  misc_feature (1132)..(1132): Xaa can be any naturally occurring amino acid
  misc_feature (1553)..(1553): Xaa can be any naturally occurring amino acid
FSGLNSRTFRGLAEEDLDPQYSWSPTQHFNEERYSPAPRSMKGLSGSRTQPPLCSGHTCGLAPPEDCEHLHHGPDARPPYLLSPADSCPGGRHRCSPRSSVHSECVMMPVVLGDHVSSSTFPRMHYSSHYDTRDDCAVAHAGAKINRIPANLLDQFEKQLPLHRDGFHTLQYQRTSAAAEQRSESPGRIRHLVHSVQKLFTKSHSLEGSSKSNANGTKADGRADDHHHAHHAKHSKRSKSKERKPEGKPRPGMSSWWSSDDNLDSDSTYRTPSVLNRHHLGPVAHCYPDALQSPFGDLSLKTSKSNNDVKCSACEGLALTPDAKYLKRSSWSTLTVSQAKEAYRKSSLNLDKPLLHQDAKPALRPCHYLQVPQDEWGGYPTGGKDEEIPCRRMRSGSYIKAMGDEESGESDSSPKTSPKSAILPEPLLKSIGQRPLGEHQTQTYLQAASDVPVGHSLDPAANYNSPKFRSRNQSYMRAVSTLSQASCVSQVSEAEINGQFESVCESVFSEVESQAMDALDLPGCFRTRSHSYLRAIQAGYSQDDECIPMMTPSDITSTIRSTAAVSYTNYKKTPPPVPPRTTSKPLISVTAQSSTESTQDAYQDSRAQRMSPWPQDSRGLYNSTDSLDSNKAMNLALETAAAQRHLPESQSSSVRTSDKAILVSKAEELLKSRCSSIGIQVETATDSDTESGGLREYHSVGVQVEDEKRHGRFKRSNSVTAAVQADLELEGFPGHITTEDKGLQFGSSFQRHSEPSTPTQYSAVRTVRTQGLFSYREDYRTQVDTSTLPPPDPWLEPAIDTVETGRMSPCRRDGSWFLKLLHAETKRMEGWCKEMEREAEENDLSEEILGKIRSAVGSAQLLMSQKFQQFYWLCQQNMDPSAMPRPTSQDLAGYWDMLQLSIEDVSMKFDELQRLRLNDWKMMESPERKEERKVPPPIPKKPPKGKFPITREKSLDLPDRQRQEARRRLMAAKRAASFRQNSASERADSIEIYIPEAQTRLWGRRPAPSPRRFRFPGRLCSAAPPWWFLSPPPAEHVLAPALPAPRTQRDAAGGLRVHGARGEDDFCFCCCCCCSRVAWLTLGSEGQVWRDLISPACSQRTARNASGAGTQLTFCYFYFYKLCDELEVRITXNYKRVHPTTPWRHETPKWKVLQPEAQERKAHSPRTAELLLPEHGPLRSPAPVCLGQKTRGSLCQASCDGKRPLQPPHSPPYSSPESQAMTSLNPRKYPAQHLHIQKKAECSHQEVTRREESLTEGWELKRKTMSLLVNSYCIFYFFLLKIRHPVFSLSFTIYATCDFFNVCIYIYSQIALQLTFQGILKKKHTRKTKVCLFKMTVDDVKSLRNMNVSGKYISVEMVKKKCSLHLYFSRILLSYAVLLKSRIYSLPVLDMKGKRGHILGFPAVAFKKKIGVHDSVVWCQRKIGTTLINRLSVYIIKFSCCNHCSDTTSVSQFRPVFKGKDLSDFSMGSSFRVLIITQSKSGLRFKMFPPQYLVFLPGLRSTMYLATGRIAFDDPIALCFFTLFALYNVPSPSAARGWQGVRCAVGPQRALQXCGVSLPHSPHPTEHGTIGSRADIKACLASKFYFFKAEELRIPCKNKTLEIEPHVWYIFYQTALKYIWKQKSVRMYLLEKCKKKKNPGISSIMNPNPPRVFKAFFLTNEYLNLEECTVMTLLPYIHSYYVKTNVFAEYWHFRTLKMLYDFQVNLLFRSNHRKAKSVYTLSERKCNVDKGPPPPHIGAIYWQLIRLTHFLELIQNIEKQTVKVVNNYLSQIPEFYDPCLKENVHCMEVDFLCFVDSLLFFNPQKSWPKPSLGEQINLPIHCTGLVTRRGECAHALPGPPCSKEDDLMVERIPAARPDGMLPVRVTYSSAIYSVLMQVTFYHETQKISHVSVLYMERKIKLFMILVLVTRASLFQPLLADHAMELTTCDHFVIFKIELQEKSKHPLENTAENYCAVLENIILESVMFTITPYLHSLMIQPMTGETQTLSFRADRLILLCGRLWLIKHKYDKQDLAFSPGKENAACHLECFPCDASLASSRVVVFEVKLVVIDDNFYHEFSQQIYITILEVVYKKIELFMIPKKLQFCLKGNVDVFNSKSILKTSSTYWKGKWSDKNIITCEGYLVLKEKKKAYKLSDLLRRGNFSLLLLMKVARFIIRRHSGRAHMCTGSDYFSWSICPCLDFCLFDAILSSHRFHPFALEGPASVNSRISVFVEILVSIATRVQDGISQESEGILQACVCSACGNCGMSSVRDSCLVCAKPSRGEEGVGEVGPSLPSGRPFLSAAIPSSQASCGPEHEGARGPPGRCSFCFRCVSSVSLAWNSGRFPGVFQWTGGPRAVAESAWVPQSPAGPPLMTGPPTNLGKAAGNVGEGVRWYGHKSIVQNSAGSGRAPGYCLWPTLKTEIAPPVSTETRFSNTGRNNYNSTWFLPAHFPALFFSSLNFIFFFSCKFNRLIENCSFQTTAPGNVPGFSCFDLHVCLHFSVGVGVNTSFQNFKIENHELKGEKDDPFLIRICNSVGWVNAVCFIQGHVAAMTPPHKVSSEPMASLQEPHLVAISWELQYIVGHKQSAKGKGLLLHIRLNVPQCRVAAECSGNEGDIAGISRLLGNLAFIHPQPATHLKFMSQFFSSRKGITVPVPVFLQDTAVRINDILALKSFELLGTGGESVRYCKGLVLALLECRPPSSAGHAARIQAGRKHLRDNQGPPEAEAMRLSLERFGNAEITTRAILLSFWLSTVSRCFQEQEPSTNQN

SEQ ID NO: 794310 - protein, 2400 aa, Homo sapiens
  misc_feature (782)..(782): Xaa can be any naturally occurring amino acid
  misc_feature (1204)..(1204): Xaa can be any naturally occurring amino acid
MSVCSQVPQDEWGGYPTGGKDEEIPCRRMRSGSYIKAMGDEESGESDSSPKTSPKSAILPEPLLKSIGQRPLGEHQTQTYLQAASDVPVGHSLDPAANYNSPKFRSRNQSYMRAVSTLSQASCVSQVSEAEINGQFESVCESVFSEVESQAMDALDLPGCFRTRSHSYLRAIQAGYSQDDECIPMMTPSDITSTIRSTAAVSYTNYKKTPPPVPPRTTSKPLISVTAQSSTESTQDAYQDSRAQRMSPWPQDSRGLYNSTDSLDSNKAMNLALETAAAQRHLPESQSSSVRTSDKAILVSKAEELLKSRCSSIGIQDSEFPEHQPYPRSDVETATDSDTESGGLREYHSVGVQVEDEKRHGRFKRSNSVTAAVQADLELEGFPGHITTEDKGLQFGSSFQRHSEPSTPTQYSAVRTVRTQGLFSYREDYRTQVDTSTLPPPDPWLEPAIDTVETGRMSPCRRDGSWFLKLLHAETKRMEGWCKEMEREAEENDLSEEILGKIRSAVGSAQLLMSQKFQQFYWLCQQNMDPSAMPRPTSQDLAGYWDMLQLSIEDVSMKFDELQRLRLNDWKMMESPERKEERKVPPPIPKKPPKGKFPITREKSLDLPDRQRQEARRRLMAAKRAASFRQNSASERADSIEIYIPEAQTRLWGRRPAPSPRRFRFPGRLCSAAPPWWFLSPPPAEHVLAPALPAPRTQRDAAGGLRVHGARGEDDFCFCCCCCCSRVAWLTLGSEGQVWRDLISPACSQRTARNASGAGTQLTFCYFYFYKLCDELEVRITXNYKRVHPTTPWRHETPKWKVLQPEAQERKAHSPRTAELLLPEHGPLRSPAPVCLGQKTRGSLCQASCDGKRPLQPPHSPPYSSPESQAMTSLNPRKYPAQHLHIQKKAECSHQEVTRREESLTEGWELKKENNVLTCKQLLYFLFLSNLKYDTQYFLYVSPFTLHVIFLMYVYIYILKLLYQLTFQGILKKKHTRKTKVCLFENDSCDVKSLRNMNVSGEVYLSLNGKEEMKFTFVFFQNSFVLCSIAKVENIFLACVRHEGKKRSHIVISSCSIQKKNWCSGLCGRCQRKIGTTLINRLSVYIIKFSCCNHCSDIDFCFTVQTGLQRKSLSDFSMGSSFRVLIITQSKSGLRFKMFPPQYLVFLPGLRSTMYLATGRIAFDDPIALCFFTLFALYNVPSPSAARGWQGVRCAVGPQRALQXCGVSLPHSPHPTEHGTIGSRADIKACLASKFYFFKAEELRIPCKNKTLYIEPHVWYIFYQTALKYIWKQKSVRMYLLEKCKKKKNPGISSIMNPNSPQVFKAFFLTNEYLNLEECTVMTLLPYIHSYYVKTNVFAEYWHFRTLKMLYDFQVNLLFRSNHRKAKSVYTLSERKCNVDKGPPPPHIGAIYWQLIRLTHFLELIQNIEKQTVKVVNNYLSQIPEFYDPCLKENVHCMEVDFLCFVDSLLFFNPQKSWPKPSLGEQINLPIHCTGLVTRRGECAHALPGPPCSKEDDLMVERIPAARPDGMLPVRVTESSAIYSVLMQVTFYHETQKISHVSVLYMERKIKLFMILVLVTRASLFQPLLADHAMELTTCDHFVILKYNFKKRVNIHWRTRLKIIVLFKEHHPRECDVHYNPIPTFPNDTANDRRNPDTLLRADRLILLCGRLWLIKHKYDKQDLAFSPGKENAACHLECFPCDASLASSRVVVFEVKLVVIDDNFYHSFLSKFISPSRMVYKKIELFMIPKKLQFCLKGNVDVFNSKSILKTSSTEWKGKWSDKNIITCEGYLVLKEKKKAYKLSDLLRRGNFSLLLLMKVARFIIRRHSGRAHMCTGSDYFSWSICPCLDFCLFDAILSSHRFHPFALEGPASVNSRISVFVEILVSIATRVQDGISQESEGILQACVCSACGNCGMSSVRDSCLVCAKPSRGEEGVGEVGPSLPSGRPFLSAAIPSSQASCGPEHEGARGPPGRCSFCFRCVSSVSLAWNSGRFPGVFQWTGGPRAVAESAWVPQSPAGPPLMTGPPTNLGKAAGNVSEGVRWYGHKSIVQNSAGSGRAPGYCLWPTLKTEIAPPVSTETRFSNTGRNNYNSTWFLPAHFPALFFSSLNFIFFFSCKFNRLIENCSFQTTAPGNVPGFSCFDLHVCLHFSVGVGVNTSFQNFKIENQSLRGEKDDPFLIRICNSVGWVNAVCFIQGHVAAMTPPHKVSSEPMASLQEPHLVAISWELQYIVGHKQSAKGKGLLLHIRLNVPQCRVAAECSGNEGDIAGISRLLGNLAFIHPQPATHLKFMSQFFSSRKGITVPVPVFLQDTAVRINDILALKSFELLGTGGESVRYCYGLVLALLECRPPSSAGHAARIQAGRKHLRDNQGPPEAEAMRLSLERFGNAEITTRAILLSFWLSTVSRCFQEQEPSTNQN

SEQ ID NO: 794311 - protein, 74 aa, Homo sapiens
GAHSWRLQLLTSLDKPLDSNDQVEIHHWREHSGMASAKTHSEGLQGNFKTCPWPGTVAYAYNPSTLGGRGGWIT

SEQ ID NO: 794312 - protein, 1710 aa, Homo sapiens
TESLKLPGVYEVLFYNETEDCPGMMLWRYPEPRVLTLVRITPVPFNTTEDPDISTADLGDVLQVPCSLEYWDELQKVFVAFREFNLSESKVCELQLPDINLVNDQKKLVSSDLWRIVLNSSQNGADDQSSASESGSQSTCDPLVTPTALAACTRVDSCFTPWFVPSLCVSFQFAHLEFHLCHHLDQLGTAAPQYLQPFVSDRNMPSELEYMIVSFREPHMYLRQWNNGSVCQEIQFLAQADCKLLECRNVTMQSVVKPFSIFGQMAVSSDVVEKLLDCTVIVDSVFVNLGQHVVHSLNTAIQAWQQNKCPEVEELVFSHFVICNDTQETLRFGQVDTDENILLASLHSHQYSWRSHKSPQLLHICIEGWGNWRWSEPFSVDHAGTFIRTIQYRGRTASLIIKVQQLNGVQKQIIICGRQIICSYLSQSIELKVVQHYIGQDGQAVVREHFDCLTAKQKLPSYILENNELTELCVKAKGDEDWSRDVCLESKAPEYSIVIQVPSSNSSIIYVWCTVLTLEPNSQVQQRMIVFSPLFIMRSHLPDPIIIHLEKRSLGLSETQIIPGKGQEKPLQNIEPDLVHHLTFQAREEYDPSDCAVPISTSLIKQIATKVHPGGTVNQILDEFYGPEKSLQPIWPYNKKDSDRNEQLSQWDSPMRVKLSIWKPYVRTLLIELLPWALLINESKWDLWLFEGEKIVLQVPAGKIIIPPNFQEAFQIGIYWANTNTVHKSVAIKLVHNLTSPKWKDGGNGEVVTLDEEAFVDTEIRLGAFPGHQKLCQFCISSMVQQGIQIIQIEDKTTIINNTPYQIFYKPQLSVCNPHSGKEYFRVPDSATFSICPGGEQPAMKSSSLPCWDLMPDISQSVLDASLLQKQIMLGFSPAPGADSSQCWSLPAIVRPEFPRQSVAVPLGNFRENGFCTRAIVLTYQEHLGVTYLTLSEDPSPRVIIHNRCPVKMLIKENIKDIPKFEVYCKKIPSECSIHHELYHQISSYPDCKTKDLLPSLLLRVEPLDEVTTEWSDAIDINSQGTQVVFLTGFGYVYVDVVHQCGTVFITVAPEGKAGPILTNTNRAPEKIVTFKMFITQLSLAVFDDLTHHKASAELLRLTLDNIFLCVAPGAGPLPGEEPVAALFELYCVEICCGDLQLDNQLYNKSNFHFAVLVCQGEKAEPIQCSKMQSLLISNKELEEYKEKCFIKLCITLNEGKSILCDINEFSFELKPARLYVEDTFVYYIKTLFDTYLPNSRLAGHSTHLSGGKQVLPMQVTQHARALVNPVKLRKLVIQPVNLLVSIHASLKLYIASDHTPLSFSVFERGPIFTTARQLVHALAMHYAAGALFRAGWVVGSLDILGSPASLVRSIGNGVADFFRLPYEGLTRGPGAFVSGVSRGTTSFVKHISKGTLTSITNLATSLARNMDRLSLDEEHYNRQEEWRRQLPESLGEGLRQGLSRLGISLLGAIAGIVDQPMQNFQKTSEAQASAGHKAKGVISGVGKGIMGVFTKPIGGAAELVSQTGYGILHGAGLSQLPKQRHQPSDLHADQAPNSHVKYVWKMLQSLGRPEVHMALDVVLVRGSGQEHEGCLLLTSEVLFVVSVSEDTQQQAFPVTEIDCAQDSKQNNLLTVQLKQPRVACDVEVDGVRERLSEQQYNRLVDYITKTSCHLAPSCSSMQIPCPVVAAEPPPSTVKTYHYLVDPHFAQVFLSKFTMVKNKALRKGFP

SEQ ID NO: 794313 - protein, 1649 aa, Homo sapiens
TESLKLPGVYEVLFYNETEDCPGMMLWRYPEPRVLTLVRITPVPFNTTEDPDISTADLGDVLQVPCSLEYWDELQKVFVAFREFNLSESKVCELQLPDINLVNDQKKLVSSDLWRIVLNSSQNGADDQSCTTVPTAFVSDRNMPSELEYMIVSFREPHMYLRQWNNGSVCQEIQFLAQADCKLLECRNVTMQSVVKPFSIFGQMAVSSDVVEKLLDCTVIVDSVFVNLGQHVVHSLNTAIQAWQQNKCPEVEELVFSHFVICNDTQETLRFGQVDTDENILLASLHSHQYSWRSHKSPQLLHICIEGWGNWRWSEPFSVDHAGTFIRTIQYRGRTASLIIKVQQLNGVQKQIIICGRQIICSYLSQSIELKVVQHYIGQDGQAVVREHFDCLTAKQKLPSYILENNELTELCVKAKGDEDWSRDVCLESKAPEYSIVIQVPSSNSSIIYVWCTVLTLEPNSQVQQRMIVFSPLFIMRSHLPDPIIIHLEKRSLGLSETQIIPGKGQEKPLQNIEPDLVHHLTFQAREEYDPSDCAVPISTSLIKQIATKVHPGGTVNQILDEFYGPEKSLQPIWPYNKKDSDRNEQLSQWDSPMRVKLSIWKPYVRTLLIELLPWALLINESKWDLWLFEGEKIVLQVPAGKIIIPPNFQEAFQIGIYWANTNTVHKSVAIKLVHNLTSPKWKDGGNGEVVTLDEEAFVDTEIRLGAFPGHQKLCQFCISSMVQQGIQIIQIEDKTTIINNTPYQIFYKPQLSVCNPHSGKEYFRVPDSATFSICPGGEQPAMKSSSLPCWDLMPDISQSVLDASLLQKQIMLGFSPAPGADSSQCWSLPAIVRPEFPRQSVAVPLGNFRENGFCTRAIVLTYQEHLGVTYLTLSEDPSPRVIIHNRCPVKMLIKENIKDIPKFEVYCKKIPSECSIHHELYHQISSYPDCKTKDLLPSLLLRVEPLDEVTTEWSDAIDINSQGTQVVFLTGFGYVYVDVVHQCGTVFITVAPEGKAGPILTNTNRAPEKIVTFKMFITQLSLAVFDDLTHHKASAELLRLTLDNIFLCVAPGAGPLPGEEPVAALFELYCVEICCGDLQLDNQLYNKSNFHFAVLVCQGEKAEPIQCSKMQSLLISNKELEEYKEKCFIKLCITLNEGKSILCDINEFSFELKPARLYVEDTFVYYIKTLFDTYLPNSRLAGHSTHLSGGKQVLPMQVTQHARALVNPVKLRKLVIQPVNLLVSIHASLKLYIASDHTPLSFSVFERGPIFTTARQLVHALAMHYAAGALFRAGWVVGSLDILGSPASLVRSIGNGVADFFRLPYEGLTRGPGAFVSGVSRGTTSFVKHISKGTLTSITNLATSLARNMDRLSLDEEHYNRQEEWRRQLPESLGEGLRQGLSRLGISLLGAIAGIVDQPMQNFQKTSEAQASAGHKAKGVISGVGKGIMGVFTKPIGGAAELVSQTGYGILHGAGLSQLPKQRHQPSDLHADQAPNSHVKYVWKMLQSLGRPEVHMALDVVLVRGSGQEHEGCLLLTSEVLFVVSVSEDTQQQAFPVTEIDCAQDSKQNNLLTVQLKQPRVACDVEVDGVRERLSEQQYNRLVDYITKTSCHLAPSCSSMQIPCPVVAAEPPPSTVKTYHYLVDPHFAQVFLSKFTMVKNKALRKGFP

SEQ ID NO: 794314 - protein, 108 aa, Homo sapiens
PGVISSRGRYETKRHRELKRLVQGYPAGKGMSGLEPGQPGFRIRIVSCYYCPSVAEGPRGEDLATEAGWRGRGTDRPGRWSYSQDQAFCGLHRVCSQGRPAGLWAEFP

SEQ ID NO: 794315 - protein, 220 aa, Homo sapiens
TSPAMGAARLLPNLTLCLQLLILCCQTQGENHPSPNFNQYVRDQGAMTDQLSRRQIREYQLYSRTSGKHVQVTGRRISATAEDGNKFAKLIVETDTFGSRVRIKGAESEKYICMNKRGKLIGKPSGKSKDCVFTEIVLENNYTAFQNARHEGWFMAFTRQGRPRQASRSRQNQREAHFIKRLYQGQLPFPNHAEKQKQFEFVGSAPTRRTKRTRRPQPLT

SEQ ID NO: 794316 - protein, 111 aa, Homo sapiens
AFMTYECVLWKPLSSAPRVKEKYSPNEKTEKRVQRINSKVLNFPIRVIVWVPYSSDPGRAFGCDSAHKKPERRKYFPTPAGWTLLPSAANTNWLFSTLQSARQWWGFILKP

SEQ ID NO: 794317 - protein, 122 aa, Homo sapiens
YRIALKSGYGKYLGINSDELVVGCSDAIGPKEQWEQVFQNIRSCAERETTKKDDIQEEDKGNVKQCEINYVKKFQSFQDHKLKISKEDSKILKKAQKDGFLHETLLDRHGSDPDIEPLLLLL

SEQ ID NO: 794318 - protein, 981 aa, Homo sapiens
MLRRPAPALAPAARLLLAGLLCGGGVWAARVNKHKPWLEPTYHGIVTENDNTVLLDPPLIALDKDAPLRFAESFEVTVTKEGEICGFKIHGQNVPFDAVVVDKSTGEGVIRSKEKLDCELQKDYSFTIQAYDCGKGPDGTNVKKSHKATVHIQVNDVNEYAPVFKEKSYKATVIEGKQYDSILRVEAVDADCSPQFSQICSYEIITPDVPFTVDKDGYIKNTEKLNYGKEHQYKLTVTAYDCGKKRATEDVLVKISIKPTCTPGWQGWNNRIEYEPGTGALAVFPNIHLETCDEPVASVQATVELETSHIGKGCDRDTYSEKSLHRLCGAAAGTAELLPSPSGSLNWTMGLPTDNGHDSDQVFEFNGTQAVRIPDGVVSVSPKEPFTISVWMRHGPFGRKKETILCSSDKTDMNRHHYSLYVHGCRLIFLFRQDPSEEKKYRPAEFHWKLNQVCDEEWHHYVLNVEFPSVTLYVDGTSHEPFSVTEDYPLHPSKIETQLVVGACWQEFSGVENDNETEPVTVASAGGDLHMTQFFRGNLAGLTLRSGKLADKKVIDCLYTCKEGLDLQVLEDSGRGVQIQAHPSQLVLTLEGEDLGELDKAMQHISYLNSRQFPTPGIRRLKITSTIKCFNEATCISVPPVDGYVMVLQPEEPKISLSGVHHFARAASEFESSEGVFLFPELRIISTITREVEPEGDGAEDPTVQESLVSEEIVHDLDTCEVTVEGEELNHEQESLEVDMARLQQKGIEVSSSELGMTFTGVDTMASYEEVLHLLRYRNWHARSLLDRKFKLICSELNGRYISNEFKVEVNVIHTANPMEHANHMAAQPQFVHPEHRSFVDLSGHNLANPHPFAVVPSTATVVIVVCVSFLVFMIILGVFRIRAAHRRTMRDQDTGKENEMDWDDSALTITVNPMETYEDQHSSEEEEEEEEEEESEDGEEEDDITSAESESSEEEEGEQGDPQNATRQQQLEWDDSTLSY

SEQ ID NO: 794319 - protein, 971 aa, Homo sapiens
MLRRPAPALAPAARLLLAGLLCGGGVWAARVNKHKPWLEPTYHGIVTENDNTVLLDPPLIALDKDAPLRFAGEICGFKIHGQNVPFDAVVVDKSTGEGVIRSKEKLDCELQKDYSFTIQAYDCGKGPDGTNVKKSHKATVHIQVNDVNEYAPVFKEKSYKATVIEGKQYDSILRVEAVDADCSPQFSQICSYEIITPDVPFTVDKDGYIKNTEKLNYGKEHQYKLTVTAYDCGKKRATEDVLVKISIKPTCTPGWQGWNNRIEYEPGTGALAVFPNIHLETCDEPVASVQATVELETSHIGKGCDRDTYSEKSLHRLCGAAAGTAELLPSPSGSLNWTMGLPTDNGHDSDQVFEFNGTQAVRIPDGVVSVSPKEPFTISVWMRHGPFGRKKETILCSSDKTDMNRHHYSLYVHGCRLIFLFRQDPSEEKKYRPAEFHWKLNQVCDEEWHHYVLNVEFPSVTLYVDGTSHEPFSVTEDYPLHPSKIETQLVVGACWQEFSGVENDNETEPVTVASAGGDLHMTQFFRGNLAGLTLRSGKLADKKVIDCLYTCKEGLDLQVLEDSGRGVQIQAHPSQLVLTLEGEDLGELDKAMQHISYLNSRQFPTPGIRRLKITSTIKCFNEATCISVPPVDGYVMVLQPEEPKISLSGVHHFARAASEFESSEGVFLFPELRIISTITREVEPEGDGAEDPTVQESLVSEEIVHDLDTCEVTVEGEELNHEQESLEVDMARLQQKGIEVSSSELGMTFTGVDTMASYEEVLHLLRYRNWHARSLLDRKFKLICSELNGRYISNEFKVEVNVIHTANPMEHANHMAAQPQFVHPEHRSFVDLSGHNLANPHPFAVVPSTATVVIVVCVSFLVFMIILGVFRIRAAHRRTMRDQDTGKENEMDWDDSALTITVNPMETYEDQHSSEEEEEEEEEEESEDGEEEDDITSAESESSEEEEGEQGDPQNATRQQQLEWDDSTLSY

SEQ ID NO: 794320 - protein, 424 aa, Homo sapiens
ITHYRARAAAGQVPRELPAREDPDGCRSPGSLGVSGTMNVSGCPGAGNASQAGGGGGWHPEAVIVPLLFALIFLVGTVGNTLVLAVLLRGGQAVSTTNLFILNLGVADLCFILCCVPFQATIYTLDGWVFGSLLCKAVHFLIFLTMHASSFTLAAVSLDRYLAIRYPLHSRELRTPRNALAAIGLIWGLSLLFSGPYLSYYRQSQLANLTVCHPAWSAPRRRAMDICTFVFSYLLPVLVLGLTYARTLRYLWRAVDPVAAGSGARRAKRKVTRMILIVAALFCLCWMPHHALILCVWFGQFPLTRATYALRILSHLVSYANSCVNPIVYALVSKHFRKGFRTICAGLLGRAPGRASGRVCAAARGTHSGSVLERESSDLLHMSEAAGALRPCPGASQPCILEPCPGPSWQGPKAGDSILTVDVA

SEQ ID NO: 794321 - protein, 114 aa, Homo sapiens
TYHLMIAIFISTSSFIKLSTQVLFRSLNLKLAFKNKIHEPIAHAKQLHSWMARSLFRCLFTHSWFLEQLLCPVLGQQRQETVLTFKLLPGWLCYPRATNRDLPELAFWPQDDVV

SEQ ID NO: 794322 - protein, 117 aa, Homo sapiens
PGGENALGEPLVRSARRSRIPEKEHGRESGQAGPGSRKTAWRRLPAPAGLLSWTRGELASRADPSCRGPRPGTGGSDTPPPAGHLPWVPLNPGGSSLRWRSVRSGTRETPNPACPTS

SEQ ID NO: 794323 - protein, 143 aa, Homo sapiens
DILKAYEDDVLLIDVIQDDPDLFGVSNEGELSFTSEVPKISQEPNVAGEHQSTDSKYMETPVKKEPSDDLRELPVLDCGWIKPDICASNSAESEIKRDPKDVNTSLGEVANETSENETLGDFSEQIKGSDLDEKHRFTDKVIT

SEQ ID NO: 794324 - protein, 454 aa, Homo sapiens
ELWHKDKMSKDLLLGIARIQLSNILSSEKTRFLGSNGEQCWRQTYSESVPVIAAQGSNNRIADLSYTVTLEDYGLVKMREIFISDSSQGVSAVQQKPSSLPPAPCPSEIQTEPRETLEYKAALELEMWKEMQEDIFENQLKQKELAHMQALAEEWKKRDRERESLVKKKVAEYTILEGKLQKTLIDLEKREQQLASVESELQREKKELQSERQRNLQELQDSIRRAKEDCIHQVELERLKIKQLEEDKHRLQQQLNDAENKYKILEKEFQQFKDQQNNKPEIRLQSEINLLTLEKVELERKLESATKSKLHYKQQWGRALKELARLKQREQESQMARLKKQQEELEQMRLRYLAAEEKDTVKTERQELLDIRNELNRLRQQEQKQYQDSTEIASGKKDGPHGSVLEEGLDDYLTRLIEERDTLMRTGVYNHEDRIISELDRQIREILAKSNASN

SEQ ID NO: 794325 - protein, 211 aa, Homo sapiens
IHYPHPHHSLNFTTLRNIYKILEKEFQQFKDQQNNKPEIRLQSEINLLTLEKVELERKLESATKSKLHYKQQWGRALKELARLKQREQESQMARLKKQQEELEQMRLRYLAAEEKDTVKTERQELLDIRNELNRLRQQEQKQYQDSTEIASGKKDGPHGSVLEEGLDDYLTRLIEERDTLMRTGVYNHEDRIISELDRQIREILAKSNASN

SEQ ID NO: 794326 - protein, 209 aa, Homo sapiens
MDSDETGFEHSGLWVSVLAGLLLGACQAHPIPDSSPLLQFGGQVRQRYLYTDDAQQTEAHLEIREDGTVGGAADQSPESLLQLKALKPGVIQILGVKTSRFLCQRPDGALYGSLHFDPEACSFRELLLEDGYNVYQSEAHGLPLHLPGNKSPHRDPAPRGPARFLPLPGLPPALPEPPGILAPQPPDVGSSDPLSMVGPSQGRSPSYAS

SEQ ID NO: 794327 - protein, 532 aa, Homo sapiens
MEGDSYHNATTVNGTPVNHQPLERHRLWEVITIAAVTAVVSLITIVGNVLVMISFKVNSQLKTVNNYYLLSLACADLIIGIFSMNLYTTYILMGRWALGSLACDLWLALDYVASNASVMNLLVISFDRYFSITRPLTYRAKRTPKRAGIMIGLAWLISFILWAPAILCWQYLVGKRTVPLDECQIQFLSEPTITFGTAIAAFYIPVSVMTILYCRIYRETEKRTKDLADLQGSDSVTKAEKRKPAHRALFRSCLRCPRPTLAQRERNQASWSSSRRSTSTTGKPSQATGPSANWAKAEQLTTCSSYPSSEDEDKPATDPVLQVVYKSQGKESPGEEFSAEETEETFVKAETEKSDYDTPNYLLSPAAAHRPKSQKCVAYKFRLVVKADGNQETNNGCHKVKIMPCPFPVAKEPSTKGLNPNPSHQMTKRKRVVLVKERKAAQTLSAILLAFIITWTPYNIMVLVSTFCDKCVPVTLWHLGYWLCYVNSTVNPICYALCNRTFRKTFKMLLLCRWKKKKVEEKLYWQGNSKLP

SEQ ID NO: 794328 - protein, 101 aa, Homo sapiens
ALIPKLFQGFNLSGSMESGFTVEQNEVAVRRGKRGHTTFVLSLLGLLRCNLQTVKSTLISIFSKFWQKSTVIQLPPQSPYKCPHATLCSQPTPLLLASGNH

SEQ ID NO: 794329 - protein, 119 aa, Homo sapiens
KCQVELSPLLYHPSPRWEQEARLPGDRGRRGEDVPAFSPEPLWLSLSAQAGDTTGRSPSPSLPSPRRLYGNQWKFHLRMNGLHYHHLCPSLLCSTKGQVHTLSLYANEVSPSSVRVSLS

SEQ ID NO: 794330 - protein, 1331 aa, Homo sapiens
MSRGKVIRLHRRKQDNISGGDSSATESWDEELSPSTVLYTATQHTPTSITLTVRRTKPKKRKKSPEKGRAAPKTKKIKNSPSEAQNLDENTTEGWENRIRLWTDQYEEAFTNQYSADVQNALEQHLHSSKEFVGKPTILDTINKTELACNNTVIGSQMQLQLGRVTRVQKHRKILRAARDLALDTLIIEYRGKVMLRQQFEVNGHFFKKPYPFVLFYSKFNGVEMCVDARTFGNDARFIRRSCTPNAEVRHMIADGMIHLCIYAVSAITKDAEVTIAFDYEYSNCNYKVDCACHKGNRNCPIQKRNPNATELPLLPPPPSLPTIGAETRRRKARRKELEMEQQNEASEENNDQQSQEVPEKVTVSSDHEEVDNPEEKPEEEKEEVIDDQENLAHSRRTREDRKVEAIMHAFENLEKRKKRRDQPLEQSNSDVEITTTTSETPVGEETKTEAPESEVSNSVSNVTIPSTPQSVGVNTRRSSQAGDIAAEKLVPKPPPAKPSRPRPKSRISRYRTSSAQRLKRQKQANAQQAELSQAALEEGGSNSLVTPTEAGSLDSSGENRPLTGSDPTVVSITGSHVNRAASKYPKTKKYLVTEWLNDKAEKQECPVECPLRITTDPTVLATTLNMLPGLIHSPLICTTPKHYIRFGSPFIPERRRRPLLPDGTFSSCKKRWIKQALEEGMTQTSSVPQETRTQHLYQSNENSSSSSICKDNADLLSPLKKWKSRYLMEQNVTKLLRPLSPVTPPPPNSGSKSPQLATPGSSHPGEEECRNGYSLMFSPVTSLTTASRCNTPLQFELCHRKDLDLAKVGYLDSNTNSCADRPSLLNSGHSDLAPHPSLGPTSETGFPSRSGDGHQTLVRNSDQAFRTEFNLMYAYSPLNAMPRADGLYRGSPLVGDRKPLHLDGGYCSPAEGFSSRYEHGLMKDLSRGSLSPGGERACEGVPSAPQNPPQRKKVSLLEYRKRKQEAKENSAGGGGDSAQSKSKSAGAGQGSSNSVSDTGAHGVQGSSARTPSSPHKKFSPSHSSMSHLEAVSPSDSRGTSSSHCRPQENISSRWMVPTSVERLREGGSIPKVLRSSVRVAQKGEPSPTWESNITEKDSDPADGEGPETLSSALSKGATVYSPSRYSYQLLQCDSPRTESQSLLQQSSSPFRGHPTQSPGYSYRTTALRPGNPPSHGSSESSLSSTSYSSPAHPVSTDSLAPFTGTPGYFSSQPHSGNSTGSNLPRRSCPSSAASPTLQGPSDSPTSDSVSQSSTGTLSSTSFPQNSRSSLPSDLRTISLPSAGQSAVYQASRVSAVSNSQHYPHRGSGGVHQYRLQPLQGSGVKTQTGLS

SEQ ID NO: 794331 - protein, 176 aa, Homo sapiens
MERKYGFFLSYGKFMVFMKNPTRSLFTQVRHMIADGMIHLCIYAVSAITKDAEVTIAFDYEYSNCNYKVDCACHKGNRNCPIQKRNPNATELPLLPPPPSLPTIGAETRRRKARRKELEMEQQNEASEENNDQQSQEVPEKVTVSSDHEVIAPGQMMMLWHQSSKGRGTRVAAWFK

SEQ ID NO: 794332 - protein, 107 aa, Homo sapiens
PHQNPSHSQGTKEVLNCLLELEEDGPILRVISLDIYGEKLGTLMEGSSSFIPQTYSVPGTLGKIKEIHDRIKRNNPSFLLTQTKINKILSLTSHPLQITHQSSISLP

SEQ ID NO: 794333 - protein, 106 aa, Homo sapiens
PGDKNKKFVYSHPKLKKLEEVVIEHFKSWNAENTTEKKRDETRVMIFSSFRDSVQEIAEMLSQHQPIIRVMTFVGHASGKSTKGFTQKEQLEVIIFGIDKNKNKID

SEQ ID NO: 794334 - protein, 114 aa, Homo sapiens
MRNELLLTGQRFCIRPPHRPAYGKLLEGRYPCLVSWEQSDSAATMHKKLPLKPGGMKETQCHRLFQKQCIHLPARRGELPSKFLAFGLQPLRRRKVAFSKRQLLTAKKSGVSPL

SEQ ID NO: 794335 - protein, 131 aa, Homo sapiens
PSPGGTAPRINWLDEGTMRNELLLTGQRFCIRPPHRPAYGKLLEGRYPCLVSWEQSDSAATMHKKLPLKPGGMKETQCHRLFQKQCIHLPARRGELPSKFLAFGLQPLRRRKVAFSKRQLLTAKKSGVSPL

SEQ ID NO: 794336 - protein, 153 aa, Homo sapiens
LDPTFYADTLTLCQRLFQSVMEGIQGCLPFLCALYKDRIGDSLAEIPSAASLVFSSNSQKSPDLRALVCPKPGKLCSGKEEQRELGCNGDGVNWSKRFCLLEIVAVSEMRSKEPSETLRACLQPGSSREDKTEPPIEARQKRLKMNQLTAHIR

SEQ ID NO: 794337 - protein, 62 aa, Homo sapiens
MWGGREPGLRAPRATSGLWSPHSSWLDEMVQKPSEKSLPCPEPPGTCHGSGDEAHAPWQLLY

SEQ ID NO: 794338 - protein, 121 aa, Homo sapiens
PLGFLLRLLLPGSPLQHSLASQALPPLLVTQEQLAQISVGITQTSSHHPLRSSSAAPMLGGSLIVSLTVATGEARALTHRVLGVPALVATCHGVRLLLSRSPHPPAGDLAHGECQVYACQR

SEQ ID NO: 794339 - protein, 109 aa, Homo sapiens
FEGSYFHSDSNSPSSTLSPMGPILKGHTKLIESLRTALHTVEHSCHCSLSPPSECSYLQFLNLIHSFPDTIALPACFGHDCLKWWLQASLFFTVFMKCIPSVPGTIAGT

SEQ ID NO: 794340 - protein, 152 aa, Homo sapiens
MVSKWQEPWGFQLTISPQAGPSRSPRVPGAPPGWACGPAGLRAALQLGGLLGAEGARPAGRGQHHGQRVAAPLVPAGVQDGVELALEVGLEGVERPQVIGAVGIEEGEFALLIVQVEPDAVGVAGHGQGYPGAGKGFVHPALLQADQPHAVL

SEQ ID NO: 794341 - protein, 189 aa, Homo sapiens
MTDKTEKVAVDPETVFKRPRECDSPSYQKRQRMALLARKQGAGDSLIAGSAMSKEKKLMTGHAIPPSQLDSQIDDFTGFSKDRMMQKPGSNAPVGGNVTSSFSGDDLECRETASSPKSQREINADIKRKLVKELRCVGQKYEKIFEMLEGVQGPTAVRKRFFESIIKEAARCMRRDFVKHLKKKLKRMI

SEQ ID NO: 794342 - protein, 132 aa, Homo sapiens
ERKKKRRRKKGRKERNHHILFFLNHYILNEVTQEWKSKHRMFSLFCSVLFFKMEFRSVVQSGVQWRDLGSPGAEFGTRKYTVYFKRRKVKRYLKIAGAKQAVTTWTFKCGMKCNITLTNSTVKPQMLSFFRC

SEQ ID NO: 794343 - protein, 71 aa, Homo sapiens
MWFDGIMTNRSTLVPDFGSVAVMAQEIDSTVKRNVKKPAFKDEQVNWPVSIKSIELPNFHIFTQYKYSTIF

SEQ ID NO: 794344 - protein, 110 aa, Homo sapiens
NRGPKVPGINSRRGETRTSSKPGPNSIPNSVPNTFSPPAAGCRPPATHTALGNSQSGHPFDAASPKGVGGGSQSVPGYWPHMPDTRVIRSSQQSHCSTKGISGRRQGRVI

SEQ ID NO: 794345 - protein, 203 aa, Homo sapiens
MYQNMDDEMKREHLAAEQRMVHRIQRIMMECHREKVEAVEKARAEERHIAQEAIQAQKSKAVEEIVNTGVTVIKDEKTSVARLMREKEHEMSILYGIAQRQRQEEVQEVLQEAEKTHQATLGNMMDKLANTQGELLSIAKQLGIMTNWKDFLEEELQETRMAFQKYINYTFPKLSPGHADFILPERKKTPSNLVIKENKTTLD

SEQ ID NO: 794346 - protein, 110 aa, Homo sapiens
NPILKRFSYCCSSLKLPLYLLFSDFLLFGASHFLLIPNSFGIWNLNTFLEVCTGTNPLFVLGSMVATILPGWKLRFSCWQLPPLLLLGKKVNPGSWSMGPWIPFGVSSPE

SEQ ID NO: 794347 - protein, 92 aa, Homo sapiens
QRMRDTPHRFPTVNIPSTSGPGLHVSVTCMWLHWPERSWLHANHWPGRIPLLLLLLQLRRVPRAPACAACVNSASSPVAHFGPAGHDQGLSN

SEQ ID NO: 794348 - protein, 124 aa, Homo sapiens
FHNKHTLTYMHTHSHTHVRTHVPSHTLTPSHACTNLLASSHKLTHTHTLTQSHTHLLSHTRVHTRACTLAQTHSCTLPHTHSHKHVLSTLRLTHAHSQSHTCTQLCTHTCTYSHAWINTHSASH

SEQ ID NO: 794349 - protein, 112 aa, Homo sapiens
EIALCSFMYLHFPPSLLVFCCYPWKVSNHPLPGLNIFRSTIHYKVYSNRKRGSQVAVCRRHDFIFTKPHHLSPKTCRIDKQLQQNLRIQNQCAKTQVFLYTNNRQAESQIMN

SEQ ID NO: 794350 - protein, 901 aa, Homo sapiens
LEGALEQERKARMNCERELHKLEGNLKLNRESMENLESSQRHLAEELRKKELELSQMNSKVENEKGLVAQLQKTVKELQTQIKDLKEKLEAERTTRAKMERERADLTQDLADLNERLEEVGGSSLAQLEITKKQETKFQKLHRDMEEATLHFETTSASLKKRHADSLAELEGQVENLQQVKQKLEKDKSDLQLEVDDLLTRVEQMTRAKANAEKLCTLYEERLHEATAKLDKVTQLANDLAAQKTKLWSESGEFLRRLEEKEALINQLSREKSNFTRQIEDLRGQLEKETKSQSALAHALQKAQRDCDLLREQYEEEQEVKAELHRTLSKVNAEMVQWRMKYENNVIQRTEDLEDAKKELAIRLQEAAEAMGVANARNASLERARHQLQLELGDALSDLGKVRSAAARLDQKQLQSGKALADWKQKHEESQALLDASQKEVQALSTELLKLKNTYEESIVGQETLRRENKNLQEEISNLTNQVREGTKNLTEMEKVKKLIEEEKTEVQVTLEETEGALERNESKILHFQLELLEAKAELERKLSEKDEEIENFRRKQQCTIDSLQSSLDSEAKSRIEVTRLKKKMEEDLNEMELQLSCANRQVSEATKSLGQLQIQIKDLQMQLDDSTQLNSDLKEQVAVAERRNSLLQSELEDLRSLQEQTERGRRLSEEELLEATERINLFYTQNTSLLSQKKKLEADVARMQKEAEEVVQECQNAEEKAKKAAIEAANLSEELKKKQDTIAHLERTRENMEQPITDLQKRLAEAEQMALMGSRKQIQKLESRVRELEGELEGEIRRSAEAQRGARRLERCIKELTYQAEEDKKNLSRMQTQMDKLQLKVQNYKQQVEVAETQANQYLSKYKKQQHELNEVKERAEVAESQVNKLKIKAREFGKKVQEE

SEQ ID NO: 794351 - protein, 151 aa, Homo sapiens
MAHSCLRALAFPFSRRPLGEGGIGVKEKAGKEDIWVRELEGELEGEIRRSAEAQRGARRLERCIKELTYQAEEDKKNLSRMQTQMDKLQLKVQNYKQQVEVAETQANQYLSKYKKQQHELNEVKERAEVAESQVNKLKIKAREFGKKVQEE

SEQ ID NO: 794352 - protein, 784 aa, Homo sapiens
LEGALEQERKARMNCERELHKLEGNLKLNRESMENLESSQRHLAEELRKKELELSQMNSKVENEKGLVAQLQKTVKELQTQIKDLKEKLEAERTTRAKMERERADLTQDLADLNERLEEVGGSSLAQLEITKKQETKFQKLHRDMEEATLHFETTSASLKKRHADSLAELEGQVENLQQVKQKLEKDKSDLQLEVDDLLTRVEQMTRAKANAEKLCTLYEERLHEATAKLDKVTQLANDLAAQKTKLWSESGEFLRRLEEKEALINQLSREKSNFTRQIEDLRGQLEKETKSQSALAHALQKAQRDCDLLREQYEEEQEVKAELHRTLSKVNAEMVQWRMKYENNVIQRTEDLEDAKRDFYLTNQVREGTKNLTEMEKVKKLIEEEKTEVQVTLEETEGALERNESKILHFQLELLEAKAELERKLSEKDEEIENFRRKQQCTIDSLQSSLDSEAKSRIEVTRLKKKMEEDLNEMELQLSCANRQVSEATKSLGQLQIQIKDLQMQLDDSTQLNSDLKEQVAVAERRNSLLQSELEDLRSLQEQTERGRRLSEEELLEATERINLFYTQNTSLLSQKKKLEADVARMQKEAEEVVQECQNAEEKAKKAAIEAANLSEELKKKQDTIAHLERTRENMEQPITDLQKRLAEAEQMALMGSRKQIQKLESRVRELEGELEGEIRRSAEAQRGARRLERCIKELTYQAEEDKKNLSRMQTQMDKLQLKVQNYKQQVEVAETQANQYLSKYKKQQHELNEVKERAEVAESQVNKLKIKAREFGKKVQEE

SEQ ID NO: 794353 - protein, 1102 aa, Homo sapiens [sequence omitted]

SEQ ID NO: 794354 - protein, 128 aa, Homo sapiens
TEERFEYVESVVYQILIDKMGFSDAPNAIKIEFAQRIGHQRDCPNAKPRPILVYFETPQQRDSVLKKSYKLKGTGIGISTDILTHDIRERKEKGIPSSQTYESMAIKLSTPEPSDLNRNSYAVLSKSE

SEQ ID NO: 794355 - protein, 128 aa, Homo sapiens
MYTLGITNFPIPGEPGFPLNAMYPKPANKQEDEVMRAYLQHLRQETGLRLCEKVFDPQNDKRCKWWTCFVKRQFMLESFKTWTVKGVRAATISRALGSIFQQDIRIFCLYFIKFYTEERRPCLYLKNS

SEQ ID NO: 794356 - protein, 32 aa, Homo sapiens
MALILKSAGKIYYCLSTRPRGQKWSGDYPLVT

SEQ ID NO: 794357 - protein, 370 aa, Homo sapiens
MGLPASSSGLGLVTRQALVVATVPGDPSWGTGLLAVKMGEPGPPSPPAPKAAPGLIDSFSEMNNYRRAMQKMAEDILSLRRQASILEGENRILRSRLAQQEEEEGQGKASEAQNTVSMKQKLLLSELDMKKLRDRVQHLQNELIRKNDREKELLLLYQAQQPQAALLKQYQGKLQKMKALEETVRHQEKVIEKMERVLEDRLQDRSKPPPLNRQQGKPYTGFPMLSASGLPLGSMGENLPVELYSVLLAENAKLRTELDKNRHQQAPIILQQQALPDLLSGTSDKFNLLAKLEHAQSRILSLESQLEDSARRWGREKQDLATRLQEQEKGFRHPSNSIIIEQPVSDPPGVAPRGSGGGAGSHRTPKVTGP

SEQ ID NO: 794358 - protein, 122 aa, Homo sapiens
MGLPASSSGLGLVTRQALVVATVPGDPSWGTGLLAVKMGEPGPPSPPAPKAAPGLIDSFSVSRPLAHWFWEDGLARLAAGVLGCVAQQPVEVFPEPLKWEAGWRGPGLWPLDARGHRNLLQG

SEQ ID NO: 794359 - protein, 112 aa, Homo sapiens
QETHGPGHSECTETLPAQDLLSGTSDKFNLLAKLEHAQSRILSLESQLEDSARRWGREKQDLATRLQEQEKGFRHPSNSIIIEQPVSDPPGVAPRGSGGGAGSHRTPKVTGP

SEQ ID NO: 794360 - protein, 121 aa, Homo sapiens
QSTGITGMNHRVWPTLRYPLDEKKFLPDIGAELSSVAFPGMLIFSYPMTTVSFVTDHVSHFVHEKAQNQTCSGTLSISFQVQEFSLALFDFSTRVFPPLYPLTIFIPLYCVHFAKLPQILF

SEQ ID NO: 794361 - protein, 352 aa, Homo sapiens
MAPLGYFLLLCSLKQALGSYPIWWSLAVGPQYSSLGSQPILCASIPGLVPKQLRFCRNYVEIMPSVAEGIKIGIQECQHQFRGRRWNCTTVHDSLAIFGPVLDKATRESAFVHAIASAGVAFAVTRSCAEGTAAICGCSSRHQGSPGKGWKWGGCSEDIEFGGMVSREFADARENRPDARSAMNRHNNEAGRQAIASHMHLKCKCHGLSGSCEVKTCWWSQPDFRAIGDFLKDKYDSASEMVVEKHRESRGWVETLRPRYTYFKVPTERDLVYYEASPNFCEPNPETGSFGTRDRTCNVSSHGIDGCDLLCCGRGHNARAERRREKCRCVFHWCCYVSCQECTRVYDVHTCK

SEQ ID NO: 794362 - protein, 117 aa, Homo sapiens
MESSRNDAKDDLGNLNVPDSSLPAENEATGPGFIPPPLAPVRGPLFPVDTRGPFMRRGPPFPPPPPGTMFGASRGYFPPRDFPGPPHAPFAMRNIYPPRGLPPYLHPRPGFYPNPTF

SEQ ID NO: 794363 - protein, 67 aa, Homo sapiens
PKTDLTVPGCHNMPAEEWRLSPGYPKGYCALNWWPHIHSPASAGSGLVQNPHAGSPRGTSAELKAKI

SEQ ID NO: 794364 - protein, 990 aa, Homo sapiens
MLLPCLGIWEKNPPPPPLPSIGIVEVRERGRSEREHTEGPKEVPGHEQGPSLRNPSAGASPAASQVGGGVVQNQLTQPGIELCKATCKEGKHLPNPPPPRALDPLPAPSPVTVTLVLSRGACKASQIQTARRTAATATELETRAQAPSSPSPADRASRLSDLPTESHPSPSLAARLPSAPTLLFRSCLLSDFYFLRTPSQIKSTNKKQGIPPGSSVLFYLVLPLPEDAKLLVDCRGEGFSLLLMCEYTPTSHCLSHLYLSSTPAASPLIPDFPTPFLLLFFFFLKRLRFLLGAQDGRAARDLFEIPQGRRRWAGFSRTTRLLMTWRLAATPREIRCKHVCSRGACVGGLGMGEWERRKETALENAMISFCRVANPLILPRSHSASLLYHFYSGFLVSFFPAPASSPCPHLRFACRYLSGHRRCLKMLSGVWFLSVLTVAGILQTESRKTAKDICKIRCLCEEKENVLNINCENKGFTTVSLLQPPQYRIYQLFLNGNLLTRLYPNEFVNYSNAVTLHLGNNGLQEIRTGAFSGLKTLKRLHLNNNKLEILREDTFLGLESLEYLQADYNYISAIEAGAFSKLNKLKVLILNDNLLLSLPSNVFRFVLLTHLDLRGNRLKVMPFAGVLEHIGGIMEIQLEENPWNCTCDLLPLKAWLDTITVFVGEIVCETPFRLHGKDVTQLTRQDLCPRKSASDSSQRGSHADTHVQRLSPTMNPALNPTRAPKASRPPKMRNRPTPRVTVSKDRQSFGPIMVYQTKSPVPLTCPSSCVCTSQSSDNGLNVNCQERKFTNISDLQPKPTSPKKLYLTGNYLQTVYKNDLLEYSSLDLLHLGNNRIAVIQEGAFTNLTSLRRLYLNGNYLEVLYPSMFDGLQSLQYLYLEYNVIKEIKPLTFDALINLQLLFLNNNLLRSLPDNIFGGTALTRLNLRNNHFSHLPVKGVLDQLPAFIQIDLQENPWDCTCDIMGLKDWTEHANSPVIINEVTCESPAKHA

SEQ ID NO: 794365 - protein, 132 aa, Homo sapiens [sequence omitted]

SEQ ID NO: 794366 - protein, 235 aa, Homo sapiens
QTLGPSGLLICRRLPYGLGPEACALGDAEAKHAHGRPASLQVLHCPAPAPLGHLSPGEALSRDQPLVRMLLMTRLGPSRQSGSTGAGANSTLEKFGCTMLAKLQLNAPTRAEARRRDRRCQPPRAAAASGGHLHASRRAQSQRVHWSTTERSTVPGRRAHARPVGVAAPGAQATRATSLQEHAVSAPGTLWGKVGHRVETTPATLGRRSSKRVATGLASRLQTTEASQQRDRMGG

SEQ ID NO: 794367 - protein, 1491 aa, Homo sapiens
RALSSAAESPQGEQRARGCRGTAAGGGQRGACERADWRRRQLRKVRSVELDQLPEQPLFLAASPPASSTSPSPEPADAAGSGTGFQPVAVPPPHGAASRGGAHLTESVAAPDSGASSPAAAEPGEKRAPAAEPSPAAAPAGREMENKETLKGLHKMDDRPEERMIREKLKATCMPAWKHEWLERRNRRGPVVVKPIPVKGDGSEMNHLAAESPGEVQASAASPASKGRRSPSPGNSPSGRTVKSESPGVRRKRVSPVPFQSGRITPPRRAPSPDGFSPYSPEETNRRVNKVMRARLYLLQQIGPNSFLIGGDSPDNKYRVFIGPQNCSCARGTFCIHLLFVMLRVFQLEPSDPMLWRKTLKNFEVESLFQKYHSRRSSRIKAPSRNTIQKFVSRMSNSHTLSSSSTSTSSSENSIKDEEEQMCPICLLGMLDEESLTVCEDGCRNKLHHHCMSIWAEECRRNREPLICPLCRSKWRSHDFYSHELSSPVDSPSSLRAAQQQTVQQQPLAGSRRNQESNFNLTHYGTQQIPPAYKDLAEPWIQVFGMELVGCLFSRNWNVREMALRRLSHDVSGALLLANGESTGNSGGSSGSSPSGGATSGSSQTSISGDVVEACCSVLSMVCADPVYKVYVAALKTLRAMLVYTPCHSLAERIKLQRLLQPVVDTILVKCADANSRTSQLSISTLLELCKGQAGELAVGREILKAGSIGIGGVDYVLNCILGNQTESNNWQELLGRLCLIDRLLLEFPAEFYPHIVSTDVSQAEPVEIRYKKLLSLLTFALQSIDNSHSMVGKLSRRIYLSSARMVTTVPHVFSKLLEMLSVSSSTHFTRMRRRLMAIADEVEIAEAIQLGVEDTLDGQQDSFLQASVPNNYLETTENSSPECTVHLEKTGKGLCATKLSASSEDISERLASISVGPSSSTTTTTTTTEQPKPMVQTKGRPHSQCLNSSPLSHHSQLMFPALSTPSSSTPSVPAGTATDVSKHRLQGFIPCRIPSASPQTQRKFSLQFHRNCPENKDSDKLSPVFTQSRPLPSSNIHRPKPSRPTPGNTSKQGDPSKNSMTLDLNSSSKCDDSFGCSSNSSNAVIPSDETVFTPVEEKCRLDVNTELNSSIEDLLEASMPSSDTTVTFKSEVAVLSPEKAENDDTYKDDVNHNQKCKEKMEAEEEEALAIAMAMSASQDALPIVPQLQVENGEDIIIIQQDTPETLPGHTKAKQPYREDTEWLKGQQIGLGAFSSCYQAQDVGTGTLMAEKVTYVRNTSSEQEEVVEALREEIRMMSHLNHPNIIRMLGATCEKSNYNLFIEWMAGGSVAHLLSKYGAFKESVVINYTEQLLRGLSYLHENQIIHRDVKGANLLIDSTGQRLRIADFGAAARLASKGTGAGEFQGQLLGTIAFMAPEVLRGQQYGRSCDVWSVGCAIIEMACAKPPWNAEKHSNHLALIFKIASATTAPSIPSHLSPGLRDVALRCLELQPQDRPPSRELLKHPVFRTTW

SEQ ID NO: 794368 - protein, 105 aa, Homo sapiens
FFLQNAVGQPARGLETRLLRAQSSGWAAALCAASRSSGSGVSAEQGEGRRSRILNTSSLKRGKEGGGKNPLYWKTNNPRKLTWSEPIFKVRKYNGDFATLLYGKD

SEQ ID NO: 794369 - protein, 196 aa, Homo sapiens
AGGGSGRRAADLLRPRASPLSSGSGSSSPGGEGWGFLETLRGAPPIGAHHPNLFLARHCAAPQDPLPNMDFLLALVLVSSLYLQAAAEFDGRWPRQIVSSIGLCRYGGRIDCCWGWARQSWGQCQPVCQPRCKHGECIGPNKCKCHPGYAGKTCNQAVGLKDVWFQPGAVALPCNPSTLEGRGGRITRSGYRDHPG

SEQ ID NO: 794370 - protein, 161 aa, Homo sapiens
AGGGSGRRAADLLRPRASPLSSGSGSSSPGGEGWGFLETLRGAPPIGAHHPNLFLARHCAAPQDPLPNMDFLLALVLVSSLYLQAAAEFDGRWPRQIVSSIGLCRYGGRIDCCWGWARQSWGQCQPVCQPRCKHGECIGPNKCKCHPGYAGKTCNQGRKRV

SEQ ID NO: 794371 - protein, 297 aa, Homo sapiens
AGGGSGRRAADLLRPRASPLSSGSGSSSPGGEGWGFLETLRGAPPIGAHHPNLFLARHCAAPQDPLPNMDFLLALVLVSSLYLQAAAEFDGRWPRQIVSSIGLCRYGGRIDCCWGWARQSWGQCQPVCQPRCKHGECIGPNKCKCHPGYAGKTCNQDLNECGLKPRPCKHRCMNTYGSYKCYCLNGYMLMPDGSCSSALTCSMANCQYGCDVVKGQIRCQCPSPGLQLAPDGRTCVDVDECATGRASCPRCKQCVNTFGSYICKCHKCFDLMYIGGKYQCHDIDECSLGQYQCSSFA

SEQ ID NO: 794372 - protein, 1036 aa, Homo sapiens
MEVVGDFEYSKRDLVGHGAFAVVFRGRHRQKTDWEVAIKSINKKNLSKSQILLGKEIKILKELQHENIVALYDVQELPNSVFLVMEYCNGGDLADYLQAKGTLSEDTIRVFLHQIAAAMRILHSKGIIHRDLKPQNILLSYANRRKSSVSGIRIKIADFGFARYLHSNMMAATLCGSPMYMAPEVIMSQHYDAKADLWSIGTVIYQCLVGKPPFQANSPQDLRMFYEKNRSLMPSIPRETSPYLANLLLGLLQRNQKDRMDFEAFFSHPFLEQGPVKKSCPVPVPMYSGSVSGSSCGSSPSCRFASPPSLPDMQHIQEENLSSPPLGPPNYLQVSKDSASTSSKNSSCDTDDFVLVPHNISSDHSCDMPMGTAGRRASNEFLVCGGQCQPTVSPHSETAPIPVPTQIRNYQRIEQNLTSTASSGTNVHGSPRSAVVRRSNTSPMGFLRPGSCSPVPADTAQTVGRRLSTGSSRPYSPSPLVGTIPEQFSQCCCGHPQGHDSRSRNSSGSPVPQAQSPQSLLSGARLQSAPTLTDIYQNKQKLRKQHSDPVCPSHTGAGYSYSPQPSRPGSLGTSPTKHLGSSPRSSDWFFKTPLPTIIGSPTKTTAPFKIPKTQASSNLLALVTRHGPAEEQSKDGNEPRECAHCLLVQGSERQRAEQQSKAVFGRSVSTGKLSDQQGKTPICRHQGSTDSLNTERPMDIAPAGACGGVLAPPAGTAASSKAVLFTVGSPPHSAAAPTCTHMFLRTRTTSVGPSNSGGSLCAMSGRVCVGSPPGPGFGSSPPGAEAAPSLRYVPYGASPPSLEGLITFEAPELPEETLMEREHTDTLRHLNVMLMFTECVLDLTAMRGGNPELCTSAVSLYQIQESVVVDQISQLSKDWGRVEQLVLYMKAAQLLAASLHLAKAQIKSGKLSPSTAVKQVVKNLNERYKFCITMRKKLTEKLNRFFSDKQRFIDEINSVTAEKLIYNCAVEMVQSAALDEMFQQTEDIVYRYHKAALLLEGLSRILQDPADIENVHKYKCSIERRLSALCHSTATV

SEQ ID NO: 794373 - protein, 1036 aa, Homo sapiens; identical to SEQ ID NO: 794372

SEQ ID NO: 794374 - protein, 157 aa, Homo sapiens
  misc_feature (151)..(151): Xaa can be any naturally occurring amino acid
DSGSRENDEPDEHSGASQKKQIPKEWARAQKVLVLDTSAGLEGPVAADTPWGAAMGGLGKRRCPWRGCGSAGEKWAAPRGGPGGPEGRPCLLGTLRDPWSGGAGLQGVKGEDIFWVLESCGRNGAGRGGAGLGGDVPAACPAPAGSATPAXGEGAAV

SEQ ID NO: 794375 - protein, 218 aa, Homo sapiens
MVTDNTHLTLYSLRPMQSPEQAQLPFPSSLTSCLPPSCPSCHPWWPGRPGSPQRFKWLHCWDPHLGGSPGHSEGTQDPASRRNHPPPWLAGKCPWLSWHQCLLIPPGQTLLLQGHLHDISNPLFLRSGSPVWPNSCWLMVIFSRTSSEPSVPVVAILASAAEAAAARLGSSSCRCCCSSIETRGPRPAEDQHWDLLQIQSHWHRDPAWHPLPQPKSEN

SEQ ID NO: 794376 - protein, 208 aa, Homo sapiens
PQSGPGAAAARWSRPGCARVRAMEPRPRRRRRSRPLVAAFLRDPGSGRVYRRGKLIGKGAFSRCYKLTDMSTSAVFALKVVPCGGAGAGWLRPQGKVEREIALHSRLRPRNIVAFHGHFADRDHVYMVLEYCSRQSLAHVLRARQILTEPEVRDYLRGLVSGLRYLHQRCILHRDLKLSNFFLNKNMEVKIGDLGLAAKVGPGGRCHR

SEQ ID NO: 794377 - protein, 82 aa, Homo sapiens
GDAGVCPAEAVARALLPDFEEAPSTYSLPKGWAAQPQTGSLWISEVRDGVYPGFGPVETPHPHPQSLGTSAVPTDAKRKSMG

SEQ ID NO: 794378 - protein, 76 aa, Homo sapiens
TCSTENSMCAAATAGSAVEFGFQWGPVSSPWDFPALQVSQPQAGKWKPGLNLELLHPQRVLGPVDYYSLNKQMNFS

SEQ ID NO: 794379 - protein, 1106 aa, Homo sapiens
AFLPLLIFPSPLFSLSGFGSPLFFPSPPSFPSPFPLPRPSPPCFPALGPGEAPAEKSPPPEARRRRPSGPSRSRAAVGPGGGRRRGRPPRQGPCERLDLFLICDAIPALDSWRLSIYSGVHRGHCILLKNMSNSNTTQETLEIMKESEKKTGGRICKQKQVYIKTPSKEEIEKECEDTSLRQETQRRTSNHGHARKRAKSNSKLKLVRSLAVCEESSTPFADGPLETQDIIQLHISCPSDKEEEKSTKDVSEKEDKDKNKEKIPRKMLSRDSSQEYTDSTGIDLHEFLVNTLKKNPRDRMMLLKLEQEILEFINDNNNQFKKFPQMTSYHRMLLHRVAAYFGMDHNVDQTGKAVIINKTSNTRIPEQRFSEHIKDEKNTEFQQRFILKRDDASMDRDDNQTGQNGYLNDIRLSKEAFSSSSHKRRQIFRGNREGLSRTSSSRQSSTDSELKSLEPRPWSSTDSDGSVRSMRPPVTKASSFSGISILTRGDSIGSSKGGSAGRISRPGMALGAPEVCNQVTSSQSVRGLLPCTAQQQQQQQQQQLPALPPTPQQQPPLNNHMISQADDLSNPFGQMSLSRQGSTEAADPSAALFQTPLISQHPQQTSFIMASTGQPLPTSNYSTSSHAPPTQQVLPPQGYMQPPQQIQVSYYPPGQYPNSNQQYRPLSHPVAYSPQRGQQLPQPSQQPGLQPMMPNQQQAAYQGMIGVQQPQNQGLLSSQRSSMGGQMQGLVVQYTPLPSYQVPVGSDSQNVVQPPFQQPMLVPVSQSVQGGLPAAGVPVYYSMIPPAQQNGTSPSVGFLQPPGSEQYQMPQSPSPCSPPQMPQQYSGVSPSGPGVVVMQLNVPNGPQPPQNPSMVQWSHCKYYSMDQRGQKPGDLYSPDSSPQANTQMSSSPVTSPTQSPAPSPVTSLSSVCTGLSPLPVLTQFPRPGGPAQGDGRYSLLGQPLQYNLSICPPLLHGQSTYTVHQGQSGLKHGNRGKRQALKSASTDLGTADVVLGRVLEVTDLPEGITRTEADKLFTQLAMSGAKIQWLKDAQGLPGGGGGDNSGTAENGRHSDLAALYTIVAVFPSPLAAQNASLRLNNSVSRFKLRMAKKNYDLRILERASSQ

SEQ ID NO: 794380 - protein, 159 aa, Homo sapiens [sequence omitted]

SEQ ID NO: 794381 - protein, 930 aa, Homo sapiens
GWCPLIFTTPSQSQMLHQLLQQHGAELPTHPSKKRKHSESPPSTLNAQMLNGMIKQEPGTVTALPLHPTRAPSPPWPPQGPLSPGPGSLPLSIARVQTPPWHPPGAPSPGLLQDSDSLSGSYLDPNYQSIKWQPHQQNKWATLYDANYKELPMLTYRVDADKGFNFSVGDDAFVCQKKNHFQVTVYIGMLGEPKYVKTPEGLKPLDCFYLKLHGVKLEALNQSINIEQSQSDRSKRPFNPVTVNLPPEQVTKVTVGRLHFSETTANNMRKKGKPNPDQRYFMLVVALQAHAQNQNYTLAAQISERIIVRASNPGQFESDSDVLWQRAQVPDTVFHHGRVGINTDRPDEALVVHGNVKVMGSLMHPSDLRAKEHVQEVDTTEQLKRISRMRLVHYRYKPEFAASAGIEATAPETGVIAQEVKEILPEAVKDTGDMVFANGKTIENFLVVNKERIFMENVGAVKELCKLTDNLETRIDELERWSHKLAKLRRLDSLKSTGSSGAFSHAGSQFSRAGSVPHKKRPPKVASKSSSVVPDQACISQRFLQGTIIALVVVMAFSVVSMSTLYVLSLRTEEDLVDTDGSFAVSTSCLLALLRPQPPGGSEALCPWSSQSFGTTQLRQSPLTTGLPGIQPSLLLVTTSLTSSAPGSAVRTLDMCSSHPCPVICCSSPTTNPTTGPSLGPSFNPGHVLSPSPSPSTNRSGPSQMALLPVTNIRAKSWGLSVNGIGHSKHHKSLEPLASPAVPFPGGQGKAKNSPSLGFHGRARRGALQSSVGPAEPTWAQGQSASLLAEPVPSLTSIQVLENSMSITSQYCAPGDACRPGNFTYHIPVSSGTPLHLSLTLQMNSSSPVSVVLCSLRSKEEPCEEGSLPQSLHTHQDTQGTSHRWPITILSFREFTYHFRVALLGQANCSSEALAQPATDYHFHFYRLCD

SEQ ID NO: 794382 - protein, 596 aa, Homo sapiens
LKFSKGDHLYVLDTSGGEWWYAHNTTEMGYIPSSYVQPLNYRNSTLSDSGMIDNLPDSPDEVAKELELLGGWTDDKKVPGRMYSNNPFWNGVQTNPFLNGNVPVMPSLDELNPKSTVDLLLFDAGTSSFTESSSATTNSTGNIFDELPVTNGLHAEPPVRRDNPFFRSKRSYSLSELSVLQAKSDAPTSSSFFTGLKSPAPEQFQSREDFRTAWLNHRKLARSCHDLDLLGQSPGWGQTQAVETNIVCKLDSSGGAVQLPDTSISIHVPEGHVAPGETQQISMKALLDPPLELNSDRSCSISPVLEVKLSNLEVKTSIILEMKVSAEIKNDLFSKSTVGLQCLRSDSKEGPYVSVPLNCSCGDTVQAQLHNLEPCMYVAVVAHGPSILYPSTVWDFINKKVTVGLYGPKHIHPSFKTVVTIFGHDCAPKTLLVSEVTRQAPNPITKRWKHLTGTLILVNSLDVLRAAAFSPADQDDFVIGMGPLPSCCSGVQALFCPACPAVTAELKREEGAAAQTDLGPPARLHPSCAALLHRGRGLKGLPTAARCQSHSFLFVKYKFKFKITFLTNGGKGSMRKVVSNFFMDHKGLKENRGTGC

SEQ ID NO: 794383 - protein, 1967 aa, Homo sapiens
MQLCIFCCCCILFYFDLYDFGRGYDFTIQENGLQIDQPPEIGNISIVRIIIMKNDNAEGIIEFDPKYTAFEVEEDVGLIMIPVVRLHGTYGYVTADFISQSSSASPGGVDYILHGSTVTFQHGQNLSFINISIIDDNESEFEEPIEILLTGATGGAVLGRHLVSRIIIAKSDSPFGVIRFLNQSKISIANPNSTMILSLVLERTGGLLGEIQVNWETVGPNSQEALLPQNRDIADPVSGLFYFGEGEGGVRTIILTIYPHEEIEVEETFIIKLHLVKGEAKLDSRAKDVTLTIQEFGDPNGVVQFAPETLSKKTYSEPLALEGPLLITFFVRRVKGTFGEIMVYWELSSEFDITEDFLSTSGFFTIADGESEASFDVHLLPDEVPEIEEDYVIQLVSVEGGAELDLEKSITWFSVYANDDPHGVFALYSDRQSILIGQNLIRSIQINITRLAGTFGDVAVGLRISSDHKEQPIVTENAERQLVVKDGATYKVDVVPIKNQVFLSLGSNFTLQLVTVMLVGGRFYGMPTILQEAKSAVLPVSEKAANSQVGFESTAFQLMNITAGTSHVMISRRGTYGALSVAWTTGYAPGLEIPEFIVVGNMTPTLGSLSFSHGEQRKGVFLWTFPSPGWPEAFVLHLSGVQSSAPGGAQLRSGFIVAEIEPMGVFQFSTSSRNIIVSEDTQMIRLHVQRLFGFHSDLIKVSYQTTAGSAKPLEDFEPVQNGELFFQKFQTEVDFEITIINDQLSEIEEFFYINLTSVEIRGLQKFDVNWSPRLNLDFSVAVITILDNDDLAGMDISFPETTVAVAVDTTLIPVETESTTYLSTSKTTTILQPTNVVAIVTEATGVSAIPEKLVTLHGTPAVSEKPDVATVTANVSIHGTFSLGPSIVYIEEEMKNGTFNTAEVLIRRTGGFTGNVSITVKTFGERCAQMEPNALPFRGIYGISNLTWAVEEEDFEEQTLTLIFLDGERERKVSVQILDDDEPEGQEFFYVFLTNPQGGAQIVEGKDDTGFAAFAMVIITGSDLHNGIIGFSEESQSGLELREGAVMRRLHLIVTRQPNRAFEDVKVFWRVTLNKTVVVLQKDGVNLMEELQSVSGTTTCTMGQTKCFISIELKPEKVPQVEVYFFVELYEATAGAAINNSARFAQIKILESDESQSLVYFSVGSRLAVAHKKATLISLQVARDSGTGLMMSVNFSTQELRSAETIGRTIISPAISGKDFVITEGTLVFEPGQRSTVLDVILTPETGSLNSFPKRFQIVLFDPKGGARIDKVYGTANITLVSDADSQAIWGLADQLHQPVNDDILNRVLHTISMKVATENTDEQLSAMMHLIEKITTEGKIQAFSVASRTLFYEILCSLINPKRKDTRGFSHFAEVTENFAFSLLTNVTCGSPGEKSKTILDSCPYLSILALHWYPQQINGHKFEGKEGDYIRIPERLLDVQDAEIMAGKSTCKLVQFTEYSSQQWFISGNNLPTLKNKVLSLSVKGQSSQLLTNDNEVLYRIYAAEPRIIPQTSLCLLWNQAAASWLSDSQFCKVIEETADYVECACSHMSVYAVYARTDNLSSYNEAFFTSGFICISGLCLAVLSHIFCARYSMFAAKLLTHMMAASLGTQILFLASAYASPQLAEESCSAMAAVTHYLYLCQFSWMLIQSVNFWYVLVMNDEHTERRYLLFFLLSWGLPAFVVILLIVILKGIYHQSMSQIYGLIHGDLCFIPNVYAALFTAALVPLTCLVVVFVVFIHAYQVKPQWKAYDDVFRGRTNAAEIPLILYLFALISVTWLWGGLHMAYRHFWMLVLFVIFNSLQGLYVFMVYFILHNQMCCPMKASYTVEMNGHPGPSTAFFTPGSGMPPAGGEISKSTQNLIGAMEEVPPDWERASFQQGSQASPDLKPSPQNGATFPSSGGYGQGSLIADEESQEFDDLIFALKTGAGLSVSDNESGQGSQEGGTLTDSQIVELRRIPIADTHL

SEQ ID NO: 794384 - protein, 1866 aa, Homo sapiens
MQLCIFCCCCILFYFDLYDFGRGYDFTIQENGLQIDQPPEIGNISIVRIIIMKNDNAEGIIEFDPKYTAFEVEEDVGLIMIPVVRLHGTYGYVTADFISQSSSASPGGVDYILHGSTVTFQHGQNLSFINISIIDDNESEFEEPIEILLTGATGGAVLGRHLVSRIIIAKSDSPFGVIRFLNQSKISIANPNSTMILSLVLERTGGLLGEIQVNWETVGPNSQEALLPQNRDIADPVSGLFYFGEGEGGVRTIILTIYPHEEIEVEETFIIKLHLVKGEAKLDSRAKDVTLTIQEFGDPNGVVQFAPETLSKKTYSEPLALEGPLLITFFVRRVKGTFGEIMVYWELSSEFDITEDFLSTSGFFTIADGESEASFDVHLLPDEVPEIEEDYVIQLVSVEGGAELDLEKSITWFSVYANDDPHGVFALYSDRQSILIGQNLIRSIQINITRLAGTFGDVAVGLRISSDHKEQPIVTENAERQLVVKDGATYKVDVVPIKNQVFLSLGSNFTLQLVTVMLVGGRFYGMPTILQEAKSAVLPVSEKAANSQVGFESTAFQLMNITAGTSHVMISRRGTYGALSVAWTTGYAPGLEIPEFIVVGNMTPTLGSLSFSHGEQRKGVFLWTFPSPGWPEAFVLHLSGVQSSAPGGAQLRSGFIVAEIEPMGVFQFSTSSRNIIVSEDTQMIRLHVQRLFGFHSDLIKVSYQTTAGSAKPLEDFEPVQNGELFFQKFQTEVDFEITIINDQLSEIEEFFYINLTSVEIRGLQKFDVNWSPRLNLDFSVAVITILDNDDLAGMDISFPETTVAVAVDTTLIPVETESTTYLSTSKTTTILQPTNVVAIVTEATGVSAIPEKLVTLHGTPAVSEKPDVATVTANVSIHGTFSLGPSIVYIEEEMKNGTFNTAEVLIRRTGGFTGNVSITVKTFGERCAQMEPNALPFRGIYGISNLTWAVEEEDFEEQTLTLIFLDGERERKVSVQILDDDEPEGQEFFYVFLTNPQGGAQIVEGKDDTGFAAFAMVIITGSDLHNGIIGFSEESQSGLELREGAVMRRLHLIVTRQPNRAFEDVKVFWRVTLNKTVVVLQKDGVNLMEELQSVSGTTTCTMGQTKCFISIELKPEKVPQVEVYFFVELYEATAGAAINNSARFAQIKILESDESQSLVYFSVGSRLAVAHKKATLISLQVARDSGTGLMMSVNFSTQELRSAETIGRTIISPAISGKDFVITEGTLVFEPGQRSTVLDVILTPETGSLNSFPKRFQIVLFDPKGGARIDKVYGTANITLVSDADSQAIWGLADQLHQPVNDDILNRVLHTISMKVATENTDEQLSAMMHLIEKITTEGKIQAFSVASRTLFYEILCSLINPKRKDTRGFSHFAEVTENFAFSLLTNVTCGSPGEKSKTILDSCPYLSILALHWYPQQINGHKFEGKEGDYIRIPERLLDVQDAEIMAGKSTCKLVQFTEYSSQQWFISGNNLPTLKNKVLSLSVKGQSSQLLTNDNEVLYRIYAAEPRIIPQTSLCLLWNQAAASWLSDSQFCKVIEETADYVECACSHMSVYAVYARTDNLSSYNEAFFTSGFICISGLCLAVLSHIFCARYSMFAAKLLTHMMAASLGTQILFLASAYASPQLAEESCSAMAAVTHYLYLCQFSWMLIQSVNFWYVLVMNDEHTERRYLLFFLLSWGLPAFVVILLIVILKGIYHQSMSQIYGLIHGDLCFIPNVYAALFTAALVPLTCLVVVFVVFIHAYQVKPQWKAYDDVFRGRTNAAEIPLILYLFALISVTWLWGGLHMAYRHFWMLVLFVIFNSLQLLVPSVLLFTSMRSTFFSFHTGTLTSREKKSTFVLTCLLSPDSKGLGVLCFLNTEWAFQVH

SEQ ID NO: 794385 - protein, 103 aa, Homo sapiens
AYNPWMDIRQREDVQALNISVPYGPIPVDFQRKIRQSYFASVSYLDTQVGRLLSALDDLQLANSTIIAFTSGSWGDICCFPNATFLQIKSRRQHAVHKELMSW

SEQ ID NO: 794386 - protein, 137 aa, Homo sapiens
  misc_feature (11)..(11): Xaa can be any naturally occurring amino acid
  misc_feature (14)..(14): Xaa can be any naturally occurring amino acid
  misc_feature (17)..(20): Xaa can be any naturally occurring amino acid
MHLKSKEKGCXAPXFGXXXXLGKIWGGPLGQDLHSWIFQHPYSKWEILKWKTVPSIAVKRLQVAIIQIKIEEAKQKKEGVNKQLIRRRYEDLEGVEESRDQQCSQSFWLELLEKKPQMPIVKKADPNMKKFHYALVD

SEQ ID NO: 794387 - protein, 35 aa, Homo sapiens
EQSSVLEEICRVRIQPANYLIPACAYSSMHHFPLM

SEQ ID NO: 794388 - protein, 129 aa, Homo sapiens
MCHPGANDTSQLNCNFALSSFALLSRPLDLSGKEETVCGKRKFPPCSQREKPVRILRVSQLLRAGMAYLKTSSDANKTKPLSSGCTVFSICTVSHRAHSNGLPCEPLSSVCVFFFLRDDSSQVKGHFSS

SEQ ID NO: 794389 - protein, 42 aa, Homo sapiens
MSGGGHSKCKGPDMGPGKGAGAGPRWRKRQLQECQMGPSGLC

SEQ ID NO: 794390 - protein, 606 aa, Homo sapiens
MACYIYQLPSWVLDDLCRNMDALSEWDWMEFASYVITDLTQLRKIKSMERVQGVSITRELLWWWGMRQATVQQLVDLLCRLELYRAAQIILNWKPAPEIRCPIPAFPDSVKPEKPLAASVRKAEDEQEEGQPVRMATFPGPGSSPARAHQPAFLQPPEEDAPHSLRSDLPTSSDSKDFSTSIPKQEKLLSLAGDSLFWSEADVVQATDDFNQNRKISQGTFADVYRGHRHGKPFVFKKLRETACSSPGSIERFFQAELQICLRCCHPNVLPVLGFCAARQFHSFIYPYMANGSLQDRLQGQGGSDPLPWPQRVSICSGLLCAVEYLHGLEIIHSNVKSSNVLLDQNLTPKLAHPMAHLCPVNKRSKYTMMKTHLLRTSAAYLPEDFIRVGQLTKRVDIFSCGIVLAEVLTGIPAMDNNRSPVYLKDLLLSEIPSSTASLCSRKTGVENVMAKEICQKYLEKGAGRLPEDCAEALATAACLCLRRRNTSLQEVCGSVAAVEERLRGRETLLPWSGLSEGTGSSSNTPEETDDVDNSSLDASSSMSVAPWAGAATPLLPTENGEGRLRVIVGREADSSSEACVGLEPPQDVTRTLRGKLRSMSAQKGN

SEQ ID NO: 794391 - protein, 333 aa, Homo sapiens
MACYIYQLPSWVLDDLCRNMDALSEWDWMEFASYVITDLTQLRKIKSMERVQGVSITRELLWWWGMRQATVQQLVDLLCRLELYRAAQIILNWKPAPEIRCPIPAFPDSVKPEKPLAASVRKAEDEQEEGQPVRMATFPGPGSSPARAHQPAFLQPPEEDAPHSLRSDLPTSSDSKDFSTSIPKQEKLLSLAGDSLFWSEADVVQATDDFNQNRKISQGTFADVYRGHRHGKPFVFKKLRETACSSPGSIERFFQAELQICLRCCHPNVLPVLGFCAARQFHSFIYPYMANGSQSAGITVGSHCAWPGRLSTCVSVQFLTHLSGPQVLQMPDT

SEQ ID NO: 794392 - protein, 911 aa, Homo sapiens
LGTEDSRDTLEAATSLYDRVDEEVHRLVLTSNNRLQQLEHLRELASLLEGNDQQSCQKGLQLAKENPQRTEEMVQDFRRGLSAVVSQAECREGELARALLVPQVSSWMGPLDPEACPSSPVAECLRSCHQEATSVAAEAFPGAGVAVLKPHALGKPWASQQDLWLQYPQTRLRLEEALSEAAPDPSLPPLAQSPPKHERAQEAMRRHQKPPSFPSTDSGGGAWEPAQPLSGLPGRALLCGQDGETLRPGLCALWDPLSLLRGLPGAGATTAHLEDSSACSSEPTQTLASRPRKHPQKKMIKKTQSFEIPQPDSGPRDSCQPDHTSVFSKGLEVTSTVATEKKLPLWQHARSPPVTQSRSLSSPSGLHPAEEDGRQQPTEAIMAEMIATEREYIRCLGYVIDNYFPEMERMDLPQGLRGKHHVIFGNLEKLHDFHQQHFLRELERCQHCPLAVGRSFLRHEEQFGMYVIYSKNKPQSDALLSSHGNAFFKDKQRELGDKMDLASYLLRPVQRVAKYALLLQDLLKEASCGLAQGQELGELRAAEVVVCFQLRHGNDLLAMDAIRGCDVNLKEQGQLRCRDEFIVCCGRKKYLRHVFLFEDLILFSKTQKVEGSHDVYLYKQSFKTAEIGMTENVGDSGLRFEIWFRRRRKSQDTYILQASSAEVKSAWTDVIGRILWRQALKSRGRRGTPPRQRDLGSHRHEGELSGCPQASYALMAKRGGPCLCPSVGLVLEHLITSPAPLSALHLELPITQLRIQEMASMGIGNQPFMDVKPRDRTPDCAVISDGAPKCAVMSDRVPDSIVKGTESQMRGSTAVSSSDHAAPFKRPHSTISDSSTSSSSSQSSSILGSLGLLVSSSPAHPGLWSPAHSPWSSDIRACVEEDEPEPELETGTQAAVCEGAPAVLLSRTRQA

SEQ ID NO: 794393 - protein, 101 aa, Homo sapiens
FSLKVNFVQYKYRCIRPFLHCYRVIIIKYHRMGALNNKSSFSHSSGSYNSKIKMSAHLVSPEACLGLQLLAFLPCPLMAFFLCTCIPGVSSSSNKDISHIA

SEQ ID NO: 794394 - protein, 66 aa, Homo sapiens
TTATATNTTSVAAAAITIITVTTILATISITTTAVTTTITATATPATAIPTIPTTIAPTATTVFAI

SEQ ID NO: 794395 - protein, 122 aa, Homo sapiens
MEPGVGKKPENKALSFLFYMPASLPLIGAAPITDPQAFFSLSLGKCPVDFTNRCLFLGPRNMREVSQFFSRMAEPSEPSTPTPPSCRGPERDRDLPNTTAMKWTMKIQNHICGLLIPRGDSR

SEQ ID NO: 794396 - protein, 152 aa, Homo sapiens [sequence omitted]

SEQ ID NO: 794397 - protein, 105 aa, Homo sapiens
TRGYSPFSKSFLFLFLRQVLICHTVLECSGMITTNCSLKLLGSSDPLTSASQVAGTTATSHHPWLIVFIFCSDGSLDMLSRLVANSWAQVVILPLQPPKVLGLQA

SEQ ID NO: 794398 - protein, 1576 aa, Homo sapiens
LCNGVNDCGDNSDESPQQNCRPRTGEENCNVNNGGCAQKCQMVRGAVQCTCHTGYRLTEDGHTCQDVNECAEEGYCSQGCTNSEGAFQCWCETGYELRPDRRSCKALGPEPVLLFANRIDIRQVLPHRSEYTLLLNNLENAIALDFHHRRELVFWSDVTLDRILRANLNGSNVEEVVSTGLESPGGLAVDWVHDKLYWTDSGTSRIEVANLDGAHRKVLLWQNLEKPRAIALHPMEGTIYWTDWGNTPRIEASSMDGSGRRIIADTHLFWPNGLTIDYAGRRMYWVDAKHHVIERANLDGSHRKAVISQGLPHPFAITVFEDSLYWTDWHTKSINSANKFTGKNQEIIRNKLHFPMDIHTLHPQRQPAGKNRCGDNNGGCTHLCLPSGQNYTCACPTGFRKISSHACAQSLDKFLLFARRMDIRRISFDTEDLSDDVIPLADVRSAVALDWDSRDDHVYWTDVSTDTISRAKWDGTGQEVVVDTSLESPAGLAIDWVTNKLYWTDAGTDRIEVANTDGSMRTVLIWENLDRPRDIVVEPMGGYMYWTDWGASPKIERAGMDASGRQVIISSNLTWPNGLAIDYGSQRLYWADAGMKTIEFAGLDGSKRKVLIGSQLPHPFGLTLYGERIYWTDWQTKSIQSADRLTGLDRETLQENLENLMDIHVFHRRRPPVSTPCAMENGGCSHLCLRSPNPSGFSCTCPTGINLLSDGKTCSPGMNSFLIFARRIDIRMVSLDIPYFADVVVPINITMKNTIAVGVDPQEGKVYWSDSTLHRISRANLDGSQHEDIITTGLQTTDGLAVDAIGRKVYWTDTGTNRIEVGNLDGSMRKVLVWQNLDSPRAIVLYHEMGFMYWTDWGENAKLERSGMDGSDRAVLINNNLGWPNGLTVDKASSQLLWADAHTERIEAADLNGANRHTLVSPVQHPYGLTLLDSYIYWTDWQTRSIHRADKGTGSNVILVRSNLPGLMDMQAVDRAQPLGFNKCGSRNGGCSHLCLPRPSGFSCACPTGIQLKGDGKTCDPSPETYLLFSSRGSIRRISLDTSDHTDVHVPVPELNNVISLDYDSVDGKVYYTDVFLDVIRRADLNGSNMETVIGRGLKTTDGLAVDWVARNLYWTDTGRNTIEASRLDGSCRKVLINNSLDEPRAIAVFPRKGYLFWTDWGHIAKIERANLDGSERKVLINTDLGWPNGLTLDYDTRRIYWVDAHLDRIESADLNGKLRQVLVGHVSHPFALTQQDRWIYWTDWQTKSIQRVDKYSGRNKETVLANVEGLMDIIVVSPQRQTGTNACGVNNGGCTHLCFARASDFVCACPDEPDSQPCSLVPGLVPPAPRATGMSEKSPVLPNTPPTTLYSSTTRTRTSLEEVEGRCSERDARLGLCARSNDAVPAAPGEGLHISYAIGGLLSILLILVVIAALMLYRHKKSKFTDPGMGNLTYSNPSYRTSTQEVKIEAIPKPAMYNQLCYKKEGGPDHNYTKEKIKIVEGICLLSGDDAEWDDLKQLRSSRGGLLRDHVCMKTDTVSIQASSGSLDDTEMEQLLQEEQSECSSVHTAATPERRGSLPDTGWKHERKLSSESQV

SEQ ID NO: 794399 - protein, 1025 aa, Homo sapiens
  misc_feature (1)..(1): Xaa can be any naturally occurring amino acid
  misc_feature (11)..(11): Xaa can be any naturally occurring amino acid
XSLEDPLKLLXYVCQVIISSNLTWPNGLAIDYGSQRLYWADAGMKTIEFAGLDGSKRKVLIGSQLPHPFGLTLYGERIYWTDWQTKSIQSADRLTGLDRETLQENLENLMDIHVFHRRRPPVSTPCAMENGGCSHLCLRSPNPSGFSCTCPTGINLLSDGKTCSPGMNSFLIFARRIDIRMVSLDIPYFADVVVPINITMKNTIAVGVDPQEGKVYWSDSTLHRISRANLDGSQHEDIITTGLQTTDGLAVDAIGRKVYWTDTGTNRIEVGNLDGSMRKVLVWQNLDSPRAIVLYHEMGFMYWTDWGENAKLERSGMDGSDRAVLINNNLGWPNGLTVDKASSQLLWADAHTERIEAADLNGANRHTLVSPVQHPYGLTLLDSYIYWTDWQTRSIHRADKGTGSNVILVRSNLPGLMDMQAVDRAQPLGFNKCGSRNGGCSHLCLPRPSGFSCACPTGIQLKGDGKTCDPSPETYLLFSSRGSIRRISLDTSDHTDVHVPVPELNNVISLDYDSVDGKVYYTDVFLDVIRRADLNGSNMETVIGRGLKTTDGLAVDWVARNLYWTDTGRNTIEASRLDGSCRKVLINNSLDEPRAIAVFPRKGYLFWTDWGHIAKIERANLDGSERKVLINTDLGWPNGLTLDYDTRRIYWVDAHLDRIESADLNGKLRQVLVGHVSHPFALTQQDRWIYWTDWQTKSIQRVDKYSGRNKETVLANVEGLMDIIVVSPQRQTGTNACGVNNGGCTHLCFARASDFVCACPDEPDSQPCSLVPGLVPPAPRATGMSEKSPVLPNTPPTTLYSSTTRTRTSLEEVEGRCSERDARLGLCARSNDAVPAAPGEGLHISYAIGGLLSILLILVVIAALMLYRHKKSKFTDPGMGNLTYSNPSYRTSTQEVKIEAIPKPAMYNQLCYKKEGGPDHNYTKEKIKIVEGICLLSGDDAEWDDLKQLRSSRGGLLRDHVCMKTDTVSIQASSGSLDDTEMEQLLQEEQSECSSVHTAATPERRGSLPDTGWKHERKLSSESQV

SEQ ID NO: 794400 - protein, 167 aa, Homo sapiens
  misc_feature (1)..(1): Xaa can be any naturally occurring amino acid
  misc_feature (11)..(11): Xaa can be any naturally occurring amino acid
XSLEDPLKLLXYVCQVIISSNLTWPNGLAIDYGSQRLYWADAGMKTIEFAGLDGSKRKVLIGSQLPHPFGLTLYGERIYWTDWQTKSIQSADRLTGLDRETLQENLENLMDIHVFHRRRPPVSTPCAMENGGCSHLCLRSPNPSGFSCTCPTGINLLSDGKTCSPGE

SEQ ID NO: 794401 - protein, 84 aa, Homo sapiens
QKGDLLTCLVFPDVNECAEEGYCSQGCTNSEGAFQCWCETGYELRPDRRSCKALGKGCWHLAGWAEGRAWRKARYSGAQGFAER

SEQ ID NO: 794402 - protein, 160 aa, Homo sapiens
LQGITLYPPALKTAFSAELSSEEAGAQRECYFLGWGCATQKSFLGVTVGEADSVGPISASSSREQRPLPPILLYSLALFDFDGFSGRWVIGWGEDDATCPGASCQELKNHQEEEQQSEEKLQPHKKLNVPQPPVAKLWTSQEQPLDFKGYRISRLATLWS

SEQ ID NO: 794403 - protein, 183 aa, Homo sapiens
MGSAYHWEARRRQMALDRRRWLMAQQQQELQQKEQELKNHQEEEQQSEEKLQPHKKLNVPQPPVAKLWTSQEQPLDFKGYRISETGYSLVIADSGVNCHRHRCGQGHSHHNHSHHLSQHNQVLKPVVLSTPPNAISRIPKGQVTSLLQRGSTKLEGNLCINNRFQGGQKILTDSGLEPGSGRW

SEQ ID NO: 794404 - protein, 150 aa, Homo sapiens
MGSAYHWEARRRQMALDRRRWLMAQQQQELQQKEQELKNHQEEEQQSEEKLQPHKKLNVPQPPVAKLWTSQEQPQPSQQQPSVQPPSQPPPQPSTLPQAQVWPGPQPPQPQPPPQPTQPSAQARCTQHTSKCNLQDSQRPGHQPTSAGIY

SEQ ID NO: 794405 - protein, 150 aa, Homo sapiens; identical to SEQ ID NO: 794404

SEQ ID NO: 794406 - protein, 134 aa, Homo sapiens
MCRNHQWRNCGHHRSNHSHHSSSHQCSHHRSHHHSHQHCHRHRCGQGHSHHNHSHHLSQHNQVLKPVVLSTPPNAISRIPKGQVTSLLQRGSTKLEGNLCINNRFQGLMNPCQSSPIRNTGYSQLKSTNYIQQW

SEQ ID NO: 794407 - protein, 220 aa, Homo sapiens
LQGITLYPPALKTAFSAELSSEEAGAQRECYFLGWGCATQKSFLGVTVGEADSVGPISASSSREQRPLPPILLYSLALFDFDGFSGRWVIGWGEDDATCPGASCQELKNHQEEEQQSEEKLQPHKKLNVPQPPVAKLWTSQEQPQPSQQQPSVQPPSQPPPQPSTLPQAQVWPGPQPPQPQPPPQPTQPSAQARCTQHTSKCNLQDSQRPGHQPTSAGIY

SEQ ID NO: 794408 - protein, 168 aa, Homo sapiens
MGSAYHWEARRRQMALDRRRWLMAQQQQELQQKEQELKNHQEEEQQSEEKLQPHKKLNVPQPPVAKLWTSQEQPQPSQQQPSVQPPSQPPPQPSTLPQAQVWPGPQPPQPQPPPQPTQPSAQARCTQHTSKCNLQDSQRPGLMNPCQSSPIRNTGYSQLKSTNYIQQW

SEQ ID NO: 794409 - protein, 137 aa, Homo sapiens
MALDRRRWLMAQQQQELQQKEQELKNHQEEEQQSEEKLQPHKKLNVPQPPVAKLWTSQEQPQPSQQQPSVQPPSQPPPQPSTLPQAQVWPGPQPPQPQPPPQPTQPSAQARCTQHTSKCNLQDSQRPGHQPTSAGIY

SEQ ID NO: 794410 - protein, 55 aa, Homo sapiens
MLEAGHYPLLAKPDIITLIFHVPPSTKRFQIPRTYRAVSSIFVFLMPARSFPLFC

SEQ ID NO: 794411 - protein, 84 aa, Homo sapiens
LPILFRGYWQSSTSGFPGLHEFCTSLFTCLYCFSTCFSSPLLGLVVFQIILPDLNKMNFAEIDRWLTKIPAKKMQIEVSESAED

SEQ ID NO: 794412 - protein, 452 aa, Homo sapiens
MNSGILQVFQGELICPLCMNYFIDPVTIDCGHSFCRPCFYLNWQDIPFLVQCSECTKSTEQINLKTNIHLKKMASLARKVSLWLFLSSEEQMCGTHRETKKIFCEVDRSLLCLLCSSSQEHRYHRHRPIEWAAEEHREKLLQKMQSLWEKACENHRNLNVETTRTRCWKDYVNLRLEAIRAEYQKMPAFHHEEEKHNLEMLKKKGKEIFHRLHLSKAKMAHRMEILRGMYEELNEMCHKPDVELLQAFGDILHRSESVLLHMPQPLNPELSAGPITGLRDRLNQFRVHITLHHEEANNDIFLYEILRSMCIGCDHQDVPYFTATPRSFLAWGVQTFTSGKYYWEVHVGDSWNWAFGVCNMYRKEKNQNEKIDGKAGLFLLGCVKNDIQCSLFTTSPLMLQYIPKPTSRVGLFLDCEAKTVSFVDVNQSSLIYTIPNCSFSPPLRPIFCCIHF

SEQ ID NO: 794413 - protein, 119 aa, Homo sapiens [sequence omitted]

SEQ ID NO: 794414 - protein, 41 aa, Homo sapiens
MTLRMRRLKAGISMNKLTWTTDLQPPVPIWLLSAIKVITYK

SEQ ID NO: 794415 - protein, 101 aa, Homo sapiens
LISCQLFLLLRSRQVLMANTEDRGRIKKRTLNGLQQPTERLPWDGTNTNFLFRRQDSASDQQLNISKETTCWPEPCPRICHITWPPTADTVKWNDPSVKGP

SEQ ID NO: 794416 - protein, 172 aa, Homo sapiens
  misc_feature (151)..(151): Xaa can be any naturally occurring amino acid
DIRQEIEKLTANSQVKKLRWFSECLSPPGGSDNLWNLVAVIKGQDDSLLPQNYCKGIMHLKHLIKFRTSEAQELTTVKMSKFGGGIGVPAKEERLKEAAEIHLRLGQIQRYCELMVELGEWDKALSIAPGVSVKYWKKLMQRRADHLSRKXRMMSSILDIHWGCEKAYSFFM

SEQ ID NO: 794417 - protein, 299 aa, Homo sapiens
AKRRESSLGSSHQLLAREKEKASKAWARRVPTGVSGFNLSTSHSEQGTMLGARLRLWVCALCSVCSMSVLRAYPNASPLLGSSWGGLIHLYTATARNSYHLQIHKNGHVDGAPHQTIYSALMIRSEDAGFVVITGVMSRRYLCMDFRGNIFGSHYFDPENCRFQHQTLENGYDVYHSPQYHFLVSLGRAKRAFLPGMNPPPYSQFLSRRNEIPLIHFNTPIPRRHTRSAEDDSERDPLNVLKPRARMTPAPASCSQELPSAEDNSPMASDPLGVVRGGRVNTHAGGTGPEGCRPFAKFI

SEQ ID NO: 794418 - protein, 260 aa, Homo sapiens
QVRMGTVRPPRPSLLLVSTRESCLFLLFCLHLGAACPQPCRCPDHAGAVAVFCSLRGLQEVPEDIPANTVLLKLDANKISHLPDGAFQHLHRLRELDLSHNAIEAIGSATFAGLAGGLRLLDLSYNRIQRIPKDALGKLSAKIRLSHNPLHCECALQEALWELKLDPDSVDEIACHTSVQEEFVGKPLVQALDAGASLCSVPHRTTDVAMLVTMFGWFAMVIAYVVYYVRHNQEDARRHLEYLKSLPSAPASKDPIGPGP

SEQ ID NO: 794419 - protein, 749 aa, Homo sapiens
MIDWVSWPLGKNIDKWIIALLKGLAAVKKFSILIEVSLTKIEKVFSKLLYPIVRGAALSVLKYMLLTFQHSHEAFHLLLPHIPPMVASLVKEDSNSGTSCLEQLAELVHCMVFRFPGFPDLYEPVMEAIKDLHVPNEDRIKQLLGQDAWTSQKSELAGFYPRLMAKSDTGKIGLINLGNTCYVNSILQALFMASDFRHCVLRLTENNSQPLMTKLQWLFGFLEHSQRPAISPENFLSASWTPWFSPGTQQDCSEYLKYLLDRLHEEEKTGTRICQKLKQSSSPSPPEEPPAPSSTSVEKMFGGKIVTRICCLCCLNVSSREEAFTDLSLAFPPPERCRRRRLGSVMRPTEDITARELPPPTSAQGPGRVGPRRQRKHCITEDTPPTSLYIEGLDSKEAGGQSSQEERIEREEEGKEERTEKEEVGEEEESTRGEGEREKEEEVEEEEEKVEKETEKEAEQEKEEDSLGAGTHPDAAIPSGERTCGSEGSRSVLDLVNYFLSPEKLTAENRYYCESCASLQDAEKVVELSQGPCYLILTLLRFSFDLRTMRRRKILDDVSIPLLLRLPLAGGRGQAYDLCSVVVHSGVSSESGHYYCYAREGAARPAASLGTADRPEPENQWYLFNDTRVSFSSFESVSNVTSFFPKDTAYVLFYRQRPREGPEAELGSSRVRTEPTLHKDLMEAISKDNILYLQEQEKEARSRAAYISALPTSPHWGRGFDEDKDEDEGSPGGCNPAGGNGGDFHRLVF

SEQ ID NO: 794420 - protein, 104 aa, Homo sapiens
STHLIFLFSSHIFLQVFSRSWLQGLPRTEPTVQETLPHLQCEDGDREGAEQTEMKQVQTAYENLGIQADICPQKQTTSTVSDSHLECIHVFINVHSSTYVKYQC

SEQ ID NO: 794421 - protein, 105 aa, Homo sapiens
MGRPYSQSFQMFFPLLNCSWLRNPAHLEESENQFFNKHIAQTYCEPRVESSIGGRERGSCCVPRLECSGAVSIMPDGSEVQVKDNICNQLTGVDHQNSFPGGKAP

SEQ ID NO: 794422 - protein, 108 aa, Homo sapiens
MGRPYSQSFQMFFPLLNCSWLRNPAHLEESENQFFNKHIAQTYCEPRVESSIGGRERGSCCVPRLECSGAVSIMPDGSEVQVKDNICNQLTGVDHQNSFPGTLRHRRK

SEQ ID NO: 794423 - protein, 115 aa, Homo sapiens
IVSSTHGIEENQISMCKRGKLDFYLTSHTKPNSKWIKDLNIKSEAVKLLEENIGEKLFDIGLVNDFMDMTPKTQATKTKISKVTSNHKASHSKGNNQQSEKKTYEMGESICKRCM

SEQ ID NO: 794424 - protein, 88 aa, Homo sapiens
GDEKVALVCSGCYNKIPAYDYDNRHLFLTVLEARKSEIKMLADSVPGEALFLACKWLPSHCVLTWQTESSLVSLFMRARSCWIRDPPL

SEQ ID NO: 794425 - protein, 302 aa, Homo sapiens
MEFGLLSEAEARSPALSLSDAGTPHPQLPEHGCKGQEHSDSEKASASLPGGSPEDGSLKKKQRRQRTHFTSQQLQELEATFQRNRYPDMSTREEIAVWTNLTEARVRVWFKNRRAKWRKRERSQQAELCKGSFAAPLGGLVPPYEEVYPGYSYGNWPPKALAPPLAAKTFPFAFNSVNVGPLASQPVFSPPSSIAASMVPSAAAAPGTVPGPGALQGLGGGPPGLAPAAVSSGAVSCPYASAAAAAAAAASSPYVYRDPCNSSLASLRLKAKQHASFSYPAVHGPPPAANLSPCQYAVERPV

SEQ ID NO: 794426 - protein, 302 aa, Homo sapiens; identical to SEQ ID NO: 794425

SEQ ID NO: 794427 - protein, 146 aa, Homo sapiens
MHRELAETELQPAWSPEGLAQGMAAVDHSRKCPSPKTHYTSLVGFSLFFGYHNWTKQRYFSCGTGQSDLSNPLSSGLSQSLPGHKNLQHGLGCSVESLASSHCHSLFAGRPCLSESFCRLPPSCTCPQPFPNFSVACAHSQLPPTA

SEQ ID NO: 794428 - protein, 100 aa, Homo sapiens
GESPLARAPGGPGWLTDSLISLQDRRPETAGGHFLRYSQRAYDSNWVPQPWTIPEKMWPHVDQAGTGKGTGLRVWGDSFGGAEAAVVCIPRSWGSDCKRE

SEQ ID NO: 794429 - protein, 144 aa, Homo sapiens
APPGPTPEAVRVTSSSPPTKMLAFQPPVRLVHPINSANAYHMLSVGARPHPQPHRLPGPALGDPPTGRPCPKTRPLHGGKPAMCPSLPRPPPAPAKSDLGRFYNAISTPLNRRRVCTQWCLWLLEIKNPIARVCNYGNLARHPQ

SEQ ID NO: 794430 - protein, 110 aa, Homo sapiens
VIVCFRLSGSDFPDEEWLWDYEKHGHRHSMIRRVKRFLSAHEHPSSPRRRSYRRQTSDSSMFLPRDDLSPARDLLDVPSRNPPRASPTWKKSCFPEGSPTLHFSMGELST

SEQ ID NO: 794431 - protein, 146 aa, Homo sapiens
MFDTVGLCSTWESFTPVAKAGVQWHDLGSLQPPPPRFKHVPLPPTWLGIQVEYHPYLNQSKLLEYCKSKDIVMTAYSALGSDSDKDWVKKGNPVLQEDPILNAIAEKPRRTPAQVALCYQLQRGVVVLVKSFSEKRIKENFQVFDF

SEQ ID NO: 794432 - protein, 130 aa, Homo sapiens
MSFNRLLSVKLNDGKFMPILGFGTSVARKVAMSNVEEAVQVAIDVGYRHIDSAYTHLNEEGIGQAIRKKIANGTVKRKDIFYTTKVWGTFSRPELVQRGLEMSLKKLQLSYMDLYLFHFPVPLQPGRSFC

SEQ ID NO: 794433 - protein, 108 aa, Homo sapiens
AQEIRHETSLQRVEYHPYLNQSKLLEYCKSKDIVMTAYSALGSDSDKDWVKKGNPVLQEDPILNAIAEKPRRTPAQVALCYQLQRGVVVLVKSFSEKRIKENFQVFDF

SEQ ID NO: 794434 - protein, 108 aa, Homo sapiens [sequence omitted]

SEQ ID NO: 794435 - protein, 78 aa, Homo sapiens
SLSLSLSLSLSLSLSLSLSVKKGNPVLQEDPILNAIAEKPRRTPAQVALCYQLQRGVVVLVKSFSEKRIKENFQVFDF

SEQ ID NO: 794436 - protein, 105 aa, Homo sapiens
AQEIRHETSLQRVEYHPYLNQSKLLEYCKSKDIVMTAYSALGSDSDKDWVKKGNPVLQEDPILNAIAEKPRRTPAQVALCYQLQRGVVVLVKSFSEKSRFQVFDF

SEQ ID NO: 794437 - protein, 259 aa, Homo sapiens
MLMAGQRGAWTMGDVVEKSLEGPLAPSTDEPSQKTGDLVEILNGEKVKFDDAGLSLILQNGLETLRMENALTDVILCVDIQEFSCHRVVLAAASNYFRAMFCNDLKEKYEKRIIIKGVDAETMHTLLDYTYTSKALITKQNVQRVLEAANLFQFLRMVDACASFLTEALNPENCVGILRLADTHSLDSLKKQVQSYIIQNFVQILNSEEFLDLPVDTLHHILKSDDLYVTEEAQVFETVMSWVRHKPSERICLLPYVLE

SEQ ID NO: 794438 - protein, 185 aa, Homo sapiens
PGEPGASPRLSPGPSTPPGAPTLPLASPGAPQPPPVTPERSFSASGAQIVSRWPPLPGTLLTEASALSMMDPSPSKTPITLLGPRVLSPTTSRLSTALAATTPPWPPAAPSGGFSGGRVHHVRRSLCPGDSGERTSASGPGCVQGSSKDEPGGDAWAPSCRGPGEDGRPPRLDVTLFPRSVWNVL

SEQ ID NO: 794439 - protein, 124 aa, Homo sapiens
LRESKPTCWESVLWLQPHGRHLCNSSIATWSYATHGSFLWTPLYRNHCSSFDYAHPLPHPMRRGLKYQLLLPPRAVLPTLPCPASLHDPWPGLCLLNDLSLLRDCVSAVCSSLPPPTPLLSGES

SEQ ID NO: 794440 - protein, 632 aa, Homo sapiens
MTPALTALLCLGLSLGPRTRVQAGPFPKPTLWAEPGSVISWGSPVTIWCQGSLEAQEYQLDKEGSPEPWDRNNPLEPKNKARFSIPSMTQHHAGRYRCHYYSSAGWSEPSDPLELVMTGAYSKPTLSALPSPVVASGGNMTLRCGSQKRYHHFVLMKEGEHQLPRTLDSQQLHSGGFQALFPVGPVNPSHRWRFTCYYYYMNTPQVWSHPSDPLEILPSGVSRKPSLLTLQGPVLAPGQSLTLQCGSDVGYDRFVLYKEGERDFLQRPGQQPQAGLSQANFTLGPVSPSNGGQYRCYGAHNLSSEWSAPSDPLNILMAGQIYDTVSLSAQPGPTVASGENVTLLCQSWWQFDTFLLTKEGAAHPPLRLRSMYGAHKYQAEFPMSPVTSAHAGTYRCYGSYSSNPHLLSHPSEPLELVVSGHSGGSSLPPTGPPSTPGLGRYLEVLIGVSVAFVLLLFLLLFLLLRRQRHSKHRTSDQRKTDFQRPAGAAETEPKDRGLLRRSSPAADVQEENLYAAVKDTQSEDRVELDSQQSPHDEDPQAVTYAPVKHSSPRREMASPPSSLSGEFLDTKDRQVEEDRQMDTEAAASEASQDVTYAQLHSLTLRRKATEPPPSQEGEPPAEPSIYATLAIH

SEQ ID NO: 794441 - protein, 80 aa, Homo sapiens
LKCLRGCATRLPKHDWLLCTQIKNGILLLALGMGKYPQLFLVSFPQSVFKPLPMLAPGVGRKKALSIGLGCLDPQWKDES

SEQ ID NO: 794442 - protein, 77 aa, Homo sapiens
DCQGHGVWGSPLSSSVYSAWMTIVWTAEGNPGDLCLYFLEMITVQAKHGAHVVIKYGLGLEMSTEFHRKETLVGSLG

SEQ ID NO: 794443 - protein, 165 aa, Homo sapiens
SGSLAAAGAAGLAFTALCPLLAEAQPLWPCDLQVLRDPQLRRQVPRKPRNGRPEVWSVSSQGSKWIPGAERKLLVYSYFEKETLTFRDVAIEFSLEEWECLNPAQQNLYMNVMLENYKNLVFLAGIAVSKQDPITSLEQEKEPWNMKICEMVDESPSETFGQSKT

SEQ ID NO: 794444 - protein, 383 aa, Homo sapiens
SGSLAAAGAAGLAFTALCPLLAEAQPLWPCDLQVLRDPQLRRQVPRKPRNGRPEVWSVSSQGSKWIPGAERKLLVYSYFEKETLTFRDVAIEFSLEEWECLNPAQQNLYMNVMLENYKNLVFLAGIAVSKQDPITSLEQEKEPWNMKICEMVDESPSAMCSSFTRDLWPEQDIKDSFQQVILRRHGKCEHENLQLRKGSANVVECKVYKKGYNELNQCLTTTQSKIFPCDTYIKVFHKIFNSNRHKTRHTGEKPFKCKKCDESFCMLLHLHQHKRIHIRENSYQCEECDKVFKRFSTLTRHKRVHTGEKPFKCEECGKAFKHSSTLTTHKMIHTGEKPYRCEECGKAFYHSSHLTTHKVIHTGEKPFKCEECGKAFNHPSALT

SEQ ID NO: 794445 - protein, 93 aa, Homo sapiens
SGSLAAAGAAGLAFTALCPLLAEAQPLWPCDLQVLRDPQLRRQVPRKPRNGRPEVWSVSSQGSKWIPGAERKLLVYSYFEKGRAVLPGWSAVA

SEQ ID NO: 794446 - protein, 706 aa, Homo sapiens
MTTLKEAVTFKDVAVVFTEEELRLLDLAQRKLYREVMLENFRNLLSVGHQSLHRDTFHFLKEEKFWMMETATQREGNLGGKIQMEMETVSESGTHEGLFSHQTWEQISSDLTRFQDSMVNSFQFSKQDDMPCQVDAGLSIIHVKTETSEGRTCKKSFSDVSVLDLHQQLQSREKSHTCDECGKSFCYSSALRIHQRVHMGEKLYNCDVCGKEFNQSSHLQIHQRIHTGEKPFKCEQCGKGFSRRSGLYVHRKLHTGVKPHICEKCGKAFIHDSQLQEHQRIHTGEKPFKCDICCKSFRSRANLNRHSMVHMREKPFRCDTCGKSFGLKSALNSHRMVHTGEKRYKCEECGKRFIYRQDLYKHQIDHTGEKPYNCKECGKSFRWASGLSRHVRVHSGETTFKCEECGKGFYTNSQRYSHQRAHSGEKPYRCEECGKGYKRRLDLDFHQRVHRGEKPYNCKECGKSFGWASCLLNHQRIHSGEKPFKCEECGKRFTQNSQLYTHRRVHSGEKPFKCEECGKRFTQNSQLYSHRRVHTGVKPYKCEECGKGFNSKFNLDMHQRVHTGERPYNCKECGKSFSRASSILNHKRLHGDEKPFKCEECGKRFTENSQLHSHQRVHTGEKPYKCEKCGKSFRWASTHLTHQRLHSREKLLQCEDCGKSIVHSSCLKDQQRDQSGEKTSKCEDCGKRYKRRLNLDTLLSLFLNDT

SEQ ID NO: 794447 - protein, 337 aa, Homo sapiens [sequence omitted]

SEQ ID NO: 794448 - protein, 100 aa, Homo sapiens
MVPLSPLNWELVTIYLETMCVTGCTCLAGYKGGISFCLCHLLADCITFWLNAYSIIRQVSFTSMDVRGVSGLSRNLFLNYIFPATPTQPTPPSLKLLPPG

SEQ ID NO: 794449 - protein, 531 aa, Homo sapiens
MEAPAQKAGQGGLPKADAQGASGAREKRPEEPRPLEEDRAGSRPTQKGDLRGAAGGRTTPPGGGSRGCSLGVSPGPGTRHSAGTRPLVREPCGPTSSQNPELVIPEGLQAREGPCRSPARGGDCSRNSCLAWHRGAPAGETPPVCDPCPERIQNHPRTQLCEVHTDCWPCQPGTGAPTCPRTPKPTSRGRNPLVEQPRACACGEAFAWRALRIPQERLQATEEPRPCARCGKRFRPNQQQQAGKSPPVCPECGQTSRPRPIVPDPPAQRLYACDECGKAFTRTSSLLQHQRIHTGERPYECAECGKAFVRCSGLYRHQKTHSAERHRRGPVLARRAFRLGCPPCGDYSERSPRRGSGAGEKPYECADCAKAFGLFSHLVEHRRVHTGEKPYACPECGKAFNQRSNLSRHQRTHSSAKPYACPLCEKAFKGRSGLVQHQRAHTGERPYGCSECGKTFRGCSELRQHERLHSGEKPYICRDCGKAFVRNCSLVRHLRTHTGERPYACGDCGRAFSQRSNLNEHRKRHGGRAAP

SEQ ID NO: 794450 - protein, 531 aa, Homo sapiens; identical to SEQ ID NO: 794449

SEQ ID NO: 794451 - protein, 651 aa, Homo sapiens
PALAVARVPQCRGGPEVAGGRLRAACGAGTRDPCGPPPENEAASLESTTVTWLKRGGEVQHWPLQRGSPGQALSCQVSLTSHLSEDMDNGSEWSQEDPECRLATEKLEGRNPTTRTLRPRMEAPAQKAGQGGLPKADAQGASGAREKRPEEPRPLEEDRAGSRPTQKGDLRGAAGGRTTPPGGGSRGCSLGVSPGPGTRHSAGTRPLVREPCGPTSSQNPELVIPEGLQAREGPCRSPARGGDCSRNSCLAWHRGAPAGETPPVCDPCPERIQNHPRTQLCEVHTDCWPCQPGTGAPTCPRTPKPTSRGRNPLVEQPRACACGEAFAWRALRIPQERLQATEEPRPCARCGKRFRPNQQQQAGKSPPVCPECGQTSRPRPIVPDPPAQRLYACDECGKAFTRTSSLLQHQRIHTGERPYECAECGKAFVRCSGLYRHQKTHSAERHRRGPVLARRAFRLGCPPCGDYSERSPRRGSGAGEKPYECADCAKAFGLFSHLVEHRRVHTGEKPYACPECGKAFNQRSNLSRHQRTHSSAKPYACPLCEKAFKGRSGLVQHQRAHTGERPYGCSECGKTFRGCSELRQHERLHSGEKPYICRDCGKAFVRNCSLVRHLRTHTGERPYACGDCGRAFSQRSNLNEHRKRHGGRAAP

SEQ ID NO: 794452 - protein, 97 aa, Homo sapiens
PQPPLCIREPPLLWPTFPSGKAPLLPKEQCHSASSQGGSKHAQLCPSLLFFPKPTFGAHTFSASPLVKPLEAALPYFVERVRPNVVQCHLRLHEPQN

SEQ ID NO: 794453 - protein, 133 aa, Homo sapiens
LSTVLKNGLKTTVCQVASHLNAPTALTYSFTYTPCSQKTRPCISAPAAKTQPCRVTAFLCRNLRGPPGSCGATKAFGEHFLQEPRQKIQNIIAPAHSSMWQRYILCSYLECGFSLACDSALLTDLKNDKHIQI

SEQ ID NO: 794454 - protein, 95 aa, Homo sapiens
QSCQQAPNRGCRPEGSRRGVGGGRRVRMRRLQRPFWAGPAALGWRVGLFDPFQVRQRGVTRGKRSRSVRMGRPNTVPGSLREAAGRLELGSRVSR

SEQ ID NO: 794455 - protein, 40 aa, Homo sapiens
CWAPWCSPACGVWPKWPMWTLFQGFYDKKHQNEDISVAMF

SEQ ID NO: 794456 - protein, 113 aa, Homo sapiens
YGLEHWLLTRMPVSLGPSILGTGPEHRPWSVLPGFGSLPCAGGESERQDDSRAGQTLPRGAQQGLGGQSWPCWEQWVEALEGQVQAGLRNSNPTPVEKPSAALQKIQKGSWVW

SEQ ID NO: 794457 - protein, 152 aa, Homo sapiens
MLPFRASLGQFAALLFLLQGGEAGAGVTGGVLVKFLLPPGRWLGELQEDRLCGLLPSPDPDSLDSAAQTVQQVIPCLCPKPPGQGISGIGLLKPYTAFISCRPNNPKGQPHCTDKETEVEQFTQVRPPLSARGRSEDTQGLRCRWVVQELHL

SEQ ID NO: 794458 - protein, 244 aa, Homo sapiens
MLPFRASLGQFAALLFLLQGGEAGAGVTGGVLVKFLLPPGRWLGELQEDRLCGLLPSPDPDSLDSAAQTVQQAATYTGRIFYNNETFPSVLDPCLSCICLLGSVACSPVDCPITCTYPFHPDGECCPVCRDCNYEGRKVANGQVFTLDDEPCTRCTCQLGEVSCEKVPCQRACADPALLPGDCCSSCPDSLSPLEEKQGLSPHGNVAFSKAGRSLHGDTEAPVNCSSCPGPPTASPSRPVLHLL

SEQ ID NO: 794459 - protein, 74 aa, Homo sapiens
TGGTRPLLSQGHADGLKLDSSEERPVGGLPDADQGRAEGKPHGRPSYGGHSFLGTPVNNLPLWPPPRPAVPTPH

SEQ ID NO: 794460 - protein, 81 aa, Homo sapiens
KPILKAGRAYHKYKAKRNCWPQLRGVAINPVEHPFGGGNHQHIGKPSTIRRDAPAGRKVGLIAARRTGRLRGTKTVQEKEN

SEQ ID NO: 794461 - protein, 87 aa, Homo sapiens
TTERKEVPRALSRERAAEPPLTGACTWRATVRTEPTAPASGRFRHRRIVWSPQRGDRFLQLAAEDVASAALTAAASVNCGSWDSGQG

SEQ ID NO: 794462 - protein, 265 aa, Homo sapiens
MGEKVSEAPEPVPRGCSGHGSRTPASALVAASSPGASSAESSSGSETLSEEGEPGGFSREHQPPPPPPLGGTLGARAPAAWAPASVLLERGVLALPPPLPGGAVPPAPRGSSASQEEQDEELDHILSPPPMPFRKCSNPDVASGPGKSLKYKRQLSEDGRQLRRGSLGGALTGRYLLPNPVAGQAWPASAETSNLVRMRSQALGQSAPSLTASLKELSLPRRGSFLTPRSLSPTPSSPGSPCSPLLAFHFWSPVCPNAGRTSPLG

SEQ ID NO: 794463 - protein, 252 aa, Homo sapiens
MGEKVSEAPEPVPRGCSGHGSRTPASALVAASSPGASSAESSSGSETLSEEGEPGGFSREHQPPPPPPLGGTLGARAPAAWAPASVLLERGVLALPPPLPGGAVPPAPRGSSASQEEQDEELDHILSPPPMPFRKCSNPDVASGPGKSLKYKRQLSEDGRQLRRGSLGGALTGRYLLPNPVAGQAWPASAETSNLVRMRSQALGQSAPSLTASLKELSLPRRGSFLTPRSLSPTPSSPGSPCSPLLAFHFWR

SEQ ID NO: 794464 - protein, 257 aa, Homo sapiens
MGEKVSEAPEPVPRGCSGHGSRTPASALVAASSPGASSAESSSGSETLSEEGEPGGFSREHQPPPPPPLGGTLGARAPAAWAPASVLLERGVLALPPPLPGGAVPPAPRGSSASQEEQDEELDHILSPPPMPFRKCSNPDVASGPGKSLKYKRQLSEDGRQLRRGSLGGALTGRYLLPNPVAGQAWPASAETSNLVRMRSQALGQSAPSLTASLLSLFLVFKQIDICGGALCSRTFLMLMILSSWPLCLPLAPVVEL

SEQ ID NO: 794465 - protein, 250 aa, Homo sapiens
MGEKVSEAPEPVPRGCSGHGSRTPASALVAASSPGASSAESSSGSETLSEEGEPGGFSREHQPPPPPPLGGTLGARAPAAWAPASVLLERGVLALPPPLPGGAVPPAPRGSSASQEEQDEELDHILSPPPMPFRKCSNPDVASGPGKSLKYKRQLSEDGRQLRRGSLGGALTGRYLLPNPVAGQAWPASAETSNLVRMRSQALGQSAPSLTASLKELSLPRRGSLCRSSDCDWVIDKRSERNCFLGKMLL

SEQ ID NO: 794466 - protein, 221 aa, Homo sapiens
MAPEPVPRGCSGHGSRTPASALVAASSPGASSAESSSGSETLSEEGEPGGFSREHQPPPPPPLGGTLGARAPAAWAPASVLLERGVLALPPPLPGGAVPPAPRGSSASQEEQDEELDHILSPPPMPFRKCSNPDVASGPGKSLKYKRQLSEDGRQLRRGSLGGALTGRYLLPNPVAGQAWPASAETSNLVRMRSQALGQSAPSLTASLPVCPNAGRTSPLG

SEQ ID NO: 794467 - protein, 277 aa, Homo sapiens
MGEKVSEAPEPVPRGCSGHGSRTPASALVAASSPGASSAESSSGSETLSEEGEPGGFSREHQPPPPPPLGGTLGARAPAAWAPASVLLERGVLALPPPLPGGAVPPAPRGSSASQEEQDEELDHILSPPPMPFRKCSNPDVASGPGKSLKYKRQLSEDGRQLRRGSLGGALTGRYLLPNPVAGQAWPASAETSNLVRMRSQALGQSAPSLTASLKELSLPRRGSLIDSQKWNCLVKRLTPRSLSPTPSSPGSPCSPLLAFHFWSPVCPNAGRTSPLG

SEQ ID NO: 794468 - protein, 296 aa, Homo sapiens
SLPWAPRDGLPLPGRETAGNWLPETRRLVNPALPTWWSSAMPMPSRDGGLHPRHHHYGSHSPWSQLLSSPMETPSIKGLYYRRVRKVGALDASPVDLKKEILINVGGRRYLLPWSTLDRFPLSRLSKLRLCRSYEEIVQLCDDYDEDSQEFFFDRSPSAFGVIVSFLAAGKLVLLQEMCALSFQEELAYWGIEEAHLERCCLRKLLRKLEELEELAKLHREDVLRQQRETRRPASHSSRWGLCMNRLREMVENPQSGLPGKVFACLSILFVATTAVSLCVSTMPDLRAEEDQVSGL

SEQ ID NO: 794469 - protein, 219 aa, Homo sapiens
MNSSKSSETQCTERGCFSSQMFLWTVAGIPILFLSACFITRCVVTFRIFQTCDEKKFQLPENFTELSCYNYGSGSVKNCCPLNWEYFQSSCYFFSTDTISWALSLKNCSAMGAHLVVINSQEEQEFLSYKKPKMREFFIGLSDQVVEGQWQWVDGTPLTKSLSFWDVGEPNNIATLEDCATMRDSSNPRQNWNDVTCFLNYFRICEMVGINPLNKGKSL

SEQ ID NO: 794470 - protein, 219 aa, Homo sapiens; identical to SEQ ID NO: 794469

SEQ ID NO: 794471 - protein, 219 aa, Homo sapiens; identical to SEQ ID NO: 794469

SEQ ID NO: 794472 - protein, 154 aa, Homo sapiens
MNSSKSSETQCTERGCFSSQMFLWTVAGIPILFLSACFITRCVVTFRIFQTCDEKKFQLPENFTELSCYNYGSGSVKNCCPLNWEYFQSSCYFFSTDTISWALSLKNCSAMGAHLVVINSQEEQLLGCRGAQQHSYPGGLCHHERLFKPKAKLE

SEQ ID NO: 794473 - protein, 1112 aa, Homo sapiens
KRNWDSNRRRLLVCGSGLAAAGQRPLAMDTPENVLQMLEAHMQSYKGNDPLGEWERYIQWVEENFPENKEYLITLLEHLMKEFLDKKKYHNDPRFISYCLKFAEYNSDLHQFFEFLYNHGIGTLSSPLYIAWAGHLEAQGELQHASAVLQRGIQNQAEPREFLQQQYRLFQTRLTETHLPAQARTSEPLHNVQVLNQMITSKSNPGNNMACISKNQGSELSGVISSACDKESNMERRVITISKSEYSVHSSLASKVDVEQVVMYCKEKLIRGESEFSFEELRAQKYNQRRKHEQWVNEDRHYMKRKEANAFEEQLLKQKMDELHKKLHQVVETSHEDLPASQERSEVNPARMGPSVGSQQELRAPCLPVTYQQTPVNMEKNPREAPPVVPPLANAISAALVSPATSQSIAPPVPLKAQTVTDSMFAVASKDAGCVNKSTHEFKPQSGAEIKEGCETHKVANTSSFHTTPNTSLGMVQATPSKVQPSPTVHTKEALGFIMNMFQAPTLPDISDDKDEWQSLDQNEDAFEAQFQKNVRSSGAWGVNKIISSLSSAFHVFEDGNKENYGLPQPKNKPTGARTFGERSVSRLPSKPKEEVPHAEEFLDDSTVWGIRCNKTLAPSPKSPGDFTSAAQLASTPFHKLPVESVHILEDKENVVAKQCTQATLDSCEENMVVPSRDGKFSPIQEKSPKQALSSHMYSASLLRLSQPAAGGVLTCEAELGVEACRLTDTDAAIAEDPPDAIAGLQAEWMQMSSLGTVDAPNFIVGNPWDDKLIFKLLSGLSKPVSSYPNTFEWQCKLPAIKPKTEFQLGSKLVYVHHLLGEGAFAQVYEATQGDLNDAKNKQKFVLKVQKPANPWEFYIGTQLMERLKPSMQHMFMKFYSAHLFQNGSVLVGELYSYGTLLNAINLYKNTPEKVMPQGLVISFAMRMLYMIEQVHDCEIIHGDIKPDNFILGNGFLEQDDEDDLSAGLALIDLGQSIDMKLFPKGTIFTAKCETSGFQCVEMLSNKPWNYQIDYFGVAATVYCMLFGTYMKVKNEGGECKPEGLFRRLPHLDMWNEFFHVMLNIPDCHHLPSLDLLRQKLKKVFQQHYTNKIRALRNRLIVLLLECKRSRK

SEQ ID NO: 794474 - protein, 433 aa, Homo sapiens
KRNWDSNRRRLLVCGSGLAAAGQRPLAMDTPENVLQMLEAHMQSYKGNDPLGEWERYIQWVEENFPENKEYLITLLEHLMKEFLDKKKYHNDPRFISYCLKFAEYNSDLHQFFEFLYNHGIGTLSSPLYIAWAGHLEAQGELQHASAVLQRGIQNQAEPREFLQQQYRLFQTRLTETHLPAQARTSEPLHNVQVLNQMITSKSNPGNNMACISKNQGSELSGVISSACDKESNMERRVITISKSEYSVHSSLASKVDVEQVVMYCKEKLIRGESEFSFEELRAQKYNQRRKHEQWVNEDRHYMKRKEANAFEEQLLKQKMDELHKKLHQVVETSHEDLPASQERSEVNPARMGPSVGSQQELRAPCLPVTYQQTPVNMEKNPREAPPVVPPLANAISAALVSPATSQSIAPPVPLKAQTVTDSMFAVASKDAG

SEQ ID NO: 794475 - protein, 115 aa, Homo sapiens
MVQQLDRDAPHFPDGGAARKRRSLLPDGRAAEQRHSSFLSAAARQRHTSCPRRCGSQAEALLTSQAVQWPGKGASHSQTGLGARERRCSLPRQWGSWAEVLLTSQKVGQLGRGAP

SEQ ID NO: 794476 - protein, 256 aa, Homo sapiens
GRERASERAAGAVLPQHQPGHAAASSPAPRAQAGPSRAEPGRARAMLLTVYCVRRDLSEVTFSLQVDADFELHNFRALCELESGIPAAESQIVYAERPLTDNHRSLASYGLKDGDVVILRQKENADPRPPVQFPNLPRIDFSSIAVPGTSSPRQRQPPGTQQSHSSPGEITSSPQGLDNPALLRDMLLANPHELSLLKERNPPLAEALLSGDLEKFSRVLVEQQQDRARREQERIRLFSADPFDLEAQAKIEEDIR

SEQ ID NO: 794477 - protein, 304 aa, Homo sapiens
MPYVDRQNRICGFLDIEEHENSGKFLRRYFILDTQANCLLWYMDNPQNLAMGAGAVGALQLTYISKVSIATPKQKPKTPFCFVINALSQRYFLQANDQKDMKDWVEALNQASKITVPKGGGLPMTTEVLKSLAAPPALEKKPQVAYKTEIIGGVVVHTPISQNGGDGQEGSEPGSHTILRRSQSYIPTSGCRASTGPPLIKSGYCVKQGNVRKSWKRRFFALDDFTICYFKCEQDREPLRTIFFKDVLKTHECLVKSGDLLMRDNLFEIITSSRTFYVQADSPEDMHSWIKEIGAAVQALKCHP

SEQ ID NO: 794478 - protein, 304 aa, Homo sapiens; identical to SEQ ID NO: 794477

SEQ ID NO: 794479 - protein, 228 aa, Homo sapiens
METLESELTCPICLELFEDPLLLPCAHSLCFNCAHRILVSHCATNESVESITAFQCPTCRHVITLSQRGLDGLKRNVTLQNIIDRFQKASVSGPNSPSETRRERAFDANTMTSAEKVLCQFCDQDPAQDAVKTCVTCEVSYCDECLKATHPNKKPFTGHRLIEPIPDSHIRGLMCLEHEDEKVNMYCVTDDQLICALCKLVGRHRDHQVAALSERYDKLKQNLESNLP

SEQ ID NO: 794480 - protein, 113 aa, Homo sapiens
QVSITTSPPHPTPNLEVHQNSFTIIRERPRQFHRCLGVKPGGSCHLFCRHFTDQKSVPGLQPAVKETGKSSQAVFAESWIQPELGVCRTGTKKQVKGKELVNVSEQVNIKIDL

SEQ ID NO: 794481 - protein, 223 aa, Homo sapiens [sequence omitted]

SEQ ID NO: 794482 - protein, 431 aa, Homo sapiens
REGAREGAREGKGERELPQMLGIIPLPFGKPQPQSRRRPLRPPSASSASRPARGSLRRAMATSPQKSPSVPKSPTPKSPPSRKKDDSFLGKLGGTLARRKKAKEVSELQEEGMNAINLPLSPIPFELDPEDTMLEENEVRTMVDPNSRSDPKLQELMKVLIDWINDVLVGERIIVKDLAEDLYDGQVLQKLFEKLESEKLNVAEVTQSEIAQKQKLQTVLEKINETLKLPPRSIKWNVDSVHAKSLVAILHLLVALSQYFRAPIRLPDHVSIQVVVVQKREGILQSRQIQEEITGNTEALSGRHERDAFDTLFDHAPDKLNVVKKTLITFVNKHLNKLNLEVTELETQFADGVYLVLLMGLLEGYFVPLHSFFLTPDSFEQKVLNVSFAFELMQDGGLEKPKPRPEDIVNCDLKSTLRVLYNLFTKYRNVE

SEQ ID NO: 794483 - protein, 431 aa, Homo sapiens; identical to SEQ ID NO: 794482

SEQ ID NO: 794484 - protein, 119 aa, Homo sapiens
VHEDLLGPVVQKLFEKLESEKLNVAEVTQSEIAQKQKLQTVLEKINETLKLPPRSIKWNVDSVHAKSLVAILHLLVALSQYFRAPIRLPDHVSIQVVVVQKREGILQFLEKLLHNLGYR

SEQ ID NO: 794485 - protein, 369 aa, Homo sapiens
AAAYYYYIRGRADPKSPPSRKKDDSFLGKLGGTLARRKKAKEVSELQEEGMNAINLPLSPIPFELDPEDTMLEENEVRTMVDPNSRSDPKLQELMKVLIDWINDVLVGERIIVKDLAEDLYDGQVLQKLFEKLESEKLNVAEVTQSEIAQKQKLQTVLEKINETLKLPPRSIKWNVDSVHAKSLVAILHLLVALSQYFRAPIRLPDHVSIQVVVVQKREGILQSRQIQEEITGNTEALSGRHERDAFDTLFDHAPDKLNVVKKTLITFVNKHLNKLNLEVTELETQFADGVYLVLLMGLLEGYFVPLHSFFLTPDSFEQKVLNVSFAFELMQDGGLEKPKPRPEDIVNCDLKSTLRVLYNLFTKYRNVE

SEQ ID NO: 794486 - protein, 307 aa, Homo sapiens
PGGESAEAMLEENEVRTMVDPNSRSDPKLQELMKVLIDWINDVLVGERIIVKDLAEDLYDGQVLQKLFEKLESEKLNVAEVTQSEIAQKQKLQTVLEKINETLKLPPRSIKWNVDSVHAKSLVAILHLLVALSQYFRAPIRLPDHVSIQVVVVQKREGILQSRQIQEEITGNTEALSGRHERDAFDTLFDHAPDKLNVVKKTLITFVNKHLNKLNLEVTELETQFADGVYLVLLMGLLEGYFVPLHSFFLTPDSFEQKVLNVSFAFELMQDGGLEKPKPRPEDIVNCDLKSTLRVLYNLFTKYRNVE

SEQ ID NO: 794487 - protein, 330 aa, Homo sapiens
MPQLPPGFSTSSLSPVYSSTLHSLLLDPEDTMLEENEVRTMVDPNSRSDPKLQELMKVLIDWINDVLVGERIIVKDLAEDLYDGQVLQKLFEKLESEKLNVAEVTQSEIAQKQKLQTVLEKINETLKLPPRSIKWNVDSVHAKSLVAILHLLVALSQYFRAPIRLPDHVSIQVVVVQKREGILQSRQIQEEITGNTEALSGRHERDAFDTLFDHAPDKLNVVKKTLITFVNKHLNKLNLEVTELETQFADGVYLVLLMGLLEGYFVPLHSFFLTPDSFEQKVLNVSFAFELMQDGGLEKPKPRPEDIVNCDLKSTLRVLYNLFTKYRNVE

SEQ ID NO: 794488 - protein, 431 aa, Homo sapiens; identical to SEQ ID NO: 794482

SEQ ID NO: 794489 - protein, 88 aa, Homo sapiens
VLSHKCKRQEEAGKAVRRRVQYANSKNSWAVVGPGSPSLHVRYLVKRLYNTRSVDFRSQLTVLSHKSSCNPEIVETEIRKEIINNSVG

SEQ ID NO: 794490 - protein, 113 aa, Homo sapiens
REGAREGAREGKGERELPQMLGIIPLPFGKPQPQSRRRPLRPPSASSASRPARGSLRRAMATSPQKSPSVPKSPTPKSPPSRKKDDSFLGKLGGTLARRKKAKEAQRAGHGPM

SEQ ID NO: 794491 - protein, 241 aa, Homo sapiens
REGAREGAREGKGERELPQMLGIIPLPFGKPQPQSRRRPLRPPSASSASRPARGSLRRAMATSPQKSPSVPKSPTPKSPPSRKKDDSFLGKLGGTLARRKKAKEVSELQEEGMNAINLPLSPIPFELDPEDTMLEENEVRTMVDPNSRSDPKLQELMKVLIDWINDVLVGERIIVKDLAEDLYDGQVLQKLFGRRVECCNGCVFNCRWLDHLLVARRSYSQFTVAYLEMDYKCVEHGITAQ

SEQ ID NO: 794492 - protein, 431 aa, Homo sapiens; identical to SEQ ID NO: 794482

SEQ ID NO: 794493 - protein, 328 aa, Homo sapiens
MVSELQEEGMNAINLPLSPIPFELDPEDTMLEENEVRTMVDPNSRSDPKLQELMKVLIDWINDVLVGERIIVKDLAEDLYDGQVLQKLFEKLESEKLNVAEVTQSEIAQKQKLQTVLEKINETLKLPPRSIKWNVDSVHAKSLVAILHLLVALSQYFRAPIRLPDHVSIQVVVVQKREGILQSRQIQEEITGNTEALSGRHERDAFDTLFDHAPDKLNVVKKTLITFVNKHLNKLNLEVTELETQFADGVYLVLLMGLLEGYFVPLHSFFLTPDSFEQKVLNVSFAFELMQDGGLEKPKPRPEDIVNCDLKSTLRVLYNLFTKYRNVE

SEQ ID NO: 794494 - protein, 202 aa, Homo sapiens
ELGTPTPPQLLLPLHQSPSFLGGWALPSSLFPSCTFDYRSASIQVVVVQKREGILQSRQIQEEITGNTEALSGRHERDAFDTLFDHAPDKLNVVKKTLITFVNKHLNKLNLEVTELETQFADGVYLVLLMGLLEGYFVPLHSFFLTPDSFEQKVLNVSFAFELMQDGGLEKPKPRPEDIVNCDLKSTLRVLYNLFTKYRNVE

SEQ ID NO: 794495 - protein, 431 aa, Homo sapiens; identical to SEQ ID NO: 794482

SEQ ID NO: 794496 - protein, 104 aa, Homo sapiens
GNLRVATAKTKLLPVTWKLLAQLPQVSEWQPIAPRQVAQATVLRSGHPPPTSAPHTQPGGQCAQPSSPQPFWRLQSPQGSPVLPLHLRWSLPGWWPAWLLRVLA

SEQ ID NO: 794497 - protein, 107 aa, Homo sapiens
SEKHFLSKALYSWPGACLPLFSQDRDLQELLPLPHPPPPTSFPASWVLWPPALQAHWRWSWLPITLLGTCSQLLCPPTAPGSLLKQSSPLSSLSLASSFTSFLPIAI

SEQ ID NO: 794498 - protein, 655 aa, Homo sapiens
MAAGVAAWLPFARAAAIGWMPVANCPMPLAPADKNKRQDELIVLNVSGRRFQTWRTTLERYPDTLLGSTEKEFFFNEDTKEYFFDRDPEVFRCVLNFYRTGKLHYPRYECISAYDDELAFYGILPEIIGDCCYEEYKDRKRENAERLMDDNDSENNQESMPSLSFRQTMWRAFENPHTSTLALVFYYVTGFFIAVSVITNVVETVPCGTVPGSKELPCGERYSVAFFCLDTACVMIFTVEYLLRLFAAPSRYRFIRSVMSIIDVVAIMPYYIGLVMTNNEDVSGAFVTLRVFRVFRIFKFSRHSQGLRILGYTLKSCASELGFLLFSLTMAIIIFATVMFYAEKGSSASKFTSIPASFWYTIVTMTTLGYGDMVPKTIAGKIFGSICSLSGVLVIALPVPVIVSNFSRIYHQNQRADKRRAQKKARLARIRVAKTGSSNAYLHSKRNGLLNEALELTGTPEEEHMGKTTSLIESQHHHLLHCLEKTTGLSYLVDDPLLSVRTSTIKNHEFIDEQMFEQNCMESSMQNYPSTRSPSLSSHPGLTTTCCSRRSKKTTHLPNSNLPATRLRSMQELSTIHIQGSEQPSLTTSRSSLNLKADDGLRPNCKTSQITTAIISIPTPPALTPEGESRPPPASPGPNTNIPSIASNVVKVSVL

SEQ ID NO: 794499 - protein, 636 aa, Homo sapiens
MAAGVAAWLPFARAAAIGWMPVANCPMPLAPADKNKRQDELIVLNVSGRRFQTWRTTLERYPDTLLGSTEKEFFFNEDTKEYFFDRDPEVFRCVLNFYRTGKLHYPRYECISAYDDELAFYGILPEIIGDCCYEEYKDRKRENAERLMDDNDSENNQESMPSLSFRQTMWRAFENPHTSTLALVFYYVTGFFIAVSVITNVVETVPCGTVPGSKELPCGERYSVAFFCLDTACVMIFTVEYLLRLFAAPSRYRFIRSVMSIIDVVAIMPYYIGLVMTNNEDVSGAFVTLRVFRVFRIFKFSRHSQGLRILGYTLKSCASELGFLLFSLTMAIIIFATVMFYAEKGSSASKFTSIPASFWYTIVTMTTLGYGDMVPKTIAGKIFGSICSLSGVLVIALPVPVIVSNFSRIYHQNQRADKRRAQKKARLARIRVAKTGSSNAYLHSKRNGLLNEALELTGTPEEEHMGKTTSLIESQHHHLLHCLEKTTNHEFIDEQMFEQNCMESSMQNYPSTRSPSLSSHPGLTTTCCSRRSKKTTHLPNSNLPATRLRSMQELSTIHIQGSEQPSLTTSRSSLNLKADDGLRPNCKTSQITTAIISIPTPPALTPEGESRPPPASPGPNTNIPSIASNVVKVSVL

SEQ ID NO: 794500 - protein, 153 aa, Homo sapiens
MAAGVAAWLPFARAAAIGWMPVANCPMPLAPADKNKRQDELIVLNVSGRRFQTWRTTLERYPDTLLGSTEKEFFFNEDTKEYFFDRDPEVFRCVLNFYRTGKLHYPRYECISAYVTDLGNMPVCYQGLITGMQLPGDEKMKNMTKLSSHTGCH

SEQ ID NO: 794501 - protein, 369 aa, Homo sapiens
MAAGVAAWLPFARAAAIGWMPVANCPMPLAPADKNKRQDELIVLNVSGRRFQTWRTTLERYPDTLLGSTEKEFFFNEDTKEYFFDRDPEVFRCVLNFYRTGKLHYPRYECISAYDDELAFYGILPEIIGDCCYEEYKDRKRENAERLMDDNDSENNQESMPSLSFRQTMWRAFENPHTSTLALVFYYVTGFFIAVSVITNVVETVPCGTVPGSKELPCGERYSVAFFCLDTACVMIFTVEYLLRLFAAPSRYRFIRSVMSIIDVVAIMPYYIGLVMTNNEDVSGAFVTLRVFRVFRIFKFSRHSQGLRILGYTLKSCASELGFLLFSLTMAIIIFATVMFYAEKGSSASKFTSIPASFWYTIVTMTTLG

SEQ ID NO: 794502 - protein, 95 aa, Homo sapiens
HDDNDGPDAEDSDQTSRVCLRSTTSTGPWLAASMLLHPQIADREGSAESSEARMALRFSGFPGPRGIRQPDATRPGLESQPQPACRTCFGSSKPP

SEQ ID NO: 794503 - protein, 67 aa, Homo sapiens
YENLLGHQCDDVQRQGQTPDLWLCLVLPHPFIGLMGQLKNLHNRKIGQSLNIVTNLHFFMKKAQYLP

SEQ ID NO: 794504 - protein, 85 aa, Homo sapiens
GSSLRFQIGTPRLGCLCAVCGECRGADVPGGGALLLLKTGPSALLGLLNWAEGMCSAHVGPEVSGEVVTGTGGAQKPCPLGEWAA

SEQ ID NO: 794505 - protein, 106 aa, Homo sapiens
EIILALEHVVFDCKILMLDITTIYYLTLGKVLASTSSFTNRNTCHEGLRQELNNYAHVHTHTHTLICIVSNSVHLAVRSQYISPRFSAPKYSALLIHAKINCSDIC

SEQ ID NO: 794506 - protein, 141 aa, Homo sapiens
GHPGVAGPGLGWGSPDRGSPTLGHWRGTVSARARQCRPADPLPGGTGEEEGAPAPASLQTTSPKSCGRLSPPCTPLSALSSLPLFGMLSSWGSAGAGWHLGCSPGPCACQNVGCSVATPARGPTCLEQDLHPCQVLDKGGR

SEQ ID NO: 794507 - protein, 398 aa, Homo sapiens
MVNDPPVPALLWAQEVGQVLAGRARRLLLQFGVLFCTILLLLWVSVFLYGSFYYSYMPTVSHLSPVHFYYRTDCDSSTTSLCSFPVANVSLTKGGRDRVLMYGQPYRVTLELELPESPVNQDLGMFLVTISCYTRGGRIISTSSRSVMLHYRSDLLQMLDTLVFSSLLLFGFAEQKQLLEVELYADYRENSYVPTTGAIIEIHSKRIQLYGAYLRIHAHFTGLRYLLYNFPMTCAFIGVASNFTFLSVIVLFSYMQWVWGGIWPRHRFSLQVNIRKRDNSRKEVQRRISAHQPGPEGQEESTPQSDVTEDGESPEDPSGTEGQLSEEEKPDQQPLSGEEELEPEASDGSGSWEDAALLTEANLPAPAPASASAPVLETLGSSEPAGGALRQRPTCSSS

SEQ ID NO: 794508 - protein, 462 aa, Homo sapiens
MSTEKVDQKEEAGEKEVCGDQIKGPDKEEEPPAAASHGQGWRPGGRAARNARPEPGARHPALPAMVNDPPVPALLWAQEVGQVLAGRARRLLLQFGVLFCTILLLLWVSVFLYGSFYYSYMPTVSHLSPVHFYYRTDCDSSTTSLCSFPVANVSLTKGGRDRVLMYGQPYRVTLELELPESPVNQDLGMFLVTISCYTRGGRIISTSSRSVMLHYRSDLLQMLDTLVFSSLLLFGFAEQKQLLEVELYADYRENSYVPTTGAIIEIHSKRIQLYGAYLRIHAHFTGLRYLLYNFPMTCAFIGVASNFTFLSVIVLFSYMQWVWGGIWPRHRFSLQVNIRKRDNSRKEVQRRISAHQPGPEGQEESTPQSDVTEDGESPEDPSGTEGQLSEEEKPDQQPLSGEEELEPEASDGSGSWEDAALLTEANLPAPAPASASAPVLETLGSSEPAGGALRQRPTCSSS

SEQ ID NO: 794509 - protein, 398 aa, Homo sapiens; identical to SEQ ID NO: 794507

SEQ ID NO: 794510 - protein, 287 aa, Homo sapiens
MVNDPPVPALLWAQEVGQVLAGRARRLLLQFGVLFCTILLLLWVSVFLYGSFYYSYMPTVSHLSPVHFYYRTDCDSSTTSLCSFPVANVSLTKGGRDRVLMYGQPYRVTLELELPESPVNQDLGMFLVTISCYTRGGRIISTSSRSVMLHYRSDLLQMLDTLVFSSLLLFGFAEQKQLLEVELYADYRENSYVPTTGAIIEIHSKRIQLYGAYLRIHAHFTGLRLTSEKETIPGRKSNEGSLLISQGLKARRSQLRNQMLQRMVRALKIPQGQRVSCPRRRNQISSP

SEQ ID NO: 794511 - protein, 140 aa, Homo sapiens
LPREPESPVSRLPWQRARLEPPAAASHGQGWRPGGRAARNARPEPGARHPALPAMVNDPPVPALLWAQEVGQVLAGRARRLLLQFGVLFCTILLLLWVSVFLYGSFYYSYMPTVSHLSPVHFYYRVRGAFYQNRGLLWEL

SEQ ID NO: 794512 - protein, 50 aa, Homo sapiens
MGCKEPKGLTTITDLRKGPGEGKGRSCEKGQGSSEESTEELLLPEGVLRS

SEQ ID NO: 794513 - protein, 462 aa, Homo sapiens; identical to SEQ ID NO: 794508

SEQ ID NO: 794514 - protein, 462 aa, Homo sapiens; identical to SEQ ID NO: 794508

SEQ ID NO: 794515 - protein, 462 aa, Homo sapiens; identical to SEQ ID NO: 794508

SEQ ID NO: 794516 - protein, 462 aa, Homo sapiens; identical to SEQ ID NO: 794508

SEQ ID NO: 794517 - protein, 398 aa, Homo sapiens; identical to SEQ ID NO: 794507

SEQ ID NO: 794518 - protein, 462 aa, Homo sapiens; identical to SEQ ID NO: 794508

SEQ ID NO: 794519 - protein, 452 aa, Homo sapiens
LPREPESPVSRLPWQRARLEPPAAASHGQGWRPGGRAARNARPEPGARHPALPAMVNDPPVPALLWAQEVGQVLAGRARRLLLQFGVLFCTILLLLWVSVFLYGSFYYSYMPTVSHLSPVHFYYRTDCDSSTTSLCSFPVANVSLTKGGRDRVLMYGQPYRVTLELELPESPVNQDLGMFLVTISCYTRGGRIISTSSRSVMLHYRSDLLQMLDTLVFSSLLLFGFAEQKQLLEVELYADYRENSYVPTTGAIIEIHSKRIQLYGAYLRIHAHFTGLRYLLYNFPMTCAFIGVASNFTFLSVIVLFSYMQWVWGGIWPRHRFSLQVNIRKRDNSRKEVQRRISAHQPGPEGQEESTPQSDVTEDGESPEDPSGTEGQLSEEEKPDQQPLSGEEELEPEASDGSGSWEDAALLTEANLPAPAPASASAPVLETLGSSEPAGGALRQRPTCSSS

SEQ ID NO: 794520 - protein, 462 aa, Homo sapiens; identical to SEQ ID NO: 794508

SEQ ID NO: 794521 - protein, 370 aa, Homo sapiens
MARGGVQVAEQLGTQGLNLGPDTLLSRPWSTTLQYLPYCGPRRTDCDSSTTSLCSFPVANVSLTKGGRDRVLMYGQPYRVTLELELPESPVNQDLGMFLVTISCYTRGGRIISTSSRSVMLHYRSDLLQMLDTLVFSSLLLFGFAEQKQLLEVELYADYRENSYVPTTGAIIEIHSKRIQLYGAYLRIHAHFTGLRYLLYNFPMTCAFIGVASNFTFLSVIVLFSYMQWVWGGIWPRHRFSLQVNIRKRDNSRKEVQRRISAHQPGPEGQEESTPQSDVTEDGESPEDPSGTEGQLSEEEKPDQQPLSGEEELEPEASDGSGSWEDAALLTEANLPAPAPASASAPVLETLGSSEPAGGALRQRPTCSSS

SEQ ID NO: 794522 - protein, 369 aa, Homo sapiens
MSTEKVDQKEEAGEKEVCGDQIKGPDKEEEPPAAASHGQGWRPGGRAARNARPEPGARHPALPAMVNDPPVPALLWAQEVGQVLAGRARRLLLQFGVLFCTILLLLWVSVFLYGSFYYSYMPTVSHLSPVHFYYRTDCDSSTTSLCSFPVANVSLTKGGRDRVLMYGQPYRVTLELELPESPVNQDLGMFLVTISCYTRGGRIISTSSRSVMLHYRSDLLQMLDTLVFSSLLLFGFAEQKQLLEVELYADYRENSYVPTTGAIIEIHSKRIQLYGAYLRIHAHFTGLRYLLYNFPMTCAFIGVASNFTFLSVIVLFSYMQWVWGGIWPRHRFSLQVNIRKRDNSRKEVQRRISAHQPGKGVGWGAVEVG

SEQ ID NO: 794523 - protein, 415 aa, Homo sapiens
LPREPESPVSRLPWQRARLVSRQPCGSRRAGFHGCTIRNHQLLHPMARGGVQVAEQLGTQGLNLGPDTLLSRPWSTTLQYLPYCGPRRTDCDSSTTSLCSFPVANVSLTKGGRDRVLMYGQPYRVTLELELPESPVNQDLGMFLVTISCYTRGGRIISTSSRSVMLHYRSDLLQMLDTLVFSSLLLFGFAEQKQLLEVELYADYRENSYVPTTGAIIEIHSKRIQLYGAYLRIHAHFTGLRYLLYNFPMTCAFIGVASNFTFLSVIVLFSYMQWVWGGIWPRHRFSLQVNIRKRDNSRKEVQRRISAHQPGPEGQEESTPQSDVTEDGESPEDPSGTEGQLSEEEKPDQQPLSGEEELEPEASDGSGSWEDAALLTEANLPAPAPASASAPVLETLGSSEPAGGALRQRPTCSSS

SEQ ID NO: 794524 - protein, 418 aa, Homo sapiens
MSTEKVDQKEEAGEKEVCGDQIKGPDKEEEPPAAASHGQGWRPGGRAARNARPEPGARHPALPAMVNDPPVPALLWAQEVGQVLAGRARRLLLQFGVLFCTILLLLWVSVFLYGSFYYSYMPTVSHLSPVHFYYRTDCDSSTTSLCSFPVANVSLTKGGRDRVLMYGQPYRVTLELELPESPVNQDLGMFLVTISCYTRGGRIISTSSRSVMLHYRSDLLQMLDTLVFSSLLLFGFAEQKQLLEVELYADYRENSYVPTTGAIIEIHSKRIQLYGAYLRIHAHFTGLRYLLYNFPMTCAFIGVASNFTFLSVIVLFSYMQWVWGGIWPRHRFSLQVNIRKRDNSRKEVQRRISAHQPGPEGQEESTPQSDVTEDGESPEDPSGTEGQLSEEEKPDQQPLSGEEELEPEASDGEGHPAA

SEQ ID NO: 794525 - protein, 118 aa, Homo sapiens
MARGGVQVAEQLGTQGLNLGPDTLLSRPWSTTLQYLPYCGPRRWAKSWQAVPAGCCCSLGCSSAPSSFCSGCLSSSMAPSTIPICRQSATSALCISTTGPTVIPPPPHSAPSLLPMSR

SEQ ID NO: 794526 - protein, 305 aa, Homo sapiens
DAWVDPLMYGQPYRVTLELELPESPVNQDLGMFLVTISCYTRGGRIISTSSRSVMLHYRSDLLQMLDTLVFSSLLLFGFAEQKQLLEVELYADYRENSYVPTTGAIIEIHSKRIQLYGAYLRIHAHFTGLRYLLYNFPMTCAFIGVASNFTFLSVIVLFSYMQWVWGGIWPRHRFSLQVNIRKRDNSRKEVQRRISAHQPGPEGQEESTPQSDVTEDGESPEDPSGTEGQLSEEEKPDQQPLSGEEELEPEASDGSGSWEDAALLTEANLPAPAPASASAPVLETLGSSEPAGGALRQRPTCSSS

SEQ ID NO: 794527 - protein, 308 aa, Homo sapiens
MSTEKVDQKEEAGEKEVCGDQIKGPDKEEEPPAAASHGQGWRPGGRAARNARPEPGARHPALPAMVNDPPVPALLWAQEVGQVLAGRARRLLLQFGVLFCTILLLLWVSVFLYGSFYYSYMPTVSHLSPVHFYYRTDCDSSTTSLCSFPVANVSLTKGGRDRVLMYGQPYRVTLELELPESPVNQDLGMFLVTISCYTRGGRIISTSSRSVMLHYRSDLLQMLDTLVFSSLLLFGFAEQKQLLEVELYADYRENSYVPTTGAIIEIHSKRIQLYGAYLRIHAHFTGLSLGSSEPAGGALRQRPTCSSS

SEQ ID NO: 794528 - protein, 417 aa, Homo sapiens
MSTEKVDQKEEAGEKEVCGDQIKGPDKEEEPPAAASHGQGWRPGGRAARNARPEPGARHPALPAMVNDPPVPALLWAQEVGQVLAGRARRLLLQFGVLFCTILLLLWVSVFLYGSFYYSYMPTVSHLSPVHFYYRTDCDSSTTSLCSFPVANVSLTKGGRDRVLMYGQPYRVTLELELPESPVNQDLGMFLVTISCYTRGGRIISTSSRSYVPTTGAIIEIHSKRIQLYGAYLRIHAHFTGLRYLLYNFPMTCAFIGVASNFTFLSVIVLFSYMQWVWGGIWPRHRFSLQVNIRKRDNSRKEVQRRISAHQPGPEGQEESTPQSDVTEDGESPEDPSGTEGQLSEEEKPDQQPLSGEEELEPEASDGSGSWEDAALLTEANLPAPAPASASAPVLETLGSSEPAGGALRQRPTCSSS

SEQ ID NO: 794529 - protein, 150 aa, Homo sapiens
MSTEKVDQKEEAGEKEVCGDQIKGPDKEEEPPAAASHGQGWRPGGRAARNARPEPGARHPALPAMVNDPPVPALLWAQEVGQVLAGRARRLLLQFGVLFCTILLLLWVSVFLYGSFYYSYMPTVSHLSPVHFYYRVRGAFYQNRGLLWEL

SEQ ID NO: 794530 - protein, 398 aa, Homo sapiens; identical to SEQ ID NO: 794507

SEQ ID NO: 794531 - protein, 462 aa, Homo sapiens; identical to SEQ ID NO: 794508

SEQ ID NO: 794532 - protein, 453 aa, Homo sapiens
LLEQNHRLVQSHEAKCRIANIWLYSYRGSLGLNTGLKLMISLTALGRTDRIQLCNNILVGHHVRVVIKLVVLVHEDVKADGLNDQSYGSLCGILLLLWVSVFLYGSFYYSYMPTVSHLSPVHFYYRTDCDSSTTSLCSFPVANVSLTKGGRDRVLMYGQPYRVTLELELPESPVNQDLGMFLVTISCYTRGGRIISTSSRSVMLHYRSDLLQMLDTLVFSSLLLFGFAEQKQLLEVELYADYRENSYVPTTGAIIEIHSKRIQLYGAYLRIHAHFTGLRYLLYNFPMTCAFIGVASNFTFLSVIVLFSYMQWVWGGIWPRHRFSLQVNIRKRDNSRKEVQRRISAHQPGPEGQEESTPQSDVTEDGESPEDPSGTEGQLSEEEKPDQQPLSGEEELEPEASDGSGSWEDAALLTEANLPAPAPASASAPVLETLGSSEPAGGALRQRPTCSSS

SEQ ID NO: 794533 - protein, 450 aa, Homo sapiens
MSTEKVDQKEEAGEKEVCGDQIKGPDKEEEPPAAASHGQGWRPGGRAARNARPEPGARHPALPAMVNDPPVPALLWAQEVGQVLAGRARRLLLQFGVLFCTILLLLWVSVFLYGSFYYSYMPTVSHLSPVHFYYRTDCDSSTTSLCSFPVANVSLTKGGRDRVLMYGQPYRVTLELELPESPVNQDLGMFLVTISCYTRGGRIISTSSRSVMLHYRSDLLQMLDTLVFSSLLLFGFAEQKQLLEVELYADYRENSYVPTTGAIIEIHSKRIQLYGAYLRIHAHFTGLRYLLYNFPMTCAFIGVASNFTFLSVIVLFSYMQWVWGGIWPRHRFSLQVNIRKRDNSRKEVQRRISAHQPGPEGQEESTPQSDVTEDGESPEDPSGTEGQLSEEEKPDQQPLSGEEELEPEASDGPHGSSAPCGRIAAFGWNRRPDLGLGVLAPWRYIAFLGT

SEQ ID NO: 794534 - protein, 396 aa, Homo sapiens
MSTEKVDQKEEAGEKEVCGDQIKGPDKEEEPPAAASHGQGWRPGGRAARNARPEPGARHPALPAMVNDPPVPALLWAQEVGQVLAGRARRLLLQFGVLFCTILLLLWVSVFLYGSFYYSYMPTVSHLSPVHFYYRTDCDSSTTSLCSFPVANVSLTKGGRDRVLMYGQPYRVTLELELPESPVNQDLGMFLVTISCYTRGGRIISTSSRSVMLHYRSDLLQMLDTLVFSSLLLFGFAEQKQLLEVELYADYRENSYVPTTGAIIEIHSKRIQLYGAYLRIHAHFTGLRYLLYNFPMTCAFIGVASNFTFLSVIVLFSYMQWVWGGIWPRHRFSLQVNIRKRDNSRKEVQRRISAHQPGPEGQEESTPQSDVTEDGESPEDPSGTGALRQRPTCSSS

SEQ ID NO: 794535 - protein, 324 aa, Homo sapiens
MSTEKVDQKEEAGEKEVCGDQIKGPDKEEEPPAAASHGQGWRPGGRAARNARPEPGARHPALPAMVNDPPVPALLWAQEVGQVLAGRARRLLLQFGVLFCTILLLLWVSVFLYGSFYYSYMPTVSHLSPVHFYYRTDCDSSTTSLCSFPVANVSLTKGGRDRVLMYGQPYRVTLELELPESPVNQDLGMFLVTISCYTRGGRIISTSSRSVMLHYRSDLLQMLDTLVFSSLLLFGFAEQKQLLEVELYADYRENSYVPTTGAIIEIHSKRIQLYGAYLRIHAHFTGLRLTSEKETIPGRKSNEGSLLISQRVSCPRRRNQISSP

SEQ ID NO: 794536 - protein, 436 aa, Homo sapiens
MSTEKVDQKEEAGEKEVCGDQIKGPDKEEEPPAAASHGQGWRPGGRAARNARPEPGARHPALPAMVNDPPVPALLWAQEVGQVLAGRARRLLLQFGVLFCTILLLLWVSVFLYGSFYYSYMPTVSHLSPVHFYYRTDCDSSTTSLCSFPVANVSLTKGGRDRVLMYGQPYRVTLELELPESPVNQDLGMFLVTISCYTRGGRIISTSSRSAEQKQLLEVELYADYRENSYVPTTGAIIEIHSKRIQLYGAYLRIHAHFTGLRYLLYNFPMTCAFIGVASNFTFLSVIVLFSYMQWVWGGIWPRHRFSLQVNIRKRDNSRKEVQRRISAHQPGPEGQEESTPQSDVTEDGESPEDPSGTEGQLSEEEKPDQQPLSGEEELEPEASDGSGSWEDAALLTEANLPAPAPASASAPVLETLGSSEPAGGALRQRPTCSSS

SEQ ID NO: 794537 - protein, 238 aa, Homo sapiens
MSTEKVDQKEEAGEKEVCGDQIKGPDKEEEPPAAASHGQGWRPGGRAARNARPEPGARHPALPAMVNDPPVPALLWAQEVGQVLAGRARRLLLQFGVLFCTILLLLWVSVFLYGSFYYSYMPTVSHLSPVHFYYRTDCDSSTTSLCSFPVANVSLTKGGRDRVLMYGQPYRVTLELELPESPVNQDLGMFLVTISCYTRGGRIISTSSRSVMLHYRSDLLQMLDTLVFSSLLLFGFLC

SEQ ID NO: 794538 - protein, 206 aa, Homo sapiens
MSTEKVDQKEEAGEKEVCGDQIKGPDKEEEPPAAASHGQGWRPGGRAARNARPEPGARHPALPAMVNDPPVPALLWAQEVGQVLAGRARRLLLQFGVLFCTILLLLWVSVFLYGSFYYSYMPTVSHLSPVHFYYRTDCDSSTTSLCSFPVANVSLTKGGRDRVLMYGQPYRVTLELELPESPVNQDLGMFLVTISCYTRGGRSDVH

SEQ ID NO: 794539 - protein, 163 aa, Homo sapiens
MSTEKVDQKEEAGEKEVCGDQIKGPDKEEEPPAAASHGQGWRPGGRAARNARPEPGARHPALPAMVNDPPVPALLWAQEVGQVLAGRARRLLLQFGVLFCTILLLLWVSVFLYGSFYYSYMPTVSHLSPVHFYYRTDCDSSTTSLCSFPVSDSAALGSSRISR

SEQ ID NO: 794540 - protein, 144 aa, Homo sapiens
MAPQKDRKPKRSTWRFNLDLTHPVEDGIFDSGNFGTFPSEYLGFSSLVLHFFCFKKEQFLREKVKVNGKTGNLGNVVHIERFKNKITVVSEKQFSKRYLKYLTKKYLKKNNLRDWLRVVASDKETYELRYFQISQDEDESESED

SEQ ID NO: 794541 - protein, 276 aa, Homo sapiens
AEWERAPGRPGRMRYRASALGSDGVRVTMESALTARDRVGVQDFVLLENFTSEAAFIENLRRRFRENLIYTYIGPVLVSVNPYRDLQIYSRQHMERYRGVSFYEVPPHLFAVADTVYRALRTERRDQAVMISGESGAGKTEATKRLLQFYAETCPAPERGGAVRDRLLQSNPVLEAFGNAKTLRNDNSSRFGKYMDVQFDFKGAPVGGHILSYLLEKSRVVHQNHGERNFHIFYQLLEGGEEETLRRLGLERNPQSYLYLVKGQCAKVSSINDKSD

SEQ ID NO: 794542 - protein, 248 aa, Homo sapiens
MESALTARDRVGVQDFVLLENFTSEAAFIENLRRRFRENLIYTYIGPVLVSVNPYRDLQIYSRQHMERYRGVSFYEVPPHLFAVADTVYRALRTERRDQAVMISGESGAGKTEATKRLLQFYAETCPAPERGGAVRDRLLQSNPVLEAFGNAKTLRNDNSSRFGKYMDVQFDFKGAPVGGHILSYLLEKSRVVHQNHGERNFHIFYQLLEGGEEETLRRLGLERNPQSYLYLVKGQCAKVSSINDKSD

SEQ ID NO: 794543 - protein, 272 aa, Homo sapiens
MIRPPRPPKALGLQALGSDGVRVTMESALTARDRVGVQDFVLLENFTSEAAFIENLRRRFRENLIYTYIGPVLVSVNPYRDLQIYSRQHMERYRGVSFYEVPPHLFAVADTVYRALRTERRDQAVMISGESGAGKTEATKRLLQFYAETCPAPERGGAVRDRLLQSNPVLEAFGNAKTLRNDNSSRFGKYMDVQFDFKGAPVGGHILSYLLEKSRVVHQNHGERNFHIFYQLLEGGEEETLRRLGLERNPQSYLYLVKGQCAKVSSINDKSD

SEQ ID NO: 794544 - protein, 61 aa, Homo sapiens
MVFPALKNDSKGSGAQDVTFLIHITTFRVFIGNEEMLLVRRNRVCKSERTVEAFNTCFPEK

SEQ ID NO: 794545 - protein, 124 aa, Homo sapiens
VPGAAALAPGRFRGAILPNLPTPWASLSLFLVPPHPNNSYSSTRYTGLLTGTFGKCPSPSPLSGATSLSLLPHRCWGVPCLHSQPQSHKYIIYAQASPYAQARRAALLPTADTFGFWRGKGSCS

SEQ ID NO: 794546 - protein, 75 aa, Homo sapiens
MFRWEGKETISVNLMCQVRKPRVLSTGPNFSTKSGSGQPFELSKLTYLHPNLWVSFASGLLTGKSPERLSQYLLF

SEQ ID NO: 794547 - protein, 123 aa, Homo sapiens
LQYSTSNKGRTTRHKTNKETKDSNNTVEQLDLTDIYRTLHLTSAEYTFFSSAHRLCSRIELMLSHKTSLNKFKKIVIIPGIFCDQNGIQPEINSGRKMRRVSNVWKLNNILVRRRKEIIKNTT

SEQ ID NO: 794548 - protein, 128 aa, Homo sapiens
VSLCTAKGIIIRVNRQPTERKKVFANYASNVKNPQGTQTNHQEKHNPIKKRANGPGVVAHACNLSTLGGQGGQIMRSGDRDHPGQHGETPSLLKIQKISRVWWQAPVVPATREAEAREWCEPGRRSLQ

SEQ ID NO: 794549 - protein, 207 aa, Homo sapiens
VNPASRPHYASAIPVPRASSQTRIPTPGASPQLRPRQAGLALSPQRAASPRLGKAAGPSRNSSPRAFRGRGSPKFAGAVRESAEDGEGPFSSPWNSPRTTPKAALSSRAGSGRIGERQGTQGKKKKAQEGTPVCQTRGRSPSRTSFHGETQIPGAPEGRKPPSCPGKDQRDINYKSSGTPRSLEPDEGAASWASSPVCSPVQGKRPS

SEQ ID NO: 794550 - protein, 109 aa, Homo sapiens
MFWEYFGQQTDLLLVTCCQSVYDKTEQAERVYMGAHRMCRGEQTVSLWLERDTKPTSKGSEGQVSPGTPQSGRRRQKHLGWGDVIPWLEGQSLQVGRRGREFSSSSRRP

SEQ ID NO: 794551 - protein, 396 aa, Homo sapiens
IAPEAFPSEDLHNKTLSQQTCKSHVDTEKPYPASIPELASTEMIKVKNHSVLQRTEKKVLPSPLELSVFSEGTDNKGNELPSAKLQDKQYISSVDKAPFSEGSRNKTHKQGSTQSRLETSHTSKSSEPSKSPDGIRNESRDSEISKRKTAEQHSFGICKEKRARIEDDQSTRNISSSSPPEKEQPPREEPRVPPLKIQLSKIGPPFIIKSQPVSKPESRASTSTSVSGGRNTGARTLADIKARAQQARAQREAAAAAAVAAAASIVSGAMGSPGEGGKTRTLAHIKEQTKAKLFAKHQARAHLFQTSKETRLPPPLSSKEGPPNLEVSSTPETKMEGSTGVIIVNPNCRSPSNKSAHLRETTTVLQQSLNPSKLPETATDLSVHSSDENITCVTFI

SEQ ID NO: 794552 - protein, 319 aa, Homo sapiens
MSCERKGLSELRSELYFLIARFLEDGPCQQAAQVLIREVAEKELLPRRTDWTGKEHPRTYQNLVKYYRHLAPDHLLQICHRLGPLLEQEIPQSVPGVQTLLGAGRQSLLRTNKSCKHVVWKGSALAALHCGRPPESPVNYGSPPSIADTLFPRKLNGKYRLERLVTTAVYQHCNCISEFLDTWSSCVLVLTFDTNTGRTDLHRHPHDLVLVPHMGQHARREGSSDNLHTNSKRHTRTGRYTFIIPVHPVKLGEQLDPPRRLNHQMHDMRTHEASGLVAHKDTHMRSEQTDYSPGEAQSVPDPPKTRYTTRHETTSTYLS

SEQ ID NO: 794553 - protein, 138 aa, Homo sapiens
MSCERKGLSELRSELYFLIARFLEDGPCQQAAQVLIREVAEKELLPRRTDWTGKEHPRTYQNLVRHSRRKQRNFSLSRIKIEFPAIFYRDKNLALERESSKGHGEGWEAGAGSAGASGRGYSYFGAAGAADNLFVIFC

SEQ ID NO: 794554 - protein, 304 aa, Homo sapiens
YGVYSSSPVWRWTCSRRSGADTRGGEKELLPRRTDWTGKEHPRTYQNLVKYYRHLAPDHLLQICHRLGPLLEQEIPQSVPGVQTLLGAGRQSLLRTNKSCKHVVWKGSALAALHCGRPPESPVNYGSPPSIADTLFPRKLNGKYRLERLVTTAVYQHCNCISEFLDTWSSCVLVLTFDTNTGRTDLHRHPHDLVLVPHMGQHARREGSSDNLHTNSKRHTRTGRYTFIIPVHPVKLGEQLDPPRRLNHQMHDMRTHEASGLVAHKDTHMRSEQTDYSPGEAQSVPDPPKTRYTTRHETTSTYLS

SEQ ID NO: 794555 - protein, 116 aa, Homo sapiens
HGKPLPHCRDSGLAPGASSSTASSTVLFTVHRMCFPRMQAAAAAGKETTPSSPGCQHWETTGKAPALKGAELDKSSDIVQSSEDFLFFQRLTQKTSSLFSLTTDENRKEGEADFEW

SEQ ID NO: 794556 - protein, 102 aa, Homo sapiens
MFRGSQNGKRCSKGTELLKGVEAALPWVTRGKLETCDIQAVSGRIGHALWQIAPSSSLLLPAPPNSTLGGSTWDHLRGGLVAVTQSQMSAQTWRLQRAGALP

SEQ ID NO: 794557 - protein, 178 aa, Homo sapiens
MERIVHCEGIVSWDNLYREYNTMASTFGPKDILVLPLATDSFFVIGKVTSSLWASVSSFLNNKKIPHGAWLLSPCLHFLQALLVCAQVYLPLPVRSLLCICTCPPFVCSLSDTGLPLFPPTASLNPAMCHNGVELSFWMMWRDLTLMPFPSHQANLASSSTHGISQNAESGREIEHQG

SEQ ID NO: 794558 - protein, 1523 aa, Homo sapiens
MGSGGSVGPLWFDTAYGPHLAWEPLLLGKLRPISSCPHPQWQLEEWPEGEAGIGGLQCHHPQIPAVAPANPWRWGMARQVLHRSPSTRALRRRNLSRDRSGLVVILQKLHSSGLGPPSQVIRPVMFPFGPGRGARPGRETPLGPRGGESELAEASGSRNLQGGDLSCWEFLGLTSCQVKVWAGHKVRLCLLVPGPRKCWDLGSAQRQHRWQNHEGAPARTPFCNPPIPPCSTSPPPGKNLSLDHSSLSHTASFFGENHPEVTVAMALTDIDLQLQFSMSQPEALLLLAAGPADHLLLQLYSGHLQVRLVLGQEELRLQTPAEILLSDSVPHTTVLTVSEDWPTLSVNGFLNASSVVLGAPLEVPYGLFVGSTGRLGLPYLRGTSHPLRGCLHAAALNGRRLLQPLTPNKHEGCAEEFSANDDVALGFSGSHSLAALPAWGTQDEGTLEFTLTTQSWQAPLAFQAAGWHGDFIHVDIFEGHLWSMVEKGQGTVLLLNSVPVTDAQPHKVSIHINIHQLEISMDQYPTRTEESSATWSHVTVSFLGSWLQRPLITSRNTASGLTPGAANASLLGWLHGRPQCQWLEAGAVGSLLTHNMVAGCRLEEVDNAYGHYEAFSTLAPKAWLSVELAEPCVPEPGLPPVFANFIQLLISAVVVTEGGTAWLEWWHVQPMLALMEAELRKSQVLFSVTCGAHYSELELDVLGAQAGKMFTLLDVVNCKARFIHDGPEDTSDQLVLEVSVMAWLPMPSCLRRGQTDLLPIQVNPVNDPPHIIFPHGSLMVILEHTQKPLGPEVLQAYDLDSACEGLAFQLLGTPSGLPVDHRDQPGEPVTEFSCWELEAGSLVYVHCGGPTQDLTFRVSNGLQASPPAMLKVVAVQLAIQIHRSTGLHLAQGSAMPILPTNLLVETSAVGQDVTVLFHVTGGLPFRELQKQGAGGVEDAEWWVTQAFHQQDVEQGHVRYRSTDPQHYTEDTVENLDLQVQVSWEILSNLSFLVTIQRATVWMLQLEPLHTQNTQQEALTTAHLEATLEEAGPSPPTFHCEVVQAPRKGNFQLQGTMLSDGQGFTQDDVQAAEVTYGAMARASVAVEDTFCFHVTAPPYFSPLCTFSIHIGGDPDMPVLTNVLVVPEGGGCVLSADQLFVKSLNSARYLYEVMEQPCHGRFLAWDTGQDHYGDILHQWRPVAWPAGLQHDDSEITEDDMPFAAAARTRAVVTWPGRRYGAIQPVNDHAPVQSISCVFHVAWGRWQLLTTDNMAFSNADSGFVDAQLVLTHKDLLSGSIMATDEPMQPICCFIQEGPQEEASPVHALRLTTAGSCCRCPTGSTRPSWCWRCRPWSLTSVWPFSLATMAASAPATPWPSQWMWGLLMDVGPVHTDATLQVTIALEGPLAPLKLAWHKKIYIFQGEAAEIRRDQLETTEFIISEPLANMYSRGNQNTLMEEWAEEAQWHDEMLRMHHVLKEALSIISDTTRTTVSMPMPLPADDTWVQVQSISEEQRCQGLPPTAPKYPPPGPHRGMPLHRGGSHLE

SEQ ID NO: 794559 - protein, 52 aa, Homo sapiens
MWLKGSDVYLSVAGRSDNTGRERELGLSRHRKQHMRSPELHLVQNLAAWASG

SEQ ID NO: 794560 - protein, 123 aa, Homo sapiens
MLVVQQLILFLLSLMWKLSPGTEPAPWVQTLPQPLLEFWALGTALDLSEQVHFFIHKTGLEWPPPHGNVAWIKYGNALTEGAAGVVHYSNTEKRIVRHQHVLELSRRGMKQVVELVASLPNAT

SEQ ID NO: 794561 - protein, 37 aa, Homo sapiens
MAVVATLRLSAQVIVVPSMPSGHLIITQKPVVLQGRV

SEQ ID NO: 794562 - protein, 271 aa, Homo sapiens
METNCRKLVSACVQLEKDKSQQGKNEDVGAEDPSKKKRQRRQRTHFTSQQLQELEATFQRNRYPDMSTREEIAVWTNLTEARVRVWFKNRRAKWRKRERNQQAELCKNGFGPQFNGLMQPYDDMYPGYSYNNWAAKGLTSASLSTKSFPFFNSMNVNPLSSQSMFSPPNSISSMSMSSSMVPSAVTGVPGSSLNSLNNLNNLSSPSLNSAVPTPACPYAPPTPPYVYRDTCNSSLASLRLKAKQHSSFGYASVQNPASNLSACQYAVDRPV

SEQ ID NO: 794563 - protein, 317 aa, Homo sapiens
METNCRKLVSACVQLGVQPAAVECLFSKDSEIKKVEFTDSPESRKEAASSKFFPRQHPGANEKDKSQQGKNEDVGAEDPSKKKRQRRQRTHFTSQQLQELEATFQRNRYPDMSTREEIAVWTNLTEARVRVWFKNRRAKWRKRERNQQAELCKNGFGPQFNGLMQPYDDMYPGYSYNNWAAKGLTSASLSTKSFPFFNSMNVNPLSSQSMFSPPNSISSMSMSSSMVPSAVTGVPGSSLNSLNNLNNLSSPSLNSAVPTPACPYAPPTPPYVYRDTCNSSLASLRLKAKQHSSFGYASVQNPASNLSACQYAVDRPV

SEQ ID NO: 794564 - protein, 107 aa, Homo sapiens
STWICQCSLGAPTGQALGEVLGHKSTSSNACLNPLPWRPHPSCSMSGLWPLGEVKQLARGQRLPEGLQLQEHWQIQVDEAVKRKLVSPPLITSLGQGYSWCYLAPFS

SEQ ID NO: 794565 - protein, 116 aa, Homo sapiens
  misc_feature (85)..(85): Xaa can be any naturally occurring amino acid
MQGEQNISSRTAEGTRYLCPWKELRGKFICCIFARLMFAKQGTLPTFPQNQSEGDSTLFPSPPLKQLSNHVEQTAVCQLVEAKQXIIWNSDQQNGICSHTMIKTYLRPHYLWGKEV

SEQ ID NO: 794566 - protein, 175 aa, Homo sapiens
TYVKYPTPCPTYVKCPASLPDQPNVKCPTPCQTYVKCPAPCQMTYIKSPAPCQTQTCYVQGASPCQSYYVQAPASGSTSQYCVTDPCSAPCSTSYCCLAPRTFGVSPLRRWIQRPQNCNTGSSGCCENSGSSGCCGSGGCGCSCGCGSSGCCCLGIIPMRSRGPACCDHEDDCCC

SEQ ID NO: 794567 - protein, 198 aa, Homo sapiens
MELPDPVRQRLGNFSRAVFSDSNRTSPESNEGPENEMVSSLALQMSLYFNTYYFPLWWVSSIMMLHMKYSILPDYYKFIVITVIILITLIEAIRLYLGYVGNLQEKVPELAGFWLLSLLLQLPLILFLLFNEGLTNLPLEKAIHIIFTLFLAFQVVAAFLTLRKMVNQLAVRFHLQDFDRLSANRGDMRRMRSCIEEI

SEQ ID NO: 794568 - protein, 69 aa, Homo sapiens
KLCSVLVLTSGPGRVVLVSSPDRFPCRQVARRVFCSQSAVLLLKVSATVSVYHAGLLLVHPGSGLFASS

SEQ ID NO: 794569 - protein, 88 aa, Homo sapiens
MTVACSVYVCGVVELPRFVVLLCVCVLYRAVVKSDTITLQNIVFIHSKFIEKSHAIILKLCDYFTKLDLQKRTISYPKSCYGYMQHVL

SEQ ID NO: 794570 - protein, 131 aa, Homo sapiens
ESFARSLIQRNVLMRRDIPNLTKYQIILARDQFRKNPSPNIVGIQQGIIEGEFAICISLYHGYELLQQMGMRSLYFFLCGIMDGTKGMTRSKNELGRNEDFMKLYNHLECMFARTRSTSANGISAIQQGLV

SEQ ID NO: 794571 - protein, 333 aa, Homo sapiens
MAVRGANTLTSFSIQAILNKKEERGGLAAPEGRPAPGGTAASVAAAPAVCCWRLFGERDAGALGGAEDSLLASPAGTRTAAGRTAESPEGWDSDSALSEENESRRRCADARGASGAGLAGGSLSLGQPVCELAASKDLEEEAAGRSDSEMSASVSGDRSPRTEDDGVGPRGAHVSALCSGAGGGGGSGPAGVAEEEEEPAAPKPRKKRSRAAFSHAQVFELERRFNHQRYLSGPERADLAASLKLTETQVKIWFQNRRYKTKRRQMAADLLASAPAAKKVAVKVLVRDDQRQYLPGEVLRPPSLLPLQPSYYYPYYCLPGWALSTCAAAAGTQ

SEQ ID NO: 794572 - protein, 67 aa, Homo sapiens
EWRRRVISTAAKLSHAIFPDSTLIMMKEQDFFFPVFTEEARGGGKGGGSERDVSCQGTECKAAVTAK

SEQ ID NO: 794573 - protein, 1158 aa, Homo sapiens
MTHGEELGSDVHQDSIVLTYLEGLLMHQAAGGSGTAVDKKSAGHNEEDQNFNISGSAFPTCQSNGPVLNTHTYQGSGMLHLKKARLLQSSEDWNAAKRKRLSDSIMNLNVKKEALLAGMVDSVPKGKQDSTLLASLLQSFSSRLQTVALSQQIRQSLKEQGYALSHDSLKVEKDLRCYGVASSHLKTLLKKSKVKDQKPDTNLPDVTKNLIRDRFAESPHHVGQSGTKVMSEPLSCAARLQAVASMVEKRASPATSPKPSVACSQLALLLSSEAHLQQYSREHALKTQNANQAASERLAAMARLQENGQKDVGSYQLPKGMSSHLNGQARTSSSKLMASKSSATVFQNPMGIIPSSPKNAGYKNSLERNNIKQAANNSLLLHLLKSQTIPKPMNGHSHSERGSIFEESSTPTTIDEYSDNNPSFTDDSSGDESSYSNCVPIDLSCKHRTEKSESDQPVSLDNFTQSLLNTWDPKVPDVDIKEDQDTSKNSKLNSHQKVTLLQLLLGHKNEENVEKNTSPQGVHNDVSKFNTQNYARTSVIESPSTNRTTPVSTPPLLTSSKAGSPINLSQHSLVIKWNSPPYVCSTQSEKLTNTASNHSMDLTKSKDPPGEKPAQNEGAQNSATFSASKLLQNLAQCGMQSSMSVEEQRPSKQLLTGNTDKPIGMIDRLNSPLLSNKTNAVEENKAFSSQPTGPEPGLSGSEIENLLERRTVLQLLLGNPNKGKSEKKEKTPLRDESTQEHSERALSEQILMVKIKSEPCDDLQIPNTNVHLSHDAKSAPFLGMAPAVQRSAPALPVSEDFKSEPVSPQDFSFSKNGLLSRLLRQNQDSYLADDSDRSHRNNEMALLESKNLCMVPKKRKLYTEPLENPFKKMKNNIVDAANNHSAPEVLYGSLLNQEELKFSRNDLEFKYPAGHGSASESEHRSWARESKSFNVLKQLLLSENCVRDLSPHRSNSVADSKKKGHKNNVTNSKPEFSISSLNGLMYSSTQPSSCMDNRTFSYPGVVKTPVSPTFPEHLGCAGSRPESGLLNGCSMPSEKGPIKWVITDAEKNEYEKDSPRLTKTNPILYYMLQKGGNSVTSRETQDKDIWREASSAESVSQVTAKEELLPTAETKASFFNLRSPYNSHMGNNASRPHSANGEVYGLLGSVLTIKKESE

SEQ ID NO: 794574 - protein, 1158 aa, Homo sapiens; identical to SEQ ID NO: 794573

SEQ ID NO: 794575 - protein, 1158 aa, Homo sapiens; identical to SEQ ID NO: 794573

SEQ ID NO: 794576 - protein, 1158 aa, Homo sapiens; identical to SEQ ID NO: 794573

SEQ ID NO: 794577 - protein, 95 aa, Homo sapiens
FHGPLAMPRGSTGFLLVLMSCGVNSRRLLRTEAETGDQDGIVWLQEATQSQEAASKRPTWPAWGCAWLSSMWSFELYMFHWDAYRKVDRRCGKSF

SEQ ID NO: 794578 - protein, 56 aa, Homo sapiens
MYHICVHEGPGCRTGGRRVSEETALEADSTVLRVKFRLSICSVALGLDSQVEWECK

SEQ ID NO: 794579 - protein, 196 aa, Homo sapiens
KPASTYSTSQPSMAPLLPIRTLPLILILLALLSPGAADFNISSLSGLLSPALTESLLVALPPCHLTGGNATLMVRRANDSKVVTSSFVVPPCRGRRELVSVVDSGAGFTVTRLSAYQVTNLVPGTKFYISYLVKKGTATESSREIPMSTLPRRNMESIGLGMARTGGMVVITVLLSVAMFLLVLGFIIALALGSRK

SEQ ID NO: 794580 - protein, 154 aa, Homo sapiens
SNWISLLAPLLAWHDFRLAPSPPLTSRGLGGPHARPELDAMTSIFQPQVSRIEVPPLPNGPTFDFNISSLSGLLSPALTESLLVALPPCHLTGGNATLMVRRANDSKVVTSSFVVPPCRGRRELVSVVDSGAGFTVTRLSAYQHFLPSEEGDSH

SEQ ID NO: 794581 - protein, 174 aa, Homo sapiens
KTDKSSLNLPEVDSDVAKPNQACISTVTAEDLLRSSISFPSGKKIGVLSLESLHASTRSSARQALGITIVRQPGRRGTGDLQLEPFLYFIVSQPSLLLSCHHRKQRVEVSIFDAVLKGVASDYKCIGKNLQTYWSANNYYLISCIPIVSRLIKQKQLADKSLFSTEYGKFMFHS

SEQ ID NO: 794582 - protein, 160 aa, Homo sapiens
KTDKSSLNLPEVDSDVAKPNQACISTVTAEDLLRSSISFPSGKKIGVLSLESLHASTRSSARQALGITIVRQPGRRGTGDLQLEPFLYFIVSQPSLLLSCHHRKQRVEVSIFDAVLKGVASDYKCIDPGKTLPEALDYCTVWLQTVPGEIDSKSGIPPSF

SEQ ID NO: 794583 - protein, 120 aa, Homo sapiens
MACWEKMKQWWRYCRTGKTGTFQKLKYIIKISRFSKSVLNSYCLSACGNSVGLFKLQLEFKLPRSHTLPSVRSMIYVCVTSRAYCRAIGSLERKYKYTPCPCDIHIPPQNLLSVSFKHLC

SEQ ID NO: 794584 - protein, 152 aa, Homo sapiens
FLQAPLWSTLPGKHSLWHMSSQDSTSLPPSWKPPVCCRGFPSLLHTLVRTRQSLLKDIDAVPQCHMLAASCLVLLEPHLHANPSLGHRMEPSARLPGASGAHHLLRDVCWCLCVPPLRMPAPSRQGLPNSVPDCDPGTQSSARHTAGAQETC

SEQ ID NO: 794585 - protein, 103 aa, Homo sapiens
LAPPSALRTRIPPNLNARLSGPEGLEGRGNDAALQSWTPWRAAATAGCSLPPEVLPFPAEALHSGRPRRSDVSLYPEFSAGGKTTCTRGGSGFAGRAHGSAPC

SEQ ID NO: 794586 - protein, 103 aa, Homo sapiens
PRVGSTAPKRGTRNRTKTSPAPKAEGTKKGEWSMKDFDGGDGLISGSGSHGTSFRTLKGVDRTGGIWGPWVFKAAVFDGTLSGEALGPGAMRPFGDRFSGAVT

SEQ ID NO: 794587 - protein, 75 aa, Homo sapiens
VHSAEARAGSRGNGFSESGRCSPKDTSPMEMVCRNGRMAGVNCGETRLRHPPLKRGMGTGQERGTGMCGEDTFIQ

SEQ ID NO: 794588 - protein, 81 aa, Homo sapiens
GGRRSSSSKRQRWRAGPAVSVTVLPEGHQPNGDGLQEWPDGRRELWRDAAASPTAQERDGDRAGARHRDVRGRHIHSVNVS

SEQ ID NO: 794589 - protein, 101 aa, Homo sapiens
TTTKFAAASTAGGSSRFTSSSSRKSHFQLDVWMNYWKLLSVLQQLDYHTNESTQMLASGAESQDRYRNTPSSRIFTPGFRPTPATTPEPGIYMFNMEPSQP

SEQ ID NO: 794590 - protein, 141 aa, Homo sapiens
ETVFGKRGHVLGNGSQVTQAANSGCSKAIGALASSRRSSSEGLSKGKKAANGLEADNSCPNSKAPVLSKYPYSCRSQENILQGFSTSHKEGVNQPAAVVMEDSSPHEALRCRVIKSSGREKPDSDDDLDIASLVTAKLVNT

SEQ ID NO: 794591 - protein, 91 aa, Homo sapiens
PPGRPHQLPARLWDLIASVLGCVQESGAQWVGMAVPGVLDGHPAPIIPEIRLHLHLGAGPVTASSRALWRAPWDNRAGLAGESPGAIPEGS

SEQ ID NO: 794592 - protein, 115 aa, Homo sapiens
CFPDLLTARDLDPASQRHSREMGSCAGGICPAVQCSGTTSFGANSPDIDFLSLRRQPRQCIPGINALNSSFPILGQSDVTQSQRLGQRILQPQIAAEFTVPWGGLILQGCFLCHF

SEQ ID NO: 794593 - protein, 106 aa, Homo sapiens [sequence omitted]

SEQ ID NO: 794594 - protein, 473 aa, Homo sapiens
LSKVPRPLLHFSRLTLEEELFGNNEESPAFKEFLDLLGDTITLQDFKGFRGGLDVTHGQTGVESVYTTFRDREIMFHVSTKLPFTDGDAQQLQRKRHIGNDIVAIIFQEENTPFVPDMIASNFLHAYIVVQVETPGTETPSYKVSVTAREDVPTFGPPLPSPPVFQKGPEFREFLLTKLTNAENACCKSDKFAKLEDRTRAALLDNLHDELHAHTQAMLGLGPEEDKFENGGHGGFLESFKRAIRVRSHSMETMVGGQKKSHSGGIPGSLSGGISHNSMEVTKTTFSPPVVAATVKNQSRSPIKRRSGLFPRLHTGSEGQGDSRARCDSTSSTPKTPDGGHSSQEIKSETSSNPSSPEICPNKEKPFMKLKENGRAISRSSSSTSSVSSTAGEGEAMEEGDSGGSQPSTTSPFKQEVFVYSPSPSSESPSLGAAATPIIMSRSPTDAKSRNSPRSNLKFRFDKLSHASSGAGH

SEQ ID NO: 794595 - protein, 407 aa, Homo sapiens
APGIHVHGSGRTSGWRGAVGSWVRGCGAGAEGRAGIHSSFCSSTTRVELWQWWDDPGRRAGGVEQEAEHAAFILAAAFVSTKLSSAVGPHRCWAGLGRMSASRPGVWSSQGAGTSLLSEPASPSPPSSLLDRTRAALLDNLHDELHAHTQAMLGLGPEEDKFENGGHGGFLESFKRAIRVRSHSMETMVGGQKKSHSGGIPGSLSGGISHNSMEVTKTTFSPPVVAATVKNQSRSPIKRRSGLFPRLHTGSEGQGDSRARCDSTSSTPKTPDGGHSSQEIKSETSSNPSSPEICPNKEKPFMKLKENGRAISRSSSSTSSVSSTAGEGEAMEEGDSGGSQPSTTSPFKQEVFVYSPSPSSESPSLGAAATPIIMSRSPTDAKSRNSPRSNLKFRFDKLSHASSGAGH

SEQ ID NO: 794596 - protein, 211 aa, Homo sapiens
LSKVPRPLLHFSRLTLEEELFGNNEESPAFKEFLDLLGDTITLQDFKGFRGGLDVTHGQTGVESVYTTFRDREIMFHVSTKLPFTDGDAQQLQRKRHIGNDIVAIIFQEENTPFVPDMIASNFLHAYIVVQVETPGTETPSYKVSVTAREDVPTFGPPLPSPPVFQKCAWVRTQAHFWELLMNVKRGTYLPQTYIIQEEMVSRSMSVTRRR

SEQ ID NO: 794597 - protein, 178 aa, Homo sapiens
LSKVPRPLLHFSRLTLEEELFGNNEESPAFKEFLDLLGDTITLQDFKGFRGGLDVTHGQTGVESVYTTFRDREIMFHVSTKLPFTDGDAQQLQRKRHIGNDIVAIIFQEENTPFVPDMIASNFLHAYIVVQVETPGTETPSYKVSVTAREDVPTFGPPLPSPPVFQKCAWVRGVLYSD

SEQ ID NO: 794598 - protein, 804 aa, Homo sapiens
EFESSSESSPSSSEDEEEVVAREEEEEEEEEEMVAEESMASAGPEDFEQDGEEAALAPGAPAVDSLGMEEEVDIETEAVAPEERPSMLDEPPLPVGVEEPADSREPPEEPGLSQEGAMLLSPEPPAKEVEARPPLSPERAPEHDLEVEPEPPMMLPLPLQPPLPPPRPPRPPSPPPEPETTDASHPSVPPEPLAEDHPPHTPGLCGSLAKSQSTETVPATPGGEPPLSGGSSGLSLSSPQVPGSPFSYPAPSPSLSSGGLPRTPGRDFSFTPTFSEPSGPLLLPVCPLPTGRRDERSGPLASPVLLETGLPLPLPLPLPLPLALPAVLRAQARAPTPLPPLLPAPLASCPPPMKRKPGRPRRSPPSMLSLDGPLVRPPAGAALGRELLLLPGQPQTPVFPSTHDPRTVTLDFRNAGIPAPPPPLPPQPPPPPPPPPVEPTKLPFKELDNQWPSEAIPPGPRGRDEVTEEYMELAKSRGPWRRPPKKRHEDLVPPAGSPELSPPQPLFRPRSEFEEMTILYDIWNGGIDEEDIRFLCVTYERLLQQDNGMDWLNDTLWVYHPSTSLSSAKKKKRDDGIREHVTGCARSEGFYTIDKKDKLRYLNSSRASTDEPPADTQGMSIPAQPHASTRAGSERRSEQRRLLSSFTGSCDSDLLKFNQLKFRKKKLKFCKSHIHDWGLFAMEPIAADEMVIEYVGQNIRQVIADMREKRYEDEGIGSSYMFRVDHDTIIDATKCGNFARFINHSCNPNCYAKVITVESQKKIVIYSKQHINVNEEITYDYKFPIEDVKIPCLCGSENCRGTLN

SEQ ID NO: 794599 - protein, 822 aa, Homo sapiens
RTSADMRDQDTGKENEMDWDDSALTITVNPMETYEDQHSSEEEEEEEEEEMVAEESMASAGPEDFEQDGEEAALAPGAPAVDSLGMEEEVDIETEAVAPEERPSMLDEPPLPVGVEEPADSREPPEEPGLSQEGAMLLSPEPPAKEVEARPPLSPERAPEHDLEVEPEPPMMLPLPLQPPLPPPRPPRPPSPPPEPETTDASHPSVPPEPLAEDHPPHTPGLCGSLAKSQSTETVPATPGGEPPLSGGSSGLSLSSPQVPGSPFSYPAPSPSLSSGGLPRTPGRDFSFTPTFSEPSGPLLLPVCPLPTGRRDERSGPLASPVLLETGLPLPLPLPLPLPLALPAVLRAQARAPTPLPPLLPAPLASCPPPMKRKPGRPRRSPPSMLSLDGPLVRPPAGAALGRELLLLPGQPQTPVFPSTHDPRTVTLDFRNAGIPAPPPPLPPQPPPPPPPPPVEPTKLPFKELDNQWPSEAIPPGPRGRDEVTEEYMELAKSRGPWRRPPKKRHEDLVPPAGSPELSPPQPLFRPRSEFEEMTILYDIWNGGIDEEDIRFLCVTYERLLQQDNGMDWLNDTLWVYHPSTSLSSAKKKKRDDGIREHVTGCARSEGFYTIDKKDKLRYLNSSRASTDEPPADTQGMSIPAQPHASTRAGSERRSEQRRLLSSFTGSCDSDLLKFNQLKFRKKKLKFCKSHIHDWGLFAMEPIAADEMVIEYVGQNIRQVIADMREKRYEDEGIGSSYMFRVDHDTIIDATKCGNFARFINHSCNPNCYAKVITVESQKKIVIYSKQHINVNEEITYDYKFPIEDVKIPCLCGSENCRGTLN

SEQ ID NO: 794600 - protein, 188 aa, Homo sapiens
RRDSRRHVTSSQPPLPATQIRPRNPCPAGRAGGHVAGAPVPAAPWCMYLWRSSPLGSLITGNNQRFRDHPGENEHTRPQTSSSAAVISGTAIPAAAGKFSWPRDAVSPKDTWIATFGPSDNVFMYLKSFKERIASCFFSRQPLHPAPRSPSRPLITQSVEKQKATFTFLHRNNGRTQGVAFWSQGSSG

SEQ ID NO: 794601 - protein, 219 aa, Homo sapiens
RRDSRRHVTSSQPPLPATQIRPRNPCPAGRAGGHVAGAPVPAAPWCMYLWRSSPLGSLITGNNQRFRDHPGENEHTRPQTSSSAAVISGTAIPAAAGKFSWPRDAVSPKDTWIATFGPSDNVFMYLKSFKERIASCFFSRQPLHPAPRSPSRPLISEQTSLQNFLWDSSLPTANSLFTSFLWFKPTAQSVEKQKATFTFLHRNNGRTQGVAFWSQGSSG

SEQ ID NO: 794602 - protein, 91 aa, Homo sapiens
VEGAGFSIDRLAEFSKEDDEYEAFRKKMMLAYRFRPNPLNIPDGLTTERSGNTYFLNDHPSLDCGMFRPAFLPPPSVVTSAMPCNKVPVFF

SEQ ID NO: 794603 - protein, 104 aa, Homo sapiens
RLECSGACNLGSPQPPPPGFKQFSYLILPSTWDYRHVPPHPANFLFFVEMGFLHVGHAGLELLTSSIHPTTPRLPKWWNYRHEPPCPAQLCFFSIYVSMTPKFV

SEQ ID NO: 794604 - protein, 108 aa, Homo sapiens
KKCLRMTDVAGWLCQRWGGMPSERDAGQSAACDISSRSSVMALVVHDMLCTFFLDPKYFIIIVFKNKVSGWARWLTLVIPALWEAEAGGSRGQEIETILANMVKPRLY

SEQ ID NO: 794605 - protein, 104 aa, Homo sapiens [sequence omitted]

SEQ ID NO: 794606 - protein, 97 aa, Homo sapiens
MHIYQAALFRIVPSGNNTNILRLLNGRRPCEAFTRRHCKASMRQPALRSQGTGLWQTRHRGGISTAEWTETLRGLHETASTWESRQRPLSDMPPWGN

SEQ ID NO: 794607 - protein, 221 aa, Homo sapiens
ARRPHREPGGNMAAPGGRGRSLSGLLPAQTSLEYALLDAVTQQEKDSLVYQYLQKVDGWEQDLSVPEFPEGLEWLNTEEPISVYKDLCGKIVVLDFFTYCCINCIHLLPDLHALEHTYSDKDGLLIIGVHSAKFPNEKVLDNIKSAVLRYNITHPMVNDADASLWQELEVSCWPTLVILGPRGNMLFSLIGEGHKDKLFLYTSIALKFYKDRGRSEIIKLG

SEQ ID NO: 794608 - protein, 129 aa, Homo sapiens
ARRPHREPGGNMAAPGGRGRSLSGLLPAQTSLEYALLDAVTQQEKDSLVYQYLQKVDGWEQDLSVPEFPEGLEWLNTEEPISVYKDLCGKIVVLDFFTYCCINCIHLLPDLHALEHTYSDKGICSLISF

SEQ ID NO: 794609 - protein, 538 aa, Homo sapiens
GAAAGKPGHCWLQQDIPGTAPRALSRHPSPLTHLQMLSQLAMLQGSLLLVVATMSVAQQTRQEADRGCETLVVQHGHCSYTFLLPKSEPCPPGPEVSRDSNTLQRESLANPLHLGKLPTQQVKQLEQALQNNTQWLKKLERAIKTILRSKLEQVQQQMAQNQTAPMLELGTSLLNQTTAQIRKLTDMEAQLLNQTSRMDAQMPETFLSTNKLENQLLLQRQKLQQLQGQNSALEKRLQALETKQQEELASILSKKAKLLNTLSRQSAALTNIERGLRGVRHNSSLLQDQQHSLRQLLVLLRHLVQERANASAPAFIMAGEQVFQDCAEIQRSGASASGVYTIQVSNATKPRKVFCDLQSSGGRWTLIQRRENGTVNFQRNWKDYKQGFGDPAGEHWLGNEVVHQLTRRAAYSLRVELQDWEGHEAYAQYEHFHLGSENQLYRLSVVGYSGSAGRQSSLVLQNTSFSTLDSDNDHCLCKCAQVMSGGWWFDACGLSNLNGVYYHAPDNKYKMDGIRWHYFKGPSYSLRASRMMIRPLDI

SEQ ID NO: 794610 - protein, 491 aa, Homo sapiens
GAAAGKPGHCWLQQDIPGTAPRALSRHPSPLTHLQMLSQLAMLQGSLLLVVATMSVAQQTRQEADRGCETLVVQHGHCSYTFLLPKSEPCPPGPEVSRDSNTLQRESLANPLHLGKLPTQQVKQLEQALQNNTQWLKKLERAIKTILRSKLEQVQQQMAQNQTAPMLELGTSLLNQTTAQIRKLTDMEAQLLNQTSRMDAQMPETFLSTNKLENQLLLQRQKLQQLQGQNSALEKRLQALETKQQEELASILSKKAKLLNTLSRQSAALTNIERGLRGVRHNSSLLQDQQHSLRQLLVLLRHLVQERANASAPAFIMAGEQVFQDCAEIQRSGASASGVYTIQVSNATKPRKVFCDLQSSGGRWTLIQRRENGTVNFQRNWKDYKQGFGDPAGEHWLGNEVVHQLTRRAAYSLRVELQDWEGHEAYAQYEHFHLGSENQLYRLSVVGYSGSAGRQSSLVLQNTSFSTLDSDNDHCLCKCAQVMSGGRCRVG

SEQ ID NO: 794611 - protein, 103 aa, Homo sapiens
GTPQGSVTQASFCGVPAASWERGEKSKAGPHQTHRGNPHKKQWLSQAWGRLVERCIVPGRRGHRVLAECEESTQEASGRTSPLTAQYTCEHRCHRLPGRGVRT

SEQ ID NO: 794612 - protein, 375 aa, Homo sapiens [sequence omitted]

SEQ ID NO: 794613 - protein, 82 aa, Homo sapiens
YRLPLDTNLQLKLTTLTSEHAELSCSGSPATLVKLTCFQTKHFNSWHGRGDLGKQCWKRMERREEEEGRMKRASLAQRQDIW

SEQ ID NO: 794614 - protein, 149 aa, Homo sapiens
RSLPPPAPFSPRLARKAGNVEREQRTPRPTAIGDSVPPYSRPGAGCPPTRAESRELFQKRIPNPRQTRGEASVPDSKNGESRALLPAGHPRPRRPNPGPPKPFEQKTLVPPSLPHPRQCSKGAPASALSEATGARSRPPTQLGNHGSAG

SEQ ID NO: 794615 - protein, 113 aa, Homo sapiens
NSQYYRCTPPRSPNFFFQFLTEMWFLFIARSGLKFLSSNNPPASASQSAEITGLTHCTQHFVFYEMGSFPLSPKLECSGTAIAHFNFKLLASSNPPALGSIDAGVTGMSHHAP

SEQ ID NO: 794616 - protein, 47 aa, Homo sapiens
GRAPWWGGDGFAYQNGLGIRYSAGSLAPGLFRTALSVASRIQRREAE

SEQ ID NO: 794617 - protein, 105 aa, Homo sapiens
MAPTFLCVKAQVLPAVHKALHTLPCPFPALPSSLSPPRSLFWSHTGHPPCSSNTQVQSCLGALARAVPSSQENPLLPNIHTACSLSSFKSLLKCHQCLNFTMRSL

SEQ ID NO: 794618 - protein, 142 aa, Homo sapiens
STKMVELGLRGTKGAHIPMRNIQDVEAPCWSPMRCFCFTFGALQQGHLLQVDQLTSKDTFKCSGAMDSMCSLKFICWKLISKVTVLEYGPFGRLQPHEWINVNYKKGLWESVHSQVLLPYPFQCWGHSKAPSWNQRPNLLAP

SEQ ID NO: 794619 - protein, 116 aa, Homo sapiens
DNNLAGQLTDACEVPTSCQTHSKPPTETPYLDMGGVPQGGPANLCGPNSHSSPTHWPSTYYSPKMPLCTFQTQHFTCGFPPCHNTPPNIPDEGFPNPCKMGLKNPSFTKCALHHIL

SEQ ID NO: 794620 - protein, 1546 aa, Homo sapiens [sequence omitted]

SEQ ID NO: 794621 - protein, 118 aa, Homo sapiens
PTTAPQPPPTWPPASLSAESLPLPRGERSLQSGPGKAIFQSPTANTNTAEANFTDFHFEALPLSQNPSAREISSLETGKNKGDVKAARTSQSNMPATGTWTFISSPSTLQSCSCGVER

SEQ ID NO: 794622 - protein, 135 aa, Homo sapiens
MAWGRYCGHRKLPGTSVGDVGETGCGGRLERRKGAEEGTPALLASPRETRTPKAHGLPLLGLRFVGEQRAERAIGFDYLKLNEAAQVLGRKQPRRHKDASGICPLIIRSSCETYLSAARTLERPRGCPCPFRRGR

SEQ ID NO: 794623 - protein, 67 aa, Homo sapiens
AGPLAMGHGGLSPELQTDGCPGEGAGFSMDADKAGPDCRVPPVEMMAVVFLRVREPCGLHCDGWFMA

SEQ ID NO: 794624 - protein, 78 aa, Homo sapiens
  misc_feature (5)..(5): Xaa can be any naturally occurring amino acid
  misc_feature (14)..(14): Xaa can be any naturally occurring amino acid
  misc_feature (16)..(16): Xaa can be any naturally occurring amino acid
  misc_feature (22)..(23): Xaa can be any naturally occurring amino acid
  misc_feature (27)..(27): Xaa can be any naturally occurring amino acid
  misc_feature (33)..(33): Xaa can be any naturally occurring amino acid
  misc_feature (42)..(42): Xaa can be any naturally occurring amino acid
  misc_feature (47)..(47): Xaa can be any naturally occurring amino acid
  misc_feature (53)..(53): Xaa can be any naturally occurring amino acid
GWGRXQFHTGTVDXVXPSFIGXXIGKXGTLQVXSGFRVDIIXSRSRXSGSAIXKQAVGVAAGLAARGTAERKGQKRLG

SEQ ID NO: 794625 - protein, 100 aa, Homo sapiens
PEARSNCIRVISYHGEGFSKSGPVAQWITRLTTDQKILEAHGNKAMTALEGDQTSSIIPSATQDSTAEPQRTQLKEVFTRALTTEKWEVPSCCHTQPMAG

SEQ ID NO: 794626 - protein, 113 aa, Homo sapiens [sequence omitted]

SEQ ID NO: 794627 - protein, 131 aa, Homo sapiens
MFACSKFVSTPSLVKSTSQLLSRPLSAVVLKRPEILTDESLSSLAVSCPLTSLVSSRSFQTSAISRDIDTAAKFIGAGAATVGVAGSGAGIGTVFGSLIIGYAREPFSEATALLLRHSWALPSRRPWGSFV

SEQ ID NO: 794628 - protein, 131 aa, Homo sapiens; identical to SEQ ID NO: 794627

SEQ ID NO: 794629 - protein, 163 aa, Homo sapiens
FAGRVDYGCEIDDQKGLCSGSSSPATAPHPLKMFACSKFVSTPSLVKSTSQLLSRPLSAVVLKRPEILTDESLSSLAVSCPLTSLVSSRSFQTSAISRDIDTAAKFIGAGAATVGVAGSGAGIGTVFGSLIIGYAREPFSEATALLLRHSWALPSRRPWGSFV

SEQ ID NO: 794630 - protein, 131 aa, Homo sapiens; identical to SEQ ID NO: 794627

SEQ ID NO: 794631 - protein, 131 aa, Homo sapiens; identical to SEQ ID NO: 794627

SEQ ID NO: 794632 - protein, 131 aa, Homo sapiens; identical to SEQ ID NO: 794627

SEQ ID NO: 794633 - protein, 163 aa, Homo sapiens; identical to SEQ ID NO: 794629

SEQ ID NO: 794634 - protein, 121 aa, Homo sapiens
MFACSKFVSTPSLVKSTSQLLSRPLSAVVLKRPEILTDESLSSLAVSCPLTSLVSSRSFQTSAISRDIDTAAKFIGAGAATVGVAGSGAGIGTVFGSLIIGYARASISLCCPGWTRTPELK

SEQ ID NO: 794635 - protein, 188 aa, Homo sapiens
MPELILYVAITLSVAERLVGPGHACAEPSFRSSRCSAPLCLLCSGSSSPATAPHPLKMFACSKFVSTPSLVKSTSQLLSRPLSAVVLKRPEILTDESLSSLAVSCPLTSLVSSRSFQTSAISRDIDTAAKFIGAGAATVGVAGSGAGIGTVFGSLIIGYAREPFSEATALLLRHSWALPSRRPWGSFV

SEQ ID NO: 794636 - protein, 147 aa, Homo sapiens
MPELILSPATAPHPLKMFACSKFVSTPSLVKSTSQLLSRPLSAVVLKRPEILTDESLSSLAVSCPLTSLVSSRSFQTSAISRDIDTAAKFIGAGAATVGVAGSGAGIGTVFGSLIIGYAREPFSEATALLLRHSWALPSRRPWGSFV

SEQ ID NO: 794637 - protein, 131 aa, Homo sapiens; identical to SEQ ID NO: 794627

SEQ ID NO: 794638 - protein, 151 aa, Homo sapiens
PTAEKTERGSSPATAPHPLKMFACSKFVSTPSLVKSTSQLLSRPLSAVVLKRPEILTDESLSSLAVSCPLTSLVSSRSFQTSAISRDIDTAAKFIGAGAATVGVAGSGAGIGTVFGSLIIGYAREPFSEATALLLRHSWALPSRRPWGSFV

SEQ ID NO: 794639 - protein, 131 aa, Homo sapiens; identical to SEQ ID NO: 794627

SEQ ID NO: 794640 - protein, 188 aa, Homo sapiens; identical to SEQ ID NO: 794635

SEQ ID NO: 794641 - protein, 188 aa, Homo sapiens; identical to SEQ ID NO: 794635

SEQ ID NO: 794642 - protein, 188 aa, Homo sapiens; identical to SEQ ID NO: 794635

SEQ ID NO: 794643 - protein, 188 aa, Homo sapiens; identical to SEQ ID NO: 794635

SEQ ID NO: 794644 - protein, 188 aa, Homo sapiens; identical to SEQ ID NO: 794635

SEQ ID NO: 794645 - protein, 131 aa, Homo sapiens; identical to SEQ ID NO: 794627

SEQ ID NO: 794646 - protein, 131 aa, Homo sapiens; identical to SEQ ID NO: 794627

SEQ ID NO: 794647 - protein, 121 aa, Homo sapiens
MGFGSLKGFKWYKSYQSKKLYLLPASFSQSLSSLAVSCPLTSLVSSRSFQTSAISRDIDTAAKFIGAGAATVGVAGSGAGIGTVFGSLIIGYAREPFSEATALLLRHSWALPSRRPWGSFV

SEQ ID NO: 794648 - protein, 196 aa, Homo sapiens
MPELILYVAITLSVAERLVGPGHACAEPSFRSSRCSAPLCLLCSGSSSPATAPHPLKMFACSKFVSTPSLVKSTSQLLSRPLSAVVLKRPEILTDESLSSLAVSCPLTSLVSSRSFQTSAISRDIDTAAKFIGAGAATVGVAGSGAGIGTVFGSLIIGYAREPFSEATALLLRHSWALPSRRTMGGGDGSFTWQRG

SEQ ID NO: 794649 - protein, 196 aa, Homo sapiens; identical to SEQ ID NO: 794648

SEQ ID NO: 794650 - protein, 173 aa, Homo sapiens
MPELILYVAITLSVAERLVGPGHACAEPSFRSSRCSAPLCLLCSGSSSPATAPHPLKMFACSKFVSTPSLVKSTSQLLSRPLSAVVLKRPEILTDESLSSLAVSCPLTSLVSSRSFQTSAISRDIDTAAKFIGAGAATVGVAGSGAGIGTVFGSLIIGYAREPFSEATGRSCH

SEQ ID NO: 794651 - protein, 184 aa, Homo sapiens
MPELILYVAITLSVAERLVGPGHACAEPSFRSSRCSAPLCLLCSGSSSPATAPHPLKMFACSKFVSTPSLVKSTSQLLSRPLSAVVLKRPEILTDESLSSLAVSCPLTSLVSSRSFQTSAISRDIDTAAKFIGAGAATVGVAGSGAGIGTVFGSLIIGYAGPSLSTALLYAFWLALGAMGSLLR

SEQ ID NO: 794652 - protein, 186 aa, Homo sapiens
SHVVPPGDKKLVALREEITELPAGVAAGVFFVGATTGIISAPRHVVDSTLYVGHRVREFVYYIVPLVRRALVDKSRAGGGGLVAPIVCRAPEMRVYVVSSLSRMVFPGVALDFSPAVDAPVVVETLRGPVAAGVIIIRPPLFVGPPWSQSGGRAVGGPPGGSFGGARPPLFFFFFFFFFFFFFFSY

SEQ ID NO: 794653 - protein, 194 aa, Homo sapiens
VARGPGKLLRGLSAAVFIAGRGVPVCGSPLLRDRKAAAVIYPPLLPNPIKWRSSGPGRRGAREPGGGGGKDGAKEGRTNGPSESGGFAFIYSRGFLFIFYFLWGLVSFSRLSRAAFKHDAGTAGVWNWIGLVALFQRAGQVLSGRQGGLGKMRARKPPPPPSIRGRASERGEKTHVQESMGAGGEGAAYPNSRS

SEQ ID NO: 794654 - protein, 148 aa, Homo sapiens
LYESARTLYEGLGTSTQQPSSLELGLPQLGWLVLGLGLELCLGASSLVMPGNPSLKQQLFSYAIPGLCPLGELWEVETAPSHGKEDEKGYHQTKEPHGLREGKAQNGVGEELLLQRRVPGITNDEAPKHSSNPSPRTSHPNCGQPQLQ

SEQ ID NO: 794655 - protein, 163 aa, Homo sapiens; identical to SEQ ID NO: 794629

SEQ ID NO: 794656 - protein, 131 aa, Homo sapiens; identical to SEQ ID NO: 794627

SEQ ID NO: 794657 - protein, 232 aa, Homo sapiens
MRASAAWQSHVPLPHLSLAAASKPAPFQGTSTQQPSSLELGLPQLGWLVLGLGLELCLGASSLVMPGNPSLKQQLFSYAIPGLCPLGGHGALLSDGSLSHPLCHVKEPSPPPIVLPRLVGPVCSFSYTSPGSLGNVVGSGFDREKTNKYCINKNTNKNNTTHTHKTCGAGRAREKLKHNWWGAGPQGNENLATRGPSRPRSTSGGSPKKKRGDTARNTPQGSATGYKGRPNP

SEQ ID NO: 794658 - protein, 131 aa, Homo sapiens; identical to SEQ ID NO: 794627

SEQ ID NO: 794659 - protein, 188 aa, Homo sapiens; identical to SEQ ID NO: 794635

SEQ ID NO: 794660 - protein, 188 aa, Homo sapiens; identical to SEQ ID NO: 794635

SEQ ID NO: 794661 - protein, 188 aa, Homo sapiens; identical to SEQ ID NO: 794635

SEQ ID NO: 794662 - protein, 194 aa, Homo sapiens; identical to SEQ ID NO: 794653

SEQ ID NO: 794663 - protein, 165 aa, Homo sapiens
MPELILYVAITLSVAERLVGPGHACAEPSFRSSRCSAPLCLLCSGSRVKSTSQLLSRPLSAVVLKRPEILTDESLSSLAVSCPLTSLVSSRSFQTSAISRDIDTAAKFIGAGAATVGVAGSGAGIGTVFGSLIIGYAREPFSEATALLLRHSWALPSRRPWGSFV

SEQ ID NO: 794664 - protein, 196 aa, Homo sapiens; identical to SEQ ID NO: 794648

SEQ ID NO: 794665 - protein, 194 aa, Homo sapiens; identical to SEQ ID NO: 794653

SEQ ID NO: 794666 - protein, 162 aa, Homo sapiens
MPELILYVAITLSVAERLVGPGHACAEPSFRSSRCSAPLCLLCSGSSSPATAPHPLKMFACSKFVSTPSLVKSTSQLLSRPLSAVVLKRPEILTDESLSSLAVSCPLTSLVSSRSFQTSAISRDIDTAAKFIGAGAATVGVAGSGAGIGTVFGSLIIGYARV

SEQ ID NO: 794667 - protein, 46 aa, Homo sapiens
MQSLSSCEVLLTKEGVETNLEQANILQGAEELWQESCSHCREDREG

SEQ ID NO: 794668 - protein, 186 aa, Homo sapiens; identical to SEQ ID NO: 794652

SEQ ID NO: 794669 - protein, 103 aa, Homo sapiens
LWEFALLNSHVPTSAKLSGQPHFPLPAVTTNTATRGVCRTCRATLIGTSVTSLTLVTLLSLPGLLPHRPSRERFSIMVNFEPCILATGIPPSIRAPYCSLIIA

SEQ ID NO: 794670 - protein, 369 aa, Homo sapiens
GVWGRTSPSAAGFAPRSPAAYVGGPSVGLRVRVAMAVDITLLFRASVKTVKTRNKALGVAVGGGVDGSRDELFRRSPRPKGDFSSRAREVISHIGKLRDFLLEHRKDYINAYSHTMSEYGRMTDTERDQIDQDAQIFMRTCSEAIQQLRTEAHKEIHSQQVKEHRTAVLDFIEDYLKRVCKLYSEQRAIRVKRVVDKKRLSKLEPEPNTKTRESTSSEKVSQSPSKDSEENPATEERPEKILAETQPELGTWGDGKGEDELSPEEIQMFEQENQRLIGEMNSLFDEVRQIEGRVVEISRLQEIFTEKVLQQEAEIDSIHQLVVGATENIKEGNEDIREAIKNNAGFRVWILFFLVMCSFSLLFLDWYDS

SEQ ID NO: 794671 - protein, 340 aa, Homo sapiens
GVWGRTSPSAAGFAPRSPAAYVGGPSVGLRVRVAMAVDITLLFRASVKTVKTRNKALGVAVGGGVDGSRDELFRRSPRPKGDFSSRAREVISHIGKLRDFLLEHRKDYINAYSHTMSEYGRMTDTERDQIDQDAQIFMRTCSEAIQQLRTEAHKEIHSQQVKEHRTAVLDFIEDYLKRVCKLYSEQRAIRVKRVVDKKRLSKLEPEPNTKTRESTSSEKVSQSPSKDSEENPATEERPEKILAETQPELGTWGDGKGEDELSPEEIQMFEQENQRLIGEMNSLFDEVRQSRGGEFDPGISEGCTDGLELQLGGRIQEERSRLTGRGSGGGRGELGGNQEA

SEQ ID NO: 794672 - protein, 424 aa, Homo sapiens
GVWGRTSPSAAGFAPRSPAAYVGGPSVGLRVRVAMAVDITLLFRASVKTVKTRNKALGVAVGGGVDGSRDELFRRSPRPKGDFSSRAREVISHIGKLRDFLLEHRKDYINAYSHTMSEYGRMTDTERDQIDQDAQIFMRTCSEAIQQLRTEAHKEIHSQQVKEHRTAVLDFIEDYLKSISFSFKGQMEHFTIDVMQNLALLAEDCSISLYLMMALPEKLFEAVSLLVFSSATGVCKLYSEQRAIRVKRVVDKKRLSKLEPEPNTKTRESTSSEKVSQSPSKDSEENPATEERPEKILAETQPELGTWGDGKGEDELSPEEIQMFEQENQRLIGEMNSLFDEVRQIEGRVVEISRLQEIFTEKVLQQEAEIDSIHQLVVGATENIKEGNEDIREAIKNNAGFRVWILFFLVMCSFSLLFLDWYDS

SEQ ID NO: 794673 - protein, 526 aa, Homo sapiens
GGRLGPPHPWSLAASHPGLSPGLPPPRPASTMTVMSGENVDEASAAPGHPQDGSYPRQADHDDHECCERVVINISGLRFETQLKTLAQFPNTLLGNPKKRMRYFDPLRNEYFFDRNRPSFDAILYYYQSGGRLRRPVNVPLDMFSEEIKFYELGEEAMEKFREDEGFIKEEERPLPEKEYQRQVWLLFEYPESSGPARVIAIVSVMVILISIVIFCLETLPELKDDKDFTGTVHRIDNTTVIYNSNIFTDPFFIVETLCIIWFSFELVVRFFACPSKTDFFKNIMNFIDIVAIIPYFITLGTEIAEQEGNQKGEQATSLAILRVIRLVRVFRIFKLSRHSKGLQILGQTLKASMRELGLLIFFLFIGVILFSSAVYFAEAEEAESHFSSIPDAFWWAVVSMTTVGYGDMYPVTIGGKIVGSLCAIAGVLTIALPVPVIVSNFNYFYHRETEGEEQAQLLHVSSPNLASDSDLSRRSSSTMSKSEYMEIEEDMNNSIAHYRQVNIRTANCTTANQNCVNKSKLLTDV

SEQ ID NO: 794674 - protein, 4364 aa, Homo sapiens
MDSQNLAGEDKDSQPAADGPAASEDPSATESDLPNPHVGEVSVLSSGSPRLQETPQDCSGGPVRRCALCNCGEPALHGQRELRRFELPFDWPRCPVVSPGGSPGPNEAVLPSEDLSQIGFPEGLTPAHLGEPGGSCWAHHWCAAWSAGVWGQEGPQLCGVDKAIFSGISQRCSHCTRLGASIPCRSPGCPRLYHFPCATASGSFLSMKTLQLLCPEHSEGAAYLEEARCAVCEGPGELCDLFFCTSCGHHYHGACLDTALTARKRAGWQCPECKVCQACRKPGNDSKMLVCETCDKGYHTFCLKPPMEELPAHSWKCKACRVCRACGAGSAELNPNSEWFENYSLCHRCHKAQGGQTIRSVAEQHTPVCSRFSPPEPGDTPTDEPDALYVACQGQPKGGHVTSMQPKEPGPLQCEAKPLGKAGVQLEPQLEAPLNEEMPLLPPPEESPLSPPPEESPTSPPPEASRLSPPPEELPASPLPEALHLSRPLEESPLSPPPEESPLSPPPESSPFSPLEESPLSPPEESPPSPALETPLSPPPEASPLSPPFEESPLSPPPEELPTSPPPEASRLSPPPEESPMSPPPEESPMSPPPEASRLFPPFEESPLSPPPEESPLSPPPEASRLSPPPEDSPMSPPPEESPMSPPPEVSRLSPLPVVSRLSPPPEESPLSPPALSPLGELEYPFGAKGDSDPESPLAAPILETPISPPPEANCTDPEPVPPMILPPSPGSPVGPASPILMEPLPPQCSPLLQHSLVPQNSPPSQCSPPALPLSVPSPLSPIGKVVGVSDEAELHEMETEKVSEPECPALEPSATSPLPSPMGDLSCPAPSPAPALDDFSGLGEDTAPLDGIDAPGSQPEPGQTPGSLASELKGSPVLLDPEELAPVTPMEVYPECKQTAGRGSPCEEQEEPRAPVAPTPPTLIKSDIVNEISNLSQGDASASFPGSEPLLGSPDPEGGGSLSMELGVSTDVSPARDEGSLRLCTDSLPETDDSLLCDAGTAISGGKAEGEKGRRRSSPARSRIKQGRSSSFPGRRRPRGGAHGGRGRGRARLKSTASSIETLVVADIDSSPSKEEEEEDDDTMQNTVVLFSNTDKFVLMQDMCVVCGSFGRGAEGHLLACSQCSQCYHPYCVNSKITKVMLLKGWRCVECIVCEVCGQASDPSRLLLCDDCDISYHTYCLDPPLLTVPKGGWKCKWCVSCMQCGAASPGFHCEWQNSYTHCGPCASLVTCPICHAPYVEEDLLIQCRHCERWMHAGCESLFTEDDVDHAPDEGFDCVSCQPYVVKPVAPVAPPELVPMKVKEPEPQYFRFEGVWLTETGMALLRNLTMSPLHKRRQRRGRLGLPGEAGLEGSEPSDALGPDDKKDGDLDTDELLKGEGGVEHMECEIKLEGPVSPDVEPGKEETEESKKRKRKPYRPGIGGFMVRQRKSHTRTKKGPAAQAEVLSGDGQPDEVIPADLPAEGAVEQSLAEGDEKKKQQRRGRKRSKLEGMFPAYLQEAFFGKELLDLSRKALFAVGVGRPSFGLGTPKAKGDGGSERKELPTSQKGDDGPDIADEESRGLEGKADTPGPEDGGVKASPVPSDPEKPGTPGEGMLSSDLDRISTEELPKMESKDLQQLFKDVLGSEREQHLGCGTPGLEGSRTPLQRPFLQGGLPLGNLPSSSPMDSYPGLCQSPFLDSRERGGFFSPEPGEPDSPWTGSGGTTPSTPTTPTTEGEGDGLSYNQRSLQRWEKDEELGQLSTISPVLYANINFPNLKQDYPDWSSRCKQIMKLWRKVPAADKAPYLQKAKDNRAAHRINKVQKQAESQINKQTKVGDIARKTDRPALHLRIPPQPGALGSPPPAAAPTIFIGSPTTPAGLSTSADGFLKPPAGSVPGPDSPGELFLKLPPQVPAQAPSQDPFGLAPAYPLEPRFPTAPPTYPPYPSPTGAPAQPPMLGASSRPGAGQPGEFHTTPPGTPRHQPSTPDPFLKPRCPSLDNLAVPESPGVGGGKASEPLLSPPPFGESRKALEVKKEELGASSPSYGPPNLGFVDSPSSGTHLGGLELKTPDVFKAPLTPRASQVEPQSPGLGLRPQEPPPAQALAPSPPSHPDIFRPGSYTDPYAQPPLTPRPQPPPPESCCALPPRSLPSDPFSRVPVSPQSQSSSQSPLTPRPLSAEAFCPSPVTPRFQSPDPYSRPPSRPQSRDPFAPLHKPPRPQPPEVAFKAGSLAHTSLGAGGFPAALPAGPAGELHAKVPSGQPPNFVRSPGTGAFVGTPSPMRFTFPQAVGEPSLKPPVPQPGLPPPHGINSHFGPGPTLGKPQSTNYTVATGNFHPSGSPLGPSSGSTGESYGLSPLRPPSVLPPPAPDGSLPYLSHGASQRSGITSPVEKREDPGTGMGSSLATAELPGTQDPGMSGLSQTELEKQRQRQRLRELLIRQQIQRNTLRQEKETAAAAAGAVGPPGSWGAEPSSPAFEQLSRGQTPFAGTQDKSSLVGLPPSKLSGPILGPGSFPSDDRLSRPPPPATPSSMDVNSRQLVGGSQAFYQRAPYPGSLPLQQQQQQLWQQQQATAATSMRFAMSARFPSTPGPELGRQALGSPLAGISTRLPGPGEPVPGPAGPAQFIELRHNVQKGLGPGGTPFPGQGPPQRPRFYPVSEDPHRLAPEGLRGLAVSGLPPQKPSAPPAPELNNSLHPTPHTKGPTLPTGLELVNRPPSSTELGRPNPLALEAGKLPCEDPELDDDFDAHKALEDDEELAHLGLGVDVAKGDDELGTLENLETNDPHLDDLLNGDEFDLLAYTDPELDTGDKKDIFNEHLRLVESANEEAEREALLRGVEPGPLGPEERPPPAADASEPRLASVLPEVKPKVEEGGRHPSPCQFTIATPKVEPAPAANSLGLGLKPGQSMMGSRDTRMGTGPFSSSGHTAEKASFGATGGPPAHLLTPSPLSGPGGSSLLEKFELESGALTLPGGPAASGDELDKMESSLVASELPLLIEDLLEHEKKELQKKQQLSAQLQPAQQQQQQQQQHSLLPAPGPAQAMSLPHEGSSPSLAGSQQQLSLGLAVARQPGLPQPLMPTQPPAHALQQRLAPSMAMVSNQGHMLSGQHGGQAGLVPQQSSQPVLSQKPMGTMPPSMCMKPQQLAMQQQLANSFFPDTDLDKFAAEDIIGPIAKAKMVALKGIKKVMAQGSIGVAPGMNRQQVSLLAQRLSGGPSSDLQNHVAAGSGQERSAGDPSQPRPNPPTFAQGVINEADQRQYEEWLFHTQQLLQMQLKVLEEQIGVHRKSRKALCAKQRTAKKAGREFPEADAEKLKLVTEQQSKIQKQLDQVRKQQKEHTNLMAEYRNKQQQQQQQQQQQQQQHSAVLALSPSQSPRLLTKLPGQLLPGHGLQPPQGPPGGQAGGLRLTPGGMALPGQPGGPFLNTALAQQQQQQHSGGAGSLAGPSGGFFPGNLALRSLGPDSRLLQERQLQLQQQRMQLAQKLQQQQQQQQQQQHLLGQVAIQQQQQQGPGVQTNQALGPKPQGLMPPSSHQGLLVQQLSPQPPQGPQGMLGPAQVAVLQQQHPGALGPQGPHRQVLMTQSRVLSSPQLAQQGQGLMGHRLVTAQQQQQQQQHQQQGSMAGLSHLQQSLMSHSGQPKLSAQPMGSLQQLQQQQQLQQQQQLQQQQQQQLQQQQQLQQQQLQQQQQQQQLQQQQQQQLQQQQQQLQQQQQQQQQQFQQQQQQQQMGLLNQSRTLLSPQQQQQQQVALGPGMPAKPLQHFSSPGALGPTLLLTGKEQNTVDPAVSSEATEGPSTHQGGPLAIGTTPESMATEPGEVKPSLSGDSQLLLVQPQPQPQPSSLQLQPPLRLPGQQQQQVSLLHTAGGGSHGQLGSGSSSEASSVPHLLAQPSVSLGDQPGSMTQNLLGPQQPMLERPMQNNTGPQPPKPGPVLQSGQGLPGVGIMPTVGQLRAQLQGVLAKNPQLRHLSPQQQQQLQALLMQRQLQQSQAVRQTPPYQEPGTQTSPLQGLLGCQPQLGGFPGPQTGPLQELGAGPRPQGPPRLPAPPGALSTGPVLGPVHPTPPPSSPQEPKRPSQLPSPSSQLPTEAQLPPTHPGTPKPQGPTLEPPPGRVSPAAAQLADTLFSKGLGPWDPPDNLAETQKPEQSSLVPGHLDQVNGQVVPEASQLSIKQEPREEPCALGAQSVKREANGEPIGAPGTSNHLLLAGPRSEAGHLLLQKLLRAKNVQLSTGQGSEGLRAEINGHIDSKLAGLEQKLQGTPSNKEDAAARKPLTPKPKRVQKASDRLVSSRKKLRKEDGVRASEALLKQLKQELSLLPLTEPAITANFSLFAPFGSGCPVNGQSQLRGAFGSGALPTGPDYYSQLLTKNNLSNPPTPPSSLPPTPPPSVQQKMV

SEQ ID NO: 794675 - protein, 4332 aa, Homo sapiens
MDSQNLAGEDKDSQPAADGPAASEDPSATESDLPNPHVGEVSVLSSGSPRLQETPQDCSGGPVRRCALCNCGEPALHGQRELRRFELPFDWPRCPVVSPGGSPGPNEAVLPSEDLSQIGFPEGLTPAHLGEPGGSCWAHHWCAAWSAGVWGQEGPQLCGVDKAIFSGISQRCSHCTRLGASIPCRSPGCPRLYHFPCATASGSFLSMKTLQLLCPEHSEGAAYLEEARCAVCEGPGELCDLFFCTSCGHHYHGACLDTALTARKRAGWQCPECKVCQACRKPGNDSKMLVCETCDKGYHTFCLKPPMEELPAHSWKCKACRVCRACGAGSAELNPNSEWFENYSLCHRCHKAQGGQTIRSVAEQHTPVCSRFSPPEPGDTPTDEPDALYVACQGQPKGGHVTSMQPKEPGPLQCEAKPLGKAGVQLEPQLEAPLNEEMPLLPPPEESPLSPPPEESPTSPPPEASRLSPPPEELPASPLPEALHLSRPLEESPLSPPPEESPLSPPPESSPFSPLEESPLSPPEESPPSPALETPLSPPPEASPLSPPFEESPLSPPPEELPTSPPPEASRLSPPPEESPMSPPPEESPMSPPPEASRLFPPFEESPLSPPPEESPLSPPPEASRLSPPPEDSPMSPPPEESPMSPPPEVSRLSPLPVVSRLSPPPEESPLSPPPEESPTSPPPEASRLSPPPEDSPTSPPPEDSPASPPPEDSLMSLPLEESPLLPLPEEPQLCPRSEGPHLSPRPEEPHLSPRPEEPHLSPQAEEPHLSPQPEEPCLCAVPEEPHLSPQAEGPHLSPQPEELHLSPQTEEPHLSPVPEEPCLSPQPEESHLSPQSEEPCLSPRPEESHLSPELEKPPLSPRPEKPPEEPGQCPAPEELPLFPPPGEPSLSPLLGEPALSEPGEPPLSPLPEELPLSPSGEPSLSPQLMPPDPLPPPLSPIITAAAPPALSPLGELEYPFGAKGDSDPESPLAAPILETPISPPPEANCTDPEPVPPMILPPSPGSPVGPASPILMEPLPPQCSPLLQHSLVPQNSPPSQCSPPALPLSVPSPLSPIGKVVGVSDEAELHEMETEKVSEPECPALEPSATSPLPSPMGDLSCPAPSPAPALDDFSGLGEDTAPLDGIDAPGSQPEPGQTPGSLASELKGSPVLLDPEELAPVTPMEVYPECKQTAGRGSPCEEQEEPRAPVAPTPPTLIKSDIVNEISNLSQGDASASFPGSEPLLGSPDPEGGGSLSMELGVSTDVSPARDEGSLRLCTDSLPETDDSLLCDAGTAISGGKAEGEKGRRRSSPARSRIKQGRSSSFPGRRRPRGGAHGGRGRGRARLKSTASSIETLVVADIDSSPSKEEEEEDDDTMQNTVVLFSNTDKFVLMQDMCVVCGSFGRGAEGHLLACSQCSQCYHPYCVNSKITKVMLLKGWRCVECIVCEVCGQASDPSRLLLCDDCDISYHTYCLDPPLLTVPKGGWKCKWCVSCMQCGAASPGFHCEWQNSYTHCGPCASLVTCPICHAPYVEEDLLIQCRHCERWMHAGCESLFTEDDVDHAPDEGFDCVSCQPYVVKPVAPVAPPELVPMKVKEPEPQYFRFEGVWLTETGMALLRNLTMSPLHKRRQRRGRLGLPGEAGLEGSEPSDALGPDDKKDGDLDTDELLKGEGGVEHMECEIKLEGPVSPDVEPGKEETEESKKRKRKPYRPGIGGFMVRQRKSHTRTKKGPAAQAEVLSGDGQPDEVIPADLPAEGAVEQSLAEGDEKKKQQRRGRKRSKLEGMFPAYLQEAFFGKELLDLSRKALFAVGVGRPSFGLGTPKAKGDGGSERKELPTSQKGDDGPDIADEESRGLEGKADTPGPEDGGVKASPVPSDPEKPGTPGEGMLSSDLDRISTEELPKMESKDLQQLFKDVLGSEREQHLGCGTPGLEGSRTPLQRPFLQGGLPLGNLPSSSPMDSYPGLCQSPFLDSRERGGFFSPEPGEPDSPWTGSGGTTPSTPTTPTTEGEGDGLSYNQRSLQRWEKDEELGQLSTISPVLYANINFPNLKQDYPDWSSRCKQIMKLWRKVPAADKAPYLQKAKDNRAAHRINKVQKQAESQINKQTKVGDIARKTDRPALHLRIPPQPGALGSPPPAAAPTIFIGSPTTPAGLSTSADGFLKPPAGSVPGPDSPGELFLKLPPQVPAQAPSQDPFGLAPAYPLEPRFPTAPPTYPPYPSPTGAPAQPPMLGASSRPGAGQPGEFHTTPPGTPRHQPSTPDPFLKPRCPSLDNLAVPESPGVGGGKASEPLLSPPPFGESRKALEVKKEELGASSPSYGPPNLGFVDSPSSGTHLGGLELKTPDVFKAPLTPRASQVEPQSPGLGLRPQEPPPAQALAPSPPSHPDIFRPGSYTDPYAQPPLTPRPQPPPPESCCALPPRSLPSDPFSRVPVSPQSQSSSQSPLTPRPLSAEAFCPSPVTPRFQSPDPYSRPPSRPQSRDPFAPLHKPPRPQPPEVAFKAGSLAHTSLGAGGFPAALPAGPAGELHAKVPSGQPPNFVRSPGTGAFVGTPSPMRFTFPQAVGEPSLKPPVPQPGLPPPHGINSHFGPGPTLGKPQSTNYTVATGNFHPSGSPLGPSSGSTGESYGLSPLRPPSVLPPPAPDGSLPYLSHGASQRSGITSPVEKREDPGTGMGSSLATAELPGTQDPGMSGLSQTELEKQRQRQRLRELLIRQQIQRNTLRQEKETAAAAAGAVGPPGSWGAEPSSPAFEQLSRGQTPFAGTQDKSSLVGLPPSKLSGPILGPGSFPSDDRLSRPPPPATPSSMDVNSRQLVGGSQAFYQRAPYPGSLPLQQQQQQLWQQQQATAATSMRFAMSARFPSTPGPELGRQALGSPLAGISTRLPGPGEPVPGPAGPAQFIELRHNVQKGLGPGGTPFPGQGPPQRPRFYPVSEDPHRLAPEGLRGLAVSGLPPQKPSAPPAPELNNSLHPTPHTKGPTLPTGLELVNRPPSSTELGRPNPLALEAGKLPCEDPELDDDFDAHKALEDDEELAHLGLGVDVAKGDDELGTLENLETNDPHLDDLLNGDEFDLLAYTDPELDTGDKKDIFNEHLRLVESANEEAEREALLRGVEPGPLGPEERPPPAADASEPRLASVLPEVKPKVEEGGRHPSPCQFTIATPKVEPAPAANSLGLGLKPGQSMMGSRDTRMGTGPFSSSGHTAEKASFGATGGPPAHLLTPSPLSGPGGSSLLEKFELESGALTLPGGPAASGDELDKMESSLVASELPLLIEDLLEHEKKELQKKQQLSAQLQPAQQQQQQQQQHSLLPAPGPAQAMSLPHEGSSPSLAGSQQQLSLGLAVARQPGLPQPLMPTQPPAHALQQRLAPSMAMVSNQGHMLSGQHGGQAGLVPQQSSQPVLSQKPMGTMPPSMCMKPQQLAMQQQLANSFFPDTDLDKFAAEDIIGPIAKAKMVALKGIKKVMAQGSIGVAPGMNRQQVSLLAQRLSGGPSSDLQNHVAAGSGQERSAGDPSQPRPNPPTFAQGVINEADQRQYEEWLFHTQQLLQMQLKVLEEQIGVHRKSRKALCAKQRTAKKAGREFPEADAEKLKLVTEQQSKIQKQLDQVRKQQKEHTNLMAEYRNKQQQQQQQQQQQQQQHSAVLALSPSQSPRLLTKLPGQLLPGHGLQPPQGPPGGQAGGLRLTPGGMALPGQPGGPFLNTALAQQQQQQHSGGAGSLAGPSGGFFPGNLALRSLGPDSRLLQERQLQLQQQRMQLAQKLQQQQQQQQQQQHLLGQVAIQQQQQQGPGVQTNQALGPKPQGLMPPSSHQGLLVQQLSPQPPQGPQGMLGPAQVAVLQQQHPGALGPQGPHRQVLMTQSRVLSSPQLAQQGQGLMGHRLVTAQQQQQQQQHQQQGSMAGLSHLQQSLMSHSGQPKLSAQPMGSLQQLQQQQQLQQQQQLQQQQQQQLQQQQQLQQQQLQQQQQQQQLQQQQQQQLQQQQQQLQQQQQQQQQQFQQQQQQQQMGLLNQSRTLLSPQQQQQQQVALGPGMPAKPLQHFSSPGALGPTLLLTGKEQNTVDPAVSSEATEGPSTHQGGPLAIGTTPESMATEPGEVKPSLSGDSQLLLVQPQPQPQPSSLQLQPPLRLPGQQQQQVSLLHTAGGGSHGQLGSGSSSEASSVPHLLAQPSVSLGDQPGSMTQNLLGPQQPMLERPMQNNTGPQPPKPGPVLQSGQGLPGVGIMPTVGQLRAQLQGVLAKNPQLRHLSPQQQQQLQALLMQRQLQQSQAVRQTPPYQEPGTQTSPLQGLLGCQPQLGGFPGPQTGPLQELGAGPRPQGPPRLPAPPGALSTGPVLGPVHPTPPPSSPQEPKRPSQLPSPSSQLSH

SEQ ID NO: 794676 - protein, 1627 aa, Homo sapiens
RGGSELGASTPNAVTVPRPQRANRGSTVGGATPPSGPRPHPAPPPPPSRRRGQAARAVQSEVLVHEDRFVLMASELGARDDGGCTELAKPLYLQYLERALRLDHFLRQTSAIFNRNISSDDSEDGLDDSNPLLPQSGDPLIQVKEEPPNSLLGETSGAGSSGMLNTYSLNGVLQSESKCDKGNLYNFSKLKKSRKWLKSILLSDESSEADSQSEDDDEEELNLSREELHNMLRLHKYKKLHQNKYSKDKELQQYQYYSAGLLSTYDPFYEQQRHLLGPKKKKFKEEKKLKAKLKKVKKKRRRDEELSSEESPRRHHHQTKVFAKFSHDAPPPGTKKKHLSIEQLNARRRKVWLSIVKKELPKANKQKASARNLFLTNSRKLAHQCMKEVRRAALQAQKNCKETLPRARRLTKEMLLYWKKYEKVEKEHRKRAEKEALEQRKLDEEMREAKRQQRKLNFLITQTELYAHFMSRKRDMGHDGIQEEILRKLEDSSTQRQIDIGGGVVVNITQEDYDSNHFKAQALKNAENAYHIHQARTRSFDEDAKESRAAALRAANKSGTGFGESYSLANPSIRAGEDIPQPTIFNGKLKGYQLKGMNWLANLYEQGINGILADEMGLGKTVQSIALLAHLAERENIWGPFLIISPASTLNNWHQEFTRFVPKFKVLPYWGNPHDRKVIRRFWSQKTLYTQDAPFHVVITSYQLVVQDVKYFQRVKWQYMVLDEAQALKSSSSVRWKILLQFQCRNRLLLTGTPIQNTMAELWALLHFIMPTLFDSHEEFNEWFSKDIESHAENKSAIDENQLSRLHMILKPFMLRRIKKDVENELSDKIEILMYCQLTSRQKLLYQALKNKISIEDLLQSSMGSTQQAQNTTSSLMNLVMQFRKVCNHPELFERQETWSPFHISLKPYHISKFIYRHGQIRVFNHSRDRWLRVLSPFAPDYIQRSLFHRKGINEESCFSFLRFIDISPAEMANLMLQGLLARWLALFLSLKASYRLHQLRSWGAPEGESHQRYLRNKDFLLGVNFPLSFPNLCSCPLLKSLVFSSHCKAVSGYSDQVVHQRRSATSSLRRCLLTELPSFLCVASPRVTAVPLDSYCNDRSAEYERRVLKEGGSLAAKQCLLNGAPELAADWLNRRSQFFPEPAGGLWSIRPQNGWSFIRIPGKESLITDSGKLYALDVLLTRLKSQGHRVLIYSQMTRMIDLLEEYMVYRKHTYMRLDGSSKISERRDMVADFQNRNDIFVFLLSTRAGGLGINLTAADTVIFYDSDWNPTVDQQAMDRAHRLGQTKQVTVYRLICKGTIEERILQRAKEKSEIQRMVISGGNFKPDTLKPKEVVSLLLDDEELEKKLRLRQEEKRQQEETNRVKERKRKREKYAEKKKKEDELDGKRRKEGVNLVIPFVPSADNSNLSADGDDSFISVDSAMPSPFSEISISSELHTGSIPLDESSSDMLVIVDDPASSAPQSRATNSPASITGSVSDTVNGISIQEMPAAGRGHSARSRGRPKGSGSTAKGAGKGRSRKSTAGSAAAMAGAKAGAAAASAAAYAAYGYNVSKGISASSPLQTSLVRPAGLADFGPSSASSPLSSPLSKGNNVPGNPKNLHMTSSLAPDSLVRKQGKGTNPSGGR

SEQ ID NO: 794677 - protein, 81 aa, Homo sapiens
VSIQQYFFLRKGITCHRKRKCCGFRHSHPSCLQALVTDSVLGPLLVNSGFSMLGIRFQKSGPQDALPSGSALSALPQAQQK

SEQ ID NO: 794678 - protein, 1490 aa, Homo sapiens
ATARDPGAAAGLSLHPTYFNLAEAARIWATATCGERGPGEGRPQPELYCKLVGGPTAPGSGHTIQGQFCDYCNSEDPRKAHPVTNAIDGSERWWQSPPLSSGTQYNRVNLTLDLGQLFHVAYILIKFANSPRPELWVLERSVDFGSTYSPWQYFAHSKVDCLKEFGREANMAVTRDDDVLCVTEYSRIVPLENGEVVVSLINGRPGAKNFTFSHTLREFTKATNIRLRFLRTNTLLGHLISKAQRDPTVTRRYYYSIKDISIGGQCVCNGHAEVCNINNPEKLFRCECQHHTCGETCDRCCTGYNQRRWRPAAWEQSHECEACNCHGHASNCYYDPDVERQQASLNTQGIYAGGGVCINCQHNTAGVNCEQCAKGYYRPYGVPVDAPDGCIPCSCDPEHADGCEQGSGRCHCKPNFHGDNCEKCAIGYYNFPFCLRIPIFPVSTPSSEDPVAGDIKGCDCNLEGVLPEICDAHGRCLCRPGVEGPRCDTCRSGFYSFPICQACWCSALGSYQMPCSSVTGQCECRPGVTGQRCDRCLSGAYDFPHCQGSSSACDPAGTINSNLGYCQCKLHVEGPTCSRCKLLYWNLDKENPSGCSECKCHKAGTVSGTGECRQGDGDCHCKSHVGGDSCDTCEDGYFALEKSNYFGCQGCQCDIGGALSSMCSGPSGVCQCREHVVGKVCQRPENNYYFPDLHHMKYEIEDGSTPNGRDLRFGFDPLAFPEFSWRGYAQMTSVQNDVRITLNVGKSSGSLFRVILRYVNPGTEAVSGHITIYPSWGAAQSKEIIFLPSKEPAFVTVPGNGFADPFSITPGIWVACIKAEGVLLDYLVLLPRDYYEASVLQLPVTEPCAYAGPPQENCLLYQHLPVTRFPCTLACEARHFLLDGEPRPVAVRQPTPAHPVMVDLSGREVELHLRLRIPQVGHYVVVVEYSTEAAQLFVVDVNVKSSGSVLAGQVNIYSCNYSVLCRSAVIDHMSRIAMYELLADADIQLKGHMARFLLHQVCIIPIEEFSAEYVRPQVHCIASYGRFVNQSATCVSLAHETPPTALILDVLSGRPFPHLPQQSSPSVDVLPGVTLKAPQNQVTLRGRVPHLGRYVFVIHFYQAAHPTFPAQVSVDGGWPRAGSFHASFCPHVLGCRDQVIAEGQIEFDISEPEVAATVKVPEGKSLVLVRVLVVPAENYDYQILHKKSMDKSLEFITNCGKNSFYLDPQTASRFCKNSARSLVAFYHKGALPCECHPTGATGPHCSPEGGQCPCQPNVIGRQCTRCATGHYGFPRCKRKSCSCGRRLCEEMTGQCRCPPRTVRPQCEVCETHSFSFHPMAGCEGCNCSRRGTIEAAMPECDRDSGQCRCKPRITGRQCDRCASGFYRFPECVPCNCNRDGTEPGVCDPGTGACLCKENVEGTECNVCREGSFHLDPANLKGCTSCFCFGVNNQCHSSHKRRTKFVDMLGWHLETADRVDIPVSFNPGSNSMVADLQELPATIHSASWVAP

SEQ ID NO: 794679 - protein, 358 aa, Homo sapiens
PRGSRRHTEQSQAHLDLGQLFHVAYILIKFANSPRPELWVLERSVDFGSTYSPWQYFAHSKVDCLKEFGREANMAVTRDDDVLCVTEYSRIVPLENGEVVVSLINGRPGAKNFTFSHTLREFTKATNIRLRFLRTNTLLGHLISKAQRDPTVTRRYYYSIKDISIGGQCVCNGHAEVCNINNPEKLFRCECQHHTCGETCDRCCTGYNQRRWRPAAWEQSHECEACNCHGHASNCYYDPDVERQQASLNTQGIYAGGGVCINCQHNTAGVNCEQCAKGYYRPYGVPVDAPDGCIRKFHFKLVYLSLCVLPQRSHQANFGSVNNFLHALSLQSISCARYVTSVTYTVSLNFGFIACKWK

SEQ ID NO: 794680 - protein, 769 aa, Homo sapiens
PRGSRRHTEQSQAHLDLGQLFHVAYILIKFANSPRPELWVLERSVDFGSTYSPWQYFAHSKVDCLKEFGREANMAVTRDDDVLCVTEYSRIVPLENGEVVVSLINGRPGAKNFTFSHTLREFTKATNIRLRFLRTNTLLGHLISKAQRDPTVTRRYYYSIKDISIGGQCVCNGHAEVCNINNPEKLFRCECQHHTCGETCDRCCTGYNQRRWRPAAWEQSHECEACNCHGHASNCYYDPDVERQQASLNTQGIYAGGGVCINCQHNTAGVNCEQCAKGYYRPYGVPVDAPDGCIPCSCDPEHADGCEQGSGRCHCKPNFHGDNCEKCAIGYYNFPFCLRIPIFPVSTPSSEDPVAGDIKGCDCNLEGVLPEICDAHGRCLCRPGVEGPRCDTCRSGFYSFPICQACWCSALGSYQMPCSSVTGQCECRPGVTGQRCDRCLSGAYDFPHCQGSSSACDPAGTINSNLGYCQCKLHVEGPTCSRCKLLYWNLDKENPSGCSECKCHKAGTVSGTGECRQGDGDCHCKSHVGGDSCDTCEDGYFALEKSNYFGCQGCQCDIGGALSSMCSGPSGVCQCREHVVGKVCQRPENNYYFPDLHHMKYEIEDGSTPNGRDLRFGFDPLAFPEFSWRGYAQMTSVQNDVRITLNVGKSSGSLFRVILRYVNPGTEAVSGHITIYPSWGAAQSKEIIFLPSKEPAFVTVPGNGFADPFSITPGIWVACIKAEGVLLDYLVLLPRDYYEASVLQLPVTEPCAYAGPPQEKSVWGRRCSR

SEQ ID NO: 794681 - protein, 77 aa, Homo sapiens
VMGLFLSLFAMLSPTSGTESGTKLFYCRASVNLEIFLSWENQDFQRGKAKHQPGPPSSNPKIHPECTRMGLEVNFKL

SEQ ID NO: 794682 - protein, 71 aa, Homo sapiens
NLRKAHPLVLREALTNTLQERGHVRENSASFIACNRQTVFHISQWDIGIFSLKEGIIHKEKTSMLHCILKG

SEQ ID NO: 794683 - protein, 125 aa, Homo sapiens
TEYAVSPMMIQPQILFFTEHLTLSSVSFLCIGHWETTCSHLNRDLAFRRHHSLPLCPGEHQLALFQKQKENEPQPLKSLRTEEKLLTFLICVQSGWPWVQTQLVSPFVSWTDLIPGCLNDVSPHQ

SEQ ID NO: 794684 - protein, 337 aa, Homo sapiens
MADGSFSLAGHLLRSPGGSTSRLHSIEAILGFTKDDGILGTFPAERGARGAKERDRRLGARPACPKAPEEGSEPSPPPAPAPAPEYEAPRPYCPKEPGEARPSPGLPVGPATGEAKLSEEEQPKKKHRRNRTTFTTYQLHELERAFEKSHYPDVYSREELAGKVNLPEVRVQVWFQNRRAKWRRQEKLEVSSMKLQDSPLLSFSRSPPSATLSPLGAGPGSGGGPAGGALPLESWLGPPLPGGGATALQSLPGFGPPAQSLPASYTPPPPPPPFLNSPPLGPGLQPLAPPPPSYPCGPGFGDKFPLDEADPRNSSIAALRLKAKEHIQAIGKPWQAL

SEQ ID NO: 794685 - protein, 437 aa, Homo sapiens
MADGSFSLAGHLLRSPGGSTSRLHSIEAILGFTKDDGILGTFPAERGARGAKERDRRLGARPACPKAPEEGSEPSPPPAPAPAPEYEGECAPWLCEAVRAPELRSWPDESAPSLTFIKATGRGVGDRLWRELPICIRESLGPIAALTTDLPGPSRSPQAGWPVPTARRGRPKGVLGSASDLPGLVAPAPRPYCPKEPGEARPSPGLPVGPATGEAKLSEEEQPKKKHRRNRTTFTTYQLHELERAFEKSHYPDVYSREELAGKVNLPEVRVQVWFQNRRAKWRRQEKLEVSSMKLQDSPLLSFSRSPPSATLSPLGAGPGSGGGPAGGALPLESWLGPPLPGGGATALQSLPGFGPPAQSLPASYTPPPPPPPFLNSPPLGPGLQPLAPPPPSYPCGPGFGDKFPLDEADPRNSSIAALRLKAKEHIQAIGKPWQAL

SEQ ID NO: 794686 - protein, 92 aa, Homo sapiens
AHLDGHVRGWGEASPTLGRRDSRATLGLPMILICPRLRSFPGYGTFTAKTRIVPCKAAWLITLLAAMRLPPSSRMIDPKERVTQSTSSPISM

SEQ ID NO: 794687 - protein, 804 aa, Homo sapiens
MAKSSSLNVRVVEGRALPAKDVSGSSDPYCLVKVDDEVVARTATVWRSLGPFWGEEYTVHLPLDFHQLAFYVLDEDTVGHDDIIGKISLSREAITADPRGIDSWINLSRVDPDAEVQGEICLSVQMLEDGQGRCLRCHVLQARDLAPRDISGTSDPFARVFWGSQSLETSTIKKTRFPHWDEVLELREMPGAPSPLRVELWDWDMVGKNDFLGMVEFSPKTLQQKPPKGWFRLLPFPRAEEDSGGNLGALRVKVRLIEDRVLPSQCYQPLMELLMESVQGPAEEDTASPLALLEELTLGDCRQDLATKLVKLFLGRGLAGRFLDYLTRREVARTMDPNTLFRSNSLASKSMEQFMKLVGMPYLHEVLKPVISRVFEEKKYMELDPCKMDLGRTRRISFKGALSEEQMRETSLGLLTGYLGPIVDAIVGSVGRCPPAMRLAFKQLHRRVEERFPQAEHQDVKYLAISGFLFLRFFAPAILTPKLFDLRDQHADPQTSRSLLLLAKAVQSIGNLGQQLGQGKELWMAPLHPFLLQCVSRVRDFLDRLVDVDGDEAGVPARALFPPSAIVREGYLLKRKEEPAGLATRFAFKKRYVWLSGETLSFSKSPEWQMCHSIPVSHIRAVERVDEGAFQLPHVMQVVTQDGTGALHTTYLQCKNVNELNQWLSALRKASAPNPNKLAACHPGAFRSARWTCCLQAERSAAGCSRTHSAVTLGDWSDPLDPDAEAQTVYRQLLLGRDQLRLKLLEDSNMDTTLEADTGACPEVLARQRAATARLLEVLADLDRAHEEFQQQERGKAALGPLGP

SEQ ID NO: 794688 - protein, 776 aa, Homo sapiens
MAKSSSLNVRVVEGRALPAKDVSGSSDPYCLVKVDDEVVARTATVWRSLGPFWGEEYTVHLPLDFHQLAFYVLDEDTVGHDDIIGKISLSREAITADPRGIDSWINLSRVDPDAEVQGEICLSVQMLEDGQGRCLRCHVLQARDLAPRDISGTSDPFARVFWGSQSLETSTIKKTRFPHWDEVLELREMPGAPSPLRVELWDWDMVGKNDFLGMVEFSPKTLQQKPPKGWFRLLPFPRAEEDSGGNLGALRVKVRLIEDRVLPSQCYQPLMELLMESVQGPAEEDTASPLALLEELTLGDCRQDLATKLVKLFLGRGLAGRFLDYLTRREVARTMDPNTLFRSNSLASKSMEQFMKLVGMPYLHEVLKPVISRVFEEKKYMELDPCKMDLGRTRRISFKGALSEEQMRETSLGLLTGYLGPIVDAIVGSVGRCPPAMRLAFKQLHRRVEERFPQAEHQDVKYLAISGFLFLRFFAPAILTPKLFDLRDQHADPQTSRSLLLLAKAVQSIGNLGQQLGQGKELWMAPLHPFLLQCVSRVRDFLDRLVDVDGDEAGVPARALFPPSAIVREGYLLKRKEEPAGLATRFAFKKRYVWLSGETLSFSKSPEWQVVTQDGTGALHTTYLQCKNVNELNQWLSALRKASAPNPNKLAACHPGAFRSARWTCCLQAERSAAGCSRTHSAVTLGDWSDPLDPDAEAQTVYRQLLLGRDQLRLKLLEDSNMDTTLEADTGACPEVLARQRAATARLLEVLADLDRAHEEFQQQERGKAALGPLGP

SEQ ID NO: 794689 - protein, 746 aa, Homo sapiens
MAKSSSLNVRVVEGRALPAKDVSGSSDPYCLVKVDDEVVARTATVWRSLGPFWGEEYTVHLPLDFHQLAFYVLDEDTVGHDDIIGKISLSREAITADPRGIDSWINLSRVDPDAEVQGEICLSVQMLEDGQGRCLRCHVLQARDLAPRDISGTSDPFARVFWGSQSLETSTIKKTRFPHWDEVLELREMPGAPSPLRVELWDWDMVGKNDFLGMVEFSPKTLQQKPPKGWFRLLPFPRAEEDSGGNLGALRVKVRLIEDRVLPSQCYQPLMELLMESVQGPAEEDTASPLALLEELTLGDCRQDLATKLVKLFLGRGLAGRFLDYLTRREVARTMDPNTLFRSNSLASKSMEQFMKLVGMPYLHEVLKPVISRVFEEKKYMELDPCKMDLGRTRRISFKGALSEEQMRETSLGLLTGYLGPIVDAIVGSVGRCPPAMRLAFKQLHRRVEERFPQAEHQDVKYLAISGFLFLRFFAPAILTPKLFDLRDQHADPQTSRSLLLLAKAVQSIGNLGQQLGQGKELWMAPLHPFLLQCVSRVRDFLDRLVDVDGDEAGVPARALFPPSAIVREGYLLKRKEEPAGLATRFAFKKRYVWLSGETLSFSKSPEWQMCHSIPVSHIRAVERVDEGAFQLPHVMQVVTQDGTGALHTTYLQCKNVNELNQWLSALRKASAPNPNKLAACHPGAFRSARWTCCLQAERSGEGAGRLQAPPSPPVNQRVSHFRLGWLCNLGQVTQPLYASVSSTVK

SEQ ID NO: 794690 - protein, 226 aa, Homo sapiens
MDPNTLFRSNSLASKSMEQFMKLVGMPYLHEVLKPVISRVFEEKKYMELDPCKMDLGRTRRISFKGALSEEQMRETSLGLLTGYLGPIVDAIVGSVGRCPPAMRLAFKQLHRRVEERFPQAEHQDVKYLAISGFLFLRFFAPAILTPKLFDLRDQHADPQTSRSLLLLAKAVQSIGNLGQQLGQGKELWMAPLHPFLLQCVSRVRDFLDRLVDVDGDEGEFLWSGH

SEQ ID NO: 794691 - protein, 830 aa, Homo sapiens
MAKSSSLNVRVVEGRALPAKDVSGSSDPYCLVKVDDEVVARTATVWRSLGPFWGEEYTVHLPLDFHQLAFYVLDEDTVGHDDIIGKISLSREAITADPRGIDSWINLSRVDPDAEVQGEICLSVQMLEDGQGRCLRCHVLQARDLAPRDISGTSDPFARVFWGSQSLETSTIKKTRFPHWDEVLELREMPGAPSPLRVELWDWDMVGKNDFLGMVEFSPKTLQQKPPKGWFRLLPFPRAEEDSGGNLGALRVKVRLIEDRVLPSQCYQPLMELLMESVQGPAEEDTASPLALLEELTLGDCRQDLATKLVKLFLGRGLAGRFLDYLTRREVARTMDPNTLFRSNSLASKSMEQFMKLVGMPYLHEVLKPVISRVFEEKKYMELDPCKMDLGRTRRISFKGALSEEQMRETSLGLLTGYLGPIVDAIVGSVGRCPPAMRLAFKQLHRRVEERFPQAEHQDVKYLAISGFLFLRFFAPAILTPKLFDLRDQHADPQTSRSLLLLAKAVQSIGNLGQQLGQGKELWMAPLHPFLLQCVSRVRDFLDRLVDVDGDEAGVPARALFPPSAIVREGYLLKRKEEPAGLATRFAFKKRYVWLSGETLSFSKSPEWQMCHSIPVSHIRAVERVDEGAFQLPHVMQVVTQDGTGALHTTYLQCKVRPHRDGEQGASSVPTRPLIASHPLQNVNELNQWLSALRKASAPNPNKLAACHPGAFRSARWTCCLQAERSAAGCSRTHSAVTLGDWSDPLDPDAEAQTVYRQLLLGRDQLRLKLLEDSNMDTTLEADTGACPEVLARQRAATARLLEVLADLDRAHEEFQQQERGKAALGPLGP

SEQ ID NO: 794692 - protein, 496 aa, Homo sapiens
MDPNTLFRSNSLASKSMEQFMKLVGMPYLHEVLKPVISRVFEEKKYMELDPCKMDLGRTRRISFKGALSEEQMRETSLGLLTGYLGPIVDAIVGSVGRCPPAMRLAFKQLHRRVEERFPQAEHQDVKYLAISGFLFLRFFAPAILTPKLFDLRDQHADPQTSRSLLLLAKAVQSIGNLGQQLGQGKELWMAPLHPFLLQCVSRVRDFLDRLVDVDGDEAGVPARALFPPSAIVREGYLLKRKEEPAGLATRFAFKKRYVWLSGETLSFSKSPEWQMCHSIPVSHIRAVERVDEGAFQLPHVMQVVTQDGTGALHTTYLQCKVRPHRDGEQGRPSVPTRPLIASHPLQNVNELNQWLSALRKASAPNPNKLAACHPGAFRSARWTCCLQAERSAAGCSRTHSAVTLGDWSDPLDPDAEAQTVYRQLLLGRDQLRLKLLEDSNMDTTLEADTGACPEVLARQRAATARLLEVLADLDRAHEEFQQQERGKAALGPLGP

SEQ ID NO: 794693 - protein, 485 aa, Homo sapiens
EIGEDKTGHWGDHNFMLRGISQLPAVATMSWVLLPVLWLIVQTQAIAIKQTPELTLHEIVCPKKLHILHKREIKNNQTEKHGKEERYEPEVQYQMILNGEEIILSLQKTKHLLGPDYTETLYSPRGEEITTKPENMEHCYYKGNILNEKNSVASISTCDGLRGYFTHHHQRYQIKPLKSTDEKEHAVFTSNQEEQDPANHTCGVKSTDGKQGPIRISRSLKSPEKEDFLRAQKYIDLYLVLDNAFYKNYNENLTLIRSFVFDVMNLLNVIYNTIDVQVALVGMEIWSDGDKIKVVPSASTTFDNFLRWHSSNLGKKIHDHAQLLSGISFNNRRVGLAASNSLCSPSSVAVIEAKKKNNVALVGVMSHELGHVLGMPDVPFNTKCPSGSCVMNQYLSSKFPKDFSTSCRAHFERYLLSQKPKCLLQAPIPTNIMTTPVCGNHLLEVGEDCDCGSPKECTNLCCEALTCKLKPGTDCGGDAPNHTTE

SEQ ID NO: 794694 - protein, 485 aa, Homo sapiens; identical to SEQ ID NO: 794693

SEQ ID NO: 794695 - protein, 37 aa, Homo sapiens
MPAAAGEAQLGLHNPQGQREPCPYRVGGAGAHTPGHS

SEQ ID NO: 794696 - protein, 111 aa, Homo sapiens
RECYVAPIRLVYIKGVVILPSNWWFPRTLCVSPEGYVTLPQVLSQRVLSLSHQTEESSKLRNHFRLGAVAHACNPSTLGGRGGRITRSGVRDHSGQHGELSPQPRRWDQHN

SEQ ID NO: 794697 - protein, 120 aa, Homo sapiens
MRPKTLRNSAARSRKEPGFLNHHMEGSCLQLGELSSVGYWWPFGHPGPAQGHLPVAVWASWVVAGISIALYLPPHPEGRHALWNREPFGRCKRIPGNGSKALEEFKYVLGQDKSLSSSRL

SEQ ID NO: 794698 - protein, 106 aa, Homo sapiens
MRPKTLRNSAARSRKEPGFLNHHMEGSCLQLGELSSVGYWWPFGHPGPAQGHLPVAVWASWVVAGISIALYLPPHPEGRYEGPFKRHTKTFRSAQCADCLTCALEP

SEQ ID NO: 794699 - protein, 102 aa, Homo sapiens
RGAGAAEMQAMQPRSSESWDDSCPCWKGPCQSWQGSTALGQEMLVESWKTMWGTGSGHRMVIVLLQDLDMDGEKQRRTFQVCPTGHAHHTLPALFRRPVRNT

SEQ ID NO: 794700 - protein, 74 aa, Homo sapiens
NIGVLVNRIHRASFTTALCNLLCDDAHQSFHKHYLSTQVGEHRPRNHRLKFATPAVPVGLHSLNRGEVSERVWM

SEQ ID NO: 794701 - protein, 110 aa, Homo sapiens
MSRIGLQPEKGDGVVSRLLFKRAYLNWVGLVLSMLITQNDFPKEFDTSDPNSVPFDFTNSIFHLVASLASSSSLFHIGESSRKCLSGYFLFSFSFYSQSFLTHFFPSNTL

SEQ ID NO: 794702 - protein, 256 aa, Homo sapiens
RTWAGGLEKPALERNGSSCLGAKGRGTPTWTPKSRTRGWARGCEGIFSGSSNGGEKCFSKGKKRHSSSSSQSSEISTKSKSVDSSLGGLSRSSTVASLDTDSTKSSGQSNNNSDTCAEFRIKYVGAIEKLKLSEGKGLEGPLDLINYIDVAQQDGKLPFVPPEEEFIMGVSKYGIKVSTSDQYDVLHRHALYLIIRMVCYDDGLGAGKSLLALKTTDASNEEYSLWVYQCNSLEQAQAICKVLSTAFDSVLTSEKP

SEQ ID NO: 794703 - protein, 240 aa, Homo sapiens
RTWAGGLEKPALERNGSSCLGAKGRGTPTWTPKSRTRGWARGCEGIFSGSSNGGEKCFSKGKKRHSSSSSQSSEISTKSKSVDSSLGGLSRSSTVASLDTDSTKSSGQSNNNSDTCAEFRIKYVGAIEKLKLSEGKGLEGPLDLINYIDVAQQDGKLPFVPPEEEFIMGVSKYGIKVSTSDQYDVLHRHALYLIIRMVCYDDGLGAGKSLLALKTTDASNEEYSLWVYQCNSLVRLRYFG

SEQ ID NO: 794704 - protein, 116 aa, Homo sapiens
ITIWCNVSGYQGPSEQNFQWSIYLPSSPEREVQIVSTMDSSFPYAIYTQRVRGGKIFIERVQGNPTLLHITDLQARDAGEYECHTPSTEKQYFGSYSAKMNLVGKEKLSSRCQRLA

SEQ ID NO: 794705 - protein, 166 aa, Homo sapiens
GLTLSLWLECSGIISAHCNLCLPSSSDPSTSASQVAGTTGVCHHAWVIFCIFCRPGFLPCCPGWLELLASSSLPTLTSQSSGITGVRHHARLYITIINTYACNTRAPRYIRKTLIDLKGELDCNTIIVGDFNTPLSVIDTSSRQKVNRETMELNYMLDLISLTDIY

SEQ ID NO: 794706 - protein, 177 aa, Homo sapiens
LLALLGGCGGGGGGGGGGAAALPACCKHDGRPRGAGRAAGAAEGKVVCIILELAQVLPPDTLPNRTVTLILSNNKISELQNGSFSGLTLLERLDLRNNLISRIDPGAFWGLSSLKRLDLTNNRIGCLNANIFRGLTNLARLNLSGNLFSSLPQGTFDYLSSLRSLEFQTEYLLCDCN

SEQ ID NO: 794707 - protein, 80 aa, Homo sapiens
QVALLVEPTGEHGPTVGVRRDNGGTLPSCVCTSHCARMIMVLAYKVTYFSCNLVPKLKKMPLSGNQLGKTLAEPHTFKYL

SEQ ID NO: 794708 - protein, 120 aa, Homo sapiens [sequence omitted]

SEQ ID NO: 794709 - protein, 102 aa, Homo sapiens
MGQVPSPPPTPHHQNTPWLPSWFPGQSEIQTKGEEATSGRFPSPCFPSPPAPGSPHVATSSLARLASDATIPGRGLWRKEGWLRAQLGSGLCPTMRGQFPFV

SEQ ID NO: 794710 - protein, 115 aa, Homo sapiens
RSKTHQRKVMWVYTWEQHYLAILGPEALIMASPMHNFDVGISFPIPFRILPCQVLSLMKYSLGQAQWLMPVIPALWEAKVGGSPEVRSSRPAWPTWQNPVSTEKKIQKLAGHGGS

SEQ ID NO: 794711 - protein, 254 aa, Homo sapiens
MATAGNPWGWFLGYLILGVAGSLVSGSCSQIINGEDCSPHSQPWQAALVMENELFCSGVLVHPQWVLSAAHCFQNSYTIGLGLHSLEADQEPGSQMVEASLSVRHPEYNRPLLANDLMLIKLDESVSESDTIRSISIASQCPTAGNSCLVSGWGLLANGRMPTVLQCVNVSVVSEEVCSKLYDPLYHPSMFCAGGGHDQKDSCNGDSGGPLICNGYLQGLVSFGKAPCGQVGVPGVYTNLCKFTEWIEKTVQAS

SEQ ID NO: 794712 - protein, 1040 aa, Homo sapiens
MGEEGGSASHDEEERASVLLGHSPGCEMCSQEAFQAQRSQLVELLVSGSLEGFESVLDWLLSWEVLSWEDYEGFHLLGQPLSHLARRLLDTVWNKGTWACQKLIAAAQEAQADSQSPKLHGCWDPHSLHPARDLQSHRPAIVRRLHSHVENMLDLAWERGFVSQYECDEIRLPIFTPSQRARRLLDLATVKANGLAAFLLQHVQELPVPLALPLEAATCKKYMAKLRTTVSAQSRFLSTYDGAETLCLEDIYTENVLEVWADVGMAGPPQKSPATLGLEELFSTPGHLNDDADTVLVVGEAGSGKSTLLQRLHLLWAAGQDFQEFLFVFPFSCRQLQCMAKPLSVRTLLFEHCCWPDVGQEDIFQLLLDHPDRVLLTFDGFDEFKFRFTDRERHCSPTDPTSVQTLLFNLLQGNLLKNARKVVTSRPAAVSAFLRKYIRTEFNLKGFSEQGIELYLRKRHHEPGVADRLIRLLQETSALHGLCHLPVFSWMVSKCHQELLLQEGGSPKTTTDMYLLILQHFLLHATPPDSASQGLGPSLLRGRLPTLLHLGRLALWGLGMCCYVFSAQQLQAAQVSPDDISLGFLVRAKGVVPGSTAPLEFLHITFQCFFAAFYLALSADVPPALLRHLFNCGRPGNSPMARLLPTMCIQASEGKDSSVAALLQKAEPHNLQITAAFLAGLLSREHWGLLAECQTSEKALLRRQACARWCLARSLRKHFHSIPPAAPGEAKSVHAMPGFIWLIRSLYEMQEERLARKAARGLNVGHLKLTFCSVGPTECAALAFVLQHLRRPVALQLDYNSVGDIGVEQLLPCLGVCKALYLRDNNISDRGICKLIECALHCEQLQKLALFNNKLTDGCAHSMAKLLACRQNFLALRLGNNYITAAGAQVLAEGLRGNTSLQFLGFWGNRVGDEGAQALAEALGDHQSLRWLSLVGNNIGSVGAQALALMLAKNVMLEELCLEENHLQDEGVCSLAEGLKKNSSLKILKLSNNCITYLGAEALLQALERNDTILEVWLRGNTFSLEEVDKLGCRDTRLLL

SEQ ID NO: 794713 - protein, 1040 aa, Homo sapiens; identical to SEQ ID NO: 794712

SEQ ID NO: 794714 - protein, 89 aa, Homo sapiens
MWPPQHSWGWDSVCGDSPASRPQLQATMTLDVKAEWWPLAWWVLRVRSSQAALVAQVVLKKKHLAKVPHADRRPRPRQHRADGGTAEPS

SEQ ID NO: 794715 - protein, 93 aa, Homo sapiens
SGSPLRSGKEGQVRAVAQPRLPAGSRFSTSPTPALTSPKEHPPLFLEVPGLRPPCGKFSVGVTSQRRAGLMPPFGLGGGAILIEIWQCRDRYT

SEQ ID NO: 794716 - protein, 110 aa, Homo sapiens
EKPARYRRAVSYDSKEYYMRLASGNPAIVQDAIVESSEGEAAQQEPEHGEDTIAKVKGLVKPPLKRSRSAPDGGDEENQEQLQDQIAEGSSIEEEEKTDNATLLRLLEEG

SEQ ID NO: 794717 - protein, 757 aa, Homo sapiens [sequence omitted]

SEQ ID NO: 794718 - protein, 759 aa, Homo sapiens
MMAALYPSTDLSGASSSSLPSSPSSSSPNEVMALKDVREVKEENTLNEKLFLLACDKGDYYMVKKILEENSSGDLNINCVDVLGRNAVTITIENENLDILQLLLDYGCQKLMERIQNPEYSTTMDVAPVILAAHRNNYEILTMLLKQDVSLPKPHAVGCECTLCSAKNKKDSLRHSRFRLDIYRCLASPALIMLTEEDPILRAFELSADLKELSLVEVEFRNDYEELARQCKMFAKDLLAQARNSRELEVILNHTSSDEPLDKRGLLEERMNLSRLKLAIKYNQKEFVSQSNCQQFLNTVWFGQMSGYRRKPTCKKIMTVLTVGIFWPVLSLCYLIAPKSQFGRIIHTPFMKFIIHGASYFTFLLLLNLYSLVYNEDKKNTMGPALERIDYLLILWIIGMIWSDIKRLWYEGLEDFLEESRNQLSFVMNSLYLATFALKVVAHNKFHDFADRKDWDAFHPTLVAEGLFAFANVLSYLRLFFMYTTSSILGPLQISMGQMLQDFGKFLGMFLLVLFSFTIGLTQLYDKGYTSKEQKDCVGIFCEQQSNDTFHSFIGTCFALFWYIFSLAHVAIFVTRFSYGEELQSFVGAVIVGTYNVVVVIVLTKLLVAMLHKSFQLIANHEDKEWKFARAKLWLSYFDDKCTLPPPFNIIPSPKTICYMISSLSKWICSHTSKGKVKRQNSLKEWRNLKQKRDENYQKVMCCLVHRYLTSMRQKMQSTDQATVENLNELRQDLSKFRNEIRDLLGFRTSKYAMFYPRN

SEQ ID NO: 794719 - protein, 759 aa, Homo sapiens; identical to SEQ ID NO: 794718

SEQ ID NO: 794720 - protein, 793 aa, Homo sapiens
MMAALYPSTDLSGASSSSLPSSPSSSSPNEVMALKDVREVKEENTLNEKLFLLACDKGDYYMVKKILEENSSGDLNINCVDVLGRNAVTITIENENLDILQLLLDYGCQSADALLVAIDSEVVGAVDILLNHRPKRSSRPTIVKLMERIQNPEYSTTMDVAPVILAAHRNNYEILTMLLKQDVSLPKPHAVGCECTLCSAKNKKDSLRHSRFRLDIYRCLASPALIMLTEEDPILRAFELSADLKELSLVEVEFRNDYEELARQCKMFAKDLLAQARNSRELEVILNHTSSDEPLDKRGLLEERMNLSRLKLAIKYNQKEFVSQSNCQQFLNTVWFGQMSGYRRKPTCKKIMTVLTVGIFWPVLSLCYLIAPKSQFGRIIHTPFMKFIIHGASYFTFLLLLNLYSLVYNEDKKNTMGPALERIDYLLILWIIGMIWSDIKRLWYEGLEDFLEESRNQLSFVMNSLYLATFALKVVAHNKFHDFADRKDWDAFHPTLVAEGLFAFANVLSYLRLFFMYTTSSILGPLQISMGQMLQDFGKFLGMFLLVLFSFTIGLTQLYDKGYTSKEQKDCVGIFCEQQSNDTFHSFIGTCFALFWYIFSLAHVAIFVTRFSYGEELQSFVGAVIVGTYNVVVVIVLTKLLVAMLHKSFQLIANHEDKEWKFARAKLWLSYFDDKCTLPPPFNIIPSPKTICYMISSLSKWICSHTSKGKVKRQNSLKEWRNLKQKRDENYQKVMCCLVHRYLTSMRQKMQSTDQATVENLNELRQDLSKFRNEIRDLLGFRTSKYAMFYPRN

SEQ ID NO: 794721 - protein, 264 aa, Homo sapiens
MGQMLQDFGKFLGMFLLVLFSFTIGLTQLYDKGYTSKEQKDCVGIFCEQQSNDTFHSFIGTCFALFWYIFSLAHVAIFVTRFSYGEELQSFVGAVIVGTYNVVVVIVLTKLLVAMLHKSFQLIANHEDKEWKFARAKLWLSYFDDKCTLPPPFNIIPSPKTICYMISSLSKWICSHTSKGKVKRQNSLKEWRNLKQKRDENYQKVMCCLVHRYLTSMRQKMQSTDQATVENLNELRQDLSKFRNEIRDLLGFRTSKYAMFYPRN

SEQ ID NO: 794722 - protein, 318 aa, Homo sapiens
MEEPGATPQPYLGLVLEELRRVVAALPESMRPDENPYGFPSELVVCAAVIGFFVVLLFLWRSFRSVRSRLYVGREQKLGATLSGLIEEKCKLLEKFSLIQKEYEGYEVESSLEDASFEKAAAEEARSLEATCEKLNRSNSELEDEILCLEKDLKEEKSKHSQQDELMADISKSIQSLEDESKSLKSQIAEAKIICKTFKMSEERRAIAIKDALNENSQLQTSHKQLFQQEAEVWKGEVSELNKQKITFEDSKVHAEQVLNDKENHIKTLTGHLPMMKDQAAVLEEDTTDDDNLELEVNSQWENGANLDDPLKGALKKL

SEQ ID NO: 794723 - protein, 187 aa, Homo sapiens
SIQVIFKKKVSLLNIATRITGGGKSGTVSSQKQPPSKATSDKTDSALNIATEIKDGLQCGTVSSQKQPALKATTDEEDSVSNIATEIKDGEKSGTVSSQKQPALKATTDEEDSVLNIATEIKDGEKSETVSSQKQPALKATTDEEDSVSIIATEIKDGEKSGTVSSRKKPALKATSDEKDSFSNITR

SEQ ID NO: 794724 - protein, 88 aa, Homo sapiens
LQTPHVLTLGFFLLPTPVPLTVLGDPLLVWESLDEVEGWSPCGGGGVSPRFAVGTGGGHSWLRRSGNSHSRGKSIHFVDAAANLVVVG

SEQ ID NO: 794725 - protein, 74 aa, Homo sapiens
LQERVGRVRESSRTAPVGCTSLTLLLPLKSSYLTACSKPVSWLQEDSHFFPEPSVMEGGPDFECLPQHAGLPVT

SEQ ID NO: 794726 - protein, 1324 aa, Homo sapiens
MGAPSACRTLVLALAAMLVVPQAETQGPVEPSWENAGHTMDGGAPTSSPTRRVSFVPPVTVFPSLSPLNPAHNGRVCSTWGDFHYKTFDGDVFRFPGLCNYVFSEHCRAAYEDFNVQLRRGLVGSRPVVTRVVIKAQGLVLEASNGSVLINGQREELPYSRTGLLVEQSGDYIKVSIRLVLTFLWNGEDSALLELDPKYANQTCGLCGDFNGLPAFNEFYAHNARLTPLQFGNLQKLDGPTEQCPDPLPLPAGNCTDEEGICHRTLLGPAFAECHALVDSTAYLAACAQDLCRCPTCPCATFVEYSRQCAHAGGQPRNWRCPELCPRTCPLNMQHQECGSPCTDTCSNPQRAQLCEDHCVDGCFCPPGTVLDDITHSGCLPLGQCPCTHGGRTYSPGTSFNTTCSSCTCSGGLWQCQDLPCPGTCSVQGGAHISTYDEKLYDLHGDCSYVLSKKCADSSFTVLAELRKCGLTDNENCLKAVTLSLDGGDTAIRVQADGGVFLNSIYTQLPLSAANITLFTPSSFFIVVQTGLGLQLLVQLVPLMQVFVRLDPAHQGQMCGLCGNFNQNQADDFTALSGVVEATGAAFANTWKAQAACANARNSFEDPCSLSVENENYARHWCSRLTDPNSAFSRCHSIINPKPFHSNCMFDTCNCERSEDCLCAALSSYVHACAAKGVQLSDWRDGVCTKYMQNCPKSQRYAYVVDACQPTCRGLSEADVTCSVSFVPVDGCTCPAGTFLNDAGACVPAQECPCYAHGTVLAPGEVVHDEGAVCSCTGGKLSCLGASLQKSTGCAAPMVYLDCSNSSAGTPGAECLRSCHTLDVGCFSTHCVSGCVCPPGLVSDGSGGCIAEEDCPCVHNEATYKPGETIRVDCNTCTCRNRRWECSHRLCLGTCVAYGDGHFITFDGDRYSFEGSCEYILAQDYCGDNTTHGTFRIVTENIPCGTTGTTCSKAIKLFVESYELILQEGTFKAVARGPGGDPPYKIRYMGIFLVIETHGMAVSWDRKTSVFIRLHQDYKGRVCGLCGNFDDNAINDFATRSRSVVGDALEFGNSWKLSPSCPDALAPKDPCTANPFRKSWAQKQCSILHGPTFAACRSQVDSTKYYEACVNDACACDSGGDCECFCTAVAAYAQACHDAGLCVSWRTPDTCPLFCDFYNPHGGCEWHYQPCGAPCLKTCRNPSGHCLVDLPGLEGCYPKCPPSQPFFNEDQMKCVAQCGCYDKDGNYYDVGARVPTAENCQSCNCTPSGIQCAHSLEACTCTYEDRTYSYQDVIYNTTDGLGACLIAICGSNGTIIRKAVACPGTPATTPFTFTTAWVPHSTTS

SEQ ID NO: 794727 - protein, 97 aa, Homo sapiens
  misc_feature (3)..(3): Xaa can be any naturally occurring amino acid
TLXRSPDVPVLVLTDADGPFFRCFSAVKPGTYYSNCMFDTCNCERSEDCLCAALSSYVHACAAKGVQLSDWRDGVCTKPMTTCPKSMTYHYHASTTN

SEQ ID NO: 794728 - protein, 465 aa, Homo sapiens
MAGVPSLAHCAPQEGICHRTLLGPAFAECHALVDSTAYLAACAQDLCRCPTCPCATFVEYSRQCAHAGGQPRNWRCPELCPRTCPLNMQHQECGSPCTDTCSNPQRAQLCEDHCVDGCFCPPGTVLDDITHSGCLPLGQCPCTHGGRTYSPGTSFNTTCSSCTCSGGLWQCQDLPCPGTCSVQGGAHISTYDEKLYDLHGDCSYVLSKKCADSSFTVLAELRKCGLTDNENCLKAVTLSLDGGDTAIRVQADGGVFLNSIYTQLPLSAANITLFTPSSFFIVVQTGLGLQLLVQLVPLMQVFVRLDPAHQGQMCGLCGNFNQNQADDFTALSGVVEATGAAFANTWKAQAACANARNSFEDPCSLSVENENYARHWCSRLTDPNSAFSRCHSIINPKPFHSNCMFDTCNCERSEDCLCAALSSYVHACAAKGVQLSDWRDGVCTKPMTTCPKSMTYHYHASTTNT

SEQ ID NO: 794729 - protein, 36 aa, Homo sapiens
LRGGAVAHIHARQPQFLCSFYSVTTVFPGGGECGGG

SEQ ID NO: 794730 - protein, 95 aa, Homo sapiens
RELEYQEIAPGMTESEIIGQGNASANKIQDQVAGIWESLAPQQMPLTTHKSGETGHQTTSGICEELHPLAISDIRKQSREQEKNAATSFLPSSFQ

SEQ ID NO: 794731 - protein, 465 aa, Homo sapiens
SPGYLQPWPMAVPGAEPAPLRALLRAGMTWIQTPSTTGRRRRELERVGAQRPEEGGGDTERGERGERGGRRAREQTPSRIQSPAAAKQQLRPRPCQSRCVRLAPLRLRPSGLPRMEDSQETSPSSNNSSEELSSALHLSKGMSIFLDILRRADKNDDGKLSFEEFKAYFADGVLSGEELHELFHTIDTHNTNNLDTEELCEYFSQHLGEYENVLAALEDLNLSILKAMGKTKKDYQEASNLEQFVTRFLLKETLNQLQSLQNSLECAMETTEEQTRQERQGPAKPEVLSIQWPGKRSSRRVQRHNSFSPNSPQFNVSGPGLLEEDNQWMTQINRLQKLIDRLEKKDLKLEPPEEEIIEGNTKSHIMLVQRQMSVIEEDLEEFQLALKHYVESASSQSGCLRISIQKLSNESRYMIYEFWENSSVWNSHLQTNYSKTFQRSNVDFLETPELTSTMLVPASWWILNN

SEQ ID NO: 794732 - protein, 579 aa, Homo sapiens
SPGYLQPWPMAVPGAEPAPLRALLRAGMTWIQTPSTTGRRRRELERVGAQRPEEGGGDTERGERGERGGRRARERTPSRIQSPAAAKQQLRPRPCQSRCVRLAPLRLRPSGLPRMEDSQETSPSSNNSSEELSSALHLSKGMSIFLDTYLTDDADQQLTDWTHTYSFDTTFKRTYFWHDLGDYISGRPPLTPTAISNTTLDYPTSLPYLHCLDPALDHEAYLLEPTLTPTTSAYERRRYLNDHLVRYDPDKLLHPEPTWTLSLYPHYPVDNGDERGRGHTQPPHRTKRHLNAQQTAQRTPFADKIDMEDNTNAMYLEITNHYSASCQVDTFSGTTEAHTKMPPLSNDSETELSEGNPVPVPLNNKQISPRTCGHTTWICAPTVIAHENKSTVGTGDKTAKEYTTPEIQQEGIQACAPTQEESHPKEAQKYETATNSPQRDPPGGKTRNQIAPNTPPGWHPPLGGTKHTTRTAPQQEPPCTPGNNLTKETAEHEPTKNNKQTLSPVSNHRKKDHTGGAHITKEKECYTRWISPDDRREPTHERKIKQISKTPKDTRDTQQTPKDRGDTLRKPPQEKRTQQ

SEQ ID NO: 794733 - protein, 450 aa, Homo sapiens
SPGYLQPWPMAVPGAEPAPLRALLRAGMTWIQTPSTTGRRRRELERVGAQRPEEGGGDTERGERGERGGRRAREQTPSRIQSPAAAKQQLRPRPCQSRCVRLAPLRLRPSGLPRMEDSQETSPSSNNSSEELSSALHLSKGMSIFLDILRRADKNDDGKLSFEEFKAYFADGVLSGEELHELFHTIDTHNTNNLDTEELCEYFSQHLGEYENVLAALEDLNLSILKAMGKTKKDYQEASNLEQFVTRFLLKETLNQLQSLQNSLECAMETTEEQTRQERQGPAKPEVLSIQWPGKRSSRRVQRHNSFSPNSPQFNVSGPGLLEEDNQWMTQINRLQKLIDRLEKKAKSHIMLVQRQMSVIEEDLEEFQLALKHYVESASSQSGCLRISIQKLSNESRYMIYEFWENSSVWNSHLQTNYSKTFQRSNVDFLETPELTSTMLVPASWWILNN

SEQ ID NO: 794734 - protein, 794 aa, Homo sapiens
KPDSWLEPLLLSTMAKTPSDHLLSTLEELVPYDFEKFKFKLQNTSVQKEHSRIPRSQIQRARPVKMATLLVTYYGEEYAVQLTLQVLRAINQRLLAEELHRAAIQEYSTQENGTDDSAASSSLGENKPRSLKTPDHPEGNEGNGPRPYGGGAASLRCSQPEAGRGLSRKPLSKRREKASEGLDAQGKPRTRSPALPGGRSPGPCRALEGGQAEVRLRRNASSAGRLQGLAGGAPGQKECRPFEVYLPSGKMRPRSLEVTISTGEKAPANPEILLTLEEKTAANLDSATEPRARPTPDGGASADLKEGPGNPEHSVTGRPPDTAASPRCHAQEGDPVDGTCVRDSCSFPEAVSGHPQASGSRSPGCPRCQDSHERKSPGSLSPQPLPQCKRHLKQVQLLFCEDHDEPICLICSLSQEHQGHRVRPIEEVALEHKKKIQKQLEHLKKLRKSGEEQRSYGEEKAVSFLKQTEALKQRVQRKLEQVYYFLEQQEHFFVASLEDVGQMVGQIRKAYDTRVSQDIALLDALIGELEAKECQSEWELLQDIGDILHRAKTVPVPEKWTTPQEIKQKIQLLHQKSEFVEKSTKYFSETLRSEMEMFNVPELIGAQAHAVNVILDAETAYPNLIFSDDLKSVRLGNKWERLPDGPQRFDSCIIVLGSPSFLSGRRYWEVEVGDKTAWILGACKTSISRKGNMTLSPENGYWVVIMMKENEYQASSVPPTRLLIKEPPKRVGIFVDYRVGSISFYNVTARSHIYTFASCSFSGPLQPIFSPGTRDGGKNTAPLTICPVGGQGPD

SEQ ID NO: 794735 - protein, 323 aa, Homo sapiens
QIQAFQQVLFFQKKIQKQLEHLKKLRKSGEEQRSYGEEKAVSFLKQTEALKQRVQRKLEQVYYFLEQQEHFFVASLEDVGQMVGQIRKAYDTRVSQDIALLDALIGELEAKECQSEWELLQDIGDILHSSELIGAQAHAVNVILDAETAYPNLIFSDDLKSVRLGNKWERLPDGPQRFDSCIIVLGSPSFLSGRRYWEVEVGDKTAWILGACKTSISRKGNMTLSPENGYWVVIMMKENEYQASSVPPTRLLIKEPPKRVGIFVDYRVGSISFYNVTARSHIYTFASCSFSGPLQPIFSPGTRDGGKNTAPLTICPVGGQGPD

SEQ ID NO: 794736 - protein, 913 aa, Homo sapiens
MKDSENKGASSPDMEPSYGGGLFDMVKGGAGRLFSNLKDNLKDTLKDTSSRVIQSVTSYTKGDLDFTYVTSRIIVMSFPLDNVDIGFRNQVDDIRSFLDSRHLDHYTVYNLSPKSYRTAKFHSRVSECSWPIRQAPSLHNLFAVCRNMYNWLLQNPKNVCVVHCLMDGRHHQFWLVLCSFSVISTLLLAQPFDCYDAKRPGIGLSPSHRRYLGYMCDLLADKPYRPHFKPLTIKSITVSPIPFFNKQRNGCRPYCDVLIGETKIYSTCTDFERMKEYRVQDGKIFIPLNITVQGDVVVSMYHLRSTIGSRLQAKVTNTQIFQLQFHTGFIPLDTTVLKFTKPELDACDVPEKYPQLFQVTLDVELQPHDKVIDLTPPWEHYCTKDVNPSILFSSHQEHQDTLALGGQAPIDIPPDNPRHYGQSGFFASLCWQDQKSEKSFCEEDHAALVNQESEQSDDELLTLSSPHGNANGDKPHGVKKPSKKQQEPAAPPPPEDVDLLGLEGSAMSNSFSPPAAPPTNSELLSDLFGGGGAAGPTQAGQSGVEDVFHPSGPASTQSTPRRSATSTSASPTLRVGEGATFDPFGAPSKPSGQDLLGSFLNTSSASSDPFLQPTRSPSPTVHASSTPAVNIQPDVSGGWDWHAKPGGFGMGSKSAATSPTGSSHGTPTHQSKPQTLDPFADLGTLGSSSFASKPTTPTGLGGGFPPLSSPQKASPQPMGGGWQQGGAYNWQQPQPKPQPSMPHSSPQNRPNYNVSFSAMPGGQNERGKGSSNLEGKQKAADFEDLLSGQGFNAHKDKKGPRTIAEMRKEEMAKEMDPEKLKILEWIEGKERNIRALLSTMHTVLWAGETKWKPVGMADLVTPEQVKKVYRKAVLVVHPDKATGQPYEQYAKMIFMELNDAWSEFENQGQKPLY

SEQ ID NO: 794737 - protein, 173 aa, Homo sapiens
MFIFCNLYSTPGPAIRLLYAKRPGIGLSPSHRRYLGYMCDLLADKPYRPHFKPLTIKSITVSPIPFFNKQRNGCRPYCDVLIGETKIYSTCTDFERMKEYRVQDGKIFIPLNITVQGDVVVSMYHLRSTIGSRLQAKVTNTQIFQLQFHTGFIPLDTTVLKFTNLSEMHVMYQ

SEQ ID NO: 794738 - protein, 970 aa, Homo sapiens
LADARRRRRAVALGSGDRGGGGRGAPMGATEKGGQKSRKLFSLRRPWKATRRLWRPRSARQAAQGASSPDMEPSYGGGLFDMVKGGAGRLFSNLKDNLKDTLKDTSSRVIQSVTSYTKGDLDFTYVTSRIIVMSFPLDNVDIGFRNQVDDIRSFLDSRHLDHYTVYNLSPKSYRTAKFHSRVSECSWPIRQAPSLHNLFAVCRNMYNWLLQNPKNVCVVHCLDGRAASSILVGAMFIFCNLYSTPGPAIRLLYAKRPGIGLSPSHRRYLGYMCDLLADKPYRPHFKPLTIKSITVSPIPFFNKQRNGCRPYCDVLIGETKIYSTCTDFERMKEYRVQDGKIFIPLNITVQGDVVVSMYHLRSTIGSRLQAKVTNTQIFQLQFHTGFIPLDTTVLKFTKPELDACDVPEKYPQLFQVTLDVELQPHDKVIDLTPPWEHYCTKDVNPSILFSSHQEHQDTLALGGQAPIDIPPDNPRHYGQSGFFASLCWQDQKSEKSFCEEDHAALVNQESEQSDDELLTLSSPHGNANGDKPHGVKKPSKKQQEPAAPPPPEDVDLLGLEGSAMSNSFSPPAAPPTNSELLSDLFGGGGAAGPTQAGQSGVEDVFHPSGPASTQSTPRRSATSTSASPTLRVGEGATFDPFGAPSKPSGQDLLGSFLNTSSASSDPFLQPTRSPSPTVHASSTPAVNIQPDVSGGWDWHAKPGGFGMGSKSAATSPTGSSHGTPTHQSKPQTLDPFADLGTLGSSSFASKPTTPTGLGGGFPPLSSPQKASPQPMGGGWQQGGAYNWQQPQPKPQPSMPHSSPQNRPNYNVSFSAMPGGQNERGKGSSNLEGKQKAADFEDLLSGQGFNAHKDKKGPRTIAEMRKEEMAKEMDPEKLKILEWIEGKERNIRALLSTMHTVLWAGETKWKPVGMADLVTPEQVKKVYRKAVLVVHPDKATGQPYEQYAKMIFMELNDAWSEFENQGQKPLY

SEQ ID NO: 794739 - protein, 900 aa, Homo sapiens
MEPSYGGGLFDMVKGGAGRLFSNLKDNLKDTLKDTSSRVIQSVTSYTKGDLDFTYVTSRIIVMSFPLDNVDIGFRNQVDDIRSFLDSRHLDHYTVYNLSPKSYRTAKFHSRVSECSWPIRQAPSLHNLFAVCRNMYNWLLQNPKNVCVVHCLMDGRHHQFWLVLCSFSVISTLLLAQPFDCYDAKRPGIGLSPSHRRYLGYMCDLLADKPYRPHFKPLTIKSITVSPIPFFNKQRNGCRPYCDVLIGETKIYSTCTDFERMKEYRVQDGKIFIPLNITVQGDVVVSMYHLRSTIGSRLQAKVTNTQIFQLQFHTGFIPLDTTVLKFTKPELDACDVPEKYPQLFQVTLDVELQPHDKVIDLTPPWEHYCTKDVNPSILFSSHQEHQDTLALGGQAPIDIPPDNPRHYGQSGFFASLCWQDQKSEKSFCEEDHAALVNQESEQSDDELLTLSSPHGNANGDKPHGVKKPSKKQQEPAAPPPPEDVDLLGLEGSAMSNSFSPPAAPPTNSELLSDLFGGGGAAGPTQAGQSGVEDVFHPSGPASTQSTPRRSATSTSASPTLRVGEGATFDPFGAPSKPSGQDLLGSFLNTSSASSDPFLQPTRSPSPTVHASSTPAVNIQPDVSGGWDWHAKPGGFGMGSKSAATSPTGSSHGTPTHQSKPQTLDPFADLGTLGSSSFASKPTTPTGLGGGFPPLSSPQKASPQPMGGGWQQGGAYNWQQPQPKPQPSMPHSSPQNRPNYNVSFSAMPGGQNERGKGSSNLEGKQKAADFEDLLSGQGFNAHKDKKGPRTIAEMRKEEMAKEMDPEKLKILEWIEGKERNIRALLSTMHTVLWAGETKWKPVGMADLVTPEQVKKVYRKAVLVVHPDKATGQPYEQYAKMIFMELNDAWSEFENQGQKPLY

SEQ ID NO: 794740 - protein, 240 aa, Homo sapiens
MLHHNRSTAAALGSSSFASKPTTPTGLGGGFPPLSSPQKASPQPMGGGWQQGGAYNWQQPQPKPQPSMPHSSPQNRPNYNVSFSAMPGGQNERGKGSSNLEGKQKAADFEDLLSGQGFNAHKDKKGPRTIAEMRKEEMAKEMDPEKLKILEWIEGKERNIRALLSTMHTVLWAGETKWKPVGMADLVTPEQVKKVYRKAVLVVHPDKATGQPYEQYAKMIFMELNDAWSEFENQGQKPLY

SEQ ID NO: 794741 - protein, 970 aa, Homo sapiens; identical to SEQ ID NO: 794738

SEQ ID NO: 794742 - protein, 970 aa, Homo sapiens; identical to SEQ ID NO: 794738

SEQ ID NO: 794743 - protein, 949 aa, Homo sapiens
LADARRRRRAVALGSGDRGGGGRGAPMGATEKGGQKSRKLFSLRRPWKATRRLWRPRSARQAAQGASSPDMEPSYGGGLFDMVKGGAGRLFSNLKDNLKDTLKDTSSRVIQSVTSYTKGDLDFTYVTSRIIVMSFPLDNVDIGFRNQVDDIRSFLDSRHLDHYTVYNLSPKSYRTAKFHSRVSECSWPIRQAPSLHNLFAVCRNMYNWLLQNPKNVCVVHCLDGRAASSILVGAMFIFCNLYSTPGPAIRLLYAKRPGIGLSPSHRRYLGYMCDLLADKPYRPHFKPLTIKSITVSPIPFFNKQRNGCRPYCDVLIGETKIYSTCTDFERMKEYRVQDGKIFIPLNITVQGDVVVSMYHLRSTIGSRLQAKVTNTQIFQLQFHTGFIPLDTTVLKFTKPELDACDVPEKYPQLFQVTLDVELQPHDKVIDLTPPWEHYCTKDVNPSILFSSHQEHQDTLALGGQAPIDIPPDNPRHYGQSGFFASLCWQDQKSEKSFCEEDHAALVNQESEQSDDELLTLSSPHGNANGDKPHGVKKPSKKQQEPAAPPPPEDVDLLGLEGSAMSNSFSPPAAPPTNSELLSDLFGGGGAAGPTQAGQSGVEDVFHPSGPASTQSTPRRSATSTSASPTLRVGEGATFDPFGAPSKPSGQDLLGSFLNTSSASSDPFLQPTRSPSPTVHASSTPAVNIQPDVSGGWDWHAKPGGFGMGSKSAATSPTGSSHGTPTHQSKPQTLDPFADLGTLGSSSFASKPTTPTGLGGGFPPLSSPQKASPQPMGGGWQQGGAYNWQQPQPKPQPSMPHSSPQNRPNYNVSFSAMPGGQNERGKGSSNLEGKQKAADFEDLLSGQGFNAHKDKKGPRTIAEMRKEEMAKEMDPEKLKILEWIEGKERNIRALLSTMHTVLWAGETKWKPVGMADPVRWLVSICSEEPGPTSPQGKSRPIKLLQWAFLF

SEQ ID NO: 794744 - protein, 248 aa, Homo sapiens
LADARRRRRAVALGSGDRGGGGRGAPMGATEKGGQKSRKLFSLRRPWKATRRLWRPRSARQAAQGASSPDMEPSYGGGLFDMVKGGAGRLFSNLKDNLKDTLKDTSSRVIQSVTSYTKGDLDFTYVTSRIIVMSFPLDNVDIGFRNQVDDIRSFLDSRHLDHYTVYNLSPKSYRTAKFHSRVSECSWPIRQAPSLHNLFAVCRNMYNWLLQNPKNVCVVHCLVSNLLLLVVMVWFGQIWMSLYTMVDR

SEQ ID NO: 794745 - protein, 91 aa, Homo sapiens
LPALGSGQQEALRELELTLLCFCFCFCSVRSLRLPLASIPHERHPCGFRRSRVNLGEKRGTQGGDLRACLIHPWTSLPETKWAAHLCDPQS

SEQ ID NO: 794746 - protein, 262 aa, Homo sapiens
GLNGPSSRNRRDGFCRKRRTGCSGPFQATQLWDGIIHSLQAQVEIKRRRHHLQTYKDCFTGSDAVDVVLSHLMQNTCLSSNDISCLKGVHLCQVLMNHKVFEPVGMKKLFKKEKELEFEDSNISLYRFLGNKSSYDCCKRQKDAENEFNETLRPGYEMISNPLAQEIGEERIEELIHTINGNPALCPNITVQKPFLRLSKEDVWKEQTLLCLLQLIHLPFLDNILEPPVKTQNLQLNKEEDLVITNTCLDRELIPSLCLPEK

SEQ ID NO: 794747 - protein, 262 aa, Homo sapiens; identical to SEQ ID NO: 794746

SEQ ID NO: 794748 - protein, 262 aa, Homo sapiens; identical to SEQ ID NO: 794746

SEQ ID NO: 794749 - protein, 571 aa, Homo sapiens
PFPHCGVIRGCPHSHNAPGSQRCWAPGQPLPGKFSLGTSGGYYRPYSRPYGLWNLTTGGRAGPDGDITCGVSPMDETEWIHRHPKAEDLRVGLISWAGTYLTFEACKNTVTATAKSLGRRQTWEILVSNEHETQAVVRLKSVQGLYLLCECDGTVCYGRPRTSHHGCFLLRFHRNSKWTLQCLISGRYLESNGKDVFCTSHVLSAYHMWTPRPALHVHVILYSPIHRCYARADPTMGRIWVDAAVPCLEECGFLLHFRDGCYHLETSTHHFLSHVDRLFSQPSSQTAFHMQVRPGGLVALCDGEGGMLYPQGTHLLLGMGCNPMRGEEWFILQHCPTWVSLRSKTGRFISVIYDGEVRAASERLNRMSLFQFECDSESPTVQLRSANGYYLSQRRHRAVMADGHPLESDTFFRMHWNCGRIILQSCRGRFLGIAPNSLLMANVILPGPNEEFGILFANRSFLVLRGRYGYVGSSSGHDLIQCNQDQPDRIHLLPCRPGIYHFQAQGGSFWSITSFGTFRPWGKFALNFCIELQGSNLLTVLAPNGFYMRADQSGTLLADSEDITRECIWEF

SEQ ID NO: 794750 - protein, 404 aa, Homo sapiens
PFPHCGVIRGCPHSHNAPGSQRCWAPGQPLPGKFSLGTSGGYYRPYSRPYGLWNLTTGGRAGPDGDITCGVSPMDETEWIHRHPKAEDLRVGLISWAGTYLTFEACKNTVTATAKSLGRRQTWEILVSNEHETQAVVRLKSVQGLYLLCECDGTVCYGRPRTSHHGCFLLRFHRNSKWTLQCLISGRYLESNGKDVFCTSHVLSAYHMWTPRPALHVHVILYSPIHRCYARADPTMGRIWVDAAVPCLEECGFLLHFRDGCYHLETSTHHFLSHVDRLFSQPSSQTAFHMQVRPGGLVALCDGEGGMLYPQGTHLLLGMGCNPMRGEEWFILQHCPTWVSLRSKTGRFISVIYDGEVRAASERLNRMSLFQFECDSESPTVQLRSANGYYLSQVRPWLPEQEKP

SEQ ID NO: 794751 - protein, 474 aa, Homo sapiens
MLPGHRGAGPQASLCLGSSLWEHLTWEILVSNEHETQAVVRLKSVQGLYLLCECDGTVCYGRPRTSHHGCFLLRFHRNSKWTLQCLISGRYLESNGKDVFCTSHVLSAYHMWTPRPALHVHVILYSPIHRCYARADPTMGRIWVDAAVPCLEECGFLLHFRDGCYHLETSTHHFLSHVDRLFSQPSSQTAFHMQVRPGGLVALCDGEGGMLYPQGTHLLLGMGCNPMRGEEWFILQHCPTWVSLRSKTGRFISVIYDGEVRAASERLNRMSLFQFECDSESPTVQLRSANGYYLSQRRHRAVMADGHPLESDTFFRMHWNCGRIILQSCRGRFLGIAPNSLLMANVILPGPNEEFGILFANRSFLVLRGRYGYVGSSSGHDLIQCNQDQPDRIHLLPCRPGIYHFQAQGGSFWSITSFGTFRPWGKFALNFCIELQGSNLLTVLAPNGFYMRADQSGTLLADSEDITRECIWEF

SEQ ID NO: 794752 - protein, 658 aa, Homo sapiens
PFPHCGVIRGCPHSHNAPGSQRCWAPGQPLPGKFSLGTSGGYYRPYSRPYGLWNLTTGGRAGPDGDITCGVSPMDETEWIHRHPKAEDLRVGLISWAGTYLTFEACKNTVTATAKSLGRRQHRVVVSERREVESTGWLCQKEEKWRAQVDQQLNQAVASELFMLPSSSLEPGPAYKSFCFCLAMLEGNLWGWRYWLSVLSADNSEEEKTWEILVSNEHETQAVVRLKSVQGLYLLCECDGTVCYGRPRTSHHGCFLLRFHRNSKWTLQCLISGRYLESNGKDVFCTSHVLSAYHMWTPRPALHVHVILYSPIHRCYARADPTMGRIWVDAAVPCLEECGFLLHFRDGCYHLETSTHHFLSHVDRLFSQPSSQTAFHMQVRPGGLVALCDGEGGMLYPQGTHLLLGMGCNPMRGEEWFILQHCPTWVSLRSKTGRFISVIYDGEVRAASERLNRMSLFQFECDSESPTVQLRSANGYYLSQRRHRAVMADGHPLESDTFFRMHWNCGRIILQSCRGRFLGIAPNSLLMANVILPGPNEEFGILFANRSFLVLRGRYGYVGSSSGHDLIQCNQDQPDRIHLLPCRPGIYHFQAQGGSFWSITSFGTFRPWGKFALNFCIELQGSNLLTVLAPNGFYMRADQSGTLLADSEDITRECIWEF

SEQ ID NO: 794753 - protein, 142 aa, Homo sapiens
MQSFPRFPLLSTGKGASPHGHHHHRPTGSTAMLLSMFSSGPRNLQSACKCYLTWDSPFIAVSVPLNVQDPRPGIRNSKSPLGAIPVAKLVPNVQESSLLFPLLFSSRRNSPHSHHSWEYAESHKKPASLRVSPKVHSLLLRY

SEQ ID NO: 794754 - protein, 198 aa, Homo sapiens
MATLWGGLLRLGSLLSLSCLALSVLLLAQLSDAAKNFEDVRCKCICPPYKENSGHIYNKNISQKDCDCLHVVEPMPVRGPDVEAYCLRCECKYEERSSVTIKVTIIIYLSILGLLLLYMVYLTLVEPILKRRLFGHAQLIQSDDDIGDHQPFANAHDVLARSRSRANVLNKVEYAQQRWKLQVQEQRKSVFDRHVVLS

SEQ ID NO: 794755 - protein, 198 aa, Homo sapiens; identical to SEQ ID NO: 794754

SEQ ID NO: 794756 - protein, 124 aa, Homo sapiens
MPVRGPDVEAYCLRCECKYEERSSVTIKVTIIIYLSILGLLLLYMVYLTLVEPILKRRLFGHAQLIQSDDDIGDHQPFANAHDVLARSRSRANVLNKVEYAQQRWKLQVQEQRKSVFDRHVVLS

SEQ ID NO: 794757 - protein, 124 aa, Homo sapiens; identical to SEQ ID NO: 794756

SEQ ID NO: 794758 - protein, 198 aa, Homo sapiens; identical to SEQ ID NO: 794754

SEQ ID NO: 794759 - protein, 198 aa, Homo sapiens; identical to SEQ ID NO: 794754

SEQ ID NO: 794760 - protein, 198 aa, Homo sapiens; identical to SEQ ID NO: 794754

SEQ ID NO: 794761 - protein, 198 aa, Homo sapiens; identical to SEQ ID NO: 794754

SEQ ID NO: 794762 - protein, 198 aa, Homo sapiens; identical to SEQ ID NO: 794754

SEQ ID NO: 794763 - protein, 182 aa, Homo sapiens
AQRIRKPTGCCGQEARGRQNFEDVRCKCICPPYKENSGHIYNKNISQKDCDCLHVVEPMPVRGPDVEAYCLRCECKYEERSSVTIKVTIIIYLSILGLLLLYMVYLTLVEPILKRRLFGHAQLIQSDDDIGDHQPFANAHDVLARSRSRANVLNKVEYAQQRWKLQVQEQRKSVFDRHVVLS

SEQ ID NO: 794764 - protein, 196 aa, Homo sapiens
MSRRSMLLAWALPSLLRLGAAQETEDPACCSPIVPRNEWKALASECAQHLSLPLRYVVVSHTAGSSCNTPASCQQQARNVQHYHMKTLGWCDVGYNFLIGEDGLVYEGRGWNFTGAHSGHLWNPMSIGISFMGNYMDRVPTPQAIRAAQGLLACGVAQGALRSNYVLKGHRDVQRTLSPGNQLYHLIQNWPHYRSP

SEQ ID NO: 794765 - protein, 208 aa, Homo sapiens
FADSYGQRPRRADGNSHEARGGSRFERSESRAHSGFYQDDSLEEYYGQRSRSREPLTDADRGWAFSPARRRPAEDAHLPRLVSRTPGTAPKYDHSYLGSARERQARPEGASRGGSLETPSKRSAQLGPRSASYYAWSPPGTYKAGSSQDDQEDASDDALPPYSELELTRGPSYRGRDLPYHSNSEKKRKKEPAKKTVRLRLPPLLRGD

SEQ ID NO: 794766 - protein, 47 aa, Homo sapiens
TATAAFGARDSGEFRRAPAPPPLPPAEPLAKEKPGTPPGPPPPDTNS

SEQ ID NO: 794767 - protein, 115 aa, Homo sapiens
  misc_feature (1)..(1): Xaa can be any naturally occurring amino acid
XHAHRTGPSRRPRLWRPGVDGSCSTKPGQPPSQPVTTPQHLDPAHPLESSAWGPRDAPPPESPLHPPLEEQAAAAPPSASIALTLFPPDGARGCFPAGILRSSFPWWLGCLSLHY

SEQ ID NO: 794768 - protein, 120 aa, Homo sapiens
NKRTPEHPVPYGTIPEPPLPAEPSNKRTPEHPVPNGTIPEPPLLTEPPNKRTPEHPVPDGTIPEPPLATEPSSETTPEHPVPSGTIPEPPLLTEPSNKRTSEHPVPDRTIPGPPLPIEPH

SEQ ID NO: 794769 - protein, 91 aa, Homo sapiens
VSDTSVMKAWVILLVEAAAGGEGNLESIVEETMDTSCSPASCRSDAVVVHSTNLSFHRIPGGAAPGTYMEDPCLARSGLWQTPRCATLPTF

SEQ ID NO: 794770 - protein, 63 aa, Homo sapiens
GRSALLPGQPPTPPAPLHSAQLARRKLSCSRPATPRLRRFATLALGRSGSGAFGMAAPSGPAR

SEQ ID NO: 794771 - protein, 303 aa, Homo sapiens
IQGTDKEGGAKGEQQPISSPWDVVFGTSGSEVQRGDILWIAMAGTHQIWALLLDSGKLPKKNELTKGTCLRFAGSGNEENRNNAYPHKAGFAQPSGLSLASEDPWSCLFVADSESSTVRTVSLKDGAVKHLVGGERDPMNLFAFGDVDGVGINAKLQHPLGVTWDKKRNLLYVADSYNHKIKVVDPKTKNCTTLAGTGDTNNVTSSSFTESTFNEPGGLCIGENGELLYVADTNNHQIKVMDLETKMVSVLPIFRSENAVVDGPFLVEKQKTLPKLPKSAPSIRLSPVTACAGQTLQFKLRLD

SEQ ID NO: 794772 - protein, 237 aa, Homo sapiens
DKEWMPVTKLGRFVKDMKIKSLEEIYVFSLPIKESEIIDSFLGASLKDEVLKIMPVQKQTRVGQRTRFKAFVAIGDYNGHVGLGVKCSKEVATAIRGAIILAKLSIVPVRRGYWGNKIGKPHTVPCKVTGRCGSVLVRLIPAPRGTGIVSAPVPKKLLMMAGIDDCYTSARGCTATLGNFAKATFDAISKTYSYLTPDLWKETVFTKSPYQEFTDHLVKTHTRVSVQRTQAPAVATT

SEQ ID NO: 794773 - protein, 168 aa, Homo sapiens
PPPQLRGPPPGPWTAQPSGRLERGAGPRSTPEVSASKVRHHVLGYSQCEATLGPSEQPLLTSGVTLPKTHCPIMAGDRLPRKVMDAKKLASLLRGGPGGGLVIDSHSFLEYNSWHVLSSVNICCSKLVKWRLQKGKVTIVEFIQPAARSQVEATEPQDVVVYDQSTRP

SEQ ID NO: 794774 - protein, 104 aa, Homo sapiens
TVYLHLPPSASVFGSSVKADMLPKTRGESLEAGEDGQVLGVEVASCPSSSPTTGAWRRLTAAITVTFHSLSSTQPALRGGSRDWSTQQQQPCPHLLLQQQLYLI

SEQ ID NO: 794775 - protein, 701 aa, Homo sapiens
MATYKVRVATGTDLLSGTRDSISLTIVGTQGESHKQLLNHFGRDFATGAVGQYTVQCPQDLGELIIIRLHKERYAFFPKDPWYCNYVQICAPNGRIYHFPAYQWMDGYETLALREATGKTTADDSLPVLLEHRKEEIRAKQDFYHWRVFLPGLPSYVHIPSYRPPVRRHRNPNRPEWNGYIPGFPILINFKATKFLNLNLRYSFLKTASFFVRLGPMALAFKVRGLLDCKHSWKRLKDIRKIFPGKKSVVSEYVAEHWAEDTFFGYQYLNGVNPGLIRRCTRIPDKFPVTDDMVAPFLGEGTCLQAELEKGNIYLADYRIMEGIPTVELSGRKQHHCAPLCLLHFGPEGKMMPIAIQLSQTPGPDCPIFLPSDSEWDWLLAKTWVRYAEFYSHEAIAHLLETHLIAEAFCLALLRNLPMCHPLYKLLIPHTRYTVQINSIGRAVLLNEGGLSAKGMSLGVEGFAGVMVRALSELTYDSLYLPNDFVERGVQDLPGYYYRDDSLAVWNALEKYVTEIITYYYPSDAAVEGDPELQSWVQEIFKECLLGRESSGFPRCLRTVPELIRYVTIVIYTCSAKHAAVNTGQMEFTAWMPNFPASMRNPPIQTKGLTTLETFMDTLPDVKTTCITLLVLWTLSREPDDRRPLGHFPDIHFVEEAPRRSIEAFRQRLNQISHDIRQRNKCLPIPYYYLDPVLIENSISI

SEQ ID NO: 794776 - protein, 114 aa, Homo sapiens
AAAVILEDPGTSGPEQDVPGGGVGWVRGYRGTYWDPRGPEGVPGMPVRLQDLPPSSQGMSLGVEGFAGVMVRALSELTYDSLYLPNDFVERGVQDLPGYYYRDDSLAVWNALEK

SEQ ID NO: 794777 - protein, 653 aa, Homo sapiens
MATYKVRVATGTDLLSGTRDSISLTIVGTQGESHKQLLNHFGRDFATGAVGQYTVQCPQDLGELIIIRLHKERYAFFPKDPWYCNYVQICAPNGRIYHFPAYQWMDGYETLALREATGKTTADDSLPVLLEHRKEEIRAKQDFYHWRVFLPGLPSYVHIPSYRPPVRRHRNPNRPEWNGYIPGFPILINFKATKFLNLNLRYSFLKTASFFVRLGPMALAFKVRGLLDCKHSWKRLKDIRKIFPGKKSVVSEYVAEHWAEDTFFGYQYLNGVNPGLIRRCTRIPDKFPVTDDMVAPFLGEGTCLQAELELSQTPGPDCPIFLPSDSEWDWLLAKTWVRYAEFYSHEAIAHLLETHLIAEAFCLALLRNLPMCHPLYKLLIPHTRYTVQINSIGRAVLLNEGGLSAKGMSLGVEGFAGVMVRALSELTYDSLYLPNDFVERGVQDLPGYYYRDDSLAVWNALEKYVTEIITYYYPSDAAVEGDPELQSWVQEIFKECLLGRESSGFPRCLRTVPELIRYVTIVIYTCSAKHAAVNTGQMEFTAWMPNFPASMRNPPIQTKGLTTLETFMDTLPDVKTTCITLLVLWTLSREPDDRRPLGHFPDIHFVEEAPRRSIEAFRQRLNQISHDIRQRNKCLPIPYYYLDPVLIENSISI

SEQ ID NO: 794778 - protein, 69 aa, Homo sapiens
AENVKLNNNQSVCKAQQEIKWRRRWVAFTFACDEILISALSPEALSSLLCLGCTLPQAPSQAACLPRLL

SEQ ID NO: 794779 - protein, 84 aa, Homo sapiens
ILLFPLDSQLDHITFPAFLPTFSKRDWVLANGMRVEERVPLSGLAHKNLTENSPPYSFSFHELNGNDFGELGSNVLKIGNSLSA

SEQ ID NO: 794780 - protein, 224 aa, Homo sapiens
MAAAVPQRAWTVEQLRSEQLPKKDIIKFLQEHGSDSFLAEHKLLGNIKNVAKTANKDHLVTAYNHLFETKRFKGTESISKVSEQVKNVKLNEDKPKETKSEETLDEGPPKYTKSVLKKGDKTNFPKKGDVVHCWYTGTLQDGTVFDTNIQTSAKKKKNAKPLSFKVGVGKVIRGWDEALLTMSKGEKARLEIEPEWAYGKKGQPDAKIPPNAKLTFEVELVDID

SEQ ID NO: 794781 - protein, 224 aa, Homo sapiens; identical to SEQ ID NO: 794780

SEQ ID NO: 794782 - protein, 224 aa, Homo sapiens; identical to SEQ ID NO: 794780

SEQ ID NO: 794783 - protein, 224 aa, Homo sapiens; identical to SEQ ID NO: 794780

SEQ ID NO: 794784 - protein, 224 aa, Homo sapiens; identical to SEQ ID NO: 794780

SEQ ID NO: 794785 - protein, 211 aa, Homo sapiens
MAAAVPQRAWTVEQLRSEQLPKKFLAEHKLLGNIKNVAKTANKDHLVTAYNHLFETKRFKGTESISKVSEQVKNVKLNEDKPKETKSEETLDEGPPKYTKSVLKKGDKTNFPKKGDVVHCWYTGTLQDGTVFDTNIQTSAKKKKNAKPLSFKVGVGKVIRGWDEALLTMSKGEKARLEIEPEWAYGKKGQPDAKIPPNAKLTFEVELVDID

SEQ ID NO: 794786 - protein, 198 aa, Homo sapiens
MAAAVPQRAWTVEQLRSEQLPKKDIIKFLQEHGSDSFLAEHKLLGNIKNVAKTANKDHLVTAYNHLFETKRFKGTESISKVSEQVKNVKLNEDKPKETKSEETLDEGPPKYTKSVLKKGDKTNFPKKGDVVHCWYTGTLQDGTVFDTNIQTSAKKKKNAKPLSFKVGVGKVIRGWDEALLTMSKGEKARNSTKCKTHF

SEQ ID NO: 794787 - protein, 507 aa, Homo sapiens
MAAAVPQRAWTVEQLRSEQLPKKDIIKFLQEHGSDSFLAEHKLLGNIKNVAKTANKDHLVTAYNHLFETKRFKGTESISKVSEQVKNVKLNEDKPKETKSEETLDEGPPKYTKSVLKKGDKTNFPKKGDVVHCWYTGTLQDGTVFDTNIQTSAKKKKNAKPLSFKVGVGKVIRGWDEALLTMSKGEKARLEIEPEWAYGKKGQPDAKYPFFPFIIKVEKKKQKKQPQHKTKKKHTTTKQNNNNSATPTTNTTERPPKQRANTERRAKRRETQRREDQLVYTKEADESKTAGRKRRKHEEKGDKNTGKESAWKKTKHKHNEELTNQRCKTIQTRAKRKNIETQVNECNLRRNQKRGRDSNAARTEHEEQKRETKTDTDIKARGHRRRKKDEKPKRRRAEKQRKQRESRDTTQETSQPKEPAEKKEEGKTINHEASDERKTRGKDADKAEGEERNRETRGERRKRREAETRRKEKKDQRKRTGTEKTQKRSDKTKKRNRREEEYSDGKS

SEQ ID NO: 794788 - protein, 230 aa, Homo sapiens
MAAAVPQRAWTVEQLRSEQLPKKDIIKFLQEHGSDSFLAEHKLLGNIKNVAKTANKDHLVTAYNHLFETKRFKGTESISKVSEQVKNVKLNEDKPKETKSEETLDEGPPKYTKSVLKKGDKTNFPKKGDVVHCWYTGTLQDGTVFDTNIQTSAKKKKNAKPLSFKVGVGKVIRGWDEALLTMSKGEKARLEIEPEWAYGKKGQPDAKSKILSYSCVKYWSRRTFSFYLML

SEQ ID NO: 794789 - protein, 198 aa, Homo sapiens; identical to SEQ ID NO: 794786

SEQ ID NO: 794790 - protein, 130 aa, Homo sapiens [sequence omitted]

SEQ ID NO: 794791 - protein, 339 aa, Homo sapiens
MQWALPVGQGAGAHVVEGVRSCLPHRKALLVSTTSWLAFGTGWPSIICHQVHCGVFCVSMAGVLQYTHTVHVLFIARARVEVSREQSSMIMYCVRPLHLVNFLFFLKINNNKIRKMAAAVPQRAWTVEQLRSEQLPKKDIIKFLQEHGSDSFLAEHKLLGNIKNVAKTANKDHLVTAYNHLFETKRFKGTESISKVSEQVKNVKLNEDKPKETKSEETLDEGPPKYTKSVLKKGDKTNFPKKGDVVHCWYTGTLQDGTVFDTNIQTSAKKKKNAKPLSFKVGVGKVIRGWDEALLTMSKGEKARLEIEPEWAYGKKGQPDAKIPPNAKLTFEVELVDID

SEQ ID NO: 794792 - protein, 116 aa, Homo sapiens
LRQSLALSLRLECSGMISVHRSLHLPGSSDFPASAFRVAGITGTHHDVRLIFEFLLVEMGLHCVGQADLKLLTSNDPPALASQSAGITGMSHHAQPIDILYQVEEFPLLLYQEGFL

SEQ ID NO: 794793 - protein, 186 aa, Homo sapiens
PNGEERRCRDTREEPPQPPPPRCGARVSAAPARPAAGQHGGCTARAAVAAAAGAVRLPGPRRRYMYWADWGETPWIEQVGMDDSTQKIIVDLDIYWPNRLTIDLGEKKLYWADTKLGFIHRANLDGSFRQKVVKGSLTHPFTLTLSGDTLHWMDWLTCSIHACNRNTAGKRNEILSALYSAWISRC

SEQ ID NO: 794794 - protein, 186 aa, Homo sapiens; identical to SEQ ID NO: 794793

SEQ ID NO: 794795 - protein, 30 aa, Homo sapiens
MRTISRRDGRLSMAGLASTSLFCHSFSAPP

SEQ ID NO: 794796 - protein, 120 aa, Homo sapiens
MTWLQTLTGLLEQMQVHRDAESQLVLQEWKKERKEMREMTKSFFNAQFGSLFRTDQNPTYFLRRLSRFADIYMASLSCLLNYDVSHTFYPRRTPLQHELPAWSERPPTFGTPLLQEAQAK

SEQ ID NO: 794797 - protein, 120 aa, Homo sapiens; identical to SEQ ID NO: 794796

SEQ ID NO: 794798 - protein, 120 aa, Homo sapiens; identical to SEQ ID NO: 794796

SEQ ID NO: 794799 - protein, 66 aa, Homo sapiens
MTKSFFNAQFGSLFRTDQNPTYFLRRLSRFADIYMASLSCLLNYDVSHTFYPRRTPLQHELPAWSE

SEQ ID NO: 794800 - protein, 31 aa, Homo sapiens
ILNEAISKQREEAQVGSIARSQMVAQRKKRC

SEQ ID NO: 794801 - protein, 248 aa, Homo sapiens
MSRGGPTTSILPSVGTPCSPAETRKPNTFPKLLSAECLEVASVLSSDARFMVWKEGAPVSVGVRHIPNLQLKTAILFWSYFRVRNSGRGLWGNSFLSLSYECVQKSLGCESKMGTHEAGALAGLLPGRHTWCLQSGAHRVLGFSAWGWSPLVEPPKMSGGSCRAFLTWPQEPCASTPFSDLTSPWDSPTELAELLKAVAEGGGTLGAAAARGVWLPRRRGDWALGVFGATQAEILETLTSAGMQAFRS

SEQ ID NO: 794802 - protein, 337 aa, Homo sapiens
MRAVFIQGAEEHPAAFCYQVNGSCPRTVHTLGIQLVIYLTCAAGMLIIVLGNVFVAFAVSYFKALHTPTNFLLLSLALADMFLGLLVLPLSTIRSVESCWFFGDFLCRLHTYLDTLFCLTSIFHLCFISIDRHCAICDPLLYPSKFTVRVALRYILAGWGVPAAYTSLFLYTDVVETRLSQWLEEMPCVGSCQLLLNKFWGWLNFPLFFVPCLIMISLYVKIFVVATRQAQQITTLSKSLAGAAKHERKAAKTLGIVVGIYLLCWLPFTIDTMVDSLLHFITPPLVFDIFIWFAYFNSACNPIIYVFSYQWFRKALKLTLSQKVFSPQTRTVDLYQE

SEQ ID NO: 794803 - protein, 142 aa, Homo sapiens
AFYFIFILRQCLTLSPRLWSAMAGGTAASTSWASSCAPISASQVAETTEKHHHAQLIFIFFVEMGFCHVAQAGLELLSSSSPSASASQSARIIGMSHCACPHCSFDLHFRNDSDGEHLFRCLLATCTPSLGKHLKAFATLIF

SEQ ID NO: 794804 - protein, 101 aa, Homo sapiens
ETESCSVTQAGVQWCDLHSLQPPPPEFKRFSCLSLPSSWDYGTCHHAWLIFIFLVETGFHHVGQAGLKLLFSSDPPASASQSAGITSMSHYAQPNLPIYRL

SEQ ID NO: 794805 - protein, 67 aa, Homo sapiens
GTLTFAPFLPEYQLTSIWGLNMGQIPEKGGWGTKTNTNSANGASTAICLQPQAAREVHGLGTPRSRM

SEQ ID NO: 794806 - protein, 290 aa, Homo sapiens
ILTGNKVLMPCDAVLIEGSCVVDEGMLTGESIPVTKTPLPKMDSSVPWKTQSEADYKRHVLFCGTEVIQAKAACSGTVRAVVLQTGFNTAKGDLVRSILYPKPVNFQLYRDAIRFLLCLVGTATIGMIYTLCVYVLSGEPPEEVVRKALDVITIAVPPALPAALTTGIIYAQRRLKKRGIFCISPQRINVCGQLNLVCFDKTGTLTRDGLDLWGVVSCDRNGFQEVHSFASGQALPWGPLCAAMASCHSLILLDGTIQGDPLDLKMFEATTWVSLCSSENLRSFFNARAT

SEQ ID NO: 794807 - protein, 465 aa, Homo sapiens
ILTGNKVLMPCDAVLIEGSCVVDEGMLTGESIPVTKTPLPKMDSSVPWKTQSEADYKRHVLFCGTEVIQAKAACSGTVRAVVLQTGFNTAKGDLVRSILYPKPVNFQLYRDAIRFLLCLVGTATIGMIYTLCVYVLSGEPPEEVVRKALDVITIAVPPALPAALTTGIIYAQRRLKKRGIFCISPQRINVCGQLNLVCFDKTGTLTRDGLDLWGVVSCDRNGFQEVHSFASGQALPWGPLCAAMASCHSLILLDGTIQGDPLDLKMFEATTWEMAFSGDDFHIKGVPAHAMVVKPCRTASQVPVEGIAILHQFPFSSALQRMTVIVQEMGGDRLAFMKGAPERVASFCQPETVPTSFVSELQIYTTQGFRVIALAYKKLENDHHATTLTRETVESDLIFLGLLILENRLKEETKPVLEELISARIRTVMITGDNLQTAITVARKSGMVSESQKVILIEANETTGS

SEQ ID NO: 794808 - protein, 106 aa, Homo sapiens
SVAGVTGQGGGLLCGSSPLQGTQSGARGAEHEAVAPDPPTASAPPLPAAAGSPGPGGQEKPHLWLSTKPTAQPRCTDAVTCTPVHTHPEMATGLVDFSPDWAPRSF

SEQ ID NO: 794809 - protein, 162 aa, Homo sapiens
VQWVPNCRQCSEGDFHGIMEVCDRGTSLIQGVVKEGFLEVGTLESKPEEHLAVNWAEERGWDRDRTFQAEGSLLCKAPEIGRCLRHLKIADVAVVGGAGERGIGERREVHTEPRRPYWILIMVWRAGPRGQQALQLLQIPTMAPITLYDGPSPVQPHPHTLE

SEQ ID NO: 794810 - protein, 130 aa, Homo sapiens
MQVAGHGEDFLTSAGKRAQRRNPRIRKALCTCNKSLTVSARLEWHDLGSLQPPSPGLKQFSCLSLQSSWDYRFCMRSTSYVQLCSGGPTGLRASACSKRLHRSKHSHHNTRCNIFPGPLTIFSIKAIITR

SEQ ID NO: 794811 - protein, 258 aa, Homo sapiens
MSGALDVLQMKEEDVLKFLAAGTHLGGTNLDFQMEQYIYKRKSDGIYIINLKRTWEKLLLAARAIVAIENPADVSVISSRNTGQRAVLKFAAATGATPIAGRFTPGTFTNQIQAAFREPRLLVVTDPRADHQPLTEASYVNLPTIALYHRFSLCYVDIAIACNNKGAHSVGLMWWTPAREVLRMRGTISCEHPWEVMPDLYFYRDPEEIEKEEQAAAKKAVTKKEFQGEWTASAPEFTATQPEVADWSEGMQVPSVTI

SEQ ID NO: 794812 - protein, 42 aa, Homo sapiens
GKTCVVQHFKSGVYTETQQNTIGVDFTVRSLDIDGKKVKVRG

SEQ ID NO: 794813 - protein, 599 aa, Homo sapiens
MLCLGWIFLWLVAGERIKGFNISGCSTKKLLWTYSTRSEEEFVLFCDLPEPQKSHFCHRNRLSPKQVPEHLPFMGSNDLSDVQWYQQPSNGDPLEDIRKSYPHIIQDKCTLHFLTPGVNNSGSYICRPKMIKSPYDVACCVKMILEVKPQTNASCEYSASHKQDLLLGSTGSISCPSLSCQSDAQSPAVTWYKNGKLLSVERSNRIVVDEVYDYHQGTYVCDYTQSDTVSSWTVRAVVQVRTIVGDTKLKPDILDPVEDTLEVELGKPLTISCKARFGFERVFNPVIKWYIKDSDLEWEVSVPEAKSIKSTLKDEIIERNIILEKVTQRDLRRKFVCFVQNSIGNTTQSVQLKEKRGVVLLYILLGTIGTLVAVLAASALLYRHWIEIVLLYRTYQSKDQTLGDKKDFDAFVSYAKWSSFPSEATSSLSEEHLALSLFPDVLENKYGYSLCLLERDVAPGGVYAEDIVSIIKRSRRGIFILSPNYVNGPSIFELQAAVNLALDDQTLKLILIKFCYFQEPESLPHLVKKALRVLPTVTWRGLKSVPPNSRFWAKMRYHMPVKNSQGFTWNQLRITSRIFQWKGLSRTETTGRSSQPKEW

SEQ ID NO: 794814 - protein, 457 aa, Homo sapiens
MILEVKPQTNASCEYSASHKQDLLLGSTGSISCPSLSCQSDAQSPAVTWYKNGKLLSVERSNRIVVDEVYDYHQGTYVCDYTQSDTVSSWTVRAVVQVRTIVGDTKLKPDILDPVEDTLEVELGKPLTISCKARFGFERVFNPVIKWYIKDSDLEWEVSVPEAKSIKSTLKDEIIERNIILEKVTQRDLRRKFVCFVQNSIGNTTQSVQLKEKRGVVLLYILLGTIGTLVAVLAASALLYRHWIEIVLLYRTYQSKDQTLGDKKDFDAFVSYAKWSSFPSEATSSLSEEHLALSLFPDVLENKYGYSLCLLERDVAPGGVYAEDIVSIIKRSRRGIFILSPNYVNGPSIFELQAAVNLALDDQTLKLILIKFCYFQEPESLPHLVKKALRVLPTVTWRGLKSVPPNSRFWAKMRYHMPVKNSQGFTWNQLRITSRIFQWKGLSRTETTGRSSQPKEW

SEQ ID NO: 794815 - protein, 97 aa, Homo sapiens
ILGTIYHHMPVLRQKEESFQFILEAISQIASFHMDTVVVNLLQKPLPFDRDTKTLWKALAEKPASSGKLLQALIDKLETELEDDIARVEAISVSWTA

SEQ ID NO: 794816 - protein, 102 aa, Homo sapiens
  misc_feature (99)..(99): Xaa can be any naturally occurring amino acid
  misc_feature (101)..(101): Xaa can be any naturally occurring amino acid
WDSNVFSGLLRAFSEFTHMHHTHHVAFPKPPGPRDPFCPELLEGPAFLGLGPCRCTAGLRVPSFSQRPDLAVDGCRARDGLTNSAEVSRIPLRSHEFRXVXV

SEQ ID NO: 794817 - protein, 122 aa, Homo sapiens
NSMISALFSAVSDCKEVIPPAHKTDHFVISHGKILVSINAPRQNQSKNICSLLLDCKEIISWMFYFFLFLMMLIHQKSLARLKDQCKSRAKQGLTGFFFPHKNKLVANNEKLLVARSEVVKT

SEQ ID NO: 794818 - protein, 115 aa, Homo sapiens
GWSQCSELKQSACLRLPECWDYRCEQTHLTSPFFYWYTCLALYQCHTVLITIAFGTGTRQGCPLSPLLFHIVLEVLARAVRQEKEIKSIQIGNEEVKLSLFADAMIVYLENPKDS

SEQ ID NO: 794819 - protein, 136 aa, Homo sapiens
VCPVCETCLLSLVKLAGPTHPKCHPKEFGDKIILEKLPDGAYLTCLFFPGERGASGGRETPLARWSCHCGRTENSDVPASLPFLTSTKGPQPKSTSLGPIQPGLSPQHNHLGDFLSILGKRNFQAVHFYKELNKWV

SEQ ID NO: 794820 - protein, 681 aa, Homo sapiens
AESRGKLRCGRPGWWLSSGLQAEGRRGRGGHVRALPRWVVGVLRRRLLCQTDKREMMANDAKPDVKTVQVLRDTANRLRIHSIRATCASGSGQLTSCCSAAEVVSVLFFHTMKYKQTDPEHPDNDRFILSRGHAAPILYAAWVEVGDISESDLLNLRKLHSDLERHPTPRLPFVDVATGSLGQGLGTACGMAYTGKYLDKASYRVFCLMGDGESSEGSVWEAFAFASHYNLDNLVAVFDVNRLGQSGPAPLEHGADIYQNCCEAFGWNTYLVDGHDVEALCQAFWQASQVKNKPTAIVAKTFKGRGIPNIEDAENWHGKPVPKERADAIVKLIESQIQTNENLIPKSPVEDSPQISITDIKMTSPPAYKVGDKIATQKTYGLALAKLGRANERVIVLSGDTMNSTFSEIFRKEHPERFIECIIAEQNMVSVALGCATRGRTIAFAGAFAAFFTRAFDQLRMGAISQANINLIGSHCGVSTGEDGVSQMALEDLAMFRSIPNCTVFYPSDAISTEHAIYLAANTKGMCFIRTSQPETAVIYTPQENFEIGQAKVVRHGVNDKVTVIGAGVTLHEALEAADHLSQQGISVRVIDPFTIKPLDAATIISSAKATGGRVITVEDHYREGGIGEAVCAAVSREPDILVHQLAVSGVPQRGKTSELLDMFGISTRHIIAAVTLTLMK

SEQ ID NO: 794821 - protein, 103 aa, Homo sapiens
ENATVTNEHGLWKRSGAEDEQCVTRMTISNILFLEVWLAETIFCSAVIGLHYIYSKYNLKCKNHELDLLFLFSLATCKGDFNLTTTENHNQCEEGLGWLQYQS

SEQ ID NO: 794822 - protein, 117 aa, Homo sapiens
MPPANPPVWIPDLHASHHQHPSSLGHLSSVQGSDLPSSFAVATPPQTVLDTQSFPVFLAPCSRLFSPRSLFSHQRSRSHPGPSHLFFCGLGSQDLCHQGLVQLSSAGPSATLRLPTA

SEQ ID NO: 794823 - protein, 1110 aa, Homo sapiens
RPQVSACLWPGVGNCRRQFPSRWRTRRLEVLRGWKSARSYPRPLSVWHLDCAIDPTCVLCMDCFQDSVHKNHRYKMHTSTGGGFCDCGDTEAWKTGPFCVNHEPGRAGTIKENSRCPLNEEVIVQARKIFPSVIKYVVEMTIWEEEKELPPELQIREKNERYYCVLFNDEHHSYDHVIYSLQRALDCELAEAQLHTTAIDKEGRRAVKAGAYAACQEAKEDIKSHSENVSQHPLHVEVLHSEIMAHQKFALRLGSWMNKIMSYSSDFRQIFCQACLREEPDSENPCLISRLMLWDAKLYKGARKILHELIFSSFFMEMEYKKLFAMEFVKYYKQLQKEYISDDHDRSISITALSVQMFTVPTLARHLIEEQNVISVITETLLEVLPEYLDRNNKFNFQGYSQDKLGRVYAVICDLKYILISKPTIWTERLRMQFLEGFRSFLKILTCMQGMEEIRRQVGQHIEVDPDWEAAIAIQMQLKNILLMFQEWCACDEELLLVAYKECHKAVMRCSTSFISSSKTVVQSCGHSLETKSYRVSEDLVSIHLPLSRTLAGLHVRLSRLGAVSRLHEFVSFEDFQVEVLVEYPLRCLVLVAQVVAEMWRRNGLSLISQVFYYQDVKCREEMYDKDIIMLQIGASLMDPNKFLLLVLQRYELAEAFNKTISTKDQDLIKQYNTLIEEMLQVLIYIVGERYVPGVGNVTKEEVTMREIIHLLCIEPMPHSAIAKNLPENENNETGLENVINKVATFKKPGVSGHGVYELKDESLKDFNMYFYHYSKTQHSKAEHMQKKRRKQENKDEALPPPPPPEFCPAFSKVINLLNCDIMMYILRTVFERAIDTDSNLWTEGMLQMAFHILALGLLEEKQQLQKAPEEEVTFDFYHKASRLGSSAMNIQMLLEKLKGIPQLEGQKDMITWILQMFDTVKRLREKSCLIVATTSGSESIKNDEITHDKEKAERKRKAEAARLHRQKIMAQMSALQKNFIETHKLMYDNTSEMPGKEDSIMEEESTPAVSDYSRIALGPKRGPSVTEKEVLTCILCQEEQEVKIENNAMVLSACVQKSTALTQHRGKPIELSGEALDPLFMDPDLAYGTYTGSCGHVMHAVCWQNSSGG

SEQ ID NO: 794824 - protein, 782 aa, Homo sapiens
RPQVSACLWPGVGNCRRQFPSRWRTRRLEVLRGWKSARSYPRPLSVWHLDCAIDPTCVLCMDCFQDSVHKNHRYKMHTSTGGGFCDCGDTEAWKTGPFCVNHEPGRAGTIKENSRCPLNEEGMEEIRRQVGQHIEVDPDWEAAIAIQMQLKNILLMFQEWCACDEELLLVAYKECHKAVMRCSTSFISSSKTVVQSCGHSLETKSYRVSEDLVSIHLPLSRTLAGLHVRLSRLGAVSRLHEFVSFEDFQVEVLVEYPLRCLVLVAQVVAEMWRRNGLSLISQVFYYQDVKCREEMYDKDIIMLQIGASLMDPNKFLLLVLQRYELAEAFNKTISTKDQDLIKQYNTLIEEMLQVLIYIVGERYVPGVGNVTKEEVTMREIIHLLCIEPMPHSAIAKNLPENENNETGLENVINKVATFKKPGVSGHGVYELKDESLKDFNMYFYHYSKTQHSKAEHMQKKRRKQENKDEALPPPPPPEFCPAFSKVINLLNCDIMMYILRTVFERAIDTDSNLWTEGMLQMAFHILALGLLEEKQQLQKAPEEEVTFDFYHKASRLGSSAMNIQMLLEKLKGIPQLEGQKDMITWILQMFDTVKRLREKSCLIVATTSGSESIKNDEITHDKEKAERKRKAEAARLHRQKIMAQMSALQKNFIETHKLMYDNTSEMPGKEDSIMEEESTPAVSDYSRIALGPKRGPSVTEKEVLTCILCQEEQEVKIENNAMVLSACVQKSTALTQHRGKPIELSGEALDPLFMDPDLAYGTYTGSCGHVMHAVCWQNSSGG

SEQ ID NO: 794825 - protein, 67 aa, Homo sapiens
SFLNTQITHDKEKAERKRKAEAARLHRQKIMAQMSALQKNFIETHKLMYDNTSEMPGKEDSIMEEER

SEQ ID NO: 794826 - protein, 71 aa, Homo sapiens
SPLGQLAVLWRCTQLELTRYSFFFIRCHLAGGQKDSLEPGGQQDRGNRKYMTDDVFRPQKGLEEAGDLLFE

SEQ ID NO: 794827 - protein, 133 aa, Homo sapiens
GKGHDQGPASVMHSPLHPGALLQAHHQAAYICSPPALSSQEAPHLSLPEEYGSQGGLLQAFLSTHALPPSLQASKELISRETLPSCPTFPSASSRNCPLTSLCLGLLVTLVHTKTVLPLSATESTQISSASQN

SEQ ID NO: 794828 - protein, 94 aa, Homo sapiens
QQQPEGPTHRSLNWSSGMRWTAGQGEESSSFLTGGLKWGAPAHLKSARTSWRKRSSEHQDIVEEKELRTPGHRGGKGAQNTKSMKLFMNVWAHL

SEQ ID NO: 794829 - protein, 106 aa, Homo sapiens
RSAGKEGWVSGVRGGGGLPPRSRPSAFLFPTSGPHVRRSEPPITLVTNIMGSQWPRCGVFSSWGLCWGFSLSSLPAIPFAGEQLAAFPQPVPFAGPVDPMRCTMEG

SEQ ID NO: 794830 - protein, 162 aa, Homo sapiens
MVVDAWLAECMVGSVGVPSRAGSKLPKRCAPCSHSSTCFQTKHTQIWARLPFFPRVLQISLHKTSHSPGSSSSSEGHKPTKATVRDRSSEASCSATPLCGSKKTRVLERPRTLLVDTSASGRPTQGPREGRCSTGLRSTRGALAFLRTQDLARKQKYQRKTC

SEQ ID NO: 794831 - protein, 293 aa, Homo sapiens
MVGQRVLLLVAFLLSGVLLSEAAKILTISTLGGSHYLLLDRVSQILQEHGHNVTMLHQSGKFLIPDIKEEEKSYQVIRWFSPEDHQKRIKKHFDSYIETALDGRKESEALVKLMEIFGTQCSYLLSRKDIMDSLKNENYDLVFVEAFDFCSFLIAEKLVKPFVAILPTTFGSLDFGLPSPLSYVPVFPSLLTDHMDFWGRVKNFLMFFSFSRSQWDMQSTFDNTIKEHFPEGSRPVLSHLLLKAELWFVNSDFAFDFARPLLPNTVYIGGLMEKPIKPVPQVSEPSAFSLGFT

SEQ ID NO: 794832 - protein, 239 aa, Homo sapiens
MLHQSGKFLIPDIKEEEKSYQVIRWFSPEDHQKRIKKHFDSYIETALDGRKESEALVKLMEIFGTQCSYLLSRKDIMDSLKNENYDLVFVEAFDFCSFLIAEKLVKPFVAILPTTFGSLDFGLPSPLSYVPVFPSLLTDHMDFWGRVKNFLMFFSFSRSQWDMQSTFDNTIKEHFPEGSRPVLSHLLLKAELWFVNSDFAFDFARPLLPNTVYIGGLMEKPIKPVPQVSEPSAFSLGFT

SEQ ID NO: 794833 - protein, 239 aa, Homo sapiens; identical to SEQ ID NO: 794832

SEQ ID NO: 794834 - protein, 72 aa, Homo sapiens
KQCKGIVDCIVRIPKDQGVLSFWRGNLANVIRYSPTQALNFAFKDKYKQIFLAGVDKHTQFCRYFAGNLASG

SEQ ID NO: 794835 - protein, 367 aa, Homo sapiens
RDSISKTKQINEQKNPQRIIFLFTRFLVSLAPPEEEQGPFLLLFIAASPTPRAEPGMGRKSSVDIWWPQANEASKKGKLGAPHCTCHLSHIFRSLWKVVHSPGVLSNLVSSEVEGPRRVSPAPDTLGMEESVVRPSVFVVDGQTDIPFTRLGRSHRRQSCSVARVGLGLLLLLMGAGLAVQGWFLLQLHWRLGEMVTRLPDGPAGSWEQLIQERRSHEVNPAAHLTGANSSLTGSGGPLLWETQLGLAFLRGLSYHDGALVVTKAGYYYIYSKVQLGGVGCPLGLASTITHGLYKRTPRYPEELELLVSQQSPCGRATSSSRVWWDSSFLGGVVHLEAGEEVVVRVLDERLVRLRDGTRSYFGAFMV

SEQ ID NO: 794836 - protein, 130 aa, Homo sapiens [sequence omitted]

SEQ ID NO: 794837 - protein, 94 aa, Homo sapiens
TGWLQALVLLTSGQALFEVYEYIFKRLGSKLVFPVLSRKLTELVALSAGRHRFPLPPAAAFLSTWKHRGVKSNQTWVRRVWLAFPAGQNFLKLG

SEQ ID NO: 794838 - protein, 76 aa, Homo sapiens
MTLLLHKLEFLQLERNRLMPCFMMPRLGQAGPVQPDVLTAGLAAPETTVTVLACPALGPGPPRPGWRNLAPLQLSK

SEQ ID NO: 794839 - protein, 158 aa, Homo sapiens
MLLLDCNPEVDGLKHLLETGASVNAPPDPCKQSPVHLAAGSGLACFLLWQLQTGADLNQQDVLGEAPLHKAAKVGSLECLSLLVASDAQIDLCNKNGQTAEDLAWSCGFPDCAKFLTTIKCMQTIKASEHPDRNDCVAVLRQKRSLGSVENTSGKRKC

SEQ ID NO: 794840 - protein, 158 aa, Homo sapiens; identical to SEQ ID NO: 794839

SEQ ID NO: 794841 - protein, 157 aa, Homo sapiens
GQGRVLRIACRGYPKWGAVAKAGPEVPTVFIFSRARASLRILTVGVRRVSHLSALPRTLVICLRREMLLLDCNPEVDGLKHLLETGASVNAPPDPCKQSPVHLAAGSGLACFLLWQLQTGADLNQQDVLGEAPLHKAAKVGSLECLSLLVASDAQIE

SEQ ID NO: 794842 - protein, 157 aa, Homo sapiens; identical to SEQ ID NO: 794841

SEQ ID NO: 794843 - protein, 147 aa, Homo sapiens
MTSSLKIWGILLALLCILCRLCVYSNNIYWREFIKLHYLSPSREFKEYKCDVLMREKEALKGKSFHMFIYSLWFKIQRACINEKGSDRYRNAYVWAPGALKVLECHWEKYNNRYTESRSFSYIEFHCGVDGYVDNIEDLRIIEPISN

SEQ ID NO: 794844 - protein, 137 aa, Homo sapiens
GSASAGAQPVASGGQARGPPCSKTPAPSFPGALQIGGGKSASILQEKPPLSPTSPTLPPPPTTITAAAARPAAAAAAAPARPVPPPPPPPPLPGQNHGKRDPRTCAAELKGLQNTGKSGLKRKAPRPPKEENWRSKG

SEQ ID NO: 794845 - protein, 137 aa, Homo sapiens
GAPTPGVQVVQKSSRYVEIEQGLGKPNGALESRCKSVPTILYGRRWNSSRASCLEPEAALAWSARRCPDLAQAAAPPRPLAQPTSVGLPRLGSRKLCPLQHQANKLYLGGADSTFTEPECNRMPEQKGLQRPYPLYR

SEQ ID NO: 794846 - protein, 115 aa, Homo sapiens
  misc_feature (6)..(6): Xaa can be any naturally occurring amino acid
  misc_feature (31)..(31): Xaa can be any naturally occurring amino acid
  misc_feature (43)..(44): Xaa can be any naturally occurring amino acid
  misc_feature (46)..(46): Xaa can be any naturally occurring amino acid
  misc_feature (53)..(53): Xaa can be any naturally occurring amino acid
  misc_feature (58)..(59): Xaa can be any naturally occurring amino acid
  misc_feature (64)..(64): Xaa can be any naturally occurring amino acid
PRPPPXPPPPPSLPCAVPPHTYYRTPSLSPXGGAAPPCIGWGXXKXKKRGGRXGPQKXXFGRRXFPPEEKQFKMVWLDCRIGSNEWQVMNLKNCISFLFPHHNFWHKESVLRNPN

SEQ ID NO: 794847 - protein, 1987 aa, Homo sapiens
PKLGEERGVVCRWPFNLERKMSESEGGKDTTPEPSPANGAGPGPEWGLCPGPPAVEGESSGASGLGTPKRRNQHSKHKTVAVASAQRSPRALFCLTLANPLRRSCISIVEWNWPFDILILLTIFANCVALGVYIPFPEDDSNTANHNLEQVEYVFLVIFTVETVLKIVAYGLVLHPSAYIRNGWNLLDFIIVVVGLFSVLLEQGPGRPGDAPHTGGKPGGFDVKALRAFRVLRPLRLVSGVPSLHIVLNSIMKALVPLLHIALLVLFVIIIYAIIGLELFLGRMHKTCYFLGSDMEAEEDPSPCASSGSGRACTLNQTECRGRWPGPNGGITNFDNFFFAMLTVFQCVTMEGWTDVLYWMQDAMGYELPWVYFVSLVIFGSFFVLNLVLGVLSGEFSKEREKAKARGDFQKQREKQQMEEDLRGYLDWITQAEELDMEDPSADDNLGPQLAELTNRRRGRLRWFSHSTRSTHSTSSHASLPASDTGSMTETQGDEDEEEGALASCTRCLNKIMKTRVCRRLRRANRVLRARCRRAVKSNACYWAVLLLVFLNTLTIASEHHGQPVWLTQIQEYANKVLLCLFTVEMLLKLYGLGPSAYVSSFFNRFDCFVVCGGILETTLVEVGAMQPLGISVLRCVRLLRIFKVTRHWASLSNLVASLLNSMKSIASLLLLLFLFIIIFSLLGMQLFGGKFNFDQTHTKRSTFDTFPQALLTVFQILTGEDWNVVMYDGIMAYGGPFFPGMLVCIYFIILFICGNYILLNVFLAIAVDNLASGDAGTAKDKGGEKSNEKDLPQENEGLVPGVEKEEEEGARREGADMEEEEEEEEEEEEEEEEEGAGGVELLQEVVPKEKVVPIPEGSAFFCLSQTNPLRKGCHTLIHHHVFTNLILVFIILSSVSLAAEDPIRAHSFRNHILGYFDYAFTSIFTVEILLKMTVFGAFLHRGSFCRSWFNMLDLLVVSVSLISFGIHSSAISVVKILRVLRVLRPLRAINRAKGLKHVVQCVFVAIRTIGNIMIVTTLLQFMFACIGVQLFKGKFYTCTDEAKHTPQECKGSFLVYPDGDVSRPLVRERLWVNSDFNFDNVLSAMMALFTVSTFEGWPALLYKAIDAYAEDHGPIYNYRVEISVFFIVYIIIIAFFMMNIFVGFVIITFRAQGEQEYQNCELDKNQRQCVEYALKAQPLRRYIPKNPHQYRVWATVNSAAFEYLMFLLILLNTVALAMQHYEQTAPFNYAMDILNMVFTGLFTIEMVLKIIAFKPKHYFTDAWNTFDALIVVGSIVDIAVTEVNNGGHLGESSEDSSRISITFFRLFRVMRLVKLLSKGEGIRTLLWTFIKSFQALPYVALLIAMIFFIYAVIGMQMFGKVALQDGTQINRNNNFQTFPQAVLLLFRCATGEAWQEIMLASLPGNRCDPESDFGPGEEFTCGSNFAIAYFISFFMLCAFLIINLFVAVIMDNFDYLTRDWSILGPHHLDEFKRIWSEYDPGAKGRIKHLDVVALLRRIQPPLGFGKLCPHRVACKRLVAMNMPLNSDGTVTFNATLFALVRTSLKIKTEGNLEQANQELRIVIKKIWKRMKQKLLDEVIPPPDEEEVTVGKFYATFLIQDYFRKFRRRKEKGLLGNDAAPSTSSALQAGLRSLQDLGPEMRQALTCDTEEEEEEGQEGVEEEDEKDLETNKATMVSQPSARRGSGISVSLPVGDRLPDSLSFGPSDDDRGTPTSSQPSVPQAGSNTHRRGSGALIFTIPEEGNSQPKGTKGQNKQDEDEEVPDRLSYLDEQAGTPPCSVLLPPHRAQRYMDGHLVPRRRLLPPTPAGRKPSFTIQCLQRQGSCEDLPIPGTYHRGRNSGPNRAQGSWATPPQRGRLLYAPLLLVEEGAAGEGYLGRSSGPLRTFTCLHVPGTHSDPSHGKRGSADSLVEAVLISEGLGLFARDPRFVALAKQEIADACRLTLDEMDNAASDLLAQGTSSLYSDEESILSRFDEEDLGDEMACVHAL

SEQ ID NO: 794848 - protein, 1998 aa, Homo sapiens
PKLGEERGVVCRWPFNLERKMSESEGGKDTTPEPSPANGAGPGPEWGLCPGPPAVEGESSGASGLGTPKRRNQHSKHKTVAVASAQRSPRALFCLTLANPLRRSCISIVEWNWPFDILILLTIFANCVALGVYIPFPEDDSNTANHNLEQVEYVFLVIFTVETVLKIVAYGLVLHPSAYIRNGWNLLDFIIVVVGLFSVLLEQGPGRPGDAPHTGGKPGGFDVKALRAFRVLRPLRLVSGVPSLHIVLNSIMKALVPLLHIALLVLFVIIIYAIIGLELFLGRMHKTCYFLGSDMEAEEDPSPCASSGSGRACTLNQTECRGRWPGPNGGITNFDNFFFAMLTVFQCVTMEGWTDVLYWMQDAMGYELPWVYFVSLVIFGSFFVLNLVLGVLSGEFSKEREKAKARGDFQKQREKQQMEEDLRGYLDWITQAEELDMEDPSADDNLGSMAEEGRAGHRPQLAELTNRRRGRLRWFSHSTRSTHSTSSHASLPASDTGSMTETQGDEDEEEGALASCTRCLNKIMKTRVCRRLRRANRVLRARCRRAVKSNACYWAVLLLVFLNTLTIASEHHGQPVWLTQIQEYANKVLLCLFTVEMLLKLYGLGPSAYVSSFFNRFDCFVVCGGILETTLVEVGAMQPLGISVLRCVRLLRIFKVTRHWASLSNLVASLLNSMKSIASLLLLLFLFIIIFSLLGMQLFGGKFNFDQTHTKRSTFDTFPQALLTVFQILTGEDWNVVMYDGIMAYGGPFFPGMLVCIYFIILFICGNYILLNVFLAIAVDNLASGDAGTAKDKGGEKSNEKDLPQENEGLVPGVEKEEEEGARREGADMEEEEEEEEEEEEEEEEEGAGGVELLQEVVPKEKVVPIPEGSAFFCLSQTNPLRKGCHTLIHHHVFTNLILVFIILSSVSLAAEDPIRAHSFRNHILGYFDYAFTSIFTVEILLKMTVFGAFLHRGSFCRSWFNMLDLLVVSVSLISFGIHSSAISVVKILRVLRVLRPLRAINRAKGLKHVVQCVFVAIRTIGNIMIVTTLLQFMFACIGVQLFKGKFYTCTDEAKHTPQECKGSFLVYPDGDVSRPLVRERLWVNSDFNFDNVLSAMMALFTVSTFEGWPALLYKAIDAYAEDHGPIYNYRVEISVFFIVYIIIIAFFMMNIFVGFVIITFRAQGEQEYQNCELDKNQRQCVEYALKAQPLRRYIPKNPHQYRVWATVNSAAFEYLMFLLILLNTVALAMQHYEQTAPFNYAMDILNMVFTGLFTIEMVLKIIAFKPKHYFTDAWNTFDALIVVGSIVDIAVTEVNNGGHLGESSEDSSRISITFFRLFRVMRLVKLLSKGEGIRTLLWTFIKSFQALPYVALLIAMIFFIYAVIGMQMFGKVALQDGTQINRNNNFQTFPQAVLLLFRCATGEAWQEIMLASLPGNRCDPESDFGPGEEFTCGSNFAIAYFISFFMLCAFLIINLFVAVIMDNFDYLTRDWSILGPHHLDEFKRIWSEYDPGAKGRIKHLDVVALLRRIQPPLGFGKLCPHRVACKRLVAMNMPLNSDGTVTFNATLFALVRTSLKIKTEGNLEQANQELRIVIKKIWKRMKQKLLDEVIPPPDEEEVTVGKFYATFLIQDYFRKFRRRKEKGLLGNDAAPSTSSALQAGLRSLQDLGPEMRQALTCDTEEEEEEGQEGVEEEDEKDLETNKATMVSQPSARRGSGISVSLPVGDRLPDSLSFGPSDDDRGTPTSSQPSVPQAGSNTHRRGSGALIFTIPEEGNSQPKGTKGQNKQDEDEEVPDRLSYLDEQAGTPPCSVLLPPHRAQRYMDGHLVPRRRLLPPTPAGRKPSFTIQCLQRQGSCEDLPIPGTYHRGRNSGPNRAQGSWATPPQRGRLLYAPLLLVEEGAAGEGYLGRSSGPLRTFTCLHVPGTHSDPSHGKRGSADSLVEAVLISEGLGLFARDPRFVALAKQEIADACRLTLDEMDNAASDLLAQGTSSLYSDEESILSRFDEEDLGDEMACVHAL

SEQ ID NO: 794849 - protein, 1928 aa, Homo sapiens
LQSWGKRGGLCADGPSISKERCRNLKAGKVRESFHPCRPLEQGPFDILILLTIFANCVALGVYIPFPEDDSNTANHNLEQVEYVFLVIFTVETVLKIVAYGLVLHPSAYIRNGWNLLDFIIVVVGLFSVLLEQGPGRPGDAPHTGGKPGGFDVKALRAFRVLRPLRLVSGVPSLHIVLNSIMKALVPLLHIALLVLFVIIIYAIIGLELFLGRMHKTCYFLGSDMEAEEDPSPCASSGSGRACTLNQTECRGRWPGPNGGITNFDNFFFAMLTVFQCVTMEGWTDVLYWMQDAMGYELPWVYFVSLVIFGSFFVLNLVLGVLSGEFSKEREKAKARGDFQKQREKQQMEEDLRGYLDWITQAEELDMEDPSADDNLGSMAEEGRAGHRPQLAELTNRRRGRLRWFSHSTRSTHSTSSHASLPASDTGSMTETQGDEDEEEGALASCTRCLNKIMKTRVCRRLRRANRVLRARCRRAVKSNACYWAVLLLVFLNTLTIASEHHGQPVWLTQIQEYANKVLLCLFTVEMLLKLYGLGPSAYVSSFFNRFDCFVVCGGILETTLVEVGAMQPLGISVLRCVRLLRIFKVTRHWASLSNLVASLLNSMKSIASLLLLLFLFIIIFSLLGMQLFGGKFNFDQTHTKRSTFDTFPQALLTVFQILTGEDWNVVMYDGIMAYGGPFFPGMLVCIYFIILFICGNYILLNVFLAIAVDNLASGDAGTAKDKGGEKSNEKDLPQENEGLVPGVEKEEEEGARREGADMEEEEEEEEEEEEEEEEEGAGGVELLQEVVPKEKVVPIPEGSAFFCLSQTNPLRKGCHTLIHHHVFTNLILVFIILSSVSLAAEDPIRAHSFRNHILGYFDYAFTSIFTVEILLKMTVFGAFLHRGSFCRSWFNMLDLLVVSVSLISFGIHSSAISVVKILRVLRVLRPLRAINRAKGLKHVVQCVFVAIRTIGNIMIVTTLLQFMFACIGVQLFKGKFYTCTDEAKHTPQECKGSFLVYPDGDVSRPLVRERLWVNSDFNFDNVLSAMMALFTVSTFEGWPALLYKAIDAYAEDHGPIYNYRVEISVFFIVYIIIIAFFMMNIFVGFVIITFRAQGEQEYQNCELDKNQRQCVEYALKAQPLRRYIPKNPHQYRVWATVNSAAFEYLMFLLILLNTVALAMQHYEQTAPFNYAMDILNMVFTGLFTIEMVLKIIAFKPKHYFTDAWNTFDALIVVGSIVDIAVTEVNNGGHLGESSEDSSRISITFFRLFRVMRLVKLLSKGEGIRTLLWTFIKSFQALPYVALLIAMIFFIYAVIGMQMFGKVALQDGTQINRNNNFQTFPQAVLLLFRCATGEAWQEIMLASLPGNRCDPESDFGPGEEFTCGSNFAIAYFISFFMLCAFLIINLFVAVIMDNFDYLTRDWSILGPHHLDEFKRIWSEYDPGAKGRIKHLDVVALLRRIQPPLGFGKLCPHRVACKRLVAMNMPLNSDGTVTFNATLFALVRTSLKIKTEGNLEQANQELRIVIKKIWKRMKQKLLDEVIPPPDEEEVTVGKFYATFLIQDYFRKFRRRKEKGLLGNDAAPSTSSALQAGLRSLQDLGPEMRQALTCDTEEEEEEGQEGVEEEDEKDLETNKATMVSQPSARRGSGISVSLPVGDRLPDSLSFGPSDDDRGTPTSSQPSVPQAGSNTHRRGSGALIFTIPEEGNSQPKGTKGQNKQDEDEEVPDRLSYLDEQAGTPPCSVLLPPHRAQRYMDGHLVPRRRLLPPTPAGRKPSFTIQCLQRQGSCEDLPIPGTYHRGRNSGPNRAQGSWATPPQRGRLLYAPLLLVEEGAAGEGYLGRSSGPLRTFTCLHVPGTHSDPSHGKRGSADSLVEAVLISEGLGLFARDPRFVALAKQEIADACRLTLDEMDNAASDLLAQGTSSLYSDEESILSRFDEEDLGDEMACVHAL

SEQ ID NO: 794850 - protein, 2021 aa, Homo sapiens
LQSWGKRGGLCADGPSISKERCRNLKAGKVRESFHPCRPLEQGPFDILILLTIFANCVALGVYIPFPEDDSNTANHNLEQVEYVFLVIFTVETVLKIVAYGLVLHPSAYIRNGWNLLDFIIVVVGLFSVLLEQGPGRPGDAPHTGGKPGGFDVKALRAFRVLRPLRLVSGVPSLHIVLNSIMKALVPLLHIALLVLFVIIIYAIIGLELFLGRMHKTCYFLGSDMEAEEDPSPCASSGSGRACTLNQTECRGRWPGPNGGITNFDNFFFAMLTVFQCVTMEGWTDVLYWMQDAMGYELPWVYFVSLVIFGSFFVLNLVLGVLSGEFSKEREKAKARGDFQKQREKQQMEEDLRGYLDWITQAEELDMEDPSADDNLGSMAEEGRAGHRPQLAELTNRRRGRLRWFSHSTRSTHSTSSHASLPASDTGSMTETQGDEDEEEGALASCTRCLNKIMKTRVCRRLRRANRVLRARCRRAVKSNACYWAVLLLVFLNTLTIASEHHGQPVWLTQIQEYANKVLLCLFTVEMLLKLYGLGPSAYVSSFFNRFDCFVVCGGILETTLVEVGAMQPLGISVLRCVRLLRIFKVTRHWASLSNLVASLLNSMKSIASLLLLLFLFIIIFSLLGMQLFGGKFNFDQTHTKRSTFDTFPQALLTVFQILTGEDWNVVMYDGIMAYGGPFFPGMLVCIYFIILFICGNYILLNVFLAIAVDNLASGDAGTAKDKGGEKSNEKDLPQENEGLVPGVEKEEEEGARREGADMEEEEEEEEEEEEEEEEEGAGGVELLQEVVPKEKVVPIPEGSAFFCLSQTNPLRKGCHTLIHHHVFTNLILVFIILSSVSLAAEDPIRAHSFRNHILGYFDYAFTSIFTVEILLKMTVFGAFLHRGSFCRSWFNMLDLLVVSVSLISFGIHSSAISVVKILRVLRVLRPLRAINRAKGLKHVVQCVFVAIRTIGNIMIVTTLLQFMFACIGVQLFKGKFYTCTDEAKHTPQECKGSFLVYPDGDVSRPLVRERLWVNSDFNFDNVLSAMMALFTVSTFEGWPALLYKAIDAYAEDHGPIYNYRVEISVFFIVYIIIIAFFMMNIFVGFVIITFRAQGEQEYQNCELDKNQRQCVEYALKAQPLRRYIPKNPHQYRVWATVNSAAFEYLMFLLILLNTVALAMQHYEQTAPFNYAMDILNMVFTGLFTIEMVLKIIAFKPKHYFTDAWNTFDALIVVGSIVDIAVTEVNNGGHLGESSEDSSRISITFFRLFRVMRLVKLLSKGEGIRTLLWTFIKSFQALPYVALLIAMIFFIYAVIGMQMFGKVALQDGTQINRNNNFQTFPQAVLLLFRCATGEAWQEIMLASLPGNRCDPESDFGPGEEFTCGSNFAIAYFISFFMLCAFLIINLFVAVIMDNFDYLTRDWSILGPHHLDEFKRIWSEYDPGAKYALYTLTYESRGQCIALHSPLAPKPPTAASHYPVNRCPKVSTAPSSALSDCPPVLPWQALGYWEEEVVMSWWGLEKGLVGASPIQWYLPNSSRGRIKHLDVVALLRRIQPPLGFGKLCPHRVACKRLVAMNMPLNSDGTVTFNATLFALVRTSLKIKTEGNLEQANQELRIVIKKIWKRMKQKLLDEVIPPPDEEEVTVGKFYATFLIQDYFRKFRRRKEKGLLGNDAAPSTSSALQAGLRSLQDLGPEMRQALTCDTEEEEEEGQEGVEEEDEKDLETNKATMVSQPSARRGSGISVSLPVGDRLPDSLSFGPSDDDRGTPTSSQPSVPQAGSNTHRRGSGALIFTIPEEGNSQPKGTKGQNKQDEDEEVPDRLSYLDEQAGTPPCSVLLPPHRAQRYMDGHLVPRRRLLPPTPAGRKPSFTIQCLQRQGSCEDLPIPGTYHRGRNSGPNRAQGSWATPPQRGRLLYAPLLLVEEGAAGEGYLGRSSGPLRTFTCLHVPGTHSDPSHGKRGSADSLVEAVLISEGLGLFARDPRFVALAKQEIADACRLTLDEMDNAASDLLAQGTSSLYSDEESILSRFDEEDLGDEMACVHAL

SEQ ID NO: 794851 - protein, 376 aa, Homo sapiens
PRCPSDGEMADAQNISLDSPGSVGAVAVPVVFALIFLLGTVGNGLVLAVLLQPGPSAWQEPGSTTDLFILNLAVADLCFILCCVPFQATIYTLDAWLFGALVCKAVHLLIYLTMYASSFTLAAVSVDRYLAVRHPLRSRALRTPRNARAAVGLVWLLAALFSAPYLSYYGTVRYGALELCVPAWEDARRRALDVATFAAGYLLPVAVVSLAYGRTLRFLWAAVGPAGAAAAEARRRATGRAGRAMLAVAALYALCWGPHHALILCFWYGRFAFSPATYACRLASHCLAYANSCLNPLVYALASRHFRARFRRLWPCGRRRRHRARRALRRVRPASSGPPGCPGDARPSGRLLAGGGQGPEPREGPVHGGEAARGPE

SEQ ID NO: 794852 - protein, 137 aa, Homo sapiens
QNAGSRVGPMRYGTPGAIGSLALCSGGGDPALKFPITSMDKHGEREARNRVSVIHGQGTPLGSNGKQNFNQVGRRFAFLTLPSPPWEAEALGVGGVGVLQSPLAPAPEGRGTDVTRMRLCPTPSVPGKFGKVKQSVT

SEQ ID NO: 794853 - protein, 96 aa, Homo sapiens
SPPSDVPSLLSGVTSILTSVPSLPFGVPSLLSGVPSPPSGVPSILPGVPSPPSGVPCSLVSQYSLMSQYSLVSPHYSLVSPHCPLVSPQYSLVSPH

SEQ ID NO: 794854 - protein, 132 aa, Homo sapiens
MSQPWLYSQCIISGKPSEEAAGENGSISAALRPLLLVADVPVLGYLCPSSVSSGVCEAKLLGWGLGGVSAAPEAKTKAEAEAEAEATLVRRKLQVEKLVDRDLDLTVILMVPMPSARRPPALATTGSCSPPG

SEQ ID NO: 794855 - protein, 67 aa, Homo sapiens
THYPGEQSDKAQCLGWGCRLYDLLGNVWEWTASPYQAAEQDMRVLRGASWIDTADGSANHRARVTTR

SEQ ID NO: 794856 - protein, 153 aa, Homo sapiens
YSRALACCFWRGKRLPTEEEWEFAARGGLKGQVYPWGNWFQPNRTNLWQGKFPKGDKAEDGFHGVSPVNAFPAQNNYGLYDLLGNVWEWTASPYQAAEQDMRVLRGASWIDTADGSANHRARVTTRMGNTPDSASDNLGFRCAADAGRPPGEL

SEQ ID NO: 794857 - protein, 153 aa, Homo sapiens; identical to SEQ ID NO: 794856

SEQ ID NO: 794858 - protein, 35 aa, Homo sapiens
EDSMKCWDGWMDGWMDGWMDGWTIQSSEFHEMLNG

SEQ ID NO: 794859 - protein, 54 aa, Homo sapiens
MVPRLGAAAGLLCSVVSGLKIDVPAYLIEAIGVVRWSSIYKLGPRGRIQVRVLI

SEQ ID NO: 794860 - protein, 49 aa, Homo sapiens
RGFIAYGSTGCRGSMAASASEEVSGSFQSRRKAKWEQASYRTGAGPRGW

SEQ ID NO: 794861 - protein, 90 aa, Homo sapiens
ILTDMLEKWCADQFMTCVPKLATEIVFAVLRSLIQMMLIYVLEKAESFPDKLLKLFRNISYFLKKMMSGQAAQEEEGNPDEFSDLLGGCD

SEQ ID NO: 794862 - protein, 65 aa, Homo sapiens
MARHKAGNSTAAALDLKRHPGLLGGDIAWLAEEDLTPLVFQGCQDDDRALDRSQRRGHPFPGSPG

SEQ ID NO: 794863 - protein, 105 aa, Homo sapiens
SGCPRAIRRGERTFFFFLLPPLFFPHLPRTEPKFSLGLLGQRDWPGPARACERGAAVAKGNRAGRDHRLPATPQSSGLASAHSAETCGEAAAAASASRLSLELYI

SEQ ID NO: 794864 - protein, 508 aa, Homo sapiens [sequence omitted]

SEQ ID NO: 794865 - protein, 62 aa, Homo sapiens
MNENKDTDSKKSEEYEDDFEKDLEWLINENEKSDASIIEMACEKEEFSKERFDIAIIYYARP

SEQ ID NO: 794866 - protein, 508 aa, Homo sapiens [sequence omitted]

SEQ ID NO: 794867 - protein, 155 aa, Homo sapiens
MAGGGCSGLRSRHFTPAWATKSETPSQNKQTNKQTNKSTLGIKGTSSACKTPHLLPMKSLTSVQPKRPARPFHCAARCTSSRHAFSVVVICACAPRAAGTFLLCASRTVIQDAETSRQLTQNWGVTSAPAACVPEAVRQGAQETHMPPEPHMHTS

SEQ ID NO: 794868 - protein, 101 aa, Homo sapiens
AHSLTPPSSLIIPRTLPTQSFGTVPAVPPPGTFFLQGSTDLAPSSPPTLIFPGGSSLITPHKATVPLPNPQYRPSTLFSHTMHFDSCTLCSSPHQVVTFMK

SEQ ID NO: 794869 - protein, 292 aa, Homo sapiens
MASPLTPNQDPGPQLCSPPHLPCDQLLTSRGLGVSVAGTFLRPSPPAPLCPTTQASPTWVPALQGAPRSVSMIRTLTRTQLAPFLPDIRALEAHSHPSLVHSHRPGTFNIPTFQVRKPRHRELGARPGGLPGGSRGVSDLRRGSGGLSRHRALPSRFSRDRAQGEGTSRPGSIHGPLTLGKGLSQGRPQVTAPEVVGSCGGLWAPSWAGTAWGPRAEGKKRARVDVSVHTQEHATAEPAQRGSGACAGRPAEEQQDPRRERTAFSEAGSRTILSVYIIALFDPGGPTVAFHR

SEQ ID NO: 794870 - protein, 149 aa, Homo sapiens
HQEGNEAAQGGGRRGPTQHPAICIDTAARRISLPPSRGPPLPAGRGRQERKHAAKERKEAQRRPGCPGETLRPDDTASLSRSGDFPDEGFPGGRQGPAHRSSATLLTMPVCYLPMKSHLGRAWWLTPVIPALWEVEACGSSEIRSLRPS

SEQ ID NO: 794871 - protein, 359 aa, Homo sapiens
MAEPFLSEYQHQPQTSNCTGAAAVQEELNPERPPGAEERVPEEDSRWQSRAFPQLGGRPGPEGEGSLESQPPPLQTQACPESSCLREGEKGQNGDDSSAGGDFPPPAEVEPTPEAELLAQPCHDSEASKLGAPAAGGEEEWGQQQRQLGKKKHRRRPSKKKRHWKPYYKLTWEEKKKFDEKQSLRASRIRAEMFAKGQPVAPYNTTQFLMDDHDQEEPDLKTGLYSKRAAAKSDDTSDDDFMEEGGEEDGGSDGMGGDGSEFLQRDFSETYERYHTESLQNMSKQELIKEYLELEKCLSRMEDENNRLRLESKRLGGDDARVRELELELDRLRAENLQLLTENELHRQQERAPLSKFGD

SEQ ID NO: 794872 - protein, 359 aa, Homo sapiens; identical to SEQ ID NO: 794871

SEQ ID NO: 794873 - protein, 355 aa, Homo sapiens
MAEPFLSEYQHQPQTSNCTGAAAVQEELNPERPPGAEERVPEEDSRWQSRAFPQLGGRPGPEGEGSLESQPPPLQTQACPESSCLREGEKGQNGDDSSAGGDFPPPAEVEPTPEAELLAQPCHDSEASKLGAPAAGGEEEWGQQQRQLGKKKHRRRPSKKKRHWKPYYKLTWEEKKKFDEKQSLRASRIRAEMFAKGQPVAPYNTTQFLMDDHDQEEPDLKTGLYSKRAAAKSDDTSDDDFMEEGGEEDGGSDGMGGDGSEFLQRDFSETYERYHTESLQNMSKQELIKEYLELEKCLSRMEDENNRLRLESKRLGGDDARVRELELELDRLRAENLQLLTENEMDGGSEAFSWG

SEQ ID NO: 794874 - protein, 276 aa, Homo sapiens
MAEPFLSEYQHQPQTSNCTGAAAVQEELNPERPPGAEERVPEEDSRWQSRAFPQLGGRPGPEGEGSLESQPPPLQTQACPESSCLREGEKGQNGDDSSAGGDFPPPAEVEPTPEAELLAQPCHDSEASKLGAPAAGGEEEWGQQQRQLGKKKHRRRPSKKKRHWKPYYKLTWEEKKKFDEKQSLRASRIRAEMFAKGQPVAPYNTTQFLMDDHDQEEPDLKTGLYSKRAAAKSDDTSDDDFMEEGGEEDGGSDGMGGDGSEFLQRDFSEHSKRFTL

SEQ ID NO: 794875 - protein, 359 aa, Homo sapiens; identical to SEQ ID NO: 794871

SEQ ID NO: 794876 - protein, 359 aa, Homo sapiens; identical to SEQ ID NO: 794871

SEQ ID NO: 794877 - protein, 341 aa, Homo sapiens
MAEPFLSEYQHQPQTSNCTGAAAVQEELNPERPPGAEERVPEEDSRWQSRAFPQLGGRPGPEGEGSLESQPPPLQTQACPESSCLREGEKGQNGDDSSAGGDFPPPAEVEPTPEAELLAQPCHDSEASKLGAPAAGGEEEWGQQQRQLGKKKHRRRPSKKKRHWKPYYKLTWEEKIAKGQPVAPYNTTQFLMDDHDQEEPDLKTGLYSKRAAAKSDDTSDDDFMEEGGEEDGGSDGMGGDGSEFLQRDFSETYERYHTESLQNMSKQELIKEYLELEKCLSRMEDENNRLRLESKRLGGDDARVRELELELDRLRAENLQLLTENELHRQQERAPLSKFGD

SEQ ID NO: 794878 - protein, 341 aa, Homo sapiens
MAEPFLSEYQHQPQTSNCTGAAAVQEELNPERPPGAEERVPEEDSRWQSRAFPQLGGRPGPEGEGSLESQPPPLQTQACPESSCLREGEKGQNGDDSSAGGDFPPPAEVEPTPEAELLAQPCHDSEASKLGAPAAGGEEEWGQQQRQLGKKKHRRRPSKKKRHWKPYYKLTWEEKKKFDEKQSLRASRIRAEMFAKGQPVAPYNTTQFLMDDHDQEEPDDDDFMEEGGEEDGGSDGMGGDGSEFLQRDFSETYERYHTESLQNMSKQELIKEYLELEKCLSRMEDENNRLRLESKRLGGDDARVRELELELDRLRAENLQLLTENELHRQQERAPLSKFGD

SEQ ID NO: 794879 - protein, 359 aa, Homo sapiens; identical to SEQ ID NO: 794871

SEQ ID NO: 794880 - protein, 311 aa, Homo sapiens
MAEPFLSEYQHQPQTSNCTGAAAVQEELNPERPPGAEERVPEEDSRWQSRAFPQLGGRPGPEGEGSLESQPPPLQTQACPESSCLREGEKGQNGDDSSAGGDFPPPAEVEPTPEAELLAQPCHDSEASKLGAPAAGGEEEWGQQQRQLGKKKHRRRPSKKKRHWKPYYKLTWEEKKKFDEKQSLRASRIRAEMFAKGQPVAPYNTTQFLMDDHDQEEPDLKTGLYSKRAAAKSDDTSDDDFMEEGGEEDGGSDGMGGDGSEFLQRDFSETYERYHTESLQNMSKQELIKEYLELEKWSSGREFSSSSSSSS

SEQ ID NO: 794881 - protein, 71 aa, Homo sapiens
MTQHVGDERSADAHLPWGEPPAGACGRRQEEGTLHRKGPTRVCRGKPGLLSPEDRAETACGCWRGVRSPGG

SEQ ID NO: 794882 - protein, 120 aa, Homo sapiens
MKAGFHNNKNKLCLAPDFFPPRIVKLTKVLRSMTSLCAFVFTKADVLDQKLISYNINQWFCIIANKMQYGRLSFSLTNIQISFQIWHNVSWPGIFEDRCYLAAINMLHQASFKSFVSSLV

SEQ ID NO: 794883 - protein, 108 aa, Homo sapiens
MGDGNVGVRTIDTVAQRQPRTWSFCDLADSAYPNVLGAQLTWPLKPPHGSCVLKASWPSQGPHPATHRMASNPLDGLLSASTPEGKRRLAQRLWISSSLVKPANSSVI

SEQ ID NO: 794884 - protein, 108 aa, Homo sapiens
YILNLRYHLPKTVLDKSWLRPPGILENASDLLRKMCVRNLVQKYCRGITAERKAMMQQKVVTSEIFRGRKDGYTESLNQPFVNSRIDEGDINPKVLQLISHEKIQKPL

SEQ ID NO: 794885 - protein, 66 aa, Homo sapiens
VPLTNDVMQSMLQVGLPFIQDDELCSGMQNTALGVGLRTSRFAAGIQKSYLNSLDFSFLTYKYKQR

SEQ ID NO: 794886 - protein, 238 aa, Homo sapiens
DRLLQQDKASLTRTLQHRIALHVADGLRYLHSAMIIYRDLKPHNVLLFTLYPNAAIIAKIADYGIAQYCCRMGIKTSEGTPGFRAPEVARGNVIYNQQADVYSFGLLLYDILTTGGRIVEGLKFPNEFDELEIQGKLPDPVKEYGCAPWPMVEKLIKQCLKENPQERPTSAQVFDILNSAELVCLTRRILLPKNVIVECMVATHHNSRNASIWLGCGHTDRGQLSFLDLNTEGYTSEV

SEQ ID NO: 794887 - protein, 56 aa, Homo sapiens
QGTGQKPRSYTASIHRPYHIKQIASKEASAGSLIPTTALCMAPKAIWRQPDAVLVC

SEQ ID NO: 794888 - protein, 124 aa, Homo sapiens
MKEAEGERHGFRKSGRPGEAFKSWITKREQQGATERLECEGKRSPGENRRERLKRAGWLGSVGGRRPPCPSSLAPPASSSPSSVACPSGGSRGSQKEPSPTHSQPPLLPESLPTPHPALPPQLP

SEQ ID NO: 794889 - protein, 121 aa, Homo sapiens
MRNHFKFLSKKDKMAAARRRAWREGERAAGSLTRGLQLEPWHWQGAWRRKRRKTVSRQDHPNRSSKLPWTSLPCPHREAAGDRAYLGNTNHGSDTSEMSCRASASTLIQTLSFSELLQAPG

SEQ ID NO: 794890 - protein, 168 aa, Homo sapiens
MPKGWGVRSSTFLPLWLPVKIELHQVQFHSSSQMIFSTLRSELYKLLALCQHAVVPMGKFLGKTKTQPQGQVVIFSEKGKAIIYLSLPRTVPIYTCIFSQSVGCLFILLIISFNFLLFIYFIETDLIMLPRVILDLLASSDPPTFVSQSAGITDVNYHTQSTCRRFSV

SEQ ID NO: 794891 - protein, 168 aa, Homo sapiens; identical to SEQ ID NO: 794890

SEQ ID NO: 794892 - protein, 33 aa, Homo sapiens
MLQRLAQAVPLLQPPCGAGTGLGSSFTNRLFSN

SEQ ID NO: 794893 - protein, 144 aa, Homo sapiens
GTMLGAGQEKSGLQSGAWVHPFQHCPTQGHSKRNRDWMRRVGAVHVEPGTGRLPVGLAGAVEAMVVVAMVWRGRLLSGQYCSVLCGPFPPVVSWELALREEIPTHSVGCVSGVSTPTTALSTACGWGCGIGPSMPWFRPAGAAA

SEQ ID NO: 794894 - protein, 130 aa, Homo sapiens
KAFSQIAHLTQHQRVHTGERPFECIECGKAFSNGSFLAQHQRIHTGEKPYVCNVCGKAFSHRGYLIVHQRIHTGERPYECKECRKAFSQYAHLAQHQRVHTGEKPYECKVCRKAFSQIAYLDQHQRVHTG

SEQ ID NO: 794895 - protein, 84 aa, Homo sapiens
  misc_feature (19)..(19): Xaa can be any naturally occurring amino acid
EVYGFHEMSREYKQPTGGXHINSMPRRTSKNVVLGRTKRMQKDSELRSSTEQTVSLLPKQMAQQKWRRQGKNTTDKIERRLKDT

SEQ ID NO: 794896 - protein, 113 aa, Homo sapiens
NCWGRYVCTKTYPFYKHKSKKYKWIRDKFLYRRKPTNSQEWVFFLSGGQDVWDTLDFTDQAVPASRTHPQLPQKTTFKAPDQDMGHTGRCSLSFRASFPGILPPGAPGSPGTG

SEQ ID NO: 794897 - protein, 131 aa, Homo sapiens
MNLPSTKVSWAAVTLLLLLLLLPPALLSSGAAAQPLPDCCRQKTCSCRLYELLHGAGNHAAGILTLGKRRSGPPGLQGRLQRLLQASGNHAAGILTMGRRAGAEPAPRPCLGRRCSAPAAASVAPGGQSGI

SEQ ID NO: 794898 - protein, 171 aa, Homo sapiens
MEGGGRYQKQKISGLLGRRDATAAAAAAAARAVVVRGGCTAPARLLSSKDLLLPPLRAAARRGQSRGRHPHAGQAEVRAPGPPGSAAAPPAGQRQPRRGHPDHGPPRRRRASAAPLPRAPLFRPGRRLRRARRTVRDLSRSSGPVLAQASALCPPSVSPQKKGNKDESPFV

SEQ ID NO: 794899 - protein, 120 aa, Homo sapiens
MASSRRGLLLLLLLTAHLGPSEAQHWSHGWYPGGKRALSSAQDPQNALRPPGRALDTAAGSPVQTAHGLPSDALAPLDDSMPWEGRTTAQWSLHRKRHLARTLLTAAREPRPAPPSSNKV

SEQ ID NO: 794900 - protein, 112 aa, Homo sapiens
MASSRRGLLLLLLLTAHLGPSEAQHWSHGWYPGGKRALSSAQDPQNALRPPGSPVQTAHGLPSDALAPLDDSMPWEGRTTAQWSLHRKRHLARTLLTAAREPRPAPPSSNKV

SEQ ID NO: 794901 - protein, 191 aa, Homo sapiens
MATLIYVDKEIGEPGTRVAAKDVLKLESRPSIKALDGISQVLTPRFGKTYDAPSALPKATRKALGTVNRATEKSVKTNGPRKQKQPSFSAKKMTEKTVKTKSSVPASDDAYPEIEKFFPFNLLDFESFDLPEERQIAHLPLSGVPLMILDEEGELEKLFQLGPPSPVKMPSPPWECNLFAVSFKHSVDPGC

SEQ ID NO: 794902 - protein, 436 aa, Homo sapiens
MAPLWACILVAAGILATDTHHPQDSALYHLSKQLLQKYHKEVRPVYNWTKATTVYLDLFVHAILDVDAENQILKTSVWYQEVWNDEFLSWNSSMFDEIREISLPLSAIWAPDIIINEFVDIERYPDLPYVYVNSSGTIENYKPIQVVSACSLETYAFPFDVQNCSLTFKSILHTVEDVDLAFLRSPEDIQHDKKAFLNDSEWELLSVSSTYSILQSSAGGFAQIQFNVVMRRHPLVYVVSLLIPSIFLMLVDLGSFYLPPNCRARIVFKTSVLVGYTVFRVNMSNQVPRSVGSTPLIGHFFTICMAFLVLSLAKSIVLVKFLHDEQRGGQEQPFLCLRGDTDADRPRVEPRAQRAVVTESSLYGEHLAQPGTLKEVWSQLQSISNYLQTQDQTDQQEAEWLVLLSRFDRLLFQSYLFMLGIYTITLCSLWALWGGV

SEQ ID NO: 794903 - protein, 301 aa, Homo sapiens
TRYASVNIKDKCMDQEVWNDEFLSWNSSMFDEIREISLPLSAIWAPDIIINEFVDIERYPDLPYVYVNSSGTIENYKPIQVVSACSLETYAFPFDVQNCSLTFKSILHTVEDVDLAFLRSPEDIQHDKKAFLNDSEWELLSVSSTYSILQSSAGGFAQIQFNGTSSPSAVAFLVLSLAKSIVLVKFLHDEQRGGQEQPFLCLRGDTDADRPRVEPRAQRAVVTESSLYGEHLAQPGTLKEVWSQLQSISNYLQTQDQTDQQEAEWLVLLSRFDRLLFQSYLFMLGIYTITLCSLWALWGGV

SEQ ID NO: 794904 - protein, 713 aa, Homo sapiens
MPSTEPRHCYRRMEEDTDYRIRFSSLCFFNDHVGFHGTIKSSPSDFIVIEIDEQGQLVNKTIDEPIFKISEIQLEPNNFPKKPKLDLQNLSLEDGRNQEVHTLIKYTDGDQNHQSGSEKEDTIVDGTSKCEEKADVLSSFLDEKTHELLNNFACDVREKWLSKTELIGLPPEFSIGRILDKNQRASLHSAIRQKFPFLVTVGKNSEIVVKPNLEYKELCHLVSEEEAFDFFKYLDAKKENSKFTFKPDTNKDHRKAVHHFVNKKFGNLVETKSFSKMNCSAGNPNVVVTVRFREKAHKRGKRPLSECQEGKVIYTAFTLRKENLEMFEAIGFLAIKLGVIPSDFSYAGLKDKKAITYQAMVVRKVTPERLKNIEKEIEKKRMNVFNIRSVDDSLRLGQLKGNHFDIVIRNLKKQINDSANLRERIMEAIENVKKKGFVNYYGPQRFGKGRKVHTDQIGLALLKNEMMKAIKLFLTPEDLDDPVNRAKKYFLQTEDAKGTLSLMPEFKVRERALLEALHRFGMTEEGCIQAWFSLPHSMRIFYVHAYTSKIWNEAVSYRLETYGARVVQGDLVCLDEDIDDENFPNSKIHLVTEEEGSANMYAIHQVVLPVLGYNIQYPKNKVGQWYHDILSRDGLQTCRFKVPTLKLNIPGCYRQILKHPCNLSYQLMEDHDIDVKTKGSHIDETALSLLISFDLDASCYATVCLKEIMKHDV

SEQ ID NO: 794905 - protein, 713 aa, Homo sapiens; identical to SEQ ID NO: 794904

SEQ ID NO: 794906 - protein, 701 aa, Homo sapiens
MEEDTDYRIRFSSLCFFNDHVGFHGTIKSSPSDFIVIEIDEQGQLVNKTIDEPIFKISEIQLEPNNFPKKPKLDLQNLSLEDGRNQEVHTLIKYTDGDQNHQSGSEKEDTIVDGTSKCEEKADVLSSFLDEKTHELLNNFACDVREKWLSKTELIGLPPEFSIGRILDKNQRASLHSAIRQKFPFLVTVGKNSEIVVKPNLEYKELCHLVSEEEAFDFFKYLDAKKENSKFTFKPDTNKDHRKAVHHFVNKKFGNLVETKSFSKMNCSAGNPNVVVTVRFREKAHKRGKRPLSECQEGKVIYTAFTLRKENLEMFEAIGFLAIKLGVIPSDFSYAGLKDKKAITYQAMVVRKVTPERLKNIEKEIEKKRMNVFNIRSVDDSLRLGQLKGNHFDIVIRNLKKQINDSANLRERIMEAIENVKKKGFVNYYGPQRFGKGRKVHTDQIGLALLKNEMMKAIKLFLTPEDLDDPVNRAKKYFLQTEDAKGTLSLMPEFKVRERALLEALHRFGMTEEGCIQAWFSLPHSMRIFYVHAYTSKIWNEAVSYRLETYGARVVQGDLVCLDEDIDDENFPNSKIHLVTEEEGSANMYAIHQVVLPVLGYNIQYPKNKVGQWYHDILSRDGLQTCRFKVPTLKLNIPGCYRQILKHPCNLSYQLMEDHDIDVKTKGSHIDETALSLLISFDLDASCYATVCLKEIMKHDV

SEQ ID NO: 794907 - protein, 701 aa, Homo sapiens; identical to SEQ ID NO: 794906

SEQ ID NO: 794908 - protein, 875 aa, Homo sapiens
TEGFRACAQRCANECLPLNRGRRGRVSCAMVGLYVCVCVCVWGGGVTRLALRIHTLCAQRKVTWTSVVPLDRQSKRREKKQVELLALSGTPLDVLEGNDALVFCEVKSASAGLGSVFLVPSQDPSSANEFLNHGPSKLLPRPLSAAVSVEWEYCTFRLNATWAPLLSSRHCYRRMEEDTDYRIRFSSLCFFNDHVGFHGTIKSSPSDFIVIEIDEQGQLVNKTIDEPIFKISEIQLEPNNFPKKPKLDLQNLSLEDGRNQEVHTLIKYTDGDQNHQSGSEKEDTIVDGTSKCEEKADVLSSFLDEKTHELLNNFACDVREKWLSKTELIGLPPEFSIGRILDKNQRASLHSAIRQKFPFLVTVGKNSEIVVKPNLEYKELCHLVSEEEAFDFFKYLDAKKENSKFTFKPDTNKDHRKAVHHFVNKKFGNLVETKSFSKMNCSAGNPNVVVTVRFREKAHKRGKRPLSECQEGKVIYTAFTLRKENLEMFEAIGFLAIKLGVIPSDFSYAGLKDKKAITYQAMVVRKVTPERLKNIEKEIEKKRMNVFNIRSVDDSLRLGQLKGNHFDIVIRNLKKQINDSANLRERIMEAIENVKKKGFVNYYGPQRFGKGRKVHTDQIGLALLKNEMMKAIKLFLTPEDLDDPVNRAKKYFLQTEDAKGTLSLMPEFKVRERALLEALHRFGMTEEGCIQAWFSLPHSMRIFYVHAYTSKIWNEAVSYRLETYGARVVQGDLVCLDEDIDDENFPNSKIHLVTEEEGSANMYAIHQVVLPVLGYNIQYPKNKVGQWYHDILSRDGLQTCRFKVPTLKLNIPGCYRQILKHPCNLSYQLMEDHDIDVKTKGSHIDETALSLLISFDLDASCYATVCLKEIMKHDV

SEQ ID NO: 794909 - protein, 713 aa, Homo sapiens; identical to SEQ ID NO: 794904

SEQ ID NO: 794910 - protein, 104 aa, Homo sapiens
IPPQPVPTGFKQPLPPSRDTHSAHSPFPSLRMFRLLPYGSPSTCRSQDNRGYGGVTEELMERKRWNSTDGYWTQSLEARRRRPCHIEEPASSSLAAHLIGQFSR

SEQ ID NO: 794911 - protein, 103 aa, Homo sapiens [sequence omitted]

SEQ ID NO: 794912 - protein, 70 aa, Homo sapiens
DEGDYRRRSRPATREPRAGGGGESKKPVGPVGSRVRGAGARGGGLGLARKGAGAGGGGVAAAAAARSGSP

SEQ ID NO: 794913 - protein, 126 aa, Homo sapiens
VYNLLFFGDSLALLPRLECSDVISAHCNLRLLGSSNSPASASQVAGITGMQHHDPLIFVYLVETGFHRFGLAGLKLLTSSDQPTSASQSAGITGMSHLAQPVIYSQMVQENNVYFHIETEIKTQKG

SEQ ID NO: 794914 - protein, 271 aa, Homo sapiens
GPSKKAVVYSIGNMLVLYGHSTQDLPETNARVVGGTEAGRNSWPSQISLQYRSGGSRYHTCGGTLIRQNWVMTAAHCVDYQKTFRVVAGDHNLSQNDGTEQYVSVQKIVVHPYWNSDNVAAGYDIALLRLAQSVTLNSYVQLGVLPQEGAILANNSPCYITGWGKTKTNGQLAQTLQQAYLPSVDYAICSSSSYWGSTVKNTMVCAGGDGVRSGCQGDSGGPLHCLVNGKYSLHGVTSFVSSRGCNVSRKPTVFTQVSAYISWINNVIASN

SEQ ID NO: 794915 - protein, 490 aa, Homo sapiens
QDDDAAQGVISASASNLDDFYPAEEDTKQNSNNTRGNANKTQKDTGVNEKAREKFYEAKLQQQQRELTLQTACPDLQLWSEMRRHEMLREELRQRRKQLEALMAEHQRRQGLAETASPVAVSLRSDGSENLCTPQQSRTEKTMATWGGSTQCALDEEGDEDGYLSEGIVRTDEEEEEEQDASSNDNFSVCPSNSVNHNSYNGKETKNRWKNNCPFSADENYRPLAKTRQQNISMQRQENLRWVSELSYVEEKEQWQEQINQLKKQLDFSVSICQTLMQDQQWMSRLPSRLTLRLLKKMNMMNRSYNVTLKRQQKAKMSHWNEKPLVKMTKITVLVKPCYLNILEDEQPLNSAAHKESPPTVDSTQQPNPLPLRLPEMEPLVPRVKEVKSAQETPESSLAGSPDTESPVLVNDYEAESGNISQKSDEEDFVKVEDLPLKLTIYSEADLRKKMVEEEQKNHLSGEICEMQTEELAGNSETLKEPETVGAQSI

SEQ ID NO: 794916 - protein, 307 aa, Homo sapiens
QDDDAAQGVISASASNLDDFYPAEEDTKQNSNNTRGNANKTQKDTGVNEKAREKFYEAKLQQQQRELTLQTACPDLQLWSEMRRHEMLREELRQRRKQLEALMAEHQRRQGLAETASPVAVSLRSDGSENLCTPQQSRTEKTMATWGGSTQCALDEEGDEDGYLSEGIVRTDEEEEEEQDASSNDNFSVCPSNSVNHNSYNGKETKNRWKNNCPFSADENYRPLAKTRQQNISMQRQENLRWVSELSYVEEKEQWQEQINQLKKQLDFSVSICQTLMQDQQTLSCLLQLFSRDTGIRSPGYQGDPSR

SEQ ID NO: 794917 - protein, 300 aa, Homo sapiens
QDDDAAQGVISASASNLDDFYPAEEDTKQNSNNTRGNANKTQKDTGVNEKAREKFYEAKLQQQQRELTLQTACPDLQLWSEMRRHEMLREELRQRRKQLEALMAEHQRRQGLAETASPVAVSLRSDGSENLCTPQQSRTEKTMATWGGSTQCALDEEGDEDGYLSEGIVRTDEEEEEEQDASSNDNFSVCPSNSVNHNSYNGKETKNRWKNNCPFSADENYRPLAKTRQQNISMQRQENLRWVSELSYVEEKEQWQEQINQLKKQLDFSVSICQTLMQDQQTLSCLLQTLLTGPYSVMPS

SEQ ID NO: 794918 - protein, 921 aa, Homo sapiens
DFFSMDFKEVVENLVTNDNSPNIPEAIDRLFSDIANINRESMAEITDIQIEEMAVNLWNWALTIGGGWLVNEEQKIRLHYVACKLLSMCEASFASEQSIQRLIMMNMRIGKEWLDAGNFLIADECFQAAVASLEQLYVKLIQRSSPEADLTMEKITVESDHFRVLSYQAESAVAQGDFQRASMCVLQCKDMLMRLPQMTSSLHHLCYNFGVETQKNNKYEESSFWLSQSYDIGKMDKKSTGPEMLAKVLRLLATNYLDWDDTKYYDKALNAVNLANKEHLSSPGLFLKMKILLKGETSNEELLEAVMEILHLDMPLDFCLNIAKLLMDHERESVGFHFLTIIHERFKSSENIGKVLILHTDMLLQRKEELLAKEKIEEIFLAHQTGRQLTAESMNWLHNILWRQAASSFEVQNYTDALQWYYYSLRFYSTDEMDLDFTKLQRNMACCYLNLQQLDKAKEAVAEAERHDPRNVFTQFYIFKIAVIEGNSERALQAIITLENILTDEESEDNDLVAERGSPTMLLSLAAQFALENGQQIVAEKALEYLAQHSEDQEQVLTAVKCLLRFLLPKIAEMPESEDKKKEMDRLLTCLNRAFVKLSQPFGEEALSLESRANEAQWFRKTAWNLAVQCDKDPVMMREFFILSYKMSQFCPSDQVILIARKTCLLMAVAVDLEQGRKASTAFEQTMFLSRALEEIQTCNDIHNFLKQTGTFSNDSCEKLLLLYEFEVRAKLNDPLLESFLESVWELPHLETKTFETIAIIAMEKPAHYPLIALKALKKALLLYKKEEPIDISQYSKCMHNLVNLSVPDGASNVELCPLEEVWGYFEDALSHISRTKDYPEMEILWLMVKSWNTGVLMFSRSKYASAEKWCGLALRFLNHLTSFKESYETQMNMLYSQLVEALSNNKGPVFHEHGYWSKSD

SEQ ID NO: 794919 - protein, 369 aa, Homo sapiens [sequence omitted]

SEQ ID NO: 794920 - protein, 145 aa, Homo sapiens
CGAVSYRRRNGIRGIKESAPDYPRREGWRRNPDLHDVNEPFDSLFLLLTCTPNLCTFTPVPPCSGVNSGNGPTCGVPPQCWVLFHMTDHCRGIIRTILQMRTQGSERSSYLLQNWDLYPGDLTLQQSLSITRHHLPQKKRKASEC

SEQ ID NO: 794921 - protein, 80 aa, Homo sapiens
ELEVFGDNSVLHKICKSLDKEAEIPAWDKWSLKSGKKTEKTRAECISSFLLAFLDKDCIIPVEGQAISSETLYVFSSIYC

SEQ ID NO: 794922 - protein, 129 aa, Homo sapiens
FPQITSTRMFTRFFPLPPRFSKHCFQQRRFQQCMTATSAWAWRRCARGGFRAARHISYSGADSVMGASRFVRRPWRAQGSPSVPASRASVNISFGQRDPAGCWGATVTKADPITPSPSSWFGQQNAETN

SEQ ID NO: 794923 - protein, 530 aa, Homo sapiens [sequence omitted]

SEQ ID NO: 794924 - protein, 530 aa, Homo sapiens [sequence omitted]

SEQ ID NO: 794925 - protein, 526 aa, Homo sapiens
LPVALLPSSVRRQDLLWGFVALLWGPGGCWSTFPGPQQPSKMGKGAARRTVDSQMASVLLDEMQIQHPTASLIAKVATAQDDVTGDGTTSNVLIIGELLKQADLYISEGLHPRIIAEGFEAAKIKALEVLEEVKVTKEMKRKILLDVARTSLQTKVHAELADVLTEVVVDSVLAVRRPGYPIDLFMVEIMEMKHKLGTDTKLIQGLVLDHGARHPDMKKRVEDAFILICNVSLEYEKTEVNSGFFYKTAEEKEKLVKAERKFIEDRVQKIIDLKDKVCAQSNKGFVVINQKGIDPFSLDSLAKHGIVALRRAKRRNMERLSLACGGMAVNSFEDLTVDCLGHAGLVYEYTLGEEKFTFIEECVNPCSVTLLVKGPNKHTLTQVKDAIRDGLRAIKNAIEDGCMVPGAGAIEVAMAEALVTYKNSIKGRARLGVQAFADALLIIPKVLAQNAGYDPQETLVKVQAEHVESKQLVGVDLNTGEPMVAADAGVWDNYCVKKQLLHSCTVIATNILLVDEIMRAGMSSLK

SEQ ID NO: 794926 - protein, 464 aa, Homo sapiens
MQIQHPTASLIAKVATAQDDVTGDGTTSNVLIIGELLKQADLYISEGLHPRIIAEGFEAAKIKALEVLEEVKVTKEMKRKILLDVARTSLQTKVHAELADVLTEVVVDSVLAVRRPGYPIDLFMVEIMEMKHKLGTDTKLIQGLVLDHGARHPDMKKRVEDAFILICNVSLEYEKTEVNSGFFYKTAEEKEKLVKAERKFIEDRVQKIIDLKDKVCAQSNKGFVVINQKGIDPFSLDSLAKHGIVALRRAKRRNMERLSLACGGMAVNSFEDLTVDCLGHAGLVYEYTLGEEKFTFIEECVNPCSVTLLVKGPNKHTLTQVKDAIRDGLRAIKNAIEDGCMVPGAGAIEVAMAEALVTYKNSIKGRARLGVQAFADALLIIPKVLAQNAGYDPQETLVKVQAEHVESKQLVGVDLNTGEPMVAADAGVWDNYCVKKQLLHSCTVIATNILLVDEIMRAGMSSLK

SEQ ID NO: 794927 - protein, 388 aa, Homo sapiens
MKRKILLDVARTSLQTKVHAELADVLTEVVVDSVLAVRRPGYPIDLFMVEIMEMKHKLGTDTKLIQGLVLDHGARHPDMKKRVEDAFILICNVSLEYEKTEVNSGFFYKTAEEKEKLVKAERKFIEDRVQKIIDLKDKVCAQSNKGFVVINQKGIDPFSLDSLAKHGIVALRRAKRRNMERLSLACGGMAVNSFEDLTVDCLGHAGLVYEYTLGEEKFTFIEECVNPCSVTLLVKGPNKHTLTQVKDAIRDGLRAIKNAIEDGCMVPGAGAIEVAMAEALVTYKNSIKGRARLGVQAFADALLIIPKVLAQNAGYDPQETLVKVQAEHVESKQLVGVDLNTGEPMVAADAGVWDNYCVKKQLLHSCTVIATNILLVDEIMRAGMSSLK

SEQ ID NO: 794928 - protein, 106 aa, Homo sapiens
VRRIRRSVPRDVEVMGGRGGVSLCHPGWSAVCVISTHCNLCLLGSSDSPASASRVAGITEFLESLRSPWARSHSESCRIFLLTPAVPVESTDPTGIIKLSARKPQG

SEQ ID NO: 794929 - protein, 102 aa, Homo sapiens
MPANEDAPQPGEHGSACEVSVSFEDVTVDFSREEWQQLDSTQRRLYQDVMLENYSHLLSVGFEVPKPEVIFKLEQGEGPWTLEGEAPHQSCSGISTYFVTST

SEQ ID NO: 794930 - protein, 106 aa, Homo sapiens; identical to SEQ ID NO: 794928

SEQ ID NO: 794931 - protein, 75 aa, Homo sapiens
PPPPPRRAPRPGAGGAQAYRFSLLTTRLLLEDGGGVVSAIQDCLSYPLQCPSLISCLNQNRTVSGKGKHLFSKGQ

SEQ ID NO: 794932 - protein, 47 aa, Homo sapiens
TAYNISPVKAGILRIVHCVAPCPCMMKNSEMHGCFPEGTCQWKPPGS

SEQ ID NO: 794933 - protein, 54 aa, Homo sapiens
AESWAWLAVGFYRVVAALCTGRGGVTDSHVGRSLLRIRCFKLRNNCAGFYFSIL

SEQ ID NO: 794934 - protein, 131 aa, Homo sapiens
MLTLSKVFLSSVSHSSKWWNLRKGTWESLTYSQSARSTGYQNHHTRDMNLPHLASQEAWISFTVNAPPLNHTSTLPPGPGDTAEEAEGCTIGFPTFEVLGLRLASWLLTLQMVYCGTSSCDHVSVCCSDWS

SEQ ID NO: 794935 - protein, 131 aa, Homo sapiens; identical to SEQ ID NO: 794934

SEQ ID NO: 794936 - protein, 77 aa, Homo sapiens
PHLGGVTGFHKRPGRQAPWDVPECVAFMISATPEAGPLRLPGSSLQNPLTNILCHEPGAGPPREHQSPNIICGVLCH

SEQ ID NO: 794937 - protein, 156 aa, Homo sapiens
RHHAWLIFVFLVETGLHHIGQAGLEPPTSGDPPASASKSAGITGVSHRARSDSLVSRRDGLGGSKEKASPGPRKRPGEASLHFPISCGALPGRAPRLPRAPVEEPRGGRGSSAQPAALNRSQHRLPVVRGRETTQRERKGRLPNGLSSHGVLRGVT

SEQ ID NO: 794938 - protein, 91 aa, Homo sapiens
GRGGYSPSPSLTRSQSRFPSSCRRRPVEDTPAGPAVPPRLALASAVLELELVPPSEPFALAVPAAGNDLALSRLAGPCAAAVRMSPSQGPF

SEQ ID NO: 794939 - protein, 105 aa, Homo sapiens
VRYKVFQKRRRVGLNVGQSWEDVSCRTVTFELEFFRQRSTRTRACGGDCAEELSQSLQPVWETDKFVAEMVCRVKWLAGSLERREKEFGNPSSGLSEVGSNSVLR

SEQ ID NO: 794940 - protein, 325 aa, Homo sapiens
MDQYCILGRIGEGAHGIVFKAKHVETGEIVALKKVALRRLEDGFPNQALREIKALQEMEDNQYVVQLKAVFPHGGGFVLAFEFMLSDLAEVVRHAQRPLAQAQVKSYLQMLLKGVAFCHANNIVHRDLKPANLLISASGQLKIADFGLARVFSPDGSRLYTHQVATRSVGCIMGELLNGSPLFPGKNDIEQLCYVLRILGTPNPQVWPELTELPDYNKISFKEQVPMPLEEVLPDVSPQALDLLGQFLLYPPHQRIAASKALLHQYFFTAPLPAHPSELPIPQRLGGPAPKAHPGPPHIHDFHVDRPLEESLLNPELIRPFILEG

SEQ ID NO: 794941 - protein, 167 aa, Homo sapiens
MDQYCILGRIGEGAHGIVFKAKHVETGEIVALKKVALRRLEDGFPNQALREIKALQEMEDNQYVVQLKAVFPHGGGFVLAFEFMLSDLAEVVRHAQRPLAQAQVKSYLQMLLKGVAFCHANNIVHRDLKPANLLISASGQLKIADFGLARVFSPDGSRLYTHQVATR

SEQ ID NO: 794942 - protein, 275 aa, Homo sapiens
MDQYCILGRIGEGAHGIVFKAKHVETGEIVALKKVALRRLEDGFPNQALREIKALQEMEDNQYVVQLKAVFPHGGGFVLAFEFMLSDLAEVVRHAQRPLAQAQVKSYLQMLLKGVAFCHANNIVHRDLKPANLLISASGQLKIADFGLARVFSPDGSRLYTHQVATRSVGCIMGELLNGSPLFPGKNDIEQLCYVLRILGTPNPQVWPELTELPDYNKISFKEQVPMPLEEVLPDVSPQALDLLGQFLLYPPHQRIAASKLPCLPIHLSCRFLSV

SEQ ID NO: 794943 - protein, 325 aa, Homo sapiens; identical to SEQ ID NO: 794940

SEQ ID NO: 794944 - protein, 232 aa, Homo sapiens
MDQYCILGRIGEGAHGIVFKAKHVETGEIVALKKVALRRLEDGFPNQALREIKALQEMEDNQYVVQLKAVFPHGGGFVLAFEFMLSDLAEVVRHAQRPLAQAQVKSYLQMLLKGVAFCHANNIVHRDLKPANLLISASGQLKIADFGLARVFSPDGSRLYTHQVATRWYRAPELLYGARQYDQGVDLWSVGCIMGELLNGSPLFPGKNDIEQLCYVLRILGTPNPQVWPAGL

SEQ ID NO: 794945 - protein, 243 aa, Homo sapiens
MDQYCILGRIGEGAHGIVFKAKHVETGEIVALKKVALRRLEDGFPNQALREIKALQEMEDNQYVVQLKAVFPHGGGFVLAFEFMLSDLAEVVRHAQRPLAQAQVKSYLQMLLKGVAFCHANNIVHRDLKPANLLISASGQLKIADFGLARVFSPDGSRLYTHQVATRSSLSCRTTTRSPLRSRCPCPWRRCCLTSLPRHWICWVNSFSTLLTSASQLPRLSSISTSSQLPCLPIHLSCRFLSV

SEQ ID NO: 794946 - protein, 338 aa, Homo sapiens
MDQYCILGRIGEGAHGIVFKAKHVEPRVGWQCLPSILQTGEIVALKKVALRRLEDGFPNQALREIKALQEMEDNQYVVQLKAVFPHGGGFVLAFEFMLSDLAEVVRHAQRPLAQAQVKSYLQMLLKGVAFCHANNIVHRDLKPANLLISASGQLKIADFGLARVFSPDGSRLYTHQVATRSVGCIMGELLNGSPLFPGKNDIEQLCYVLRILGTPNPQVWPELTELPDYNKISFKEQVPMPLEEVLPDVSPQALDLLGQFLLYPPHQRIAASKALLHQYFFTAPLPAHPSELPIPQRLGGPAPKAHPGPPHIHDFHVDRPLEESLLNPELIRPFILEG

SEQ ID NO: 794947 - protein, 325 aa, Homo sapiens; identical to SEQ ID NO: 794940

SEQ ID NO: 794948 - protein, 31 aa, Homo sapiens
IWGQSRERRNEERLNCCASCSQLRGISSYSG

SEQ ID NO: 794949 - protein, 135 aa, Homo sapiens
TPNPFCPLSPVPIPSFSKQGSHGPIWDVGLGGTAVESWVGWVWGSLAPSPEQFGKLEEIQPLFLCPLLNTSRLGWLGWEPGSWVLPGTEGGGHWESGLLVPREGLESALGASRRGEGPDKEGFSPGCHAPVWLPW

SEQ ID NO: 794950 - protein, 103 aa, Homo sapiens
SHGHHEHVTVQQRFCLWPVLRPVDGQIWGPLPNSPQPDLDSIQIGFDQHVENGGVECGIQNGGVGQAWWLMPVIPALWESEAGRSRGQEIETILANTVKPHLH

SEQ ID NO: 794951 - protein, 157 aa, Homo sapiens
MDWDDEYSHNSFDLHCLLNSFPGDLEFEQIFSDIDEKIEQNAASIKHCIKEIQSEINKQCPGVQLQTTTDCFEWLTNYNYSTSESSFISHGDLIKFFKTLQDLLKNEQNQEEMTLDLLWDLSCHSSVSFPSTLSGTSFHFLSRTSLHSVEDNSSMDV

SEQ ID NO: 794952 - protein, 102 aa, Homo sapiens
MDWDDEYSHNSFDLHCLLNSFPGDLEFEQIFSDIDEKIEQNAASIKHCIKEIQSEINKQCPGVQLQTTTDCFEWLTNYNYSTSESSFISHGDLIKFFKTLVK

SEQ ID NO: 794953 - protein, 36 aa, Homo sapiens
MFIHVKEQIKVKQQRVGAGCSLSAMSGFFVELGSSF

SEQ ID NO: 794954 - protein, 42 aa, Homo sapiens
MGPCTLKLTSMENSVSGPGSRLLRFTSRCLDEALAINFEKTI

SEQ ID NO: 794955 - protein, 122 aa, Homo sapiens
AVGLLSVLRPLSPSPEERPLACSSPHLAEEPILGILAVLLCHLLILLTHLIQDAAQVHTWGSAHLHIDLTAHLASRGVHLLWKKGMWMCASGPILISHSQAFPHEVTPLPTRTPPLFFLCSI

SEQ ID NO: 794956 - protein, 81 aa, Homo sapiens
TRRLFSNLILIGKHNNQPGPVLLERAVMCRETAGYGWLLASTELLSLLEPLSPQLLKEHISCTSQVAAGAKVTPDSAVWAP

SEQ ID NO: 794957 - protein, 293 aa, Homo sapiens
MSGLGRSRRGGRSRVDQEERFPQGLWTGVAMRSCPEEQYWDPLLGTCMSCKTICNHQSQRTCAAFCRSLSCRKEQGKFYDHLLRDCISCASICGQHPKQCAYFCENKLRSPVNLPPELRRQRSGEVENNSDNSGRYQGLEHRGSEASPALPGLKLSADQVALVYSTLGLCLCAVLCCFLVAVACFLKKRGDPCSCQPRSRPRQSPAKSSQDHAMEAGSPVSTSPEPVETCSFCFPECRAPTQESAVTPGTPDPTCAGRWGCHTRTTVLQPCPHIPDSGLGIVCVPAQEGGPGA

SEQ ID NO: 794958 - protein, 541 aa, Homo sapiens
MASQEFEVEAIVDKRQDKNGNTQYLVRWKGYDKQDDTWEPEQHLMNCEKCVHDFNRRQTEKQKKLTWTTTSRIFSNNARRRTSRSTKANYSKNSPKTPVTDKHHRSKNCKLFAASKNVRRKAASTLSDTKNMEIINSTIETLAPDSPFDHKKTVSGFQKLEKLDPIAADQQDTVVFKVTEGKLLRDPLSHPGAEQTGIQNKTQMHPLMSQMSGSVTASMATGSATRKGIVVLIDPLAANGTTDMHTSVPRVKGGQRNITDDSRGQPFIKKMHFTIRLTESAITYRDIVVKKEDGFTQIVLSTRSTEKNALNTEVIKEMVNALNSAAADDSKLVLFSAAGSVFCCGLDFGYFVRHLRNDRNTASLEMVDTIKNFVNTFIQFKKPIVVSVNGPAIGLGASILPLCDLVWANEKAWFQTPYTTFGQSPDGCSSITFPKMMGKASANEMLIAGRKLTAREACAKGLVSQVFLTGTFTQEVMIQIKELASYNAIVLEECKALVRCNIKLELEQANERECEVLRKIWSSAQGIESMLKYVENKIDEF

SEQ ID NO: 794959 - protein, 188 aa, Homo sapiens
SRNSNMSKIMRSNNWKNWRNEAEVTLGSANDRQAETRVQRAAVDSSRTTLQLEETVDGFQRQKLKDLQKFFCDFVTIEMVFHAKAVEVYSSAFQTLEKYDLERDLLDFRAKMQGVYGHYDTRLLANTSPPPSVLQSLASQSAQSTIWSPGKEGEESEDNSMEEAPVEDLRALGQGPHKRELPTTVRRT

SEQ ID NO: 794960 - protein, 177 aa, Homo sapiens
SRNSNMSKIMRSNNWKNWRNEAEVTLGSANDRQAETRVQRAAVDSSRTTLQLEETVDGFQRQKLKDLQKFFCDFVTIEMVFHAKAVEVYSSAFQTLEKYDLERDLLDFRAKMQGVYGHYDTRLLANTSPPPSVLQSLASQGTLQVQLSRANEDPEHPHANHECSEHHMEPRKRRGGE

SEQ ID NO: 794961 - protein, 126 aa, Homo sapiens
NKHLRLVAAIIITDVAVVLLLLLFRVLRAPYGAQEKKGRRVRTTPWRRPPWRTSGHWGRDPIRENCPQQSEELSWPWILRWALLCALRQATCPLSLSFLICTTGPISLTSQVALGDRCAWHIVGVQ

SEQ ID NO: 794962 - protein, 260 aa, Homo sapiens
AAGHERKLQQELQKICTCSPQQFNRLHVFGKVFEDICNSSLIFGDLLKKVKDEYELYMATLLESQPAAQYEALLAQLKALGQRPVKTADMDLAREELRMLVTATKAALEQNDRLRSELEMEVALLQSAKERSESSEKHIIDENRLTLTEKVEKKRCEILSKWDEIQALEKEIKTTLVHTGISDITENRIKSIEHEAIQLETENMILKKKIKVTENHVKQIIGKISEERQEGLWKFIKEFVKSEETEDNAQVAEQMASGNS

SEQ ID NO: 794963 - protein, 81 aa, Homo sapiens
VWDAESPATPQPEPGEVSGLLERGERPRPRSCVRRDSHGDWVLLLPGRTDAASQDPSTCVMGEEGLGRADQCREPILPGSP

SEQ ID NO: 794964 - protein, 81 aa, Homo sapiens; identical to SEQ ID NO: 794963

SEQ ID NO: 794965 - protein, 143 aa, Homo sapiens
LSLSGTNWLDCGFAGLLPTSPWEKADHASQPGWNLLAVAGVSLPHLPVYLARSFKPPALVYLPPPTLASLRTLPQSTGGHSGQRCVWRALKAPTWEGKMGGFLQDHSCGRAGQGSPQCNRLPDWLQPRSWGDTQGPENSAKFP

SEQ ID NO: 794966 - protein, 36 aa, Homo sapiens
GRHGRVLLCERSEDTMVQGVSPFDIWGQGTMVTVSS

SEQ ID NO: 794967 - protein, 38 aa, Homo sapiens
VDTAVYYCARDSLTVEMATIPYNTTGAREPWSPSPQVS

SEQ ID NO: 794968 - protein, 103 aa, Homo sapiens
VQYLMEVFGCLFLWGVPKPMSLGIFFQILSALSLSLLSLSFIHTLSHSEMASLQLGAASNSGSGHTHKVPRVANLSSSSVPVQDDVTKHLPSGRCFQRIFIDI

SEQ ID NO: 794969 - protein, 117 aa, Homo sapiens
EDQTRQRNILFHMNCGFDPQTARRNLLGQAAAALSCWSGDLESEKTHRLLCPFSSICTRLSLGPSPLHGEEGHGQGKLSFIQCGEERLSRETDLPQARLTYNAPPYRNGTPSTQSSL

SEQ ID NO: 794970 - protein, 99 aa, Homo sapiens
EDQTRQRNILFHMNCGFDPQTARRNLLGQAAAALSCWSGDLESEKTHRLLCPFSSICTRLSLGPSPLHGEEGHGQGKLSFIQCGEERCPRAGQLPNCDL

SEQ ID NO: 794971 - protein, 113 aa, Homo sapiens
ACRPLELDDQDWRELAGNHQGSQVSSSRNSETTTSQPSIISQRTQAPQPPSDSLFILPSFLFHSCVSGPLLMSHSTTAPTIQGATDLTATRAPTPWSLPVPLSCFGVQARSPS

SEQ ID NO: 794972 - protein, 116 aa, Homo sapiens
MCHPEASRPFSPWYPPPRSCLPKPSSCCCSHNKCHHQGPSSCQCRLSRAGDWGTCSHHLSNSGGSQASQGSDDDRNEKWDDSSTLVDELRTPGRGMYLVFDGSVDLHYHCSAKCKS

SEQ ID NO: 794973 - protein, 116 aa, Homo sapiens; identical to SEQ ID NO: 794972

SEQ ID NO: 794974 - protein, 68 aa, Homo sapiens
MSTKQLLCRKIPDPLRMISLTVPDSPFYKEVTYLLISTPLSIPNNTILTPLLRVKRLETFNLFEPTFP

SEQ ID NO: 794975 - protein, 116 aa, Homo sapiens
DSDSNRGSVILDSGHLSTASSSDDLKGEEGSFRGSVLQRAAKFGSLAKQNSQMIVKRFSFSQRSRDESASETSTPSEHSAAPSPQVEVRTLEGQLVQHPGPGIPRPGHRSRAPELV

SEQ ID NO: 794976 - protein, 111 aa, Homo sapiens
LPRQMNSSSEHWECTCLSDVVMGHMVGSEGDSGPVGQSMWEDCHRDSQRVHSALNRAKDCKGQELGLTCKVALHKALFRECDSLKLFLAASVLNLTGRDPPKHDPDGKKYF

SEQ ID NO: 794977 - protein, 1321 aa, Homo sapiens [sequence omitted]

SEQ ID NO: 794978 - protein, 387 aa, Homo sapiens
MENKLPMETLVEECGENRERKCKLKDQSDKEEGTRDISSPKRLRDRQALFPAKVTNVSLLEKFERSESGGKIMTPESLSYPSCLKHDSEMKPQTSPACQDHNKAGQMKSLATREQNQKNAAYNLGVAEAIRNHKNEKPEFYISFLFDKRPLSPALNALKQEEYSRSLLKQMDNRQENEIKQRQYRELMDRLEQVQLTEELAAQRAKFLKDKMEETQCYKRALDAQIKNKPSRLPPFEPDSSEPIFGKNEGELMVEKQKREQNYMKHQLEAAANHKRKAILHQLVDQRRDLQMLQRTQREHLADRTAELERVNRVNQCLQEDWERSAAMKKQRDLEDKAFERASDKLFLLDQCEKYRRCKQCQRRTSNVGESNLWPLNKFLPGSRLLV

SEQ ID NO: 794979 - protein, 1469 aa, Homo sapiens
MDVDAEREKITQEIKELERILDPGSSGSHVEISESSLESDSEADSLPSEDLDPADPPISEEERWGEASNDEDDPKDKTLPEDPETCLQLNMVYQEVIQEKLAEANLLLAQNREQQEELMRDLAGSKGTKVKDGKSLPPSTYMGHFMKPYFKDKVTGVGPPANEDTREKAAQGIKAFEELLVTKWKNWEKALLRKSVVSDRLQRLLQPKLLKLEYLHQKQSKVSSELERQALEKQGREAEKEIQDINQLPEEALLGNRLDSHDWEKISNINFEGSRSAEEIRKFWQNSEHPSINKQEWSREEEERLQAIAAAHGHLEWQKIAEELGTSRSAFQCLQKFQQHNKALKRKEWTEEEDRMLTQLVQEMRVGSHIPYRRIVYYMEGRDSMQLIYRWTKSLDPGLKKGYWAPEEDAKLLQAVAKYGEQDWFKIREEVPGRSDAQCRDRYLRRLHFSLKKGRWNLKEEEQLIELIEKYGVGHWAKIASELPHRSGSQCLSKWKIMMGKKQGLRRRRRRARHSVRWSSTSSSGSSSGSSGGSSSSSSSSSEEDEPEQAQAGEGDRALLSPQYMVPDMDLWVPARQSTSQPWRGGAGAWLGGPAASLSPPKGSSASQGGSKEASTTAAAPGEETSPVQVPARAHGPVPRSAQASHSADTRPAGAEKQALEGGRRLLTVPVETVLRVLRANTAARSCTQKEQLRQPPLPTSSPGVSSGDSVARSHVQWLRHRATQSGQRRWRHALHRRLLNRRLLLAVTPWVGDVVVPCTQASQRPAVVQTQADGLREQLQQARLASTPVFTLFTQLFQIDTAGCLEVVRERKALPPRLPQAGARDPPVHLLQASSSAQSTPGHLFPNVPAQEASKSASHKGSRRLASSRVERTLPQASLLASTGPRPKPKTVSELLQEKRLQEARAREATRGPVVLPSQLLVSSSVILQPPLPHTPHGRPAPGPTVLNVPLSGPGAPAAAKPGTSGSWQEAGTSAKDKRLSTMQALPLAPVFSEAEGTAPAASQAPALGPGQISVSCPESGLGQSQAPAASRKQGLPEAPPFLPAAPSPTPLPVQPLSLTHIGGPHVATSVPLPVTWVLTAQGLLPVPVPAVVSLPRPAGTPGPAGLLATLLPPLTETRAAQGPRAPALSSSWQPPANMNREPEPSCRTDTPAPPTHALSQSPAEADGSVAFVPGEAQVAREIPEPRTSSHADPPEAEPPWSGRLPAFGGVIPATEPRGTPGSPSGTQEPRGPLGLEKLPLRQPGPEKGALDLEKPPLPQPGPEKGALDLGLLSQEGEAATQQWLGGQRGVRVPLLGSRLPYQPPALCSLRALSGLLLHKKALEHKATSLVVGGEAERPAGALQASLGLVRGQLQDNPAYLLLRARFLAAFTLPALLATLAPQGVRTTLSVPSRVGSESEDEDLLSELELADRDGQPGCTTATCPIQGAPDSGKCSASSCLDTSNDPDDLDVLRTRHARHTRKRRRLV

SEQ ID NO: 794980 - protein, 171 aa, Homo sapiens [sequence omitted]

SEQ ID NO: 794981 - protein, 72 aa, Homo sapiens
ANGARGWMLWFCSSWAGPQSASSRESHAKDGGGRFSLLLGVLGSRVCANDPDDLDVLRTRHARHTRKRRRLV

SEQ ID NO: 794982 - protein, 1021 aa, Homo sapiens
SPGEQQACPGEESLDEGISMGFGFAGHWAKIASELPHRSGSQCLSKWKIMMGKKQGLRRRRRRARHSVRWSSTSSSGSSSGSSGGSSSSSSSSSEEDEPEQAQAGEGDRALLSPQYMVPDMDLWVPARQSTSQPWRGGAGAWLGGPAASLSPPKGSSASQGGSKEASTTAAAPGEETSPVQVPARAHGPVPRSAQASHSADTRPAGAEKQALEGGRRLLTVPVETVLRVLRANTAARSCTQKEQLRQPPLPTSSPGVSSGDSVARSHVQWLRHRATQSGQRRWRHALHRRLLNRRLLLAVTPWVGDVVVPCTQASQRPAVVQTQADGLREQLQQARLASTPVFTLFTQLFQIDTAGCLEVVRERKALPPRLPQAGARDPPVHLLQASSSAQSTPGHLFPNVPAQEASKSASHKGSRRLASSRVERTLPQASLLASTGPRPKPKTVSELLQEKRLQEARAREATRGPVVLPSQLLVSSSVILQPPLPHTPHGRPAPGPTVLNVPLSGPGAPAAAKPGTSGSWQEAGTSAKDKRLSTMQALPLAPVFSEAEGTAPAASQAPALGPGQISVSCPESGLGQSQAPAASRKQGLPEAPPFLPAAPSPTPLPVQPLSLTHIGGPHVATSVPLPVTWVLTAQGLLPVPVPAVVSLPRPAGTPGPAGLLATLLPPLTETRAAQGPRAPALSSSWQPPANMNREPEPSCRTDTPAPPTHALSQSPAEADGSVAFVPGEAQVAREIPEPRTSSHADPPEAEPPWSGRLPAFGGVIPATEPRGTPGSPSGTQEPRGPLGLEKLPLRQPGPEKGALDLEKPPLPQPGPEKGALDLGLLSQEGEAATQQWLGGQRGVRVPLLGSRLPYQPPALCSLRALSGLLLHKKALEHKATSLVVGGEAERPAGALQASLGLVRGQLQDNPAYLLLRARFLAAFTLPALLATLAPQGVRTTLSVPSRVGSESEDEDLLSELELADRDGQPGCTTATCPIQGAPDSGKCSASSCLDTSNDPDDLDVLRTRHARHTRKRRRLV

SEQ ID NO: 794983 - protein, 702 aa, Homo sapiens
PPVPAADGLREQLQQARLASTPVFTLFTQLFQIDTAGCLEVVRERKALPPRLPQAGARDPPVHLLQASSSAQSTPGHLFPNVPAQEASKSASHKGSRRLASSRVERTLPQASLLASTGPRPKPKTVSELLQEKRLQEARAREATRGPVVLPSQLLVSSSVILQPPLPHTPHGRPAPGPTVLNVPLSGPGAPAAAKPGTSGSWQEAGTSAKDKRLSTMQALPLAPVFSEAEGTAPAASQAPALGPGQISVSCPESGLGQSQAPAASRKQGLPEAPPFLPAAPSPTPLPVQPLSLTHIGGPHVATSVPLPVTWVLTAQGLLPVPVPAVVSLPRPAGTPGPAGLLATLLPPLTETRAAQGPRAPALSSSWQPPANMNREPEPSCRTDTPAPPTHALSQSPAEADGSVAFVPGEAQVAREIPEPRTSSHADPPEAEPPWSGRLPAFGGVIPATEPRGTPGSPSGTQEPRGPLGLEKLPLRQPGPEKGALDLEKPPLPQPGPEKGALDLGLLSQEGEAATQQWLGGQRGVRVPLLGSRLPYQPPALCSLRALSGLLLHKKALEHKATSLVVGGEAERPAGALQASLGLVRGQLQDNPAYLLLRARFLAAFTLPALLATLAPQGVRTTLSVPSRVGSESEDEDLLSELELADRDGQPGCTTATCPIQGAPDSGKCSASSCLDTSNDPDDLDVLRTRHARHTRKRRRLV

SEQ ID NO: 794984 - protein, 691 aa, Homo sapiens
LTKSSYRPGMVAHACNPQLFQIDTAGCLEVVRERKALPPRLPQAGARDPPVHLLQASSSAQSTPGHLFPNVPAQEASKSASHKGSRRLASSRVERTLPQASLLASTGPRPKPKTVSELLQEKRLQEARAREATRGPVVLPSQLLVSSSVILQPPLPHTPHGRPAPGPTVLNVPLSGPGAPAAAKPGTSGSWQEAGTSAKDKRLSTMQALPLAPVFSEAEGTAPAASQAPALGPGQISVSCPESGLGQSQAPAASRKQGLPEAPPFLPAAPSPTPLPVQPLSLTHIGGPHVATSVPLPVTWVLTAQGLLPVPVPAVVSLPRPAGTPGPAGLLATLLPPLTETRAAQGPRAPALSSSWQPPANMNREPEPSCRTDTPAPPTHALSQSPAEADGSVAFVPGEAQVAREIPEPRTSSHADPPEAEPPWSGRLPAFGGVIPATEPRGTPGSPSGTQEPRGPLGLEKLPLRQPGPEKGALDLEKPPLPQPGPEKGALDLGLLSQEGEAATQQWLGGQRGVRVPLLGSRLPYQPPALCSLRALSGLLLHKKALEHKATSLVVGGEAERPAGALQASLGLVRGQLQDNPAYLLLRARFLAAFTLPALLATLAPQGVRTTLSVPSRVGSESEDEDLLSELELADRDGQPGCTTATCPIQGAPDSGKCSASSCLDTSNDPDDLDVLRTRHARHTRKRRRLV

SEQ ID NO: 794985 - protein, 1185 aa, Homo sapiens
MDVDAEREKITQEIKELERILDPGSSGSHVEISESSLESDSEADSLPSEDLDPADPPISEEERWGEASNDEDDPKDKTLPEDPETCLQLNMVYQEVIQEKLAEANLLLAQNREQQEELMRDLAGSKGTKVKDGKSLPPSTYMGHFMKPYFKDKVTGVGPPANEDTREKAAQGIKAFEELLVTKWKNWEKALLRKSVVSDRLQRLLQPKLLKLEYLHQKQSKVSSELERQALEKQGREAEKEIQDINQLPEEALLGNRLDSHDWEKISNINFEGSRSAEEIRKFWQNSEHPSINKQEWSREEEERLQAIAAAHGHLEWQKIAEELGTSRSAFQCLQKFQQHNKALKRKEWTEEEDRMLTQLVQEMRVGSHIPYRRIVYYMEGRDSMQLIYRWTKSLDPGLKKGYWAPEEDAKLLQAVAKYGEQDWFKIREEVPGRSDAQCRDRYLRRLHFSLKKGRWNLKEEEQLIELIEKYGVGHWAKIASELPHRSGSQCLSKWKIMMGKKQGLRRRRRRARHSVRWSSTSSSGSSSGSSGGSSSSSSSSSEEDEPEQAQAGEGDRALLSPQYMVPDMDLWVPARQSTSQPWRGGAGAWLGGPAASLSPPKGSSASQGGSKEASTTAAAPGEETSPVQVPARAHGPVPRSAQASHSADTRPAGAEKQALEGGRRLLTVPVETVLRVLRANTAARSCTQKEQLRQPPLPTSSPGVSSGDSVARSHVQWLRHRATQSGQRRWRHALHRRLLNRRLLLAVTPWVGDVVVPCTQASQRPAVVQTQADGLREQLQQARLASTPVFTLFTQLFQIDTAGCLEVVRERKALPPRLPQAGARDPPVHLLQASSSAQSTPGHLFPNVPAQEASKSASHKGSRRLASSRVERTLPQASLLASTGPRPKPKTVSELLQEKRLQEARAREATRGPVVLPSQLLVSSSVILQPPLPHTPHGRPAPGPTVLNVPLSGPGAPAAAKPGTSGSWQEAGTSAKDKRLSTMQALPLAPVFSEAEGTAPAASQAPALGPGQISVSCPESGLGQSQAPAASRKQGLPEAPPFLPAAPSPTPLPVQPLSLTHIGGPHVATSVPLPVTWVLTAQGLLPVPVPAVVSLPRPAGTPGPAGLLATLLPPLTGPGPAVPGGRGGHTAVAGGPAGGACASSGQQTALSAPSPVQPASSVRSPTPQEGPGAQGHLPGGGGRG

SEQ ID NO: 794986 - protein, 74 aa, Homo sapiens
RRARHLTAGEEDKEKKRPFFSSDEQYPLSYRTIRAMPGGLLVNPILYGKYRKNIEPGTKLLQFITPSHLPVCTT

SEQ ID NO: 794987 - protein, 121 aa, Homo sapiens
MTTNQATLGPALHLDCNLQGAAEEEMLKHLQELGYFHSGPETRSCSHHRGEEVRSSCLGRPPLDGAAAAGPAENPRTGGQTGVSEAAPERTGGKVFVPFFVFLTSIHSVALMTSVSQELGI

SEQ ID NO: 794988 - protein, 104 aa, Homo sapiens
QRGEAERLQGTLGASQGGLSYPRRSQGCHRQALKSQGLEHVVGVSHGRPPHAKTGRQGGMGQPKGLKESLRQAEGRSSGTAGDAGSLPRDDSPITEVPRGVLGR

SEQ ID NO: 794989 - protein, 453 aa, Homo sapiens
MKIFKCYFKHTLQQKVFILFLTLWLLSLLKLLNVRRLFPQKDIYLVEYSLSTSPFVRNRYTHVKDEVRYEVNCSGIYEQEPLEIGKSLEIRRRDIIDLEDDDVVAMTSDCDIYQTLRGYAQKLVSKEEKSFPIAYSLVVHKDAIMVERLIHAIYNQHNIYCIHYDRKAPDTFKVAMNNLAKCFSNIFIASKLEAVEYAHISRLQADLNCLSDLLKSSIQWKYVINLCGQDFPLKSNFELVSELKKLNGANMLETVKPPNSKLERFTYHHELRRVPYEYVKLPIRTNISKEAPPHNIQIFVGSAYFVLSQAFVKYIFNNSIVQDFFAWSKDTYSPDEHFWATLIRVPGIPGEISRSAQDVSDLQSKTRLVKWNYYEGFFYPSCTGSHLRSVCIYGAAELRWLIKDGHWFANKFDSKVDPILIKCLAEKLEEQQRDWITLPSEKLFMDRNLTTTS

SEQ ID NO: 794990 - protein, 81 aa, Homo sapiens
EASKRGSHVQRGISEGLSGVEKRGGLLFFHLTLKRHAGSTESDTSEPVSTVWFGLDFHWYSGVLDKSLDLAFVICEVDRFQ

SEQ ID NO: 794991 - protein, 104 aa, Homo sapiens
GGLFRVEASKENVREITGKHPTISPRLSPHPHPIQMAGPGHLHGSHSLRLRAALGMGITESGPIRSSATLGPNRSTPPHLTPSPALRTFFRTLFAFDPRLAPYA

SEQ ID NO: 794992 - protein, 133 aa, Homo sapiens
YPHPQDSAGVDPTLAAHLTGPWISSRTRCTQKDAHILASAPASAHPESCLAPMSTMQPPGLGKRGVRDGLDTQKRSQDLLGLYPGSACLSVPACKVGSMGTHVWAGHSAHTCEPSTLGGQREDPLSSGDRVSL

SEQ ID NO: 794993 - protein, 124 aa, Homo sapiens
MLALYSVIRVRGGGSNGPPPPLWSPFSPLMVTRPPLSSLSYPLCCACSPRAQEYQATGSGPLPSSQAGWVVGGGDFRCGFGRMAKGDCPPFSYRINILLALPSAWSDEISKARSHLGFHPIPLS

SEQ ID NO: 794994 - protein, 63 aa, Homo sapiens
MACLAESAKSSALRLQRRGSALFRALALSRVGQLRARGHLQRKQPSVRPRRPGRKGGGIMELK

SEQ ID NO: 794995 - protein, 41 aa, Homo sapiens
RVDTAVYYCARASPYYYDSSGYYRRLDYWGQGTLVTVSSGS

SEQ ID NO: 794996 - protein, 40 aa, Homo sapiens
AGSTRPCITVREFRGSSRGDLENACDYWGQGTLVTVSSGS

SEQ ID NO: 794997 - protein, 33 aa, Homo sapiens
PGRHGRVLLCESSEATLSGILLRYYYMDVWGKG

SEQ ID NO: 794998 - protein, 170 aa, Homo sapiens
MAPEVIRQDFQAGEVAFRRTGYLRGRSVLTQTKHSLAGNGRHPVALRTRLGSLALGAVPTWTKLWAQSTTWQTRNHTRTGHAYPRFTRPSFPSCNRNGKRRKLRLGKQKRWCVDTSSPKAGKAALETGGATWPRPRRVRMRPARTLRHSIRELGAPAISLGTASSSRPPF

SEQ ID NO: 794999 - protein, 109 aa, Homo sapiens
MAPEVIRQDFQAGEVAFRRTGYLRGRSVLTQTKHSLAGNGRHPVALRTRLGSLALGAVPTWTKLWAQSTTWQTRNHTRTGHAYPRFTRPSFPSCNRNGKRRKLRLGLPY

SEQ ID NO: 795000 - protein, 789 aa, Homo sapiens
DDPNSSDESNGNPHANSESDNNSSSRGDASYNSDESKDNGNGSDSKGAEDDDSDSTSDTNNSDSNGNGNNGNDDNDKSNSGKGKSDSSDSDSSDSSNSSDSSDSSDSDSSDSNSSSDSDSSDSDSSDSSDSDSSDSSNSSDSSDSSDSSDSSDSSDSSDSKSDSSKSESDSSDSDSKSDSSDSNSSDSSDNSDSSDSSNSSNSSDSSDSSDSSDSSSSSDSSNSSDSSDSSDSSNSSESSDSSDSSDSDSSDSSDSSNSNSSDSDSSNSSDSSDSSNSSDSSDSSDSSNSSDSSDSSDSSNSSDSSDSSDSSDSSDSSNSSDSNDSSNSSDSSDSSNSSDSSNSSDSSDSSDSSDSDSSNSSDSSNSSDSSDSSNSSDSSDSSDSSDGSDSDSSNRSDSSNSSDSSDSSDSSNSSDSSDSSDSNESSNSSDSSDSSNSSDSDSSDSSNSSDSSDSSNSSDSSESSNSSDNSNSSDSSNSSDSSDSSDSSNSSDSSNSSDSSNSSDSSDSNSSDSSDSSNSSDSSDSSDSSDSSDSSDSSNSSDSSDSSDSSDSSNSSDSSNSSDSSDSSDSSDSSDSSDSSDSSDSSNSSDSSDSSDSSDSSDSSDSSDSSDSSESSDSSDSSDSSNSSDSSDSSESSDSSDSSDSSDSSDSSDSSDSSDSSDSSNSSDSSDSSDSSDSSDSSDSSDSSDSSDSSDSSDSSDSSDSSDSSDSSDSSDSNESSDSSDSSDSSDSSNSSDSSDSSDSSDSTSHSNDESDSQSKCGNGNNNGSDSDSDCEGSDSNYSTSDDY

SEQ ID NO: 795001 - protein, 79 aa, Homo sapiens
  misc_feature (7)..(7): Xaa can be any naturally occurring amino acid
  misc_feature (10)..(10): Xaa can be any naturally occurring amino acid
  misc_feature (12)..(13): Xaa can be any naturally occurring amino acid
  misc_feature (19)..(19): Xaa can be any naturally occurring amino acid
IRGRVDXDAXRXXRPCIAXCQKTTEGQMGKKKREVAGGDNLNSTGTPAYQSLHRVLPWSKHDIRVLAASSSGPSSVCLC

SEQ ID NO: 795002 - protein, 79 aa, Homo sapiens
AAPASSARAAALTRAPPTLKPPSSGKKVCDMNEGIIKGTWNQSFWSTANKVQRPNSNHRMNLEVDPLTPVEPSDDCSPG

SEQ ID NO: 795003 - protein, 497 aa, Homo sapiens
MTLGSCCCEIMSSESSPAALSEADADIDVVGGGSGGGELPARSGPRAPRDVLPHGHEPPAEEAEADLAEDEEESGGCSDGEPRALASRGAAAAAGSPGPGAAAARGAAGPGPGPPSGGAATRSPLVKPPYSYIALITMAILQSPKKRLTLSEICEFISGRFPYYREKFPAWQNSIRHNLSLNDCFVKIPREPGNPGKGNYWTLDPESADMFDNGSFLRRRKRFKRQPLPPPHPHPHPHPELLLRGGAAAAGDPGAFLPGFAAYGAYGYGYGLALPAYGAPPPGPAPHPHPHPHPHAFAFAAAAAAAPCQLSVPPGRAAAPPPGPPTASVFAGAGSAPAPAPASGSGPGPGPAGLPAFLGAELGCAKAFYPASLSPPAAGTAAGLPTALLRQGLKTDAGGGAGGGGAGAGQRPSFSIDHIMGHGGGGAAPPGAGEGSPGPPFAAAAGPGGQAQVLAMLTAPALAPVAGHIRLSHPGDALLSSGSRFASKVAGLSGCHF

SEQ ID NO: 795004 - protein, 144 aa, Homo sapiens
PADADGDLEIPGVTASPAAQPLPGVPAVPAELRESIYEVSRPWAGTRDTALQAPRTESRRLLGLSGLYRSGRQARGYAKKSQAKILYSLRNKSRGVGASFFSLPLRLSGNTFRERCLARLHGSRQKHQQRVSLSAFPLSLLPQR

SEQ ID NO: 795005 - protein, 119 aa, Homo sapiens
MSRSKTLIHTSGKPGSRDGEKSKAWSHLDGHPGPSASTSQEEAGTFGRQWREGNRRKRAGAPSSLITGSQGPAVFQGEKSVGLGQISCTVLTFQRLNSLPISRNLIFDVSLNNFKKNKS

SEQ ID NO: 795006 - protein, 216 aa, Homo sapiens
MAVARVDAALPPGEGSVVNWSGQGLQKLGPNLPCEADIHTLILDKNQIIKLENLEKCKRLIQLSVANNRLVRMMGVAKLTLLRVLNLPHNSIGCVEGLKELVHLEWLNLAGNNLKAMEQINSCTALQHLDLSDNNISQIGDLSKLVSLKTLLLHGNIITSLRMAPAYLPRSLAILSLAENEIRDLNEISFLASLTELEQLSIMNNPCVMATPSIPG

SEQ ID NO: 795007 - protein, 69 aa, Homo sapiens
REVERTLGLQPSSCTPWFPRGTHAHVSWRPARGQHHGDDQQLIPPKGPPTGEWIPQQGCMHATEHTTYW

SEQ ID NO: 795008 - protein, 78 aa, Homo sapiens
RRGRRRKKKEEEEEKKVGRSTVPDFKTYCHRCISQDNVVFAEDREIHQWNRIKNPGIHPHKYSQLIFKHSMKDILFNK

SEQ ID NO: 795009 - protein, 219 aa, Homo sapiens
MASAGDTQAGPRDAADQNFDYMFKLLLIGNSSVGKTSFLFRYADDSFTPAFVSTVGIDFKVKTVYRHDKRIKLQIWDTAGQERYRTITTAYYRGAMGFLLMYDIANQESFAAVQDWATQIKTYSWDNAQVILVGNKCDLEDERVVPAEDGRRLADDLGFEFFEASAKENINVKQVFERLVDVICEKMNESLEPSSSSGSNGKGPAVGDAPAPQPSSCSC

SEQ ID NO: 795010 - protein, 184 aa, Homo sapiens [sequence omitted]

SEQ ID NO: 795011 - protein, 184 aa, Homo sapiens [sequence omitted]

SEQ ID NO: 795012 - protein, 184 aa, Homo sapiens [sequence omitted]

SEQ ID NO: 795013 - protein, 72 aa, Homo sapiens
WKVQRSIHRKKNSQPPEANQLKPRNPSHPNAPRGCCLLSGSDEPRGSGKSEDAICMVVNYRGDEARWVWGCS

SEQ ID NO: 795014 - protein, 242 aa, Homo sapiens
MSNPRSLEEEKYDMSGARLALILCVTKAREGSEEDLDALEHMFRQLRFESTMKRDPTAEQFQEELEKFQQAIDSREDPVSCAFVVLMAHGREGFLKGEDGEMVKLENLFEALNNKNCQALRAKPKVYIIQACRGEQRDPGETVGGDEIVMVIKDSPQTIPTYTDALHVYSTVEGYIAYRHDQKGSCFIQTLVDVFTKRKGHILELLTEVTRRMAEAELVQEGKARKTNPEIQSTLRKRLYLQ

SEQ ID NO: 795015 - protein, 133 aa, Homo sapiens
EIRKHHEKRPHCRGIGVPTPGLFGGKVLGWKCRLWGPSCVWFFLSLQQFQEELEKFQQAIDSREDPVSCAFVVLMAHGREGFLKGEDGEMVKLENLFEALNNKNCQALRAKPKVYIIQACRGGGDRSKSTESV

SEQ ID NO: 795016 - protein, 126 aa, Homo sapiens [sequence omitted]

SEQ ID NO: 795017 - protein, 105 aa, Homo sapiens
SHGLALGFLFLDPILLPQVWFLDCNTCHTNDILRYRLLYSNEVTAFLQSLFEENRLLSPCRHCQLRVCDTKEGKAAEGWTIINIPSITLCPSVKSNNEIKCIYIV

SEQ ID NO: 795018 - protein, 119 aa, Homo sapiens
MESQLLPGSICADAQQTYISSPPSGPNPRLLLTHHCQPDVMYTQTSHAHADFPSQLRLHLPQHSSKQLQACGRMARWSKVLDTSFHFPRQLQTSSNLGQHPGAACDPTFVSLPNVRSAS

SEQ ID NO: 795019 - protein, 1044 aa, Homo sapiens
MPAAGSNEPDGVLSYQRPDEEAVVDQGGTSTILNIHYEKEELEGHRTLYVGVRMPLGRQSHRHHRTHGQKHRRRGRGKGASQGEEGLEALAHDTPSQRVQFILGTEEDEEHVPHELFTELDEICMKEGEDAEWKETARWLKFEEDVEDGGERWSKPYVATLSLHSLFELRSCLINGTVLLDMHANSIEEISDLILDQQELSSDLNDSMRVKVREALLKKHHHQNEKKRNNLIPIVRSFAEVGKKQSDPHLMDKHGQTVSPQSVPTTNLEVKNGVNCEHSPVDLSKVDLHFMKKIPTGAEASNVLVGEVDILDRPIVAFVRLSPAVLLSGLTEVPIPTRFLFILLGPVGKGQQYHEIGRSMATIMTDEIFHDVAYKAKERDDLLAGIDEFLDQVTVLPPGEWDPSIRIEPPKNVPSQEKRKMPGVPNGNVCHIEQEPHGGHSGPELQRTGRLFGGLVLDIKRKAPWYWSDYRDALSLQCLASFLFLYCACMSPVITFGGLLGEATEGRISAIESLFGASMTGIAYSLFAGQALTILGSTGPVLVFEKILFKFCKDYALSYLSLRACIGLWTAFLCIVLVATDASSLVCYITRFTEEAFASLICIIFIYEAIEKLIHLAETYPIHMHSQLDHLSLYYCRCTLPENPNNHTLQYWKDHNIVTAEVHWANLTVSECQEMHGEFMGSACGHHGPYTPDVLFWSCILFFTTFILSSTLKTFKTSRYFPTRVRSMVSDFAVFLTIFTMVIIDFLIGVPSPKLQVPSVFKPTRDDRGWIINPIGPNPWWTVIAAIIPALLCTILIFMDQQITAVIINRKEHKLKKGCGYHLDLLMVAIMLGVCSIMGLPWFVAATVLSITHVNSLKLESECSAPGEQPKFLGIREQRVTGLMIFVLMGCSVFMTAILKFIPMPVLYGVFLYMGVSSLQGIQFFDRLKLFGMPAKHQPDFIYLRHVPLRKVHLFTLIQLTCLVLLWVIKASPAAIVFPMMVLALVFVRKVMDLCFSKRELSWLDDLMPESKKKKLDDAKKKAKEEEVIVLAPTVYLGASNYRT

SEQ ID NO: 795020 - protein, 1130 aa, Homo sapiens
VLPREELQATATSRERRQEGPAWPSPFILLSGVVRRKRKRRRLAEEEDNYIESVVKFRSMFNKNNSNKLRSTPRYRRGDPGYLNFTELGPLKPEQKDQWSQHRPDEEAVVDQGGTSTILNIHYEKEELEGHRTLYVGVRMPLGRQSHRHHRTHGQKHRRRGRGKGASQGEEGLEALAHDTPSQRVQFILGTEEDEEHVPHELFTELDEICMKEGEDAEWKETARWLKFEEDVEDGGERWSKPYVATLSLHSLFELRSCLINGTVLLDMHANSIEEISDLILDQQELSSDLNDSMRVKVREALLKKHHHQNEKKRNNLIPIVRSFAEVGKKQSDPHLMDKHGQTVSPQSVPTTNLEVKNGVNCEHSPVDLSKVDLHFMKKIPTGAEASNVLVGEVDILDRPIVAFVRLSPAVLLSGLTEVPIPTRFLFILLGPVGKGQQYHEIGRSMATIMTDEIFHDVAYKAKERDDLLAGIDEFLDQVTVLPPGEWDPSIRIEPPKNVPSQEKRKMPGVPNGNVCHIEQEPHGGHSGPELQRTGRLFGGLVLDIKRKAPWYWSDYRDALSLQCLASFLFLYCACMSPVITFGGLLGEATEGRISAIESLFGASMTGIAYSLFAGQALTILGSTGPVLVFEKILFKFCKDYALSYLSLRACIGLWTAFLCIVLVATDASSLVCYITRFTEEAFASLICIIFIYEAIEKLIHLAETYPIHMHSQLDHLSLYYCRCTLPENPNNHTLQYWKDHNIVTAEVHWANLTVSECQEMHGEFMGSACGHHGPYTPDVLFWSCILFFTTFILSSTLKTFKTSRYFPTRVRSMVSDFAVFLTIFTMVIIDFLIGVPSPKLQVPSVFKPTRDDRGWIINPIGPNPWWTVIAAIIPALLCTILIFMDQQITAVIINRKEHKLKKGCGYHLDLLMVAIMLGVCSIMGLPWFVAATVLSITHVNSLKLESECSAPGEQPKFLGIREQRVTGLMIFVLMGCSVFMTAILKFIPMPVLYGVFLYMGVSSLQGIQFFDRLKLFGMPAKHQPDFIYLRHVPLRKVHLFTLIQLTCLVLLWVIKASPAAIVFPMMVLALVFVRKVMDLCFSKRELSWLDDLMPESKKKKLDDAKKKAKEEEVIVLAPTVYLGASNYRT

SEQ ID NO: 795021 - protein, 920 aa, Homo sapiens
MKEGEDAEWKETARWLKFEEDVEDGGERWSKPYVATLSLHSLFELRSCLINGTVLLDMHANSIEEISDLILDQQELSSDLNDSMRVKVREALLKKHHHQNEKKRNNLIPIVRSFAEVGKKQSDPHLMDKHGQTVSPQSVPTTNLEVKNGVNCEHSPVDLSKVDLHFMKKIPTGAEASNVLVGEVDILDRPIVAFVRLSPAVLLSGLTEVPIPTRFLFILLGPVGKGQQYHEIGRSMATIMTDEIFHDVAYKAKERDDLLAGIDEFLDQVTVLPPGEWDPSIRIEPPKNVPSQEKRKMPGVPNGNVCHIEQEPHGGHSGPELQRTGRLFGGLVLDIKRKAPWYWSDYRDALSLQCLASFLFLYCACMSPVITFGGLLGEATEGRISAIESLFGASMTGIAYSLFAGQALTILGSTGPVLVFEKILFKFCKDYALSYLSLRACIGLWTAFLCIVLVATDASSLVCYITRFTEEAFASLICIIFIYEAIEKLIHLAETYPIHMHSQLDHLSLYYCRCTLPENPNNHTLQYWKDHNIVTAEVHWANLTVSECQEMHGEFMGSACGHHGPYTPDVLFWSCILFFTTFILSSTLKTFKTSRYFPTRVRSMVSDFAVFLTIFTMVIIDFLIGVPSPKLQVPSVFKPTRDDRGWIINPIGPNPWWTVIAAIIPALLCTILIFMDQQITAVIINRKEHKLKKGCGYHLDLLMVAIMLGVCSIMGLPWFVAATVLSITHVNSLKLESECSAPGEQPKFLGIREQRVTGLMIFVLMGCSVFMTAILKFIPMPVLYGVFLYMGVSSLQGIQFFDRLKLFGMPAKHQPDFIYLRHVPLRKVHLFTLIQLTCLVLLWVIKASPAAIVFPMMVLALVFVRKVMDLCFSKRELSWLDDLMPESKKKKLDDAKKKAKEEEVIVLAPTVYLGASNYRT

SEQ ID NO: 795022 - protein, 691 aa, Homo sapiens
MPAAGSNEPDGVLSYQRPDEEAVVDQGGTSTILNIHYEKEELEGHRTLYVGVRMPLGRQSHRHHRTHGQKHRRRGRGKGASQGEEGLEALAHDTPSQRVQFILGTEEDEEHVPHELFTELDEICMKEGEDAEWKETARWLKFEEDVEDGGERWSKPYVATLSLHSLFELRSCLINGTVLLDMHANSIEEISDLILDQQELSSDLNDSMRVKVREALLKKHHHQNEKKRNNLIPIVRSFAEVGKKQSDPHLMDKHGQTVSPQSVPTTNLEVKNGVNCEHSPVDLSKVDLHFMKKIPTGAEASNVLVGEVDILDRPIVAFVRLSPAVLLSGLTEVPIPTRFLFILLGPVGKGQQYHEIGRSMATIMTDEIFHDVAYKAKERDDLLAGIDEFLDQVTVLPPGEWDPSIRIEPPKNVPSQEKRKMPGVPNGNVCHIEQEPHGGHSGPELQRTGRLFGGLVLDIKRKAPWYWSDYRDALSLQCLASFLFLYCACMSPVITFGGLLGEATEGRISAIESLFGASMTGIAYSLFAGQALTILGSTGPVLVFEKILFKFCKDYALSYLSLRACIGLWTAFLCIVLVATDASSLVCYITRFTEEAFASLICIIFIYEAIEKLIHLAETYPIHMHSQLDHLSLYYCRCTLPENPNNHTLQYWKDHNIVTAEVHWANLTVSVSLGAARCPSIVTTGLGGTSK

SEQ ID NO: 795023 - protein, 218 aa, Homo sapiens
MDWNGLQWNEMEWNGMESIIPSGMEGNVMEWKEGNGINPSGMQGNGMEWKGMEWNQLDCNEWNGMEWNGMELIGIEWNGMEWNGTEWNQHECRGMEWNGMQWNGIIRNGMEWNGINSIAMEWNGMEWNRRNGINPNRMECNRMECNGTEWSGMEWNIINPSTGEWNGMECNGMESSVMEWKEWNGMEWNGMEWNGINSMAIEWNAMELTRIEWNGMEW

SEQ ID NO: 795024 - protein, 75 aa, Homo sapiens
CEDCGGGLRFIPRHTGLINNSVIVLDFVSHVNYTFEIEAMNGVSELSFSPKPFTAITVTTDQDGKFHCCSLKTDP

SEQ ID NO: 795025 - protein, 105 aa, Homo sapiens
GALLQGPGPPPGHSSHLDDEGSRRHPQPWNSLFQIRDPGENREDGHLDRKRLLCPEQQQRWSLKPSPGSAPHRRKESPSHQALGTNNTNSSLLAIHFPICFCFFL

SEQ ID NO: 795026 - protein, 67 aa, Homo sapiens
TVCRSHRFPFQPPAPLAFDLSKARGGMGAAGLGPLSLLESDVASMRVRPGPQVPPESVGLGPGPGAL

SEQ ID NO: 795027 - protein, 695 aa, Homo sapiens [sequence omitted]

SEQ ID NO: 795028 - protein, 37 aa, Homo sapiens
MPTSEEHLCRLSDPPAVSACSRCSAMLPRPGHSAAHS

SEQ ID NO: 795029 - protein, 111 aa, Homo sapiens
MWMGLIQLVEGVKRKDQGFLEKEFYHKTNIKMHCEFHACWPAFTVLGEAWRDQVDWSRLLRDAGLVKMSRKPRASSPLSNNHPPTPKGRFPRQPGREKGPIKEVPGTKGSP

SEQ ID NO: 795030 - protein, 73 aa, Homo sapiens
SLGSRQGWNRILPGWGSGWGGGGLIWEAEHSSPNLLVMSAATEERPRMDRLIKGHLQATNKAITRSQPRQSLI

SEQ ID NO: 795031 - protein, 135 aa, Homo sapiens
MWMGLIQLVEGVKRKDQGFLEKEFYHKTNIKMHCEFHACWPAFTVLGEAWRDQVDWSRLLRDAGLVKMSRKPRASSPLSNNHPPTPKGRKWKASSQPWPRSPIKVPKTTRKGKGTHQGSSRNKRLSLKDRRFKKT

SEQ ID NO: 795032 - protein, 73 aa, Homo sapiens; identical to SEQ ID NO: 795030

SEQ ID NO: 795033 - protein, 145 aa, Homo sapiens
GESEDVTQFLQSHKKTLTNEKLFLMDGKRTWFLEMESTPGEDAMNTVKMTTKDLKYDRSLIDKAGFERTDSNFERSHTVGKMLSNSIMCYRDIFYERESQLMQQTSLLSYEIAIATPTFSNYYPDWSAPINIVARPSTSKKIMTC

SEQ ID NO: 795034 - protein, 42 aa, Homo sapiens
RRCGEQAVSTGAEVGSSQQCSGVARCKRLFQETAIVGMDSVW

SEQ ID NO: 795035 - protein, 129 aa, Homo sapiens [sequence omitted]

SEQ ID NO: 795036 - protein, 1857 aa, Homo sapiens
MARKKLKKFTTLEIVLSVLLLVLFIISIVLIVLLAKESLKSTAPDPGTTGTPDPGTTGTPDPGTTGTTHARTTGPPDPGTTGTTPVSAECPVVNELERINCIPDQPPTKATCDQRGCCWNPQGAVSVPWCYYSKNHSYHVEGNLVNTNAGFTARLKNLPSSPVFGSNVDNVLLTAEYQTSNRFHFKLTDQTNNRFEVPHEHVQSFSGNAAASLTYQVEISRQPFSIKVTRRSNNRVLFDSSIGPLLFADQFLQLSTRLPSTNVYGLGEHVHQQYRHDMNWKTWPIFNRDTTPNGNGTNLYGAQTFFLCLEDASGLSFGVFLMNSNAMEVVLQPAPAITYRTIGGILDFYVFLGNTPEQVVQEYLELIGRPALPSYWALGFHLSRYEYGTLDNMREVVERNRAAQLPYDVQHADIDYMDERRDFTYDSVDFKGFPEFVNELHNNGQKLVIIVDPAISNNSSSSKPYGPYDRGSDMKIWVNSSDGVTPLIGEVWPGQTVFPDYTNPNCAVWWTKEFELFHNQVEFDGIWIDMNEVSNFVDGSVSGCSTNNLNNPPFTPRILDGYLFCKTLCMDAVQHWGKQYDIHNLYGYSMAVATAEAAKTVFPNKRSFILTRSTFAGSGKFAAHWLGDNTATWDDLRWSIPGVLEFNLFGIPMVGPDICGFALDTPEELCRRWMQLGAFYPFSRNHNGQGYKDQDPASFGADSLLLNSSRHYLNIRYTLLPYLYTLFFRAHSRGDTVARPLLHEFYEDNSTWDVHQQFLWGPGLLITPVLDEGAEKVMAYVPDAVWYDYETGSQVRWRKQKVEMELPGDKIGLHLRGGYIFPTQQPNTTTLASRKNPLGLIIALDENKEAKGELFWDDGETKDTVANKVYLLCEFSVTQNRLEVNISQSTYKDPNNLAFNEIKILGTEEPSNVTVKHNGVPSQTSPTVTYDSNLKVAIITDIDLLLGEAYTVEWSIKIRDEEKIDCYPDENGASAENCTARGCIWEASNSSGVPFCYFVNDLYSVSDVQYNSHGATADISLKSSVYANAFPSTPVNPLRLDVTYHKNEMPQFKIYDPNKNRYEVPVPLNIPSMPSSTPEGQLYDVLIKKNPFGIEIRRKSIGTIIWDSQLLGFTFSDMFIRISTRLPSKYLYGFGETEHRSYRRDLEWHTWGMFSRDQPPGYKKNSYGVHPYYMGLEEDGSAHGVLLLNSNAMDVTFQPLPALTYRTTGGVLDFYVFLGPTPELVTQQYTELIGRPVMVPYWSLGFQLCRYGYQNDSEIASLYDEMVAAQIPYDVQYSDIDYMERQLDFTLSPKFAGFPALINRMKADGMRVILILDPAISGNETQPYPAFTRGVEDDVFIKYPNDGDIVWGKVWPDFPDVVVNGSLDWDSQVELYRAYVAFPDFFRNSTAKWWKREIEELYNNPQNPERSLKFDGMWIDMNEPSSFVNGAVSPGCRDASLNHPPYMPHLESRDRGLSSKTLCMESQQILPDGSLVQHYNVHNLYGWSQTRPTYEAVQEVTGQRGVVITRSTFPSSGRWAGHWLGDNTAAWDQLKKSIIGMTEFSLFGISYTGADICGFFQDAEYEMCVRWMQLGAFYPFSRNHNTIGTRRQDPVSWDVAFVNISRTVLQTRYTLLPYLYTLMQKAHTEGVTVVRPLLHEFVSDQVTWDIDSQFLLGPAFLVSPVLERNARNVTAYFPRARWYDYYTGVDINARGEWKTLPAPLDHINLHVRGGYILPWQEPALNTHLSRQKFMGFKIALDDEGTAGGWLFWDDGQSIDTYGKGLYYLASFSASQNTMQSHIIFNNYITGTNPLKLGYIEIWGVGSVPVTSASISVSGMVITPSFNNDPTTQVLSIDVTDRNISLHNFTSLTWISTL

SEQ ID NO: 795037 - protein, 801 aa, Homo sapiens
MARKKLKKFTTLEIVLSVLLLVLFIISIVLIVLLAKESLKSTAPDPGTTGTPDPGTTGTPDPGTTGTTHARTTGPPDPGTTGTTPVSAECPVVNELERINCIPDQPPTKATCDQRGCCWNPQGAVSVPWCYYSKNHSYHVEGNLVNTNAGFTARLKNLPSSPVFGSNVDNVLLTAEYQTSNRFHFKLTDQTNNRFEVPHEHVQSFSGNAAASLTYQVEISRQPFSIKVTRRSNNRVLFDSSIGPLLFADQFLQLSTRLPSTNVYGLGEHVHQQYRHDMNWKTWPIFNRDTTPNGNGTNLYGAQTFFLCLEDASGLSFGVFLMNSNAMEVVLQPAPAITYRTIGGILDFYVFLGNTPEQVVQEYLELIGRPALPSYWALGFHLSRYEYGTLDNMREVVERNRAAQLPYDVQHADIDYMDERRDFTYDSVDFKGFPEFVNELHNNGQKLVIIVDPAISNNSSSSKPYGPYDRGSDMKIWVNSSDGVTPLIGEVWPGQTVFPDYTNPNCAVWWTKEFELFHNQVEFDGIWIDMNEVSNFVDGSVSGCSTNNLNNPPFTPRILDGYLFCKTLCMDAVQHWGKQYDIHNLYGYSMAVATAEAAKTVFPNKRSFILTRSTFAGSGKFAAHWLGDNTATWDDLRWSIPGVLEFNLFGIPMVGPDICGFALDTPEELCRRWMQLGAFYPFSRNHNGQGYKDQDPASFGADSLLLNSSRHYLNIRYTLLPYLYTLFFRAHSRGDTVARPLLHEFYEDNSTWDVHQQFLWGPGLLITPVLDEGAEKVMAYVPDAVWYDYETVSSFDFSSTP

SEQ ID NO: 795038 - protein, 1742 aa, Homo sapiens
MARKKLKKFTTLEIVLSVLLLVLFIISIVLIVLLAKESLKSTAPDPGTTGTPDPGTTGTPDPGTTGTTHARTTGPPDPGTTGTTPVSAECPVVNELERINCIPDQPPTKATCDQRGCCWNPQGAVSVPWCYYSKNHSYHVEGNLVNTNAGFTARLKNLPSSPVFGSNVDNVLLTAEYQTSNRFHFKLTDQTNNRFEVPHEHVQSFSGNAAASLTYQVEISRQPFSIKVTRRSNNRVLFDSSIGPLLFADQFLQLSTRLPSTNVYGLGEHVHQQYRHDMNWKTWPIFNRDTTPNGNGTNLYGAQTFFLCLEDASGLSFGVFLMNSNAMEVVLQPAPAITYRTIGGILDFYVFLGNTPEQVVQEYLELIGRPALPSYWALGFHLSRYEYGTLDNMREVVERNRAAQLPYDVQHADIDYMDERRDFTYDSVDFKGFPEFVNELHNNGQKLVIIVDPAISNNSSSSKPYGPYDRGSDMKIWVNSSDGVTPLIGEVWPGQTVFPDYTNPNCAVWWTKEFELFHNQVEFDGIWIDMNEVSNFVDGSVSGCSTNNLNNPPFTPRILDGYLFCKTLCMDAVQHWGKQYDIHNLYGYSMAVATAEAAKTVFPNKRSFILTRSTFAGSGKFAAHWLGDNTATWDDLRWSIPGVLEFNLFGIPMVGPDICGFALDTPEELCRRWMQLGAFYPFSRNHNGQGYKDQDPASFGADSLLLNSSRHYLNIRYTLLPYLYTLFFRAHSRGDTVARPLLHEFYEDNSTWDVHQQFLWGPGLLITPVLDEGAEKVMAYVPDAVWYDYETGSQVRWRKQKVEMELPGDKIGLHLRGGYIFPTQQPNTTTLASRKNPLGLIIALDENKEAKGELFWDDGETKDTVANKVYLLCEFSVTQNRLEVNISQSTYKDPNNLAFNEIKILGTEEPSNVTVKHNGVPSQTSPTVTYDSNLKVAIITDIDLLLGEAYTVEWSIKIRDEEKIDCYPDENGASAENCTARGCIWEASNSSGVPFCYFVNDLYSVSDVQYNSHGATADISLKSSVYANAFPSTPVNPLRLDVTYHKNEMPQFKIYDPNKNRYEVPVPLNIPSMPSSTPEGQLYDVLIKKNPFGIEIRRKSIGTIIWDSQLLGFTFSDMFIRISTRLPSKYLYGFGETEHRSYRRDLEWHTWGMFSRDQPPGYKKNSYGVHPYYMGLEEDGSAHGVLLLNSNAMDVTFQPLPALTYRTTGGVLDFYVFLGPTPELVTQQYTELIGRPVMVPYWSLGFQLCRYGYQNDSEIASLYDEMVAAQIPYDVQYSDIDYMERQLDFTLSPKFAGFPALINRMKADGMRVILILDPAISGNETQPYPAFTRGVEDDVFIKYPNDGDIVWGKVWPDFPDVVVNGSLDWDSQVELYRAYVAFPDFFRNSTAKWWKREIEELYNNPQNPERSLKFDGMWIDMNEPSSFVNGAVSPGCRDASLNHPPYMPHLESRDRGLSSKTLCMESQQILPDGSLVQHYNVHNLYGWSQTRPTYEAVQEVTGQRGVVITRSTFPSSGRWAGHWLGDNTAAWDQLKKSIIGMTEFSLFGISYTGADICGFFQDAEYEMCVRWMQLGAFYPFSRNHNTIGTRRQDPVSWDVAFVNISRTVLQTRYTLLPYLYTLMQKAHTEGVTVVRPLLHEFVSDQVTWDIDSQFLLGPAFLVSPVLERNARNVTAYFPRARWYDYYTGVDINARGEWKTLPAPLDHINLHVRGGYILPWQEPALNTHLSRKNPLGLIIALDE

SEQ ID NO: 795039 - protein, 446 aa, Homo sapiens
LPSGPCGPQPSPFLSSTGAPPGGRAEGSPGRCQGAILEGGREEEVRAAMHTVATSGPNASWGAPANASGCPGCGANASDGPVPSPRAVDAWLVPLFFAALMLLGLVGNSLVIYVICRHKPMRTVTNFYIANLAATDVTFLLCCVPFTALLYPLPGWVLGDFMCKFVNYIQQVSVQATCATLTAMSVDRWYVTVFPLRALHRRTPRLALAVSLSIWVGSAAVSAPVLALHRLSPGPRAYCSEAFPSRALERAFALYNLLALYLLPLLATCACYAAMLRHLGRVAVRPAPADSALQGQVLAERAGAVRAKVSRLVAAVVLLFAACWGPIQLFLVLQALGPAGSWHPRSYAAYALKTWAHCMSYSNSALNPLLYAFLGSHFRQAFRRVCPCAPRRPRRPRRPGPSDPAAPHAELHRLGSHPAPARAQKPGSSGLAARGLCVLGEDNAPL

SEQ ID NO: 795040 - protein, 292 aa, Homo sapiens
PGNALECVSPVQDDLLIPRRAAFPVWVPERTALLTCPLGAAPGSSREAPGIAGPPNSTAMSKLGKFFKGGGSSKSRAAPSPQEALVRLRETEEMLGKKQEYLENRIQREIALAKKHGTQNKRAALQALKRKKRFEKQLTQIDGTLSTIEFQREALENSHTNTEVLRNMGFAAKAMKSVHENMDLNKIDDLMQEITEQQDIAQEISEAFSQRVGFGDDFDEDELMAELEELEQEELNKKMTNIRLPNVPSSSLPAQPNRKPGMSSTARRSRAASSQRAEEEDDDIKQLAAWAT

SEQ ID NO: 795041 - protein, 150 aa, Homo sapiens
DAWVTISDSHSVLSKMKGSIFTLFLFSVLFAISEVRSKESVRLCGLEYIRTVIYICASSRWRRHLEGIPQAQQAETGNSFQLPHKREFSEENPAQNLPKVDASGEDRLWGGQMPTEELWKSKKHSVMSRQDLQTLCCTDGCSMTDLSALC

SEQ ID NO: 795042 - protein, 89 aa, Homo sapiens
RHLASHPVLGPVLQNSSSALCPHLLLAESPRFHLPQPSQTCAFFSNPRSVITLSLSQIKNSLLTCSLLPALPVLLMLHTAPKITFKIQI

SEQ ID NO: 795043 - protein, 74 aa, Homo sapiens
EIPEEQSISRGRGEQVKGLGSASMMKVHLRGFADGRDVGCARRSHHSVGLPLTDMGKVMARVMVVRIQGCVVWL

SEQ ID NO: 795044 - protein, 107 aa, Homo sapiens
GVGTGEKPCAQDLWPKVPLPLLGSHLELEILHCELSWHRKVLEGKLREMLSEFSSLLSTEFSPSVVRGVFPARLSHRSWSPPCYSPGFASLLICLSFSRFLFMEPPL

SEQ ID NO: 795045 - protein, 151 aa, Homo sapiens
STRLQLAIEASAESLASLQRQITSVAQVAAQNRRALDLLTAEKGGTCLFLQEECCYYLNVSGVVETNLQTLKKKDPRGVKTFLGPSPPWSFLVVFTCGSTDAPFPYPNYNSLYNNVFCPNPSTVSPPADTRNHQGHFQPDVTSPLRPTANL

SEQ ID NO: 795046 - protein, 185 aa, Homo sapiens
SSLHVASCYVCGGMNMGDQWPWEARELMPQDNFTLTASSLEPAPSSQSIWFLKTSIIGKFCIARWGKAFTDPVGELTCLGQQYYNETLGKTLWRGKSNNSESPRRALMHKNKVLSMLKEPPLHEKCEDGKTETTFEMSMHNTMKSKSPLPLTLQHLVAFWEDISLATIKAASQNMIFPSPGSCAV

SEQ ID NO: 795047 - protein, 83 aa, Homo sapiens
SSSDMRVDFIFRYGVFTESDSTQYWQKPTRSIIKQKLPGSSPLKEWLCPFDVEPAMLPISLTVKSRGLTTSCATWPSFIPLAS

SEQ ID NO: 795048 - protein, 408 aa, Homo sapiens
MSACPTTLTLSPPHTMHLFNTLLCLVFSFTSHIDRNQGFTFLLESCFFPGLELRDEDGSSRRTEAHLGDEILPGEGKHSLYFAHFKSEASNHLLPLTLQAHFHTPSPLRSPTPPHHHSATRNAACRTQEPSLWVGFLVSADRLLVSRSSSIRKPGIFILPRSSMLPSPPVFRDFALPQAPAHLSHRWALVAPQEERGAAGARSRSAGTDSTLGVWAACHEEQRSHRSRFRRRPDTEDPERRAAPPRNALTGAKFSHPGSEGGGEGSGTRGGGAGLCAGGCGAGAQDPNFSEVGPRRGGWRRRGQGLPQVRSEAPPHGRGQESQELGSRQQSPVRDRELPGPQSALPTALRGCRLRSNCKRHGPCLLFTAFSLETPANVLERRGIPALSILVSTLAPWCKPTAEAACPG

SEQ ID NO: 795049 - protein, 106 aa, Homo sapiens
MFTAQIFLQPYCLTTGMNYFTICCKRMGHVLCQQQKIQKLVRITCPPGASPTWIPLSAQFFHPYCLLPSGIMNSSWKRTLLFNISALSCAVRLTRKLPCFSPSFGL

SEQ ID NO: 795050 - protein, 106 aa, Homo sapiens; identical to SEQ ID NO: 795049

SEQ ID NO: 795051 - protein, 106 aa, Homo sapiens; identical to SEQ ID NO: 795049

SEQ ID NO: 795052 - protein, 115 aa, Homo sapiens
EQPGLSHLANIYGAPTVCRHCPSARTGKEQVHLCPQGTYHLANGSSSQTTNYAINFSVDCSIIIGLYQITDKYLNPAVGKVPCNVQMGIPKKMKQSVPPFRVHSLADNTGTHSCH

SEQ ID NO: 795053 - protein, 104 aa, Homo sapiens
MHSMLLWADQNSALAFASYLHRALRSARDERLRPSQGLGLYIDLHLHGFLMPGICQSFSKAIYVPGSLWLGLLGSSNSVLLSFPTVLARLLDSISYYYSEAIDF

SEQ ID NO: 795054 - protein, 112 aa, Homo sapiens
GLPGAARREPRGAGGRRTPSLAACAPGRPPARDGTGSMSSGYSSLEEDAEDFFFTARTSFFRRAPQGKPRSGQQHAVGSTSWEKMGRELVPVSPAVAVFFGRPSRNGARRLD

SEQ ID NO: 795055 - protein, 227 aa, Homo sapiens
GLPGAARREPRGAGGRRTPSLAACAPGRPPARDGTGSMSSGYSSLEEDAEDFFFTARTSFFRRAPQGKPRSGQQDVEKEKETHSYLSKEEIKEKVHKYNLAVTDKLKMTLNSNGIYTGFIKVQMELCKPPQTSPNSGKLSPSSNGCMNTLHISSTNTVGEVIEALLKKFLVTESPAKFALYKRCHREDQVYACKLSDREHPLYLRLVAGPRTDTLSFVLREHEIGEV

SEQ ID NO: 795056 - protein, 147 aa, Homo sapiens
DPEKMWRELRGCPGGDVETAQRLSQRRRGKSSEAVPEKTWRSSEDVPEKTWREFRGCPGEDVERAQKLRDCPGEDMETAQRLSARRRAESSEAVPEKTWRELKGCPQEDVERVQRLSLLLHLAVFLWIIIAINFSNSGVKSQSSTYL

SEQ ID NO: 795057 - protein, 103 aa, Homo sapiens
ECHPSLTDPQTENQRHPGRSFFPGTLPKLPETPPKLSRKSVREILIQQICVSCLLGTLAEVGNTMVNEPQSLPSVAHPGEGQLHPPRQTPNWKYTPNLYPRYT

SEQ ID NO: 795058 - protein, 553 aa, Homo sapiens
MSTETELQVAVKTSAKKDSRKKGQDRSEATLIKRFKGEGVRYKAKLIGIDEVSAARGDKLCQDSMMKLKGVVAGARSKGEHKQKIFLTISFGGIKIFDEKTGALQHHHAVHEISYIAKDITDHRAFGYVCGKEGNHRFVAIKTAQAAEPVILDLRDLFQLIYELKQREELEKKAQKDKQCEQAVYQTILEEDVEDPVYQYIVFEAGHEPIRDPETEENIYQVPTSQKKEGVYDVPKSQPAVTQLELFGDMSTPPDITSPPTPATPGDAFIPSSSQTLPASADVFSSVPFGTAAVPSGYVAMGAVLPSFWGQQPLVQQQMVMGAQPPVAQVMPGAQPIAWGQPGLFPATQQPWPTVAGQFPPAAFMPTQTVMPLPAAMFQGPLTPLATVPGTSDSTRSSPQTDKPRQKMGKETFKDFQMAQPPPVPSRKPDQPSLTCTSEAFSSYFNKVGVAQDTDDCDDFDISQLNLTPVTSTTPSTNSPPTPAPRQSSPSKSSASHASDPTTDDIFEEGFESPSKSEEQEAPDGSQASSNSDPFGEPSGEPSGDNISPQAGS

SEQ ID NO: 795059 - protein, 553 aa, Homo sapiens; identical to SEQ ID NO: 795058

SEQ ID NO: 795060 - protein, 189 aa, Homo sapiens
MSTETELQVAVKTSAKKDSRKKGQDRSEATLIKRFKGEGVRYKAKLIGIDEVSAARGDKLCQDSMMKLKGVVAGARSKGEHKQKIFLTISFGGIKIFDEKTGALQHHHAVHEISYIAKDITDHRAFGYVCGKEGNHRFVAIKTAQAAEPVILDLRDLFQLIYELKQREELEKKAQKDKQCEQAVYQVYL

SEQ ID NO: 795061 - protein, 86 aa, Homo sapiens
KAHLTPRGTARGEGAAWHIWNPGAAGEHLSGNQCVAFCQVPSHALGPQSVSLSPIRIFHPFCFQAIFVIHCCLFVVSPDDICRGPL

SEQ ID NO: 795062 - protein, 142 aa, Homo sapiens
KRNRQPLTSNPLKDDSGISTPSDNYDFPPLPTDWAWEAVNPELAPVMKTVDTGQIPHSVSRPLRSQDSVFNSIQSNTGRSQGGWSYRDGNKNTSLKTWNKNDFKPQCVSVRPASVSEQKTFQAFVKIADVEMQYYINVMNET

SEQ ID NO: 795063 - protein, 174 aa, Homo sapiens
KRNRQPLTSNPLKDDSGISTPSDNYDFPPLPTDWAWEAVNPELAPVMKTVDTGQIPHSVSRPLRSQDSVFNSIQSNTGRSQGGWSYRDGNKNTSLKTWNKNDFKPCVFYEIDRELPRLIRGRVHRCVGNYDQKKNIFQCVSVRPASVSEQKTFQAFVKIADVEMQYYINVMNET

SEQ ID NO: 795064 - protein, 344 aa, Homo sapiens
MANYTLAPEDEYDVLIEGELESDEAEQCDKYDAQALSAQLVPSLCSAVFVIGVLDNLLVVLILVKYKGLKRVENIYLLNLAVSNLCFLLTLPFWAHAGGDPMCKILIGLYFVGLYSETFFNCLLTVQRYLVFLHKGNFFSARRRVPCGIITSVLAWVTAILATLPEYVVYKPQMEDQKYKCAFSRTPFLPADETFWKHFLTLKMNISVLVLPLFIFTFLYVQMRKTLRFREQRYSLFKLVFAIMVVFLLMWAPYNIAFFLSTFKEHFSLSDCKSSYNLDKSVHITKLIATTHCCINPLLYAFLDGTFSKYLCRCFHLRSNTPLQPRGQSAQGTSREEPDHSTEV

SEQ ID NO: 795065 - protein, 344 aa, Homo sapiens; identical to SEQ ID NO: 795064

SEQ ID NO: 795066 - protein, 356 aa, Homo sapiens [sequence omitted]

SEQ ID NO: 795067 - protein, 424 aa, Homo sapiens
MGSLVLTLCALFCLAAYLVSGSPIMNLEQSPLEEDMSLFGDVFSEQDGVDFNTLLQSMKDEFLKTLNLSDIPTQDSAKVDPPEYMLELYNKFATDRTSMPSANIIRSFKNEDLFSQPVSFNGLRKYPLLFNVSIPHHEEVIMAELRLYTLVQRDRMIYDGVDRKITIFEVLESKGDNEGERNMLVLVSGEIYGTNSEWETFDVTDAIRRWQKSGSSTHQLEVHIESKHDEAEDASSGRLEIDTSAQNKHNPLLIVFSDDQSSDKERKEELNEMISHEQLPELDNLGLDSFSSGPGEEALLQMRSNIIYDSTARIRRNAKGNYCKRTPLYIDFKEIGWDSWIIAPPGYEAYECRGVCNYPLAEHLTPTKHAIIQALVHLKNSQKASKACCVPTKLEPISILYLDKGVVTYKFKYEGMAVSECGCR

SEQ ID NO: 795068 - protein, 661 aa, Homo sapiens
MDLQQSTTITSLEKWCLDESLSGCRRHYSVKKKLKLIRVLGLFMGLVAISTVSFSISAFSETDTQSTGEASVVSGPRVAQGYHQRTLLDLNDKILDYTPQPPLSKEGESENSTDHAQGDYPKDIFSLEERRKGAIILHVIGMIYMFIALAIVCDEFFVPSLTVITEKLGISDDVAGATFMAAGGSAPELFTSLIGVFIAHSNVGIGTIVGSAVFNILFVIGMCALFSREILNLTWWPLFRDVSFYIVDLIMLIIFFLDNVIMWWESLLLLTAYFCYVVFMKFNVQVEKWVKQMINRNKVVKVTAPEAQAKPSAARDKDEPTLPAKPRLQRGGSSASLHNSLMRNSIFQLMIHTLDPLAEELGSYGKLKYYDTMTEEGRFREKASILHKIAKKKCHVDENERQNGAANHVEKIELPNSTSTDVEMTPSSDASEPVQNGNLSHNIEGAEAQTADEEEDQPLSLAWPSETRKQVTFLIVFPIVFPLWITLPDVRKPSSRKFFPITFFGSITWIAVFSYLMVWWAHQVGETIGISEEIMGLTILAAGTSIPDLITSVIVARKGLGDMAVSSSVGSNIFDITVGLPLPWLLYTVIHRFQPVAVSSNGLFCAIVLLFIMLLFVILSIALCKWRMNKILGFIMFGLYFVFLVVSVLLEDRILTCPVSI

SEQ ID NO: 795069 - protein, 644 aa, Homo sapiens
MDLQQSTTITSLEKWCLDESLSGCRRHYSVKKKLKLIRVLGLFMGLVAISTVSFSISAFSETDTQSTGEASVVSGPRVAQGYHQRTLLDLNDKILDYTPQPPLSKEGESENSTDHAQGDYPKDIFSLEERRKGAIILHVIGMIYMFIALAIVCDEFFVPSLTVITEKLGISDDVAGATFMAAGGSAPELFTSLIGVFIAHSNVGIGTIVGSAVFNILFVIGMCALFSREILNLTWWPLFRDVSFYIVDLIMLIIFFLDNVIMWWESLLLLTAYFCYVVFMKFNVQVEKWVKQMINRNKVVKVTAPEAQAKPSAARDKDEPTLPAKPRLQRGGSSASLHNSLMRNSIFQLMIHTLDPLAEGRFREKASILHKIAKKKCHVDENERQNGAANHVEKIELPNSTSTDVEMTPSSDASEPVQNGNLSHNIEGAEAQTADEEEDQPLSLAWPSETRKQVTFLIVFPIVFPLWITLPDVRKPSSRKFFPITFFGSITWIAVFSYLMVWWAHQVGETIGISEEIMGLTILAAGTSIPDLITSVIVARKGLGDMAVSSSVGSNIFDITVGLPLPWLLYTVIHRFQPVAVSSNGLFCAIVLLFIMLLFVILSIALCKWRMNKILGFIMFGLYFVFLVVSVLLEDRILTCPVSI

SEQ ID NO: 795070 - protein, 311 aa, Homo sapiens
LCVFYCDVVELGSYGKLKYYDTMTEEGRFREKASILHKIAKKKCHVDENERQNGAANHVEKIELPNSTSTDVEMTPSSDASEPVQNGNLSHNIEGAEAQTADEEEDQPLSLAWPSETRKQVTFLIVFPIVFPLWITLPDVRKPSSRKFFPITFFGSITWIAVFSYLMVWWAHQVGETIGISEEIMGLTILAAGTSIPDLITSVIVARKGLGDMAVSSSVGSNIFDITVGLPLPWLLYTVIHRFQPVAVSSNGLFCAIVLLFIMLLFVILSIALCKWRMNKILGFIMFGLYFVFLVVSVLLEDRILTCPVSI

SEQ ID NO: 795071 - protein, 1955 aa, Homo sapiens
MFRQFYLWTCLASGIILGSLFEICLGQYDDDCKLARGGPPATIVAIDEESRNGTILVDNMLIKGTAGGPDPTIELSLKDNVDYWVLMDPVKQMLFLNSTGRVLDRDPPMNIHSIVVQVQCINKKVGTIIYHEVRIVVRDRNDNSPTFKHESYYATVNELTPVGTTIFTGFSGDNGATDIDDGPNGQIEYVIQYNPDDPTSNDTFEIPLMLTGNIVLRKRLNYEDKTRYFVIIQANDRAQNLNERRTTTTTLTVDVLDGDDLGPMFLPCVLVPNTRDCRPLTYQAAIPELRTPEELNPIIVTPPIQAIDQDRNIQPPSDRPGILYSILVGTPEDYPRFFHMHPRTAELSLLEPVNRDFHQKFDLVIKAEQDNGHPLPAFAGLHIEILDENNQSPYFTMPSYQGYILESAPVGATISDSLNLTSPLRIVALDKDIEDTKDPELHLFLNDYTSVFTVTQTGITRYLTLLQPVDREEQQTYTFSITAFDGVQESEPVIVNIQVMDANDNTPTFPEISYDVYVYTDMRPGDSVIQLTAVDADEGSNGEITYEILVGAQGDFIINKTTGLITIAPGVEMIVGRTYALTVQAADNAPPAERRNSICTVYIEVLPPNNQSPPRFPQLMYSLEISEAMRVGAVLLNLQATDREGDSITYAIENGDPQRVFNLSETTGILTLGKALDRESTDRYILIITASDGRPDGTSTATVNIVVTDVNDNAPVFDPYLPRNLSVVEEEANAFVGQVKATDPDAGINGQVHYSLGNFNNLFRITSNGSIYTAVKLNREVRDYYELVVVATDGAVHPRHSTLTLAIKVLDIDDNSPVFTNSTYTVLVEENLPAGTTILQIEAKDVDLGANVSYRIRSPEVKHFFALHPFTGELSLLRSLDYEAFPDQEASITFLVEAFDIYGTMPPGIATVTVIVKDMNDYPPVFSKRIYKGMVAPDAVKGTPITTVYAEDADPPGLPASRVRYRVDDVQFPYPASIFEVEEDSGRVITRVNLNEEPTTIFKLVVVAFDDGEPVMSSSATVKILVLHPGEIPRFTQEEYRPPPVSELATKGTMVGVISAAAINQSIVYSIVSGNEEDTFGINNITGVIYVNGPLDYETRTSYVLRVQADSLEVVLANLRVPSKSNTAKVYIEIQDENNHPPVFQKKFYIGGVSEDARMFTSVLRVKATDKDTGNYSVMAYRLIIPPIKEGKEGFVVETYTGLIKTAMLFHNMRRSYFKFQVIATDDYGKGLSGKADVLVSVVNQLDMQVIVSNVPPTLVEKKIEDLTEILDRYVQEQIPGAKVVVESIGARRHGDAFSLEDYTKCDLTVYAIDPQTNRAIDRNELFKFLDGKLLDINKDFQPYYGEGGRILEIRTPEAVTSIKKRGESLGYTEGALLALAFIIILCCIPAILVVLVSYRQFKVRQAECTKTARIQAALPAAKPAVPAPAPVAAPPPPPPPPPGAHLYEELGDSSILFLLYHFQQSRGNNSVSEDRKHQQVVMPFSSNTIEAHKSAHVDGSLKSNKLKSARKFTFLSDEDDLSAHNPLYKENISQVSTNSDISQRTDFVDPFSPKIQAKSKSLRGPREKIQRLWSQSVSLPRRLMRKVPNRPEIIDLQQWQGTRQKAENENTGICTNKRGSSNPLLTTEEANLTEKEEIRQGETLMIEGTEQLKSLSSDSSFCFPRPHFSFSTLPTVSRTVELKSEPNVISSPAECSLELSPSRPCVLHSSLSRRETPICMLPIETERNIFENFAHPPNISPSACPLPPPPPISPPSPPPAPAPLAPPPDISPFSLFCPPPSPPSIPLPLPPPTFFPLSVSTSGPPTPPLLPPFPTPLPPPPPSIPCPPPPSASFLSTECVCITGVKCTTNLMPAEKIKSSMTQLSTTTVCKTDPQREPKGILRHVKNLAELEKSVANMYSQIEKNYLRTNVSELQTMCPSEVTNMEITSEQNKGSLNNIVEGTEKQSHSQSTSL

SEQ ID NO: 795072 - protein, 1955 aa, Homo sapiens; identical to SEQ ID NO: 795071

SEQ ID NO: 795073 - protein, 323 aa, Homo sapiens
MGLFDRGVQMLLTTVGAFAAFSLMTIAVGTDYWLYSRGVCKTKSVSENETSKKNEEVMTHSGLWRTCCLEGNFKGLCKQIDHFPEDADYEADTAEYFLRAVRASSIFPILSVILLFMGGLCIAASEFYKTRHNIILSAGIFFVSAGLSNIIGIIVYISANAGDPSKSDSKKNSYSYGWSFYFGALSFIIAEMVGVLAVHMFIDRHKQLRATARATDYLQASAITRIPSYRYRYQRRSRSSSRSTEPSHSRDASPVGIKGFNTLPSTEISMYTLSRDPLKAATTPTATYNSDRDNSFLQVHNCIQKENKDSLHSNTANRRTTPV

SEQ ID NO: 795074 - protein, 133 aa, Homo sapiens
MKARDRGRPTQLSPPLRLPCGRLPEKLTSFSLIPHPATLRPAGLSNIIGIIVYISANAGDPSKSDSKKNSYSYGWSFYFGALSFIIAEMVGVLAVHMFIDRHKQLRATARATDYLQASAITRIPSYRYRYQRR

SEQ ID NO: 795075 - protein, 151 aa, Homo sapiens
ALNIVIGFPALSLSFCSIELKALLSLICLRLQTRSKRSGAQSSRHVRTIQCDVLPGMINSGDLINLRVQISDEVSFQPGIPVQAHVRLRKIDDTIKESSFHHHDAPSSKRAHPSRLSLEGFECLSDQSTGPLNEHLFIVPVIFSEDSSGSR

SEQ ID NO: 795076 - protein, 296 aa, Homo sapiens
MSACGRKALTLLSSVFAVCGLGLLGIAVSTDYWLYLEEGVIVPQNQSTEIKMSLHSGLWRVCFLAGEERGRCFTIEYVMPMNTQLTSESTVNVLKMIRSATPFPLVSLFFMFIGFILNNIGHIRPHRTILAFVSGIFFILSGLSLVVGLVLYISSINDEMLNRTKDAETYFNYKYGWSFAFAAISFLLTEVKPVTLSMDRLGLGTAPLSRGEWGWGRRDIPQPFWTPDHPLYFPSSSQNVSLSYLSGSPPARMSPGPCSCPHVHFPPHSSCVLCRPQPREMRQAPAASPSSAVFSL

SEQ ID NO: 795077 - protein, 121 aa, Homo sapiens
DSASFLCFLVKTGFHHVGQAGLELLTSGDPPSLASQSAGITGLSRCARPPFLCVCVCVGLGEGTFIQISLKEMLVTASTSGERTRGLGIGGGHTCTFLYVPFVKIAFLKTMHMCHLLQIKN

SEQ ID NO: 795078 - protein, 122 aa, Homo sapiens
TGTPGLLLSNQPGAHGVGLGILGKAGPGGFGGEGLSDPLMTFVSLSRYSPYLPPPTCPPPHVSMGTYLAPHPPSSGPLLSTPRFPSCLSSLVTEQNSISKRERERGRERERKKGKERKKGER

SEQ ID NO: 795079 - protein, 337 aa, Homo sapiens
MDETGNLTVSSATCHDTIDDFRNQVYSTLYSMISVVGFFGNGFVLYVLIKTYHKKSAFQVYMINLAVADLLCVCTLPLRVVYYVHKGIWLFGDFLCRLSTYALYVNLYCSIFFMTAMSFFRCIAIVFPVQNINLVTQKKARFVCVGIWIFVILTSSPFLMAKPQKDEKNNTKCFEPPQDNQTKNHVLVLHYVSLFVGFIIPFVIIIVCYTMIILTLLKKSMKKNLSSHKKAIGMIMVVTAAFLVSFMPYHIQRTIHLHFLHNETKPCDSVLRMQKSVVITLSLAASNCCFDPLLYFFSGGNFRKRLSTFRKHSLSSVTYVPRKKASLPEKGEEICKV

SEQ ID NO: 795080 - protein, 74 aa, Homo sapiens
MLSVPSATAPWQPLPRLHTSDSTLSGASLHAAAKGGFLQQTADVSSRMDSTLLSLPEGPDRCPLRPQAWMPGPF

SEQ ID NO: 795081 - protein, 58 aa, Homo sapiens
MLSPNTDIKGPDFSEYRRLEVLDSTKSSRESSEARKGFSYLVTGVTTVGVAYAATNAV

SEQ ID NO: 795082 - protein, 119 aa, Homo sapiens [sequence omitted]

SEQ ID NO: 795083 - protein, 240 aa, Homo sapiens
VSSASMSLSREGSVSLAIAGVVLTSRTAAEADMDAAAGPPVSTRQSKSSLSGQHGRERTQASAEGCKEGRERREKDRALGRSSHRRRTGESRHKTRGDKIAQKSSSRSSFSHRANRDDKKEKGCGNPGSSRHRDSHKGVSHTPISKESRTSHKSGRSLWTTSSGSSKGLGRVSSFLRNVRANLTTKVVGTPHGRDVDVMAKMAERSTNVAIAETAEGGQGLEMVGSMTPDIMETVTFEAH

SEQ ID NO: 795084 - protein, 68 aa, Homo sapiens
GGRVLPSLGALAFLCLWSQESTPRADVRLLPMGPRAGMAQLLMALFFCVQDIKLPPIRSFNLFGAWIS

SEQ ID NO: 795085 - protein, 106 aa, Homo sapiens [sequence omitted]

SEQ ID NO: 795086 - protein, 115 aa, Homo sapiens
HPFLSSAEGNPPDASPLTHRSRSRLPPAPGPPENTASPHWSPPGNPTAHPRPALTLWGLHPLEEGRVKAWRCAACLTSAQGARQATGLSPDQRGPKGLIVKSAGPRTQGEDMLVL

SEQ ID NO: 795087 - protein, 40 aa, Homo sapiens
QQVVKKYELKLPYGGVKEMFLSREILESVIKTVKTFNSSK

SEQ ID NO: 795088 - protein, 42 aa, Homo sapiens
MGLGCHLQKLISSRTVCDGQMWNKTTGCIRRHCQGCKGLLHA

SEQ ID NO: 795089 - protein, 137 aa, Homo sapiens
MHGRAQKYTLGTAGPRVSDKVPGRDRAGVREPEPTLPLLQGGSGVHSLLEGVGSLWEWGQRLDSAHRRRPDSYCTAGSKPKGPPLARHSFLSVQNTPLEGEDRNHTLPWKEAEPRALSIPAAGELYTKSPTLQYLAL

SEQ ID NO: 795090 - protein, 80 aa, Homo sapiens
CWFSGSQLTPGLYAQALLHLLLLYGLVVSTALIWHPINKLAALLLLPYLAWLTVTSALTYHLWRDSLCPVHQPQPTEKSD

SEQ ID NO: 795091 - protein, 118 aa, Homo sapiens
PPCLHSYASYLVWKDLGGGLGWPLALPLGLYAVQLTISWTVLVLFFTVHNPGLALLHLLLLYGLVVSTALIWHPINKLAALLLLPYLAWLTVTSALTYHLWRDSLCPVHQPQPTEKSD

SEQ ID NO: 795092 - protein, 74 aa, Homo sapiens
EAPARAPRGGIYYESLAPSASFSSGLNSIRAAAARWLDQCRRGVEVSGVGKDSELQALEFAGIVNLQGEAVLIQ

SEQ ID NO: 795093 - protein, 120 aa, Homo sapiens
DPPLSTVAEEVGDVGEAAPPSVDVVGGFVSGTATTDGQACASAGARHKASNHVNRRRCSLPHVTNLLDTQHLPRKPIRQCWTTGSKLCKYPSTDTVLVPGIKVAASHHPPDRPPDPFSTL

SEQ ID NO: 795094 - protein, 105 aa, Homo sapiens
NINSLSSLCGQWTLSILPNSTFLKVCYRPSEFLLTSLAWLQGHKTNKFRWQDMFLSRYKKCNAVFVSCFCNLLPASRSSCLKMFTSRKSPLFGAQTFWTYVRLSW

SEQ ID NO: 795095 - protein, 44 aa, Homo sapiens [sequence omitted]

SEQ ID NO: 795096 - protein, 248 aa, Homo sapiens
MCNPWVAWLGVLPLFILLTQAALKPAMPPVIKSQPFNIFWAAPTMYCMPSFNVDINLQVFNIISNPLETQSGSKIAIFYPNELGYYPYLSQDGKSFNGGIPQNVSLSEHLRKTADDIGEGVPWWRSEELVVIDWESWKPQWDRNQGSRIIYKNHSLAFTRNHHPYWSEMKVETVAREEFENAGKNFMNITLTLALEMRPKCLWGFYLYPDCYNYDYRINPETYTGNCPNCGCGKKAQHFILQYIWIKY

SEQ ID NO: 795097 - protein, 66 aa, Homo sapiens
AGRHTSGWTSRGTHWQKKTQRLDLERALRGACRQKRTRGGRAHDKCQQAVERSRVWLGHLEKSLGR

SEQ ID NO: 795098 - protein, 74 aa, Homo sapiens
  misc_feature (5)..(5): Xaa can be any naturally occurring amino acid
  misc_feature (8)..(8): Xaa can be any naturally occurring amino acid
PGLFXRGXGYRRPGARVDKLELMFQKAESDLDYIQYRLEYEIKTNHPDSASELSPLTKEEKTAAEQFKFHMPDL

SEQ ID NO: 795099 - protein, 121 aa, Homo sapiens
MEAEVDKLELMFQKAESDLDYIQYRLEYEIKTNHPDSASEKNPVTLLKELSVIKSRYQTLYARFKPVAVEQKESKSRICATVKKTMNMIQKLQKQTDLELSPLTKEEKTAAEQFKFHMPDL

SEQ ID NO: 795100 - protein, 105 aa, Homo sapiens
MEAEVDKLELMAECKVKEIYWVVYFSPMASEVGHNLESPETPGGGGWTRVEFPPPAPKGAATVWCLNRLGSRKLSLIWITFNTGWNMKSRLIILIQQVRKIQLHS

SEQ ID NO: 795101 - protein, 121 aa, Homo sapiens; identical to SEQ ID NO: 795099

SEQ ID NO: 795102 - protein, 109 aa, Homo sapiens
MEAEVDKLELMFQKAESDLDYIQYRLEYEIKTNHPDSASEKNPVTLLKELSVIKSRYQTLYARFKPVAVEQKESKSRICATVKKTMNMIQKLQKQTDLEVMLSVDSCHH

SEQ ID NO: 795103 - protein, 105 aa, Homo sapiens; identical to SEQ ID NO: 795100

SEQ ID NO: 795104 - protein, 121 aa, Homo sapiens; identical to SEQ ID NO: 795099

SEQ ID NO: 795105 - protein, 74 aa, Homo sapiens; identical to SEQ ID NO: 795098
  misc_feature (5)..(5): Xaa can be any naturally occurring amino acid
  misc_feature (8)..(8): Xaa can be any naturally occurring amino acid

SEQ ID NO: 795106 - protein, 130 aa, Homo sapiens
SATLPFISFNELSSHQVKKRAGERRAQPYWDDAVPLLTPSWYGSDLCWQDFPLQCAQRVGVPSESVWFSSVLQRDAPRLMLTERADWAFLLKLSLKAGVTQSGVETDSYPCFSELSLKHIWLLYVTHFQI

SEQ ID NO: 795107 - protein, 538 aa, Homo sapiens
MALPYHIFLFTVLLPSFTLTAPPPCRCMTSSSPYQEFLWRMQRPGNIDAPSYRSLSKGTPTFTAHTHMPRNCYHSATLCMHANTHYWTGKMINPSCPGGLGVTVCWTYFTQTGMSDGGGVQDQAREKHVKEVISQLTRVHGTSSPYKGLDLSKLHETLRTHTRLVSLFNTTLTGLHEVSAQNPTNCWICLPLNFRPYVSIPVPEQWNNFSTEINTTSVLVGPLVSNLEITHTSNLTCVKFSNTTYTTNSQCIRWVTPPTQIVCLPSGIFFVCGTSAYRCLNGSSESMCFLSFLVPPMTIYTEQDLYSYVISKPRNKRVPILPFVIGAGVLGALGTGIGGITTSTQFYYKLSQELNGDMERVADSLVTLQDQLNSLAAVVLQNRRALDLLTAERGGTCLFLGEECCYYVNQSGIVTEKVKEIRDRIQRRAEELRNTGPWGLLSQWMPWILPFLGPLAAIILLLLFGPCIFNLLVNFVSSRIEAVKLQMEPKMQSKTKIYRRPLDRPASPRSDVNDIKGTPPEEISAAQPLLRPNSAGSS

SEQ ID NO: 795108 - protein, 76 aa, Homo sapiens [sequence omitted]

SEQ ID NO: 795109 - protein, 73 aa, Homo sapiens
TIDKDRIIDAGPKGNYSRFMNHSCQPNCETLKWTVSKGHIFEKSVKYSCQKEIQGQEKYYRVAIGNTEKCGKL

SEQ ID NO: 795110 - protein, 79 aa, Homo sapiens
GNKAVAAAAKWLKVQPKSGLFLSLGCGRLASTALGLQAACSLSSALTLTGAAFAGSSERLCNDPDPIQQRFKRKLVQGH

SEQ ID NO: 795111 - protein, 317 aa, Homo sapiens
MKRLSLVTTNRLSPQGNFLPLCTFPLAVDMAALFQEASSCPVCSDYLEKPMSLECGCTVCLKCINSLQKEPHGEDLLCCCCSMVSQRNKIRPNRQLERLVSHIKELEPKLKKILQMNPRMRKFQVDMTLDADTANNFLLISDDLRSVRSGLITQNRQDLAERFDVSVCILGSPRFTCGRHYWEVDVGTSTEWDLGVCRESVHCKGKIQLTTELGFWTVSLRDGSRLSASTVPLTFLLVDRKLQRVGIFLDMGMQNVSFFDAESGSHVYTFRSVSAEEPLRPFLAPSIPPNGDQGVLSICPLMNSGTTDAPVRPGEAK

SEQ ID NO: 795112 - protein, 67 aa, Homo sapiens
KEFLQLPSIEITPSSDEDTPWSNCSTPSASPRRKRFLLRKWLRVRERKECSEKQLKLADFHCTKLKI

SEQ ID NO: 795113 - protein, 134 aa, Homo sapiens
SETHPASGHTEGASFLVALAGMGCIGPGLILGKQLGIGSPLWKATPTSCTLSPGFLGWRHRLGQAGTCLGSAEPRSPAWEISSWVAHSWSTAAGEPALNSPHCRPGAMAHACNPSTLGGRDGRITRSGDRDHPG

SEQ ID NO: 795114 - protein, 102 aa, Homo sapiens
GPELSGSGGRPSTEALQQGLGEQKGRPCNSGWEYRTLCLGPELLPVPAPSAHPSLIIWLLGTVDFPECSGLLGTPLTVGEDSVNKGAPWVGAVVTSCGKSPG

SEQ ID NO: 795115 - protein, 539 aa, Homo sapiens
MGFEELLEQVGGFGPFQLRNVALLALPRVLLPLHFLLPIFLAAVPAHRCALPGAPANFSHQDVWLEAHLPREPDGTLSSCLRFAYPQALPNTTLGEERQSRGELEDEPATVPCSQGWEYDHSEFSSTIATEWDLVCEQKGLNRAASTFFFAGVLVGAVAFGYLSDRFGRRRLLLVAYVSTLVLGLASAASVSYVMFAITRTLTGSALAGFTIIVMPLELEWLDVEHRTVAGVLSSTFWTGGVMLLALVGYLIRDWRWLLLAVTLPCAPGILSLWWVPESARWLLTQGHVKEAHRYLLHCARLNGRPVCEDSFSQEAVSKVAAGERVVRRPSYLDLFRTPRLRHISLCCVVVWFGVNFSYYGLSLDVSGLGLNVYQTQLLFGAVELPSKLLVYLSVRYAGRRLTQAGTLLGTALAFGTRLLVSSDMKSWSTVLAVMGKAFSEAAFTTAYLFTSELYPTVLRQTGMGLTALVGRLGGSLAPLAALLDGVWLSLPKLTYGGIALLAAGTALLLPETRQAQLPETIQDVERKRCVHRTVSVYV

SEQ ID NO: 795116 - protein, 645 aa, Homo sapiens
MGFEELLEQVGGFGPFQLRNVALLALPRVLLPLHFLLPIFLAAVPAHRCALPGAPANFSHQDVWLEAHLPREPDGTLSSCLRFAYPQALPNTTLGEERQSRGELEDEPATVPCSQGWEYDHSEFSSTIATEWDLVCEQKGLNRAASTFFFAGVLVGAVAFGYLSDRFGRRRLLLVAYVSTLVLGLASAASVSYVMFAITRTLTGSALAGFTIIVMPLELEWLDVEHRTVAGVLSSTFWTGGVMLLALVGYLIRDWRWLLLAVTLPCAPGILSLWWVPESARWLLTQGHVKEAHRYLLHCARLNGRPVCEDSFSQEVRVNVCVSMHIVCGGEWAVSSASLPEPTIYGRKSPWAPTESSELFRMSYLAPVGHIHHSRQLVSAAMSISIPPLQMGGIERGGGRVLCPIEITEPTLMLQPHLLPYQAVSKVAAGERVVRRPSYLDLFRTPRLRHISLCCVVVWFGVNFSYYGLSLDVSGLGLNVYQTQLLFGAVELPSKLLVYLSVRYAGRRLTQAGTLLGTALAFGTRLLVSSDMKSWSTVLAVMGKAFSEAAFTTAYLFTSELYPTVLRQTGMGLTALVGRLGGSLAPLAALLDGVWLSLPKLTYGGIALLAAGTALLLPETRQAQLPETIQDVERKRDGAKERTSI

SEQ ID NO: 795117 - protein, 744 aa, Homo sapiens
MGFEELLEQVGGFGPFQLRNVALLALPRVLLPLHFLLPIFLAAVPAHRCALPGAPANFSHQDVWLEAHLPREPDGTLSSCLRFAYPQALPNTTLGEERQSRGELEDEPATVPCSQGWEYDHSEFSSTIATESQVGIYIIHLEVECRWRQSPWEAAGRGLPWEEAEAAGLGRDKVSYSPSWRESLGGLLSGMEVPEWQSSPQKAPGSGEEELVPAGEGLMFIGGPFLPVLQWDLVCEQKGLNRAASTFFFAGVLVGAVAFGYLSDRFGRRRLLLVAYVSTLVLGLASAASVSYVMFAITRTLTGSALAGFTIIVMPLELEWLDVEHRTVAGVLSSTFWTGGVMLLALVGYLIRDWRWLLLAVTLPCAPGILSLWWVPESARWLLTQGHVKEAHRYLLHCARLNGRPVCEDSFSQEVRVNVCVSMHIVCGGEWAVSSASLPEPTIYGRKSPWAPTESSELFRMSYLAPVGHIHHSRQLVSAAMSISIPPLQMGGIERGGGRVLCPIEITYPTLMLQPHLLPYQAVSKVAAGERVVRRPSYLDLFRTPRLRHISLCCVVVWFGVNFSYYGLSLDVSGLGLNVYQTQLLFGAVELPSKLLVYLSVRYAGRRLTQAGTLLGTALAFGTRLLVSSDMKSWSTVLAVMGKAFSEAAFTTAYLFTSELYPTVLRQTGMGLTALVGRLGGSLAPLAALLDGVWLSLPKLTYGGIALLAAGTALLLPETRQAQLPETIQDVERKRDGAKERTSI

SEQ ID NO: 795118 - protein, 233 aa, Homo sapiens
MLQPHLLPYQAVSKVAAGERVVRRPSYLDLFRTPRLRHISLCCVVVWFGVNFSYYGLSLDVSGLGLNVYQTQLLFGAVELPSKLLVYLSVRYAGRRLTQAGTLLGTALAFGTRLLVSSDMKSWSTVLAVMGKAFSEAAFTTAYLFTSELYPTVLRQTGMGLTALVGRLGGSLAPLAALLDGVWLSLPKLTYGGIALLAAGTALLLPETRQAQLPETIQDVERKRDGAKERTSI

SEQ ID NO: 795119 - protein, 516 aa, Homo sapiens
MEWDLVCEQKGLNRAASTFFFAGVLVGAVAFGYLSDRFGRRRLLLVAYVSTLVLGLASAASVSYVMFAITRTLTGSALAGFTIIVMPLELEWLDVEHRTVAGVLSSTFWTGGVMLLALVGYLIRDWRWLLLAVTLPCAPGILSLWWVPESARWLLTQGHVKEAHRYLLHCARLNGRPVCEDSFSQEVRVNVCVSMHIVCGGEWAVSSASLPEPTIYGRKSPWAPTESSELFRMSYLAPVGHIHHSRQLVSAAMSISIPPLQMGGIERGGGRVLCPIEITEPTLMLQPHLLPYQAVSKVAAGERVVRRPSYLDLFRTPRLRHISLCCVVVWFGVNFSYYGLSLDVSGLGLNVYQTQLLFGAVELPSKLLVYLSVRYAGRRLTQAGTLLGTALAFGTRLLVSSDMKSWSTVLAVMGKAFSEAAFTTAYLFTSELYPTVLRQTGMGLTALVGRLGGSLAPLAALLDGVWLSLPKLTYGGIALLAAGTALLLPETRQAQLPETIQDVERKRDGAKERTSI

SEQ ID NO: 795120 - protein, 563 aa, Homo sapiens
MGFEELLEQVGGFGPFQLRNVALLALPRVLLPLHFLLPIFLAAVPAHRCALPGAPANFSHQDVWLEAHLPREPDGTLSSCLRFAYPQALPNTTLGEERQSRGELEDEPATVPCSQGWEYDHSEFSSTIATEWDLVCEQKGLNRAASTFFFAGVLVGAVAFGYLSDRFGRRRLLLVAYVSTLVLGLASAASVSYVMFAITRTLTGSALAGFTIIVMPLELEWLDVEHRTVAGVLSSTFWTGGVMLLALVGYLIRDWRWLLLAVTLPCAPGILSLWWVPESARWLLTQGHVKEAHRYLLHCARLNGRPVCEDSFSQEVRVNVCVSMHIVCGGEWAVSSASLPEPTIYGRKSPWAPTESSELFRMSYLAPVGHIHHSRQLVSAAMSISIPPLQMGGIERGGGRVLCPIEITEPTLMLQPHLLPYQAVSKVAAGERVVRRPSYLDLFRTPRLRHISLCCVVVWFGVNFSYYGLSLDVSGLGLNVYQTQLLFGAVELPSKLLVYLSVRYAGRRLTQAGTLLGTALAFGTRLLVSSGEPSPIGSAHPRSRARNPAHSPETPPPGQEPTP

SEQ ID NO: 795121 - protein, 118 aa, Homo sapiens
PPSGTETPFRFGVNFSYYGLSLDVSGLGLNVYQTQLLFGAVELPSKLLVYLSVRYAGRRLTQAGTLLGTALAFGTRLLVSSDMKSWSTVLAVMGKAFSEAAFTTAYLFTSELYPTVLR

SEQ ID NO: 795122 - protein, 460 aa, Homo sapiens
MGFEELLEQVGGFGPFQLRNVALLALPRVLLPLHFLLPIFLAAVPAHRCALPGAPANFSHQDVWLEAHLPREPDGTLSSCLRFAYPQALPNTTLGEERQSRGELEDEPATVPCSQGWEYDHSEFSSTIATEWDLVCEQKGLNRAASTFFFAGVLVGAVAFGYLSDRFGRRRLLLVAYVSTLVLGLASAASVSYVMFAITRTLTGSALAGFTIIVMPLELEWLDVEHRTVAGVLSSTFWTGGVMLLALVGYLIRDWRWLLLAVTLPCAPGILSLWWVPESARWLLTQGHVKEAHRYLLHCARLNGRPVCEDSFSQEAVSKVAAGERVVRRPSYLDLFRTPRLRHISLCCVVVWFGVNFSYYGLSLDVSGLGLNVYQTQLLFGAVELPSKLLVYLSVRYAGRRLTQAGTLLGTALAFGTRLLVSSDMKSWSTVLAVMGKAFSEAAFTTAYLFTSELYPTVLR

SEQ ID NO: 795123 - protein, 152 aa, Homo sapiens
SQNQQASQHSSKCPVSTLGFSQQTNNESEEKQSTKGSMMRTIIKEWLRPGSFLSHCVGIPSLWPLRSPGQEPHLSTVAEHSEAWGLPHRCAPIPRLECAGCMSPPTHGDFRAPLRRRDSGWEEIPQGFCDVDSALFLHLAGSDTGLCFPISC

SEQ ID NO: 795124 - protein, 38 aa, Homo sapiens
MHHQAQLIFVFLVETGFHHVGQAGLELLTSGDPPTLAS

SEQ ID NO: 795125 - protein, 102 aa, Homo sapiens
PPLNQPPGGKALSTRALQPGGALEAGTRGGREGHRRLRQPPTPSAPPGSPLHEGFLLIALFPSSQNRHRSAGRGLAGRLQQVRPGAAGPRGFLRSCIYFTSM

SEQ ID NO: 795126 - protein, 102 aa, Homo sapiens; identical to SEQ ID NO: 795125

SEQ ID NO: 795127 - protein, 113 aa, Homo sapiens
PAAQSPPPAERPGRDAAGARVCGTQRGGCARAAEAPQPTGGRGCSRGSATASGVGGKAIKKAQRIPAELYLLYIHVNCCHHYCVQAQRMNWKRREGENNKKRKLVFTTHSKPE

SEQ ID NO: 795128 - protein, 102 aa, Homo sapiens; identical to SEQ ID NO: 795125

SEQ ID NO: 795129 - protein, 94 aa, Homo sapiens
WVWLSCPGQGPLRAAEPSLQLEHRRPAPSLCRFFLRDLGWSRHCPGLYSGEACLLSSHQPFVTPCPQAGIKFMPTDLSLSLGLSPPAQGRPDAG

SEQ ID NO: 795130 - protein, 64 aa, Homo sapiens
KQQVALGGQFPMTAPQHRLGDPHVVISITRGMTPVGLGQLSPHLSSLLMDLFVSRDLINSFLFR

SEQ ID NO: 795131 - protein, 93 aa, Homo sapiens
PEPVWRALYHWYGANLALPRPVIKNSKTDIPELELFPRYLLFLRQQPAYILFYEQQGIDYAQFLPKTDGKKMADTSSMDEDFESDYKKYCVLQ

SEQ ID NO: 795132 - protein, 95 aa, Homo sapiens
EVSAFGEEGEGDYLDDWTVLCNGPYWVRDGEVRFKHSSTEVLLSVTGEQYGRPISGQKEVHGMAQPSQNNYWKAMEGIFMKPSELLKAEAHHAEL

SEQ ID NO: 795133 - protein, 89 aa, Homo sapiens
ECSPLDSASLGAECSPLDAVRLGAECSRLDAVSLGAECSLLDSLRLGAGSFGVCCAGRPFLSPAPGAAFASSKPPQALCGVSEMQVQRL

SEQ ID NO: 795134 - protein, 90 aa, Homo sapiens
LWAKRSLCGRVWKSHGWVLDLQDDSGEKGRPSLRSWSQDLLFSFGLSSPFEKVTFSNPCQLCLVLERPQQECLTLGEVWGKISKHINIEN

SEQ ID NO: 795135 - protein, 353 aa, Homo sapiens
MNECHYDKHMDFFYNRSNTDTVDDWTGTKLVIVLCVGTFFCLFIFFSNSLVIAAVIKNRKFHFPFYYLLANLAAADFFAGIAYVFLMFNTGPVSKTLTVNRWFLRQGLLDSSLTASLTNLLVIAVERHMSIMRMRVHSNLTKKRVTLLILLVWAIAIFMGAVPTLGWNCLCNISACSSLAPIYSRSYLVFWTVSNLMAFLIMVVVYLRIYVYVKRKTNVLSPHTSGSISRRRTPMKLMKTVMTVLGAFVVCWTPGLVVLLLDGLNCRQCGVQHVKRWFLLLALLNSVVNPIIYSYKDEDMYGTMKKMICCFSQENPERRPSRIPSTVLSRSDTGSQYIEDSISQGAVCNKSTS

SEQ ID NO: 795136 - protein, 305 aa, Homo sapiens
MNECHYDKHMDFFYNRSNTDTVDDWTGTKLVIVLCVGTFFCLFIFFSNSLVIAAVIKNRKFHFPFYYLLANLAAADFFAGIAYVFLMFNTGPVSKTLTVNRWFLRQGLLDSSLTASLTNLLVIAVERHMSIMRMRVHSNLTKKKVSNLMAFLIMVVVYLRIYVYVKRKTNVLSPHTSGSISRRRTPMKLMKTVMTVLGAFVVCWTPGLVVLLLDGLNCRQCGVQHVKRWFLLLALLNSVVNPIIYSYKDEDMYGTMKKMICCFSQENPERRPSRIPSTVLSRSDTGSQYIEDSISQGAVCNKSTS

SEQ ID NO: 795137 - protein, 2156 aa, Homo sapiens
MSDTPSTGFSIIHPTSSEGQVPPPRHLSLTHPVVAKRISFYKSGDPQFGGVRVVVNPRSFKSFDALLDNLSRKVPLPFGVRNISTPRGRHSITRLEELEDGESYLCSHGRKVQPVDLDKARRRPRPWLSSRAISAHSPPHPVAVAAPGMPRPPRSLVVFRNGDPKTRRAVLLSRRVTQSFEAFLQHLTEVMQRPVVKLYATDGRRVPSLQAVILSSGAVVAAGREPFKPGNYDIQKYLLPARLPGISQRVYPKGNAKSESRKISTHMSSSSRSQIYSVSSEKTHNNDCYLDYSFVPEKYLALEKNDSQNLPIYPSEDDIEKSIIFNQDGTMTVEMKVRFRIKEEETIKWTTTVSKTGPSNNDEKSEMSFPGRTESRSSGLKLAACSFSADVSPMERSSNQEGSLAEEINIQMTDQVAETCSSASWENATVDTDIIQGTQDQAKHRFYRPPTPGLRRVRQKKSVIGSVTLVSETEVQEKMIGQFSYSEERESGENKSEYHMFTHSCSKMSSVSNKPVLVQINNNDQMEESSLERKKENSLLKSSAISAGVIEITSQKMLEMSHNNGLPSTISNNSIVEEDVVDCVVLDNKTGIKNFKTYGNTNDRFSPISADATHFSSNNSGTDKNISEAPASEASSTVTARIDRLINEFAQCGLTKLPKNEKKILSSVASKKKKKSRQQAINSRYQDGQLATKGILNKNERINTKGRITKEMIVQDSDSPLKGGILCEEDLQKSDTVIESNTFCSKSNLNSTISKNFHRNKLNTTQNSKVQGLLTKRKSRSLNKISLGAPKKREIGQRDKVFPHNESKYCKSTFENKSLFHVFNILEQKPKDFYAPQSQAEVASGYLRGMAKKSLVSKVTDSHITLKSQKKRKGDKVKASAILSKQHATTRANSLASLKKPDFPEAIAHHSIQNYIQSWLQNINPYPTLKPIKSAPVCRNETSVVNCSNNSFSGNDPHTNSGKISNFVMESNKHITKIAGLTGDNLCKEGDKSFIANDTGEEDLHETQVGSLNDAYLVPLHEHCTLSQSAINDHNTKSHIAAEKSGPEKKLVYQEINLARKRQSVEAAIQVDPIEEETPKDLLPVLMLHQLQASVPGIHKTQNGVVQMPGSLAGVPFHSAICNSSTNLLLAWLLVLNLKGSMNSFCQVDAHKATNKSSETLALLEILKHIAITEEADDLKAAVANLVESTTSHFGLSEKEQDMVPIDLSANCSTVNIQSVPKCSENERTQGISSLDGGCSASEACAPEVCVLEVTCSPCEMCTVNKAYSPKETCNPSDTFFPSDGYGVDQTSMNKACFLGEVCSLTDTVFSDKACAQKENHTYEGACPIDETYVPVNVCNTIDFLNSKENTYTDNLDSTEELERGDDIQKDLNILTDPEYKNGFNTLVSHQNVSNLSSCGLCLSEKEAELDKKHSSLDDFENCSLRKFQDENAYTSFDMEEPRTSEEPGSITNSMTSSERNISELESFEELENHDTDIFNTVVNGGEQATEELIQEEVEASKTLELIDISSKNIMEEKRMNGIIYEIISKRLATPPSLDFCYDSKQNSEKETNEGETKMVKMMVKTMETGSYSESSPDLKKCIKSPVTSDWSDYRPDSDSEQPYKTSSDDPNDSGELTQEKEYNIGFVKRAIEKLYGKADIIKPSFFPGSTRKSQVCPYNSVEFQCSRKASLYDSEGQSFGSSEQVSSSSSMLQEFQEERQDKCDVSAVRDNYCRGDIVEPGTKQNDDSRILTDIEEGVLIDKGKWLLKENHLLRMSSENPGMCGNADTTSVDTLLDNNSSEVPYSHFGNLAPGPTMDELSSSELEELTQPLELKCNYFNMPHGSDSEPFHEDLLDVRNETCAKERIANHHTEEKGSHQSERVCTSVTHSFISAGNKVYPVSDDAIKNQPLPGSNMIHGTLQEADSLDKLYALCGQHCPILTVIIQPMNEEDRGFAYRKESDIENFLGFYLWMKIHPYLLQTDKNVFREENNKASMRQNLIDNAIGDIFDQFYFSNTFDLMGKRRKQKRINFLGLEEEGNLKKFQPDLKERFCMNFLHTSLLVVGNVDSNTQDLSGQTNEIFKAVDENNNLLNNRFQGSRTNLNQVVRENINCHYFFEMLGQACLLDICQVETSLNISNRNILELCMFEGENLFIWEEEDILNLTDLESSREQEDL

SEQ ID NO: 795138 - protein, 2156 aa, Homo sapiens; identical to SEQ ID NO: 795137

SEQ ID NO: 795139 - protein, 553 aa, Homo sapiens
MKLGSSRAGPGRGSAGLLPGVHELPMGIPAPWGTSPLSFHRKCSLWAPGRPFLTLVLLVSIKQVTGSLLEETTRKWAQYKQACLRDLLKEPSGIFCNGTFDQYVCWPHSSPGNVSVPCPSYLPWWSEESSGRAYRHCLAQGTWQTIENATDIWQDDSECSENHSFKQNVDRYALLSTLQLMYTVGYSFSLISLFLALTLLLFLRKLHCTRNYIHMNLFASFILRTLAVLVKDVVFYNSYSKRPDNENGWMSYLSEMSTSCRSVQVLLHYFVGANYLWLLVEGLYLHTLLEPTVLPERRLWPRYLLLGWAFPVLFVVPWGFARAHLENTGCWTTNGNKKIWWIIRGPMMLCVTVNFFIFLKILKLLISKLKAHQMCFRDYKYRLAKSTLVLIPLLGVHEILFSFITDDQVEGFAKLIRLFIQLTLSSFHGFLVALQYGFANGEVKAELRKYWVRFLLARHSGCRACVLGKDFRFLGKCPKKLSEGDGAEKLRKLQPSLNSGRLLHLAMRGLGELGAQPQQDHARWPRGSSLSECSEGDVTMANTMEEILEESEI

SEQ ID NO: 795140 - protein, 422 aa, Homo sapiens
  misc_feature (5)..(5): Xaa can be any naturally occurring amino acid
SWYPXELMDIRQTRPLRATDIWQDDSECSENHSFKQNVDRYALLSTLQLMYTVGYSFSLISLFLALTLLLFLRKLHCTRNYIHMNLFASFILRTLAVLVKDVVFYNSYSKRPDNENGWMSYLSEMSTSCRSVQVLLHYFVGANYLWLLVEGLYLHTLLEPTVLPERRLWPRYLLLGWAFPVLFVVPWGFARAHLENTGCWTTNGNKKIWWIIRGPMMLCVTVNFFIFLKILKLLISKLKAHQMCFRDYKYRLAKSTLVLIPLLGVHEILFSFITDDQVEGFAKLIRLFIQLTLSSFHGFLVALQYGFANGEVKAELRKYWVRFLLARHSGCRACVLGKDFRFLGKCPKKLSEGDGAEKLRKLQPSLNSGRLLHLAMRGLGELGAQPQQDHARWPRGSSLSECSEGDVTMANTMEEILEESEI

SEQ ID NO: 795141 - protein, 47 aa, Homo sapiens
PGPRAGSTSTLLTKLPLPSYGCRKPLDASLSLPLHTWYAVSTTLIPQ

SEQ ID NO: 795142 - protein, 425 aa, Homo sapiens
AAVVTALEDVFQALGFESCERREVPVQGFLEELAWFQEQLDAHGRPVGCALVALMPPEEQLRQPQQLVRELSGCRALRGCPKVFLLLSSGPGSSLEPGAFLAGLRELCGRSPHWSLVQLLTKLFRRVAEESAGGTCCPVLRSSLRGALCLGGVEPWRPEPAPGPSTQYDLSKARAALLLAVIQGRPGAQHDVEALGGLCWALGFETTVRTDPTAQAFQEELAQFREQLDTCRGPVSCALVALMAHGGPRGQLLGADGQEVQPEALMQELSRCQVLQGRPKIFLLQACRGGNRDAGVGPTALPWYWSWLRAPPSVPSHADVLQIYAEAQGSSCRGTPPGSSDQADILTVYSAAEGYVAYRDDKGSDFIQTLVEVLRANPGRDLLELLTEVNRRVCEQEVLGPDCDELRKACLEIRSSLRRRLCLQA

SEQ ID NO: 795143 - protein, 272 aa, Homo sapiens
AAVVTALEDVFQALGFESCERREVPVQGFLEELAWFQEQLDAHGRPVGCALVALMPPEEQLRQPQQLVRELSGCRALRGCPKVFLLLSSGPGSSLEPGAFLAGLRELCGRSPHWSLVQLLTKLFRRVAEESAGGTCCPVLRSSLRGALCLGGVEPWRPEVRGAGQGSNHMATVSSGTEAKGGPRRGGQELESSQATLDVSEPSLQPAPGPSTQYDLSKARAALLLAVIQGRPGAQHDVEALGGLCWALGFETTVRTDPTAQVRGSRELPLVL

SEQ ID NO: 795144 - protein, 98 aa, Homo sapiens
SAVGCSTRDTVLSRERGLSFHQFPTDTIQRSKWIRAVNRVDPRSKKIWIPGPGAILCSKHFQESDFESYGIRRKLKKGAVPSVSLYKIPQGVHLKGKA

SEQ ID NO: 795145 - protein, 109 aa, Homo sapiens
SVLGGSATTRTVRTRPATATHDDVTSGTPKEKKAQTSKKKQSSMAKAERQASPADLPIDPSEPSYWEMIRCDNECPIEWFRFSCVSLNHKPKRKWYCSRCRGKNDGQSP

SEQ ID NO: 795146 - protein, 135 aa, Homo sapiens
MPNSPCRDPPCAGMPNSPCRDPPCAEPWTGLSLPDTAQSWSSPLGLLGRLRNKRPSVQTPPDPILEPSFSLCSPMDPSASSPGPGRGRIYAGTACTDIVWVSEAGVTLGCWTWGACSYGGGCQPSPPRIADSTWT

SEQ ID NO: 795147 - protein, 269 aa, Homo sapiens
MLRLLSSLLLVAVASGYGPPSSHSSSRVVHGEDAVPYSWPWQVSLQYEKSGSFYHTCGGSLIAPDWVVTAGHCISRDLTYQVVLGEYNLAVKEGPEQVIPINSEELFVHPLWNRSCVACGNDIALIKLSRSAQLGDAVQLASLPPAGDILPNKTPCYITGWGRLYTNGPLPDKLQQARLPVVDYKHCSRWNWWGSTVKKTMVCAGGYIRSGCNGDSGGPLNCPTEDGGWQVHGVTSFVSGFGCNFIWKPTVFTRVSAFIDWIEETIASH

SEQ ID NO: 795148 - protein, 263 aa, Homo sapiens
TALLSPLASGYGPPSSHSSSRVVHGEDAVPYSWPWQVSLQYEKSGSFYHTCGGSLIAPDWVVTAGHCISRDLTYQVVLGEYNLAVKEGPEQVIPINSEELFVHPLWNRSCVACGNDIALIKLSRSAQLGDAVQLASLPPAGDILPNKTPCYITGWGRLYTNGPLPDKLQQARLPVVDYKHCSRWNWWGSTVKKTMVCAGGYIRSGCNGDSGGPLNCPTEDGGWQVHGVTSFVSGFGCNFIWKPTVFTRVSAFIDWIEETIASH

SEQ ID NO: 795149 - protein, 140 aa, Homo sapiens
  misc_feature (1)..(1): Xaa can be any naturally occurring amino acid
  misc_feature (16)..(16): Xaa can be any naturally occurring amino acid
  misc_feature (18)..(18): Xaa can be any naturally occurring amino acid
XPFQGLPLNSLPRWVXIXFPNKNNPGNITGLGAVFYTNGPLPDKLQQARLPVVDYKHCSRWNWWGSTVKKTMVCAGGYIRSGCNGDSGGPLNCPTEDGGWQVHGVTSFVSGFGCNFIWKPTVFTRVSAFIDWIEETIASH

SEQ ID NO: 795150 - protein, 178 aa, Homo sapiens
MLRLLSSLLLVAVASGYGPPSSHSSSRVVHGEDAVPYSWPWQVSLQYEKSGSFYHTCGGSLIAPDWVVTAGHCISRDLTYQVVLGEYNLAVKEGPEQVIPINSEELFVHPLWNRSCVACGNDIALIKLSRSAQLGDAVQLASLPPAGDILPNKTSCSRPGCPWWTISTAPGGTGGVPP

SEQ ID NO: 795151 - protein, 69 aa, Homo sapiens
CPIITKLMMLRLLSSLLLVAVASGYGPPSSHRGWWLAGPRCDQLCFWLWLQLHLEAHGVHSSLRLHRLD

SEQ ID NO: 795152 - protein, 269 aa, Homo sapiens; identical to SEQ ID NO: 795147

SEQ ID NO: 795153 - protein, 265 aa, Homo sapiens
MLRLLSSLLLVAVASGYGPPSSHSSSRVVHGEDAVPYSWPWQVSLQYEKSGSFYHTCGGSLIAPDWVVTAGHCISRDLTYQVVLGEYNLAVKEGPEQVIPINSEELFVHPLWNRSCVACGNDIALIKLSRSAQLGDAVQLASLPPAGDILPNKTPCYITGWGRLYTNGPLPDKLQQARLPVVDYKHCSRWNWWGSTVKKTMVCAGGYIRSGCNGDSGGPLNCPTEDGGWQVHGVTSFVSGFGCNFIWKPTVFTRVSAFIDWIEET

SEQ ID NO: 795154 - protein, 266 aa, Homo sapiens
MLRLLSSLLLVAVASGYGPPSSHSSSRVVHGEDAVPYSWPWQVSLQYEKSGSFYHTCGGSLIAPDWVVTAGHCISRDLTYQVVLGEYNLAVKEGPEQVIPINSEELFVHPLWNRSCVACGNDIALIKLSRSAQLGDAVQLASLPPAGDILPNKTPCYITGWGRLYTNGPLPDKLQQARLPVVDYKHCSRWNWWGSTVKKTMVCAGGYIRSGCNGDSGGPLNCPTEDGGWQVHGVTSFVSGFGCNFIWKPTVFTRVSAFIDWIEEGG

SEQ ID NO: 795155 - protein, 140 aa, Homo sapiens
MLRLLSSLLLVAVASGYGPPSSHSSSRVVHGEDAVPYSWPWQVSLQYEKSGSFYHTCGGSLIAPDWVVTAGHCISRDLTYQVVLGEYNLAVKEGPEQVIPINSEELFVHPLWNRSCVACGVTLEDPSTAPQRMVAGRSTV

SEQ ID NO: 795156 - protein, 75 aa, Homo sapiens
GRASVPLLRWFRSPSLASPRVLLPASEEGPQSASGVRVVGIPGRITKSLKWDLPNAFLSAHFRSRLTNVLETCCY

SEQ ID NO: 795157 - protein, 102 aa, Homo sapiens
LGSRNVTVGGMKGWNLELDSLRCRSGQHRHRQFHPRLAVQAVHDAGPVARFPYRVQSQLTPPLRRTSTKEGKERQRHRCPPHGRITSSSDEGGGFKLQLCLR

SEQ ID NO: 795158 - protein, 106 aa, Homo sapiens
QAGEVVYHIAAVAVVYNRQQHSQRLYLGHDDDILSLTIHPVKDYVATGQVGRDAAIHVWDTQTLKCLSLLKGQHQRGVCALDFSADGKCLVSVGLDDFHSIVFWDW

SEQ ID NO: 795159 - protein, 104 aa, Homo sapiens
MQTASNSKQVTAHGVLAKDISYRKETGSYGLDFPTLTDPQDKTTGSCQPLEKSQNTQPWHVNTLHRSEAAGHTDSPSHRLVFHKHVLVSRADGGEVHFLPDIFV

SEQ ID NO: 795160 - protein, 702 aa, Homo sapiens
MTSRNQLVQKVLQELQEAVECEGLEGLIGASLEAKQVLSSFTLPTCREGGPGLQVLEVDSVALSLYPEDAPRNMLPLVCKGEGSLLFEAASMLLWGDAGLSLELRARTVVEMLLHRHYYLQGMIDSKVMLQAVRYSLCSEESPEMTSLPPATLEAIFDADVKASCFPSSFSNVWHLYALASVLQRNIYSIYPMRNLKIRPYFNRVIRPRRCDHVPSTLHIMWAGQPLTSHFFRHQYFAPVVGLEEVEAEGAPGVAPALPALAPLSSPAKTLELLNREPGLSYSHLCERYSVTKSTFYRWRRQSQEHRQKVAARFSAKHFLQDSFHRGGVVPLQQFLQRFPEISRSTYYAWKHELLGSGTCPALPPREVLGMEELEKLPEEQVAEEELECSALAVSSPGMVLMQRAKLYLEHCISLNTLVPYRCFKRRFPGISRSTYYNWRRKALRRNPSFKPAPALSAAGTPQLASVGEGAVIPWKSEAEEGAGNATGEDPPAPGELLPLRMPLSRWQRRLRRAARRQVLSGHLPFCRFRLRYPSLSPSAFWVWKSLARGWPRGLSKLQVPVPTLGKGGQEAEEKQEKEAGRDVTAVMAPPVGASSEDVEGGPSREGALQEGATAQGQPHSGPLLSQPVVAAAGGRDGRMLVMDMIATTKFKAQAKLFLQKRFQSKSFPSYKEFSALFPLTARSTYYMWKRALYDGLTLVDG

SEQ ID NO: 795161 - protein, 243 aa, Homo sapiens
  misc_feature (236)..(236): Xaa can be any naturally occurring amino acid
  misc_feature (238)..(238): Xaa can be any naturally occurring amino acid
MTSRNQLVQKVLQELQEAVECEGLEGLIGASLEAKQVLSSFTLPTCREGGPGLQVLEVDSVALSLYPEDAPRNMLPLVCKGEGSLLFEAASMLLWGDAGLSLELRARTVVEMLLHRHYYLQGMIDSKVMLQAVRYSLCSEESPEMTSLPPATLEAIFDADVKASCFPSSFSNVWHLYALASVLQRNIYSIYPMRNLKIRPYFNRVIRPRRCDHVPSTLHIMWAGQPYSIFAHLAWXAXMTKAL

SEQ ID NO: 795162 - protein, 177 aa, Homo sapiens
MCLSHLENMPLSHSRTQGAQRSSWKLWLFCSIVMLLFLCSFSWLIFIFLQLETAKEPCMAKFGPLPSKWQMASSEPPCVNKVSDWKLEILQNGLYLIYGQVAPNANYNDVAPFEVRLYKNKDMIQTLTNKSKIQNVGGTYELHVGDTIDLIFNSEHQVLKNNTYWGIILLANPQFIS

SEQ ID NO: 795163 - protein, 354 aa, Homo sapiens
MAEVLRTLAGKPKCHALRPMILFLIMLVLVLFGYGFLSPRSLMPGSLERGFCMAVREPDHLQHVSLPRMVYPQSKVLTPCRKDVLVVPLGWLPIVWEGTFNIDILNEQFRLQNTTIGLTVFAIKKYVAFLKLFLETAEKHFMVGHRVHYYVFTDQPAAVPRVTLGTGRQLSVLEVRAYKRWQDVSMRRMEMISDFCERRFLSEVDYLVCVDVDMEIRDHVGVEILTPLFGTLHPGFYGSSREAFTYERRPQSQAYIPKDEGDFYYLGGFFGGSVQEMQRLTRACHQAMMVDQANGIEAVWHDESHLNKYLLRHKPTKVLSPEYLWDQQLLGWPAVLRKLRFTAVPKNHQAVRNP

SEQ ID NO: 795164 - protein, 117 aa, Homo sapiens
ALENANTNTEVLKNMGSAAKAKKRAHDNMDIDKVDELMQDIADQQELGEEISTAISKPVGFGEKSDEDELMAELEELEQEEPDKNLLEVSGPETVPLPNVPSIALPSKPAKKRKTTT

SEQ ID NO: 795165 - protein, 165 aa, Homo sapiens
RGRGGWGVGGREGAGTPGSGAGAGGAGTGDPGGGGGGRGKPRGRSCGCGARGPERPPSPERETVRTATPFPMVSLFLVFTAFVISNIGHIRPQRTILAFVSGIFFILSGLSLVVGLVLYISSINDEVMNRPSSSEQYFHYRYGWSFAFAASSFLLKEVTSVGPRL

SEQ ID NO: 795166 - protein, 269 aa, Homo sapiens
RGRGGWGVGGREGAGTPGSGAGAGGAGTGDPGGGGGGRGKPRGRSCGCGARGPERPPSPERGPAGRPLPLRMSHCSSRALTLLSSVFGACGLLLVGIAVSTDYWLYMEEGTVLPQNQTTEVKMALHAGLWRVCFFAGREKGRCVASEYFLEPEINLVTENTENILKTVRTATPFPMVSLFLVFTAFVISNIGHIRPQRTILAFVSGIFFILSGLSLVVGLVLYISSINDEVMNRPSSSEQYFHYRYGWSFAFAASSFLLKEVTSVGPRL

SEQ ID NO: 795167 - protein, 61 aa, Homo sapiens
LLSQGFGLTALPPPGCCPQSPWKCCIHICAYSSQQRVEPKTKPWKDQDPQPVRISVFWLET

SEQ ID NO: 795168 - protein, 110 aa, Homo sapiens
MLPPGEPPRGLALQMKAAGCRESVTGLAMELGCSCLGGVCDWLAGELCSLEALGRHCCPPGSAMPGGGRWGGRGLGVCLKLQGTVLRPMLTTDHVSSSPEITLGPTLGRL

SEQ ID NO: 795169 - protein, 383 aa, Homo sapiens
MLENYNSIVSLGLPVPQPDVIFQLKRGDKPWMVDLHGSEEREWPESVSLDWETKPEIHDASDKKSEGSLRECLGRQSPLCPKFEVHTPNGRMGTEKQSPSGETRKKSLSRDKGLRRRSALSREILTKERHQECSDCGKTFFDHSSLTRHQRTHTGEKPYDCRECGKAFSHRSSLSRHLMSHTGESPYECSVCSKAFFDRSSLTVHQRIHTGEKPFQCNECGKAFFDRSSLTRHQRIHTGESPYECHQCGKAFSQKSILTRHQLIHTGRKPYECNECGKAFYGVSSLNRHQKAHAGDPRYQCNECGKAFFDRSSLTQHQKIHTGDKPYECSECGKAFSQRCRLTRHQRVHTGEKPFECTVCGKVFSSKSSVIQHQRRYAKQGID

SEQ ID NO: 795170 - protein, 207 aa, Homo sapiens
GSVSGFPALITFEMGPGNQPSGGGATEPCQKAPLKKVIWKIFRNLAILGLLVSKPYVICQLEEGGEPFMVEREISTGAHSDWKRRSKSKESMPSWGISKEELFQVVSVEKHIQDVLQFSKLKAACGCDGQLKMQQIKQERHLKQMSTIHKSATTLSRDYKWNGFGKSLGLRSALVNQPSILMGKGSYKCDTEFRQPLGGNNSQRTPP

SEQ ID NO: 795171 - protein, 425 aa, Homo sapiens
MAAVSPTTRCQESVTFEDVAVVFTDEEWSRLVPIQRDLYKEVMLENYNSIVSLGLPVPQPDVIFQLKRGDKPWMVDLHGSEEREWPESVSLDWETKPEIHDASDKKSEGSLRECLGRQSPLCPKFEVHTPNGRMGTEKQSPSGETRKKSLSRDKGLRRRSALSREILTKERHQECSDCGKTFFDHSSLTRHQRTHTGEKPYDCRECGKAFSHRSSLSRHLMSHTGESPYECSVCSKAFFDRSSLTVHQRIHTGEKPFQCNECGKAFFDRSSLTRHQRIHTGESPYECHQCGKAFSQKSILTRHQLIHTGRKPYECNECGKAFYGVSSLNRHQKAHAGDPRYQCNECGKAFFDRSSLTQHQKIHTGDKPYECSECGKAFSQRCRLTRHQRVHTGEKPFECTVCGKVFSSKSSVIQHQRRYAKQGID

SEQ ID NO: 795172 - protein, 237 aa, Homo sapiens
LFHAHKMPSKRNNPRAASSQSIMIKVLDGSDSLDGDPDLMTFEDVAVEFSQWEWGQLNPAQKDLYKEVMLENFRNLAILGLLVSKPYVICQLEEGGEPFMVEREISTGAHSDWKRRSKSKESMPSWGISKEELFQVVSVEKHIQDVLQFSKLKAACGCDGQLKMQQIKQERHLKQMSTIHKSATTLSRDYKWNGFGKSLGLRSALVNQPSILMGKGSYKCDTEFRQPLGGNNSQRTP

SEQ ID NO: 795173 - protein, 316 aa, Homo sapiens
KNEFLTEQLSKTQIKLNTLKDKFRKTRDTLRKKIIGFRNSPNDLSQTQQQIKEMKEMYENAEDKVNNSTGKWSCVEERICHLQHENPCLEQQLDDVHQKEDHKEIVTNIQRGFIESRKKDLMLEEKSKKLMNECDHLKESLFQYEREKAERVVVVDNFNKKRLTALKKLTMLESPLEGISRCHINLVETQVPKKKLFQVESQFDDLMAEKEAVSSKCVNLAKENQVFQQELLSMKKVQQECEKLEEDKKMLEEEILNLKTHMENSMVELSKLQEYKSELDERAMQAVEKLEEIHLQEQAQYKKQLEQLNKDIIQLH

SEQ ID NO: 795174 - protein, 74 aa, Homo sapiens
EEDAQSVKKEMGMGNRAPEGYQAVRSQVGGAENASIATRRGTTVSGKLAHGEGDIHSSHCPLSLLSQGESTPVM

SEQ ID NO: 795175 - protein, 53 aa, Homo sapiens
MSQQKMARALVATCRGINRGTSSAISGNQEWLRVPHRVRAGLWSQIKKQGRPR

SEQ ID NO: 795176 - protein, 110 aa, Homo sapiens
GLRAAQGESLRPPAPASLHVGGPKPAAKSAKSFPRRLRDRKCLGPGGGRTRVAASALSLGSVPLPAFLPRPSPWQLGRRERGLRAEWVGEPPGSIRQPTRSDEGAPLKEN

SEQ ID NO: 795177 - protein, 101 aa, Homo sapiens
GLRAAQGESLRPPAPASLHVGGPKPAAKSAKSFPRRLRDRKCLGPGGGRTRVAASALSLGSTIEGELDKLESTEMRLLGMALVPHPEQGWPMEWGEDSGGA

SEQ ID NO: 795178 - protein, 117 aa, Homo sapiens
SPRGAAEVRGNRVEQDVDLDLSLALPLPTPSSCLDRGRKGRLHSGLRPGWASCPKHKDWDLALWAHPVIQQTLIGRARWLPPVILILWEAKAGGSPELRNLRPAWPTWQNTISTEKK

SEQ ID NO: 795179 - protein, 390 aa, Homo sapiens
MGQRLSGGRSCLDVPGRLLPQPPPPPPPVRRKLALLFAMLCVWLYMFLYSCAGSCAAAPGLLLLGSGSRAAHDPPALATAPDGTPPRLPFRAPPATPLASGKEMAEGAASPEEQSPEVPDSPSPISSFFSGSGSKQLPQAIIIGVKKGGTRALLEFLRVHPDVRAVGAEPHFFDRSYDKGLAWYRDLMPRTLDGQITMEKTPSYFVTREAPARISAMSKDTKLIVVVRDPVTRAISDYTQTLSKRPDIPTFESLTFKNRTAGLIDTSWSAIQIGIYAKHLEHWLRHFPIRQMLFVSGERLISDPAGELGRVQDFLGLKRIITDKHFYFNKTKGFPCLKKAEGSSRPHCLGKTKGRTHPEIDREVVRRLREFYRPFNLKFYQMTGHDFGWD

SEQ ID NO: 795180 - protein, 390 aa, Homo sapiens; identical to SEQ ID NO: 795179

SEQ ID NO: 795181 - protein, 99 aa, Homo sapiens
SKLIPASCRFSAGRKPALLTAPWSLEEATLCCWRMAWDTEAPALARLHVRGDPCVPSSAHDGSRTRECLGTTGSWHQLRRGCRGPWVTRDPCPSELPDG

SEQ ID NO: 795182 - protein, 437 aa, Homo sapiens
MDGNDNVTLLFAPLLRDNYTLAPNASSLGPGTDLALAPASSAGPGPGLSLGPGPSFGFSPGPTPTPEPTTSGLAGGAASHGPSPFPRPWAPHALPFWDTPLNHGLNVFVGAALCITMLGLGCTVDVNHFGAHVRRPVGALLAALCQFGLLPLLAFLLALAFKLDEVAAVAVLLCGCCPGGNLSNLMSLLVDGDMNLSIIMTISSTLLALVLMPLCLWIYSWAWINTPIVQLLPLGTVTLTLCSTLIPIGLGVFIRYKYSRVADYIVKVSLWSLLVTLVVLFIMTGTMLGPELLASIPAAVYVIAIFMPLAGYASGYGLATLFHLPPNCKRTVCLETGSQNVQLCTAILKLAFPPQFIGSMYMFPLLYALFQSAEAGIFVLIYKMYGSEMLHKRDPLDEDEDTDISYKKLKEEEMADTSYGTVKAENIIMMETAQTSL

SEQ ID NO: 795183 - protein, 437 aa, Homo sapiens; identical to SEQ ID NO: 795182

SEQ ID NO: 795184 - protein, 292 aa, Homo sapiens
MALAALMIALGSLGLHTWQAQAVPTILPLGLAPDTFDDTYVGCAEEMEEKAAPLLKEEMAHHALLRESWEAAQETWEDKRRGLTLPPGFKAQNGIAIMVYTNSSNTLYWELNQAVRTGGGSRELYMRHFPFKALHFYLIRALQLLRGSGGCSRGPGEVVFRGVGSLRFEPKRLGDSVRLGQFASSSLDKAVAHRFGNATLFSLTTCFGAPIQAFSVFPKEREVLIPPHEVFLVTRFSQDGAQSLVTLWSYNQTCSHFNCAYLGGEKRRGCVSAPGALGTGDLHMTKRHLQQP

SEQ ID NO: 795185 - protein, 331 aa, Homo sapiens
QLASRTFAFSRTPDSSGDSAAPARALGAPSRWRPPQPSRMALAALMIALGSLGLHTWQAQAVPTILPLGLAPDTFDDTYVGCAEEMEEKAAPLLKEEMAHHALLRESWEAAQETWEDKRRGLTLPPGFKAQNGIAIMVYTNSSNTLYWELNQAVRTGGGSRELYMRHFPFKALHFYLIRALQLLRGSGGCSRGPGEVVFRGVGSLRFEPKRLGDSVRLGQFASSSLDKAVAHRFGNATLFSLTTCFGAPIQAFSVFPKEREVLIPPHEVFLVTRFSQDGAQSLVTLWSYNQTCSHFNCAYLGGEKRRGCVSAPGALGTGDLHMTKRHLQQP

SEQ ID NO: 795186 - protein, 126 aa, Homo sapiens
WALFHQLCILPDRNWTYIHSIIPREQKLLEGRGHLISLVLPDAAQLPLSTEIWREDIWGHRPFLKPIFHEAFLNSPKLTFPSSSECHRHDPCDSSPCIVISGFYLLPGYLPFQNMRLVTHEGKAHG

SEQ ID NO: 795187 - protein, 1073 aa, Homo sapiens
KSSVVPPRGTRRGEKSDQDKSGQKNKRDFLSMKQSPALAPEERYRRAGSPKPVLRADDNNMGNGCSQKLATANLLRFLLLVLIPCICALVLLLVILLSYVGTLQKVYFKSNGSEPLVTDGEIQGSDVILTNTIYNQSTVVSTAHPDQHVPAWTTDASLPGDQSHRNTSACMNITHSQCQMLPYHATLTPLLSVVRNMEMEKFLKFFTYLHRLSCYQHIMLFGCTLAFPECIIDGDDSHGLLPCRSFCEAAKEGCESVLGMVNYSWPDFLRCSQFRNQTESSNVSRICFSPQQENGKQLLCGRGENFLCASGICIPGKLQCNGYNDCDDWSDEAHCNCSENLFHCHTGKCLNYSLVCDGYDDCGDLSDEQNCDCNPTTEHRCGDGRCIAMEWVCDGDHDCVDKSDEVNCSCHSQGLVECRNGQCIPSTFQCDGDEDCKDGSDEENCSVIQTSCQEGDQRCLYNPCLDSCGGSSLCDPNNSLNNCSQCEPITLELCMNLPYNSTSYPNYFGHRTQKEASISWESSLFPALVQTNCYKYLMFFSCTILVPKCDVNTGERIPPCRALCEHSKERCESVLGIVGLQWPEDTDCSQFPEENSDNQTCLMPDEYVEECSPSHFKCRSGQCVLASRRCDGQADCDDDSDEENCGCKERDLWECPSNKQCLKHTVICDGFPDCPDYMDEKNCSFCQDDELECANHACVSRDLWCDGEADCSDSSDEWDCVTLSINVNSSSFLMVHRAATEHHVCADGWQEILSQLACKQMGLGEPSVTKLIQEQEKEPRWLTLHSNWESLNGTTLHELLVNGQSCESRSKISLLCTKQDCGRRPAARMNKRILGGRTSRPGRWPWQCSLQSEPSGHICGCVLIAKKWVLTVAHCFEGRENAAVWKVVLGINNLDHPSVFMQTRFVKTIILHPRYSRAVVDYDISIVELSEDISETGYVRPVCLPNPEQWLEPDTYCYITGWGHMGNKMPFKLQEGEVRIISLEHCQSYFDMKTITTRMICAGYESGTVDSCMGDSGGPLVCEKPGGRWTLFGLTSWGSVCFSKVLGPGVYSNVSYFVEWIKRQIYIQTFLLN

SEQ ID NO: 795188 - protein, 125 aa, Homo sapiens
MLRIKCHCKITSLYVECRKITTADVNEKNLLSCCKNQCPKELPCGHRCKEMCHPGECPFNCNQKVKLRCPCKRIKKELQCNKVRENQVSIECDTTCKEMKRKASEIKEAEAKAALEEEKRRQQVN

SEQ ID NO: 795189 - protein, 245 aa, Homo sapiens
ILDCQNHTCMKECHKVTKTDGCTGKNKAGPECLHCEEGCSKSRPLGCLHPCILRCHPGECPPCVQMLRIKCHCKITSLYVECRKITTADVNEKNLLSCCKNQCPKELPCGHRCKEMCHPGECPFNCNQKVKLRCPCKRIKKELQCNKVRENQVSIECDTTCKEMKRKASEIKEAEAKAALEEEKRRQQAELEAFENRLKGRRKKNRKRDEVAVELSLWQKHKYYLISVCGVVVVVFAWYITHDVN

SEQ ID NO: 795190 - protein, 245 aa, Homo sapiens; identical to SEQ ID NO: 795189

SEQ ID NO: 795191 - protein, 529 aa, Homo sapiens
MFVHSSTNRQHTRKSFRALCEHSKERCESVLGIVGLQWPEDTDCSQFPEENSDNQTCLMPDEYVEECSPSHFKCRSGQCVLASRRCDGQADCDDDSDEENCGCKERDLWECPSNKQCLKHTVICDGFPDCPDYMDEKNCSFCQDDELECANHACVSRDLWCDGEADCSDSSDEWDCVTLSINVNSSSFLMVHRAATEHHVCADGWQEILSQLACKQMGLGEPSVTKLIQEQEKEPRWLTLHSNWESLNGTTLHELLVNGQSCESRSKISLLCTKQDCGRRPAARMNKRILGGRTSRPGRWPWQCSLQSEPSGHICGCVLIAKKWVLTVAHCFEGRENAAVWKVVLGINNLDHPSVFMQTRFVKTIILHPRYSRAVVDYDISIVELSEDISETGYVRPVCLPNPEQWLEPDTYCYITGWGHMGNKMPFKLQEGEVRIISLEHCQSYFDMKTITTRMICAGYESGTVDSCMGDSGGPLVCEKPGGRWTLFGLTSWGSVCFSKVLGPGVYSNVSYFVEWIKRQIYIQTFLLN

SEQ ID NO: 795192 - protein, 926 aa, Homo sapiens
ILDCQNHTCMKECHKVTKTDGCTGKNKAGPECLHCEEGCSKSRPLGCLHPCILRCHPGECPPCVQMLRIKCHCKITSLYVECRKITTADVNEKNLLSCCKNQCPKELPCGHRCKEMCHPGECPFNCNQKVKLRCPCKRIKKELQCNKVRENQVSIECDTTCKEMKRKASEIKEAEAKAALEEEKRRQQAELEAFENRLKGRRKKNRKRDEVAVLRADDNNMGNGCSQKLATANLLRFLLLVLIPCICALVLLLVILLSYVGTLQKVYFKSNGSEPLVTDGEIQGSDVILTNTIYNQSTVVSTAHPDQHVPAWTTDASLPGDQSHRNTSACMNITHSQCQMLPYHATLTPLLSVVRNMEMEKFLKFFTYLHRLSCYQHIMLFGCTLAFPECIIDGDDSHGLLPCRSFCEAAKEGCESVLGMVNYSWPDFLRCSQFRNQTESSNVSRICFSPQQENGKQLLCGRGENFLCASGICIPGKLQCNGYNDCDDWSDEAHCNCSENLFHCHTGKCLNYSLVCDGYDDCGDLSDEQNCDCNPTTEHRCGDGRCIAMEWVCDGDHDCVDKSDEVNCSCHSQGLVECRNGQCIPSTFQCDGDEDCKDGSDEENCSVIQTSCQEGDQRCLYNPCLDSCGGSSLCDPNNSLNNCSQCEPITLELCMNLPYNSTSYPNYFGHRTQKEASISWESSLFPALVQTNCYKYLMFFSCTILVPKCDVNTGERIPPCRALCEHSKERCESVLGIVGLQWPEDTDCSQFPEENSDNQTCLMPDEYVEGCKERDLWECPSNKQCLKHTVICDGFPDCPDYMDEKNCSFCQDDELECANHACVSRDLWCDGEADCSDSSDEWDCGELLVSAICCTLSCLSATEAEWILNYFLDFTDQVHLFCFTVIKADSADLCVLFPTHRKFPHEATSLFEISILYGKTFGFKML

SEQ ID NO: 795193 - protein, 262 aa, Homo sapiens
ILDCQNHTCMKECHKVTKTDGCTGKNKAGPECLHCEEGCSKSRPLGCLHPCILRCHPGECPPCVQMLRIKCHCKITSLYVECRKITTADVNEKNLLSCCKNQCPKELPCGHRCKEMCHPGECPFNCNQKVKLRCPCKRIKKELQCNKVRENQVSIECDTTCKEMKRKASEIKEAEAKAALEEEKRRQQAELEAFENRLKGRRKKNRKRDEVAVLRADDNNMGNGCSQKLATANLLRFLLLVLIPCICALVLLLVILLSYVGG

SEQ ID NO: 795194 - protein, 222 aa, Homo sapiens
MFVHSSTNRQHTRKSFRALCEHSKERCESVLGIVGLQWPEDTDCSQFPEENSDNQTCLMPDEYVEGCKERDLWECPSNKQCLKHTVICDGFPDCPDYMDEKNCSFCQDDELECANHACVSRDLWCDGEADCSDSSDEWDCGELLVSAICCTLSCLSATEAEWILNYFLDFTDQVHLFCFTVIKADSADLCVLFPTHRKFPHEATSLFEISILYGKTFGFKML

SEQ ID NO: 795195 - protein, 245 aa, Homo sapiens; identical to SEQ ID NO: 795189

SEQ ID NO: 795196 - protein, 1166 aa, Homo sapiens
ILDCQNHTCMKECHKVTKTDGCTGKNKAGPECLHCEEGCSKSRPLGCLHPCILRCHPGECPPCVQMLRIKCHCKITSLYVECRKITTADVNEKNLLSCCKNQCPKELPCGHRCKEMCHPGECPFNCNQKVKLRCPCKRIKKELQCNKVRENQVSIECDTTCKEMKRKASEIKEAEAKAALEEEKRRQQAELEAFENRLKGRRKKNRKRDEVAVLRADDNNMGNGCSQKLATANLLRFLLLVLIPCICALVLLLVILLSYVGACMNITHSQCQMLPYHATLTPLLSVVRNMEMEKFLKFFTYLHRLSCYQHIMLFGCTLAFPECIIDGDDSHGLLPCRSFCEAAKEGCESVLGMVNYSWPDFLRCSQFRNQTESSNVSRICFSPQQENGKQLLCGRGENFLCASGICIPGKLQCNGYNDCDDWSDEAHCNCSENLFHCHTGKCLNYSLVCDGYDDCGDLSDEQNCDCNPTTEHRCGDGRCIAMEWVCDGDHDCVDKSDEVNCSCHSQGLVECRNGQCIPSTFQCDGDEDCKDGSDEENCSVIQTSCQEGDQRCLYNPCLDSCGGSSLCDPNNSLNNCSQCEPITLELCMNLPYNSTSYPNYFGHRTQKEASISWESSLFPALVQTNCYKYLMFFSCTILVPKCDVNTGERIPPCRALCEHSKERCESVLGIVGLQWPEDTDCSQFPEENSDNQTCLMPDEYVEECSPSHFKCRSGQCVLASRRCDGQADCDDDSDEENCGCKERDLWECPSNKQCLKHTVICDGFPDCPDYMDEKNCSFCQDDELECANHACVSRDLWCDGEADCSDSSDEWDCVTLSINVNSSSFLMVHRAATEHHVCADGWQEILSQLACKQMGLGEPSVTKLIQEQEKEPRWLTLHSNWESLNGTTLHELLVNGQSCESRSKISLLCTKQDCGRRPAARMNKRILGGRTSRPGRWPWQCSLQSEPSGHICGCVLIAKKWVLTVAHCFEGRENAAVWKVVLGINNLDHPSVFMQTRFVKTIILHPRYSRAVVDYDISIVELSEDISETGYVRPVCLPNPEQWLEPDTYCYITGWGHMGNKMPFKLQEGEVRIISLEHCQSYFDMKTITTRMICAGYESGTVDSCMGDSGGPLVCEKPGGRWTLFGLTSWGSVCFSKVLGPGVYSNVSYFVEWIKRQIYIQTFLLN

SEQ ID NO: 795197 - protein, 962 aa, Homo sapiens
ILDCQNHTCMKECHKVTKTDGCTGKNKAGPECLHCEEGCSKSRPLGCLHPCILRCHPGECPPCVQMLRIKCHCKITSLYVECRKITTADVNEKNLLSCCKNQCPKELPCGHRCKEMCHPGECPFNCNQKVKLRCPCKRIKKELQCNKVRENQVSIECDTTCKEMKRKASEIKEAEAKAALEEEKRRQQAELEAFENRLKGRRKKNRKRDEVAVLRADDNNMGNGCSQKLATANLLRFLLLVLIPCICALVLLLVILLSYVGTLQKVYFKSNGSEPLVTDGEIQGSDVILTNTIYNQSTVVSTAHPDQHVPAWTTDASLPGDQSHRNTSACMNITHSQCQMLPYHATLTPLLSVVRNMEMEKFLKFFTYLHRLSCYQHIMLFGCTLAFPECIIDGDDSHGLLPCRSFCEAAKEGCESVLGMVNYSWPDFLRCSQFRNQTESSNVSRICFSPQQENGKQLLCGRGENFLCASGICIPGKLQCNGYNDCDDWSDEAHCNCSENLFHCHTGKCLNYSLVCDGYDDCGDLSDEQNCDCNPTTEHRCGDGRCIAMEWVCDGDHDCVDKSDEVNCSCHSQGLVECRNGQCIPSTFQCDGDEDCKDGSDEENCSVIQTSCQEGDQRCLYNPCLDSCGGSSLCDPNNSLNNCSQCEPITLELCMNLPYNSTSYPNYFGHRTQKEASISWESSLFPALVQTNCYKYLMFFSCTILVPKCDVNTGERIPPCRALCEHSKERCESVLGIVGLQWPEDTDCSQFPEENSDNQTCLMPDEYVEECSPSHFKCRSGQCVLASRRCDGQADCDDDSDEENCGCKERDLWECPSNKQCLKHTVICDGFPDCPDYMDEKNCSFCQDDELECANHACVSRDLWCDGEADCSDSSDEWDCGELLVSAICCTLSCLSATEAEWILNYFLDFTDQVHLFCFTVIKADSADLCVLFPTHRKFPHEATSLFEISILYGKTFGFKML

SEQ ID NO: 795198 - protein, 133 aa, Homo sapiens
SLYPPYSLEVESNHRSAGFFLCTWQPLEGKACTFPAVTPAHVSHIISLSCSKNFSPERRWQRWAGGAKVGALTARFQGALLSQPTTMVRQGDSAGLRIRALKMAFVLLVFSLFICCLFSDDVLVKSSFENPKL

SEQ ID NO: 795199 - protein, 1363 aa, Homo sapiens
LTIGARAAARGRSFNSPQWSPLFPLASSNSYSQGRWLWVAITMSDSVILRSIKKFGEENDGFESDKSYNNDKKSRLQDEKKGDGVRVGFFQLFRFSSSTDIWLMFVGSLCAFLHGIAQPGVLLIFGTMTDVFIDYDVELQELQIPGKACVNNTIVWTNSSLNQNMTNGTRCGLLNIESEMIKFASYYAGIAVAVLITGYIQICFWVIAAARQIQKMRKFYFRRIMRMEIGWFDCNSVGELNTRFSDDINKINDAIADQMALFIQRMTSTICGFLLGFFRGWKLTLVIISVSPLIGIGAATIGLSVSKFTDYELKAYAKAGVVADEVISSMRTVAAFGGEKREVERYEKNLVFAQRWGIRKGIVMGFFTGFVWCLIFLCYALAFWYGSTLVLDEGEYTPGTLVQIFLSVIVGALNLGNASPCLEAFATGRAAATSIFETIDRKPIIDCMSEDGYKLDRIKGEIEFHNVTFHYPSRPEVKILNDLNMVIKPGEMTALVGPSGAGKSTALQLIQRFYDPCEGMVTVDGHDIRSLNIQWLRDQIGIVEQEPVLFSTTIAENIRYGREDATMEDIVQAAKEANAYNFIMDLPQQFDTLVGEGGGQMSGGQKQRVAIARALIRNPKILLLDMATSALDNESEAMVQEVLSKIQHGHTIISVAHRLSTVRAADTIIGFEHGTAVERGTHEELLERKGVYFTLVTLQSQGNQALNEEDIKDATEDDMLARTFSRGSYQDSLRASIRQRSKSQLSYLVHEPPLAVVDHKSTYEEDRKDKDIPVQEEVEPAPVRRILKFSAPEWPYMLVGSVGAAVNGTVTPLYAFLFSQILGTFSIPDKEEQRSQINGVCLLFVAMGCVSLFTQFLQGYAFAKSGELLTKRLRKFGFRAMLGQDIAWFDDLRNSPGALTTRLATDASQVQGAAGSQIGMIVNSFTNVTVAMIIAFSFSWKLSLVILCFFPFLALSGATQTRMLTGFASRDKQALEMVGQITNEALSNIRTVAGIGKERRFIEALETELEKPFKTAIQKANIYGFCFAFAQCIMFIANSASYRYGGYLISNEGLHFSYVFRVISAVVLSATALGRAFSYTPSYAKAKISAARFFQLLDRQPPISVYNTAGEKWDNFQGKIDFVDCKFTYPSRPDSQVLNGLSVSISPGQTLAFVGSSGCGKSTSIQLLERFYDPDQGKVMIDGHDSKKVNVQFLRSNIGIVSQEPVLFACSIMDNIKYGDNTKEIPMERVIAAAKQAQLHDFVMSLPEKYETNVGSQGSQLSRGEKQRIAIARAIVRDPKILLLDEATSALDTESEKTVQVALDKAREGRTCIVIAHRLSTIQNADIIAVMAQGVVIEKGTHEELMAQKGAYYKLVTTGSPIS

SEQ ID NO: 795200 - protein, 447 aa, Homo sapiens
LTIGARAAARGRSFNSPQWSPLFPLASSNSYSQGRWLWVAITMSDSVILRSIKKFGEENDGFESDKSYNNDKKSRLQDEKKGDGVRVGFFQLFRFSSSTDIWLMFVGSLCAFLHGIAQPGVLLIFGTMTDVFIDYDVELQELQIPGKACVNNTIVWTNSSLNQNMTNGTRCGLLNIESEMIKFASYYAGIAVAVLITGYIQICFWVIAAARQIQKMRKFYFRRIMRMEIGWFDCNSVGELNTRFSDDINKINDAIADQMALFIQRMTSTICGFLLGFFRGWKLTLVIISVSPLIGIGAATIGLSVSKFTDYELKAYAKAGVVADEVISSMRTVAAFGGEKREVERYEKNLVFAQRWGIRKGIVMGFFTGFVWCLIFLCYALAFWYGSTLVLDEGEYTPGTLVQIFLSVIVGALNLGNASPCLEAFATGRAAATSIFETIDRVCISQK

SEQ ID NO: 795201 - protein, 123 aa, Homo sapiens
LVPGSDPSRERLGMKGWGDDMSIRLQLLLQGPFMEAYFLGPLPRTPSPCSQPHPPLSLTVRLQSMAYIFPLPESQPQLSQFLAAMVLGPPLNFQTFCLVPPSLPRTLAYLSVLPCVSPQPGSP

SEQ ID NO: 795202 - protein, 125 aa, Homo sapiens
MSSTLGKLSNQVEETLPLLKKVPANYFHICSAILMGFSLSKSATQVSAIHMDSKVDDHLIRGTEKSRLEPATQLFQNTKKIRLEDTNQENFTRIEGTGTGSLSGKALGSVVYVKESDGLEMTDVE

SEQ ID NO: 795203 - protein, 102 aa, Homo sapiens
SQNRFWNSFSRPRAREGSPAPGKPGHPLGCPSTPQPQVLSQHLSALPVNPDCDSRLRAKPRPLPPPSVGHNCQGDLPDRPSPPTVSSRQQPTEQPPTKLPCP

SEQ ID NO: 795204 - protein, 87 aa, Homo sapiens
TLSVFALKEEHGGTTQCLHCATRTKDTSVTGRHSSLGKSDTTMLLLPSQAHGKEKCLPGVSATQPPVLYHYCPLHRRPAPSSSSSGH

SEQ ID NO: 795205 - protein, 117 aa, Homo sapiens
TDTRPGAMLSLCSYKGNRMPKTGLVNPNSKPPRSAGTQGALLLEGVVDASLFTSFVLTRQWGCPGDISHPVLGHFRGSGELPCSLSIPKDGSGEATGAGEPAPVRSEPHPPPLCWCE

SEQ ID NO: 795206 - protein, 89 aa, Homo sapiens
TWCNFQFYTSLMNSVNRQHKYNSVIPMRPLNNPLPRERTPFALQTINALEEESRGFPTQVERIFQESVYKTQQTIWKETRNMVQRQFIA

SEQ ID NO: 795207 - protein, 67 aa, Homo sapiens
GDFSPPPSKLPRHGHRHELGVLQLSSDTLYLETASDPRGWGLSPPRPPLTFRHHSLVQASGTSDNQL

SEQ ID NO: 795208 - protein, 158 aa, Homo sapiens
RRGRGKQHGIPASGLPGRCWLGIKMSTLQPRTRAPEELFVPQESSGSTQENMLVSFHGSSLRNEATPRYSQQEEAGNGRWQQSLSLERWPLWTSHPLGTPPLMPVAVARCCILPGLWPLLSPPSGSASPVSQGPGCLSLWPNAFKKDDFPVRQGDTFW

SEQ ID NO: 795209 - protein, 78 aa, Homo sapiens
FLGEQNWSQIWRFFCWEARAGAGAPEASRFWLRGRGLSRAIRPHTVQQMGRGPRHHPGDRRGDLHRKSGAGLLAPGPS

SEQ ID NO: 795210 - protein, 463 aa, Homo sapiens
MRAGPEPQALVGQKRGALRLLVPRLVLTVSAPAEVRRRVLRPVLSWMDRETRALADSHFRGLGVDVPGVGQAPGRVAFVSEPGAFSYADFVRGFLLPNLPCVFSSAFTQGWGSRRRWVTPAGRPDFDHLLRTYGDVVVPVANCGVQEYNSNPKEHMTLRDYITYWKEYIQAGYSSPRGCLYLKDWHLCRDFPVEDVFTLPVYFSSDWLNEFWDALDVDDYRFVYAGPAGSWSPFHADIFRSFSWSVNVCGRKKWLLFPPGQEEALRDRHGNLPYDVTSPALCDTHLHPRNQLAGPPLEITQEAGEMVFVPSGWHHQVHNLDDTISINHNWVNGFNLANMWRFLQQELCAVQEEVSEWRDSMPDWHHHCQVIMRSCSGINFEEFYHFLKVIAEKRLLVLREAAAEDGAGLGFEQAAFDVGRITEVLASLVAHPDFQRVDTSAFSPQPKELLQQLREAVDAAAAP

SEQ ID NO: 795211 - protein, 447 aa, Homo sapiens
MRAGPEPQALVGQKRGALRLLVPRLVLTVSAPAEVRRRVLRPVLSWMDRETRALADSHFRGLGVDVPGVGQAPGRVAFVSEPGAFSYADFVRGFLLPNLPCVFSSAFTQGWGSRRRWVTPAGRPDFDHLLRTYGDVVVPVANCGVQEYNSNPKEHMTLRDYITYWKEYIQAGYSSPRGCLYLKDWHLCRDFPVEDVFTLPVYFSSDWLNEFWDALDVDDYRFVYAGPAGSWSPFHADIFRSFSWSVNVCGRKKWLLFPPGQEEALRDRHGNLPYDVTSPALCDTHLHPRNQLAGPPLEITQEAGEMVFVPSGWHHQVHNLDDTISINHNWVNGFNLANMWRFLQQELCAVQEEVIMRSCSGINFEEFYHFLKVIAEKRLLVLREAAAEDGAGLGFEQAAFDVGRITEVLASLVAHPDFQRVDTSAFSPQPKELLQQLREAVDAAAAP

SEQ ID NO: 795212 - protein, 164 aa, Homo sapiens
MWVGQGAPAMGSGLPALCPFQDDTISINHNWVNGFNLANMWRFLQQELCAVQEEVSEWRDSMPDWHHHCQVIMRSCSGINFEEFYHFLKVIAEKRLLVLREAAAEDGAGLGFEQAAFDVGRITEVLASLVAHPDFQRVDTSAFSPQPKELLQQLREAVDAAAAP

SEQ ID NO: 795213 - protein, 128 aa, Homo sapiens
  misc_feature (17)..(17): Xaa can be any naturally occurring amino acid
  misc_feature (31)..(31): Xaa can be any naturally occurring amino acid
KGQGGLGVLGPFPFNLXQGGMGACWEPKPGXGGLRLPLGTQSGGLGWAGLCHLPAFAGPVDSWRGHRWGGIPSAAESSPGPEGLCLLCTHSWVFPRMLFSGVVGPQPLFTLGMMEVWAGSSRPIKAQQ

SEQ ID NO: 795214 - protein, 133 aa, Homo sapiens
GRRPRAGRKGRRDPGPGGPRLERGTREGEGGQARGPWRVPLQTVWSEDGAQGDGMDRAFHFRRRGCTSCKLWGPGIQLEPQRAHDSQRLHHLLERVHTGGLLLSQGLSLPQRLALVQVMGLGTHRGAAFPSAA

SEQ ID NO: 795215 - protein, 167 aa, Homo sapiens
GRRPRAGRKGRRDPGPGGPRLERGTREGEGGQARGPWRVPLQTVWSEDGAQGDGMDRAFHFRRRGCTSCKLWDPLAEDAPGLNPLVDPQFVETGTLPALSLTESPAFFQLAPGWLPHPSRGGGIRIHRDGTCHGYAHCLPVASTGAAGTCLGWKPPRRAGVSVCSVQ

SEQ ID NO: 795216 - protein, 176 aa, Homo sapiens
GRRPRAGRKGRRDPGPGGPRLERGTREGEGGQARGPWRVPLQTVWSEDGAQGDGMDRAFHFRRRGCTSCKLWGPGIQLEPQRAHDSQRLHHLLERVHTGGLLLSQGLSLPQRLALVQVMGLGTHRCVNPEAFLMKVAPGCTTELFFPVRHFNQFKRNWIVFRMAASVVLWEVNMVF

SEQ ID NO: 795217 - protein, 422 aa, Homo sapiens
WYWSRIRLMTRALADSHFRGLGVDVPGVGQAPGRVAFVSEPGAFSYADFVRGFLLPNLPCVFSSAFTQGWGSRRRWVTPAGRPDFDHLLRTYGDVVVPVANCGVQEYNSNPKEHMTLRDYITYWKEYIQAGYSSPRGCLYLKDWHLCRDFPVEDVFTLPVYFSSDWLNEFWDALDVDDYRFVYAGPAGSWSPFHADIFRSFSWSVNVCGRKKWLLFPPGQEEALRDRHGNLPYDVTSPALCDTHLHPRNQLAGPPLEITQEAGEMVFVPSGWHHQVHNLDDTISINHNWVNGFNLANMWRFLQQELCAVQEEVSEWRDSMPDWHHHCQVIMRSCSGINFEEFYHFLKVIAEKRLLVLREAAAEDGAGLGFEQAAFDVGRITEVLASLVAHPDFQRVDTSAFSPQPKELLQQLREAVDAAAAP

SEQ ID NO: 795218 - protein, 439 aa, Homo sapiens
MRAGPEPQALVGQKRGALRLLVPRLVLTVSAPAEVRRRVLRPVLSWMDRETRALADSHFRGLGVDVPGVGQAPGRVAFVSEPGAFSYADFVRGFLLPNLPCVFSSAFTQGWGSRRRWVTPAGRPDFDHLLRTYGDVVVPVANCGVQEYNSNPKEHMTLRDYITYWKEYIQAGYSSPRGCLYLKDWHLCRDFPVEDVFTLPVYFSSDWLNEFWDALDVDDYRFVYAGPAGSWSPFHADIFRSFSWSVNVCGRKKWLLFPPGQEEALRDRHGNLPYDVTSPALCDTHLHPRNQLAGPPLEITQEAGEMVFVPSGWHHQVHNLQELCAVQEEVSEWRDSMPDWHHHCQVIMRSCSGINFEEFYHFLKVIAEKRLLVLREAAAEDGAGLGFEQAAFDVGRITEVLASLVAHPDFQRVDTSAFSPQPKELLQQLREAVDAAAAP

SEQ ID NO: 795219 - protein, 463 aa, Homo sapiens; identical to SEQ ID NO: 795210

SEQ ID NO: 795220 - protein, 412 aa, Homo sapiens
AGWIGRRFRGLGVDVPGVGQAPGRVAFVSEPGAFSYADFVRGFLLPNLPCVFSSAFTQGWGSRRRWVTPAGRPDFDHLLRTYGDVVVPVANCGVQEYNSNPKEHMTLRDYITYWKEYIQAGYSSPRGCLYLKDWHLCRDFPVEDVFTLPVYFSSDWLNEFWDALDVDDYRFVYAGPAGSWSPFHADIFRSFSWSVNVCGRKKWLLFPPGQEEALRDRHGNLPYDVTSPALCDTHLHPRNQLAGPPLEITQEAGEMVFVPSGWHHQVHNLDDTISINHNWVNGFNLANMWRFLQQELCAVQEEVSEWRDSMPDWHHHCQVIMRSCSGINFEEFYHFLKVIAEKRLLVLREAAAEDGAGLGFEQAAFDVGRITEVLASLVAHPDFQRVDTSAFSPQPKELLQQLREAVDAAAAP

SEQ ID NO: 795221 - protein, 339 aa, Homo sapiens [sequence omitted]

SEQ ID NO: 795222 - protein, 356 aa, Homo sapiens
RLGRGPCYSAEAPRGVPDFDHLLRTYGDVVVPVANCGVQEYNSNPKEHMTLRDYITYWKEYIQAGYSSPRGCLYLKDWHLCRDFPVEDVFTLPVYFSSDWLNEFWDALDVDDYRFVYAGPAGSWSPFHADIFRSFSWSVNVCGRKKWLLFPPGQEEALRDRHGNLPYDVTSPALCDTHLHPRNQLAGPPLEITQEAGEMVFVPSGWHHQVHNLDDTISINHNWVNGFNLANMWRFLQQELCAVQEEVSEWRDSMPDWHHHCQVIMRSCSGINFEEFYHFLKVIAEKRLLVLREAAAEDGAGLGFEQAAFDVGRITEVLASLVAHPDFQRVDTSAFSPQPKELLQQLREAVDAAAAP

SEQ ID NO: 795223 - protein, 447 aa, Homo sapiens; identical to SEQ ID NO: 795211

SEQ ID NO: 795224 - protein, 592 aa, Homo sapiens
MRAGPEPQALVGQKRGALRLLVPRLVLTVSAPAEVRRRVLRPVLSWMDRETRALADSHFRGLGVDVPGVGQAPGRVAFVSEPGAFSYADFVRGFLLPNLPCVFSSAFTQGWGSRRRWVTPAGRPDFDHLLRTYGDVVVPVANCGVQEYNSNPKEHMTLRDYITYWKEYIQAGYSSPRGCLYLKDWHLCRDFPVEDVFTLPVYFSSDWLNEFWDALDVDDYRFVYAGPAGSWSPFHADIFRSFSWSVNVCGRKKWLLFPPGQEEALRDRHGNLPYDVTSPALCDTHLHPRNQLAGPPLEITQEAGEMVFVPSGWHHQVHNLVMCCFSCPLSGAFLQEDGSTTSPLSQPELGWNGVAHGLRLTPSQGGVAEAYASVSPTAGPWVYLLWVHCGLRWSEPATHFPAEQALLGDRRALLAAEGWTPQWVLAQEMWVGQGAPAMGSGLPALCPFQDDTISINHNWVNGFNLANMWRFLQQELCAVQEEVSEWRDSMPDWHHHCQVIMRSCSGINFEEFYHFLKVIAEKRLLVLREAAAEDGAGLGFEQAAFDVGRITEVLASLVAHPDFQRVDTSAFSPQPKELLQQLREAVDAAAAP

SEQ ID NO: 795225 - protein, 110 aa, Homo sapiens
MARGNQRELARQKNMKKTQEISKGKRKEDSLTASQRKQSSGGQKSESKMSAGPHLPLKAPRENPCFPLPAAGGSRYYLAYGSITPISAFVFVVFFSVFFPSFYEDFCCWI

SEQ ID NO: 795226 - protein, 79 aa, Homo sapiens
GGVRLENPPGSRSAGIPASVGRERARGWFRSGFSGRTGACPSGASLCGKEHTPEMWTRPPQEGPCLEVEINENLPARKT

SEQ ID NO: 795227 - protein, 274 aa, Homo sapiens
MKGRRLLFQGHARPTTPGPRRTRTTRSRRWRQLPTLTRPLLPRLPAPPAAPPLSHGMLGARGGVGPAGPGERGGSCRRGGAERGGADSRPPRPPRPQALGRRRGLGVVVTNPKTRDLHYCGHTLFSQTLPGKHRRAGQSGVNRRPIKDLQCGWWGLVPWGASAHRRALGFTCASFPTFYGGEWKVKIVRSRGGYPPSQPPPEMCPSSPSTFYHFFPMKKTKRCKGREYPRPPNPVLCNVKCALKSSHPEACPPSAGERSWGLGAVGHACNPSTL

SEQ ID NO: 795228 - protein, 107 aa, Homo sapiens
IFLTVNYQITFGCIVSLSVHGFVSLWQRQLADKLIKIPELQIKLGPGVAVKFQTQRPIQSVHYIPILMRAEQTLMRDMTSASPITKKRDYHTDDLPGGFIARFDLMN

SEQ ID NO: 795229 - protein, 1327 aa, Homo sapiens
MAASRRSQHHHHHHQQQLQPAPGASAPPPPPPPPLSPGLAPGTTPASPTASGLAPFASPRHGLALPEGDGSRDPPDRPRSPDPVDGTSCCSTTSTICTVAAAPVVPAVSTSSAAGVAPNPAGSGSNNSPSSSSSPTSSSSSSPSSPGSSLAESPEAAGVSSTAPLGPGAAGPGTGVPAVSGALRELLEACRNGDVSRVKRLVDAANVNAKDMAGRKSSPLHFAAGFGRKDVVEHLLQMGANVHARDDGGLIPLHNACSFGHAEVVSLLLCQGADPNARDNWNYTPLHEAAIKGKIDVCIVLLQHGADPNIRNTDGKSALDLADPSAKAVLTGEYKKDELLEAARSGNEEKLMALLTPLNVNCHASDGRKSTPLHLAAGYNRVRIVQLLLQHGADVHAKDKGGLVPLHNACSYGHYEVTELLLKHGACVNAMDLWQFTPLHEAASKNRVEVCSLLLSHGADPTLVNCHGKSAVDMAPTPELRERLTYEFKGHSLLQAAREADLAKVKKTLALEIINFKQPQSHETALHCAVASLHPKRKQVTELLLRKGANVNEKNKDFMTPLHVAAERAHNDVMEVLHKHGAKMNALDTLGQTALHRAALAGHLQTCRLLLSYGSDPSIISLQGFTAAQMGNEAVQQILSESTPIRTSDVDYRLLEASKAGDLETVKQLCSSQNVNCRDLEGRHSTPLHFAAGYNRVSVVEYLLHHGADVHAKDKGGLVPLHNACSYGHYEVAELLVRHGASVNVADLWKFTPLHEAAAKGKYEICKLLLKHGADPTKKNRDGNTPLDLVKEGDTDIQDLLKGDAALLDAAKKGCLARVQKLCTPENINCRDTQGRNSTPLHLAAGYNNLEVAEYLLEHGADVNAQDKGGLIPLHNAASYGHVDIAALLIKYNTCVNATDKWAFTPLHEAAQKGRTQLCALLLAHGADPTMKNQEGQTPLDLATADDIRALLIDAMPPEALPTCFKPQATVVSASLISPASTPSCLSAASSIDNLTGPLAELAVGGASNAGDGAAGTERKEGEVAGLDMNISQFLKSLGLEHLRDIFETEQITLDVLADMGHEELKEIGINAYGHRHKLIKGVERLLGGQQGTNPYLTFHCVNQGTILLDLAPEDKEYQSVEEEMQSTIREHRDGGNAGGIFNRYNVIRIQKVVNKKLRERFCHRQKEVSEENHNHHNERMLFHGSPFINAIIHKGFDERHAYIGGMFGAGIYFAENSSKSNQYVYGIGGGTGCPTHKDRSCYICHRQMLFCRVTLGKSFLQFSTMKMAHAPPGHHSVIGRPSVNGLAYAEYVIYRGEQAYPEYLITYQIMKPEAPSQTATAAEQKT

SEQ ID NO: 795230 - protein, 77 aa, Homo sapiens
ATIYLEDLDKTIEGGYSTQQIFNIDKTAFYWKKMSSRTFLAREEKSIPGFNASKEGLRSVAYTCNSSTSGDQGKTMA

SEQ ID NO: 795231 - protein, 117 aa, Homo sapiens
LWGLCLLANQHPIPGNIFGAFCYLLFRDGCRALCPMSRGGECPVSSPPNHFLHHPGLHSPCYFLHFSLPNPSHKEAPKTGSQIWSPASAPHTRAFQEDEFYGSILSDSRFTTLKGSL

SEQ ID NO: 795232 - protein, 534 aa, Homo sapiens
MFSWVSKDARRKKEPELFQTVAEGLRQLYAQKLLPLEEHYRFHEFHSPALEDADFDNKPMVLLVGQYSTGKTTFIRHLIEQDFPGMRIGPEPTTDSFIAVMHGPTEGVVPGNALVVDPRRPFRKLNAFGNAFLNRFMCAQLPNPVLDSISIIDTPGILSGEKQRISRGYDFAAVLEWFAERVDRIILLFDAHKLDISDEFSEVIKALKNHEDKIRVVLNKADQIETQQLMRVYGALMWSLGKIINTPEVVRVYIGSFWSHPLLIPDNRKLFEAEEQDLFKDIQSLPRNAALRKLNDLIKRARLAKVHAYIISSLKKEMPNVFGKESKKKELVNNLGEIYQKIEREHQISPGDFPSLRKMQELLQTQDFSKFQALKPKLLDTVDDMLANDIARLMVMVRQEESLMPSQVVKGGAFDGTMNGPFGHGYGEGAGEGIDDVEWVVGKDKPSYDEIFYTLSPVNGKITGANVKKEMVKSKLPNTELGKIWKLADVDKDGLLDDEEFALANHLIKVKLEGHELPADLPPHLVPPSKRRHE

SEQ ID NO: 795233 - protein, 571 aa, Homo sapiens
ILTSLDSQRGLCVAGEDGGGVSPMEQPGTAASPVSGSMFSWVSKDARRKKEPELFQTVAEGLRQLYAQKLLPLEEHYRFHEFHSPALEDADFDNKPMVLLVGQYSTGKTTFIRHLIEQDFPGMRIGPEPTTDSFIAVMHGPTEGVVPGNALVVDPRRPFRKLNAFGNAFLNRFMCAQLPNPVLDSISIIDTPGILSGEKQRISRGYDFAAVLEWFAERVDRIILLFDAHKLDISDEFSEVIKALKNHEDKIRVVLNKADQIETQQLMRVYGALMWSLGKIINTPEVVRVYIGSFWSHPLLIPDNRKLFEAEEQDLFKDIQSLPRNAALRKLNDLIKRARLAKVHAYIISSLKKEMPNVFGKESKKKELVNNLGEIYQKIEREHQISPGDFPSLRKMQELLQTQDFSKFQALKPKLLDTVDDMLANDIARLMVMVRQEESLMPSQVVKGGAFDGTMNGPFGHGYGEGAGEGIDDVEWVVGKDKPSYDEIFYTLSPVNGKITGANVKKEMVKSKLPNTELGKIWKLADVDKDGLLDDEEFALANHLIKVKLEGHELPADLPPHLVPPSKRRHE

SEQ ID NO: 795234 - protein, 141 aa, Homo sapiens
VEPADMSDAVTKASKCRWGTNSLTSEEDDSGLCSPPAEREEKQGILTGDQSRIKSLSSTEDILVTDQYRPFFSVNSISEQKIPLLSCQSAHPDENFKMILHDVSPLEEAKHVNGQREIHDENCCLQNNLKESPVKCDPLIM

SEQ ID NO: 795235 - protein, 107 aa, Homo sapiens
ERASFRVGEVVGRSLGELLTAQHQHCHGSRLLPTPPSWGTGCASRNSTQAAETPSPPLTSPDCPSGCSVALRAATVLKLLSPASLGFIVITPLSAVLLLLAINSGLP

SEQ ID NO: 795236 - protein, 123 aa, Homo sapiens
GFQMRPPPALRATRFPLPRGASTRQGTHALPPFSLPPTSPVRVISGALSFWHEMLQGPVVFSLPQPEPSYFCCSLVHCGRMSCRARDLAPDVLIATGVSLQLAEQGNTSMYMPTRICIHTVSW

SEQ ID NO: 795237 - protein, 183 aa, Homo sapiens
MCACMLHVAVAYVCECICVCVCARAPTSPGSFHPLSLLPPPTLPYSDSLLTSLLSLILPTAIPLPLPPYYAFPPSPSPLRASFPSSPPLLPLFSSAPYALHSAKLLTYSRHYYSSSSSLTLTHPPPAPPRPSSSALLTHSPYPSLHYASRAPTSPHSPLSLALSLLFPLTPLLFVSYITSPLL

SEQ ID NO: 795238 - protein, 101 aa, Homo sapiens
GCETPRLPEIALRALPRPGVSSLGTILCVPSVPVGPIVLTSATPESSRFTRPAPSTVPEAHRHSRILRLAPVPCRCYRPPAPAHTSRSTSLFYESPSTFNV

SEQ ID NO: 795239 - protein, 106 aa, Homo sapiens
MPRMLRDRAWHSTGRWARFGPCAAWRCCARSAWVSAPPGVPGAALGASCLGRERTRAAAGFTRRAAAAITRVSKPRLLNADRPRRPAEAGMGGRPPSRAQTGVAEV

SEQ ID NO: 795240 - protein, 251 aa, Homo sapiens
LYAPDVTGPSMAQHGAMGAFRALCGLALLCALSLGQRPTGGPGCGPGRLLLGTGTDARCCRVHTTRCCRDYPGEECCSEWDCMCVQPEFHCGDPCCTTCRHHPCPPGQGVQSQGKFSFGFQCIDCASGTFSGGHEGHCKPWTDCTQFGFLTVFPGNKTHNAVCVPGSPPAEPLGWLTVVLLAVAACVLLLTSAQLGLHIWQLRSQCMWPRETQLLLEVPPSTEDARSCQFPEEERGERSAEEKGRLGDLWV

SEQ ID NO: 795241 - protein, 273 aa, Homo sapiens
MGAFRALCGLALLCALSLGQRPTGGPGCGPGRLLLGTGTDARCCRVHTTRCCRDYPGEECCSEWDCMCVQPEFHCGDPCCTTCRHHPCPPGQGVQSQGKFSFGFQCIDCASGTFSGGHEGHCKPWTEDPAAAGGAAVDRRRQKLPVPRGRAGRAIGRGEGAAGRPVGVSLAVLRGHRPQPAPPQELPRPQGLCVLLWAGPCSPGSRSGCRKVAVTSALDHAVRRPRLGPAGGRERHSHGPLPPLLALMGWGLRTGGCVRGCAVPSTGPGCRGP

SEQ ID NO: 795242 - protein, 244 aa, Homo sapiens
LYAPDVTGPSMAQHGAMGAFRALCGLALLCALSLGQRPTGGPGCGPGRLLLGTGTDARCCRVHTTRCCRDYPGEECCSEWDCMCVQPEFHCGDPCCTTCRHHPCPPGQGVQSQGKFSFGFQCIDCASGTFSGGHEGHCKPWTDCTQFGFLTVFPGNKTHNAVCVPGSPPAEPLGWLTVVLLAVAACVLLLTSAQLGLHIWQLRKTQLLLEVPPSTEDARSCQFPEEERGERSAEEKGRLGDLWV

SEQ ID NO: 795243 - protein, 109 aa, Homo sapiens
CLHPLLTRTSPGSGFSGHERSQPPPGRAGEDGDGACPTGCGLLKPEHGTARGDGRVSGPVRPGAAVRAQPGSAPHRGSRVRPWAPPAWDGNGRALLPGSHDALLPRLPG

SEQ ID NO: 795244 - protein, 149 aa, Homo sapiens
MFCSEKKLREVERIVKANDREYNEKFQYADNRIHTSKYNILTFLPINLFEQFQRVANAYFLCLLILQLIPEISSLTWFTTIVPLVLVITMTAVKDATDDYFRHKSDNQVNNRQSEVLINSKLQNEKWMNVKVGDIIKLENNQFVALIKD

SEQ ID NO: 795245 - protein, 310 aa, Homo sapiens
MFCSEKKLREVERIVKANDREYNEKFQYADNRIHTSKYNILTFLPINLFEQFQRVANAYFLCLLILQLIPEISSLTWFTTIVPLVLVITMTAVKDATDDYFRHKSDNQVNNRQSEVLINSKLQNEKWMNVKVGDIIKLENNQFVAADLLLLSSSEPHGLCYVETAELDGETNLKVRHALSVTSELGADISRLAGFDGIVVCEVPNNKLDKFMGILSWKDSKHSLNNEKIILRGCILRNTSWCFGMVIFAGPDTKLMQNSGKTKFKRTSIDRLMNTLVLWEIQSGRVKLGTNSELSSFGMKERRALCSPDS

SEQ ID NO: 795246 - protein, 403 aa, Homo sapiens [sequence omitted]

SEQ ID NO: 795247 - protein, 69 aa, Homo sapiens
  misc_feature (2)..(2): Xaa can be any naturally occurring amino acid
  misc_feature (4)..(4): Xaa can be any naturally occurring amino acid
GXAXTGCEKTTEGTQCRQNQALSKCSLVIFRHQSKLEFWIGVKKSRHITQITECFKSPPCHTRPGYNCI

SEQ ID NO: 795248 - protein, 73 aa, Homo sapiens
  misc_feature (18)..(18): Xaa can be any naturally occurring amino acid
MRTKSEREIHLCVLGFFXFFFETGSRSVAQAGVQRHSHGSLQPRPPGLIQFSHLSLPSSWDYRHAPPHLVNFL

SEQ ID NO: 795249 - protein, 68 aa, Homo sapiens
SAQPEDCEDGEDAPRPGREVTGTQTGGDGRGAQWFTPVIPALWQVEACGSPKVRSSRPAWPTWRNCLY

SEQ ID NO: 795250 - protein, 101 aa, Homo sapiens
TLHTLPEGSHPSPWRQPPPEDPLGLNCLLSATPSSPASSVFLPGWNAPQHCQLNLLTKTQLVISPLGQPWLPGSWTWSPRSKIQGSLIWTELDGKVLMFQC

SEQ ID NO: 795251 - protein, 178 aa, Homo sapiens
PAAELTGSVCTTGRAALAKNSALPSSTCEPPLDSEPGRLKEPGALHTPHPGPGPGPTTEAEAAGTALAPQVPRRVAGPLAEALPRPSEMGAGGASFRALAWASLPLLGPPACALCEDTLCCGESPQERPGSRRSLPGSLSEKSPSMEPSAATPFRVTVTISASPTPPLPPPSPPRPGC

SEQ ID NO: 795252 - protein, 127 aa, Homo sapiens
NAWAPAGLSGAADGARVSAPRPGPVPGGRQHVRGRQRQEEHREVLLLLPAAEAAPAAATEEPLPQPDPACQGVASRKAGLSAQPAWQPFREEPQHGALGRHAVPGHGNYLCVTNTATATTITTSPGV

SEQ ID NO: 795253 - protein, 172 aa, Homo sapiens
PAAELTGSVCTTGRAALAKNSALPSSTCEPPLDSEPGALHTPHPGPGPGPTTEAEAAGTALAPQVPRRVAGPLAEALPRPSEMGAGGASFRALAWASLPLLGPPACALCEDTLCCGESPQERPGSRRSLPGSLSEKSPSMEPSAATPFRVTVTISASPTPPLPPPSPPRPGC

SEQ ID NO: 795254 - protein, 123 aa, Homo sapiens
GVGGSFFLEQMPPPQRLPETALLSSEVLKYPGLHPWTVRVGAPSPPPSVISLPCVLFWGRGHKNWHTVCFQEILTEWIETSHQAHTSSSLCPWRSLSGDSGVWLRLLKCFYCDRGPGYSPTPL

SEQ ID NO: 795255 - protein, 74 aa, Homo sapiens
DYSTAPEYQSVPLRRQREQYKRIQEPQPESETRQIAECIYHLDATDVDSYSFKILIFNMTMHVTCQGIEKLKVQ

SEQ ID NO: 795256 - protein, 69 aa, Homo sapiens
RRAFPLARAAARPDLGPRRPSLRVGTWGCRGSGPGEGPESCPGLELELVGCVVNVETFAAHWTSFLDIQ

SEQ ID NO: 795257 - protein, 69 aa, Homo sapiens; identical to SEQ ID NO: 795256

SEQ ID NO: 795258 - protein, 93 aa, Homo sapiens
KGKTVVARILPFLSTEQAADIFMTTARDLPFLIKKDAQDEVLPCLLSPFSLLLYHLPTVTITSLLQQLMNLPQSAATPAPSNPHFTAVLQNKF

SEQ ID NO: 795259 - protein, 74 aa, Homo sapiens
WGTRTRREGELGIYGQILILLAVVNYTHVNRAAALLYFRRLLALLVGPFPGPSQQGLPPVDACVLPWHRPLCFA

SEQ ID NO: 795260 - protein, 64 aa, Homo sapiens
MVGMTRVAGGLCIGCWMRAEAPMEVQACFAAPPDPSIPSHQCDKVSASRGQEGRDPAQPLLLSS

SEQ ID NO: 795261 - protein, 167 aa, Homo sapiens
MSAEWHCPLVSTLCLFYPECATQGSASSSGARRGRVSLGQRVMRAGLRPLGWQLGLRLPSRAGLVPVSPQASSRRLLRGRCFLERSRGLRATSLRLRLPRSESEHPRLRGRGVNEQCGCSQHAPASLSAPGVPAREHAVESAPDLCPPSRCVDSRSPPGRGGSQRSR

SEQ ID NO: 795262 - protein, 290 aa, Homo sapiens
PKTFPSLHITRGIYIPKIPVSGLQGGCYFLMVGHKNEPARGFPQQAHNHLRKPYGPAWIAYGHSFAVESEHEQAMAAYFTAAQLMKGWKQPENCFSDALERIKPFGNEVTVDKWEPLLNNLGHVCRKLKKYAEALDYHRQALVLIPQNASTYSAIGYIHSLMGNFENAVDYFHTALGLRRDDTFSVTMLGHCIEMYIGDSEAYIGADIKDKLKCYDFDVHTMKTLKNIISPPWDFREFEVEKQTAEETGLTPLETSRKTPDSRPSLEETFEIEMNESDMMLETSMSDHST

SEQ ID NO: 795263 - protein, 347 aa, Homo sapiens
PKTFPSLHITRGIYIPKIPVSGLQGGCYFLMVGHKNEPARGFPQQAHNHLRKPYGPAWIAYGHSFAVESEHEQAMAAYFTAAQLMNRVSFAYAAILDYEYGLTNNSNKLDLKGSSAKLCALHRKTLLCYACRSAVDCQNFTNGEWKTAEKWFLDALEKIKAIGNEVTVDKWEPLLNNLGHVCRKLKKYAEALDYHRQALVLIPQNASTYSAIGYIHSLMGNFENAVDYFHTALGLRRDDTFSVTMLGHCIEMYIGDSEAYIGADIKDKLKCYDFDVHTMKTLKNIISPPWDFREFEVEKQTAEETGLTPLETSRKTPDSRPSLEETFEIEMNESDMMLETSMSDHST

SEQ ID NO: 795264 - protein, 34 aa, Homo sapiens
EGREGYVVGEGGGRVAAALAVSGCPAVSRGSARP

SEQ ID NO: 795265 - protein, 105 aa, Homo sapiens
MALRMEPGKQQAPIPQPQGSRLAPCTEARMQSLSLRASLSTRPHRADHQQHRCGAGRVGEKPIRGCSKKVQSQHLGATGDSEGTHRSNTDRTWPRGNQQPNLNNL

SEQ ID NO: 795266 - protein, 537 aa, Homo sapiens [sequence omitted]

SEQ ID NO: 795267 - protein, 388 aa, Homo sapiens
SLISNSRPRRREAPGSVGAPAAQAATHLGDLRGGGGGGWVESGPGAHAGTPGPPGTERRGAARRDPGEGAAMRAAAAAGGVRTAALALLLGALHWAPARCEEYDYYGWQAEPLHGRSYSKPPQCLDIPADLPLCHTVGYKRMRLPNLLEHESLAEVKQQASSWLPLLAKRCHSDTQVFLCSLFAPVCLDRPIYPCRSLCEAVRAGCAPLMEAYGFPWPEMLHCHKFPLDNDLCIAVQFGHLPATAPPVTKICAQCEMEHSADGLMEQMCSSDFVVKMRIKEIKIENGDRKLIGAQKKKKLLKPGPLKRKDTKRLVLHMKNGAGCPCPQLDSLAGSFLVMGRKVDGQLLLMAVYRWDKKNKEMKFAVKFMFSYPCSLYYPFFYGAAEPH

SEQ ID NO: 795268 - protein, 984 aa, Homo sapiens
MDDRYPALQRAQLRLDFIHANSTTHSFLFGALAELLDNARDAGAERLDVFSVDNEKLQGGFMLCFLDDGCGMSPEEASDIIYFGRSKKRLSTLKFIGQYGNGLKSGSMRIGKDFILFTKKEETMTCVFFSQTFCEEESLSEVVVPMPSWLIRTRESVTDDPQKFAMELSIIYKYSPFKTEAELMQQFDVIYGKCGTLLVIYNLKLLLNGEPELDVKTDKEDILMAGALEDFPARWSFRAYTSVLYFNPWMRIFIQAKRVKTKHLCYCLYRPRKYLYVTSSFKGAFKDEVKKAEEAVKIAESILKEAQIKVNQCDRTSLSSAKDVLQRALEDVEAKQKNLKEKQRELKTARTLSLFYGVNVENRSQAGMFIYSNNRLIKMHEKVGSQLKLKSLLGAGVVGIVNIPLEVMEPSHNKQEFLNVQEYNHLLKVMGQYLVQYCKDTGINNRNLTLFCNEFGYQNDIDVEKPLNSIQYQRRQAMGIPFIIQCDLCLKWRVLPSSTNYQEKEFFDIWICANNPNRLENSCHQVECLPSIPLGTMSTISPSKNEKEKQLRESVIKYQNRLAEQQPQPQFIPVDEITVTSTCLTSAHKENTKTQKIRLLGDDLKHESLSSFELSASRRGQKRNIEETDSDVEYISETKIMKKSMEEKMNSQQQRIPVALPENVKLAERSQRSQIANITTVWRAQPTEGCLKNAQAASWEMKRKQSLNFVEECKVLTEDENTSDSDIILVSDKSNTDVSLKQEKKEIPLLNQEKQELCNDVLAMKRSSSLPSWKSLLNVPMEDVNLSSGHIARVSVSGSCKVASSPASSQSTPVKETVRKLKSKLREILLYFFPEHQLPSELEEPALSCELEQCPEQMNKKLKMCFNQIQNTYMVQYEKKIKRKLQSIIYDSNTRGIHNEISLGQCENKRKISEDKLKNLRIKLALLLQKLQLGGPEGDLEQTDTYLEALLKEDNLLFQNNLNKVTIDARHRLPLEKNEKTSEN

SEQ ID NO: 795269 - protein, 984 aa, Homo sapiens; identical to SEQ ID NO: 795268

SEQ ID NO: 795270 - protein, 120 aa, Homo sapiens
HARPNPQATYQSTSQTLSSLPPHVHGLHMPFIILHQRRASEGIFESCLPGPRPARSHSFPDAIQPCRAACPRAKLVARPTPGTELTFSRVCSLPGISARPPVLRLLMFVCQGQVECSPLG

SEQ ID NO: 795271 - protein, 529 aa, Homo sapiens
RSTWRGRVATAAAPARPGSDMEDIQTNAELKSTQEQSVPAESAAVLNDYSLTKSHEMENVDSGEGPANEDEDIGDDSMKVKDEYSERDENVLKSEPMGNAEEPEIPYSYSREYNEYENIKLERHVVSFDSSRPTSGKMNCDVCGLSCISFNVLMVHKRSHTGERPFQCNQCGASFTQKGNLLRHIKLHTGEKPFKCHLCNYACQRRDALTGHLRTHSVEKPYKCEFCGRSYKQRSSLEEHKERCRTFLQSTDPGDTASAEARHIKAEMGSERALVLDRLASNVAKRKSSMPQKFIGEKRHCFDVNYNSSYMYEKESELIQTRMMDQAINNAISYLGAEALCPLVQTPPAPTSEMVPVISSMYPIALTRAEMSNGAPQELERKSILLPEKSVPSERGLSPNNSGHDSTDTDSNHEERQNHIYQQNHMVLSRARNGMPLLKEVPRSYELLKPPPICPRDSVKVIDKEGEVMDVYRCDHCRVLFLDYVMFTIHMGCHGFRDPFECNMCGDRSHDRYEFSSHIARGEHRSLLK

SEQ ID NO: 795272 - protein, 225 aa, Homo sapiens
MQRLLLLPFLLLGTVSALHLENDAPHLESLETQADLGQDLDSSKEQERDLALTEEVIQAEGEEVKASACQDNFEDEEAMESDPAALDKDFQCPREEDIVEVQGSPRCKTCRYLLVRTPKTFAEAQNVCSRCYGGNLVSIHDFNFNYRIQCCTSTVNQAQVWIGGNLRGWFLWKRFCWTDGSHWNFAYWSPGQPGNGQGSCVALCTKGGYWRRAQCDKQLPFVCSF

SEQ ID NO: 795273 - protein, 350 aa, Homo sapiens
MSKGLPETRTDAAMSELVPEPRPKPAVPMKPMSINSNLLGYIGIDTIIEQMRKKTMKTGFDFNIMVVGQSGLGKSTLVNTLFKSQVSRKASSWNREEKIPKTVEIKAIGHVIEEGGVKMKLTVIDTPGFGDQINNENCWEPIEKYINEQYEKFLKEEVNIARKKRIPDTRVHCCLYFISPTGHSLRPLDLEFMKHLSKVVNIIPVIAKADTMTLEEKSEFKQRVRKELEVNGIEFYPQKEFDEDLEDKTENDKIRQESMPFAVVGSDKEYQVNGKRVLGRKTPWGIIEVENLNHCEFALLRDFVIRTHLQDLKEVTHNIHYETYRAKRLNDNGGLPPVSVDTEESHDSNP

SEQ ID NO: 795274 - protein, 350 aa, Homo sapiens; identical to SEQ ID NO: 795273

SEQ ID NO: 795275 - protein, 158 aa, Homo sapiens
MKHLSKVVNIIPVIAKADTMTLEEKSEFKQRVRKELEVNGIEFYPQKEFDEDLEDKTENDKIRQESMPFAVVGSDKEYQVNGKRVLGRKTPWGIIEVENLNHCEFALLRDFVIRTHLQDLKEVTHNIHYETYRAKRLNDNGGLPPVSVDTEESHDSNP

SEQ ID NO: 795276 - protein, 158 aa, Homo sapiens; identical to SEQ ID NO: 795275

SEQ ID NO: 795277 - protein, 358 aa, Homo sapiens
MSKGLPETRTDAAMSELVPEPRPKPAVPMKPMSINSNLLGYIGIDTIIEQMRKKTMKTGFDFNIMVVGQSGLGKSTLVNTLFKSQVSRKASSWNREEKIPKTVEIKAIGHVIEEGGVKMKLTVIDTPGFGDQINNENCWEPIEKYINEQYEKFLKEEVNIARKKRIPDTRVHCCLYFISPTGHSLRPLDLEFMKHLSKVVNIIPVIAKADTMTLEEKSEFKQRVRKELEVNGIEFYPQKEFDEDLEDKTENDKIRQESMPFAVVGSDKEYQVNGKRVLGRKTPWGIIEVENLNHCEFALLRDFVIRTHLQDLKEVTHNIHYETYRAKRLNDNGGLPPGEGLLGTVLPPVPATPCPTAE

SEQ ID NO: 795278 - protein, 263 aa, Homo sapiens
MSKGLPETRTDAAMSELVPEPRPKPAVPMKPMSINSNLLGYIGIDTIIEQMRKKTMKTGFDFNIMVVAEEPIEKYINEQYEKFLKEEVNIARKKRIPDTRVHCCLYFISPTGHSLRPLDLEFMKHLSKVRKELEVNGIEFYPQKEFDEDLEDKTENDKIRQESMPFAVVGSDKEYQVNGKRVLGRKTPWGIIEVENLNHCEFALLRDFVIRTHLQDLKEVTHNIHYETYRAKRLNDNGGLPPGEGLLGTVLPPVPATPCPTAE

SEQ ID NO: 795279 - protein, 350 aa, Homo sapiens; identical to SEQ ID NO: 795273

SEQ ID NO: 795280 - protein, 103 aa, Homo sapiens
RKYLQTMHPTKDEYPESTRRYFICLLPAAGLHTLNRSQPPCREKASWALSFHLCQPPPAPLLNEGHFKRCFSLHSSQLLLLQGQALFSAVLVQLTTTAPLSPQ

SEQ ID NO: 795281 - protein, 350 aa, Homo sapiens; identical to SEQ ID NO: 795273

SEQ ID NO: 795282 - protein, 90 aa, Homo sapiens
MKLTVIDTPGFGDQINNENWYLSASEIFALKTLLGRYLLWCRFIHVENHLHPPCSVVPDSPGQGPWGAPPLLTNHPGKPSVRGLRGNLAA

SEQ ID NO: 795283 - protein, 1939 aa, Homo sapiens
MSSDSEMAIFGEAAPFLRKSEKERIEAQNKPFDAKTSVFVVDPKESYVKAIVQSREGGKVTAKTEAGATVTVKEDQVFSMNPPKYDKIEDMAMMTHLHEPAVLYNLKERYAAWMIYTYSGLFCVTVNPYKWLPVYNPEVVTAYRGKKRQEAPPHIFSISDNAYQFMLTDRENQSILITGESGAGKTVNTKRVIQYFATIAVTGEKKKEEPASGKMQGTLEDQIISANPLLEAFGNAKTVRNDNSSRFGKFIRIHFGATGKLASADIETYLLEKSRVTFQLKAERSYHIFYQILSNKKPELIEMLLITTNPYDFAFVSQGEITVPSIDDQEELMATDSAVDILGFTADEKVAIYKLTGAVMHYGNMKFKQKQREEQAEPDGTEVADKAAYLTSLNSADLLKSLCYPRVKVGNEFVTKGQTVQQVYNAVGALAKAIYEKMFLWMVTRINQQLDTKQPRQYFIGVLDIAGFEIFDFNSLEQLCINFTNEKLQQFFNHHMFVLEQEEYKKEGIEWEFIDFGMDLAACIELIEKPMGIFSILEEECMFPKATDTSFKNKLYEQHLGKSNNFQKPKPAKGKPEAHFSLVHYAGTVDYNIAGWLDKNKDPLNETVVGLYQKSAMKTLAFLFSGAQTAEAEGGGGKKGGKKKGSSFQTVSALFRENLNKLMTNLRSTHPHFVRCIIPNETKTPGAMEHELVLHQLRCNGVLEGIRICRKGFPSRILYADFKQRYKVLNASAIPEGQFIDSKKASEKLLGSIEIDHTQYKFGHTKVFFKAGLLGTLEEMRDEKLAQLITRTQAICRGFLMRVEFRKMMERRESIFCIQYNIRAFMNVKHWPWMKLYFKIKPLLKSAETEKEMANMKEEFEKTKEELAKTEAKRKELEEKMVTLMQEKNDLQLQVQAEADALADAEERCDQLIKTKIQLEAKIKEVTERAEDEEEINAELTAKKRKLEDECSELKKDIDDLELTLAKVEKEKHATENKVKNLTEEMAGLDETIAKLTKEKKALQEAHQQTLDDLQMEEDKVNTLTKAKTKLEQQVDDLEGSLEQEKKLCMDLERAKRKLEGDLKLAQESTMDTENDKQQLNEKLKKKEFEMSNLQGKIEDEQALAMQLQKKIKELQARIEELEEEIEAERASRAKAEKQRSDLSRELEEISERLEEAGGATSAQIELNKKREAEFQKMRRDLEESTLQHEATAAALRKKHADSVAELGKQIDSLQRVKQKLEKEKSELKMEINDLASNMETVSKAKANFEKMCRTLEDQLSEIKTKEEEQQRLINELSAQKARLHTESGEFSRQLDEKDAMVSQLSRGKQAFTQQIEELKRQLEEETKAKSTLAHALQSARHDCDLLREQYEEEQEAKAELQRGMSKANSEVAQWRTKYETDAIQRTEELEEAKKKLAQRLQDAEEHVEAVNSKCASLEKTKQRLQNEVEDLMIDVERSNAACIALDKKQRNFDKVLAEWKQKYEETQAELEASQKESRSLSTELFKVKNAYEESLDHLETLKRENKNLQQEISDLTEQIAEGGKHIHELEKVKKQLDHEKSELQTSLEEAEASLEHEEGKILRIQLELNQVKSEIDRKIAEKDEELDQLKRNHLRVVESMQSTLDAEIRSRNDALRIKKKMEGDLNEMEIQLNHANRQAAEALRNLRNTQGILKDTQLHLDDAIRGQDDLKEQLAMVERRANLMQAEVEELRASLERTERGRKMAEQELLDASERVQLLHTQNTSLINTKKKLETDISQIQGEMEDIVQEARNAEEKAKKAITDAAMMAEELKKEQDTSAHLERMKKNMEQTVKDLQLRLDEAEQLALKGGKKQIQKLEARVRELESEVESEQKHNVEAVKGLRKHERRVKELTYQTEEDRKNILRLQDLVDKLQTKVKAYKRQAEEAEEQSNVNLAKFRKLQHELEEAEERADIAESQVNKLRVKSREVHTKVISEE

SEQ ID NO: 795284 - protein, 154 aa, Homo sapiens
MKKNMEQTVKDLQLRLDEAEQLALKGGKKQIQKLEARVRELESEVESEQKHNVEAVKGLRKHERRVKELTYQTEEDRKNILRLQDLVDKLQTKVKAYKRQAEEAEEQSNVNLAKFRKLQHELEEAEERADIAESQVNKLRVKSREVHTKVISEE

SEQ ID NO: 795285 - protein, 99 aa, Homo sapiens
MTPPELDAASPAQGKHPDGCLIPYTQILYPPGTRRSRPRASLQKEFAQHNQFSRSVHPTISDSSLKAVEPRTKDAMGSVSAKTLAAGSAAHLGFKPRLL

SEQ ID NO: 795286 - protein, 107 aa, Homo sapiens
VVFQRSLTPFHKKKRGQNPRETPAGLQELGCMKPPRCQGCVLRQLACLGNTQPLPYPWLSFPAEPRTGVCVGKQGHLVHTGSQHAREESQAWVCSDCVLQFSDILDL

SEQ ID NO: 795287 - protein, 130 aa, Homo sapiens
MTNRKTTSTCPLPYGRRSYDSRNNETLNPLKFYKSSLCQTQRGVAARCQREEHVDCRCQRSPVRVPCFLSVPGRPQLVAKSSCRFPVCAPTLPVSRQKRRRPGEKQTPLIGLRLAAQLCPSLPQATCPRP

SEQ ID NO: 795288 - protein, 90 aa, Homo sapiens
SSQRGGGIEFSRSPQPRSPWAVAVAAAAPARQPIGSWARSARGGRWAERRARSEVVGFVRAGSMGSLLSVGSWKRWSLERLMRYLIHPAN

SEQ ID NO: 795289 - protein, 70 aa, Homo sapiens
GCRARAAPPEGRQGLTTESAGASSREEGRAARAEVVGFVRAGSMGSLLSVGSWKRWSLERLMRYLIHPAN

SEQ ID NO: 795290 - protein, 121 aa, Homo sapiens
GARALVQHFGWGAGFSHGPTPAFPFGFGEACARPHPWQQCLSPSQEGLGKTAPQHPIQAGLPSPRENGLWIEGDKLDFMTLNGGGLRGGAKPGGLQDHTTHFSKETEGQELGKAGPLFFFL

SEQ ID NO: 795291 - protein, 211 aa, Homo sapiens
DGGRYPDMPTAADVVNALDQQALASILRTYGEEKHAKKIASAIVQARSIYPITRTQQLASIVAGAFPPSAIYTRKDLLQRSTHIATKTFQALRIFVNNELNELYTGLKTAQKFLRPGGRLVALSFHSLEDRIVKRFLLGISMTERFNLSVRQQVMKTSQLGSDHENTEEVSMRRAPLMWELIHKKVLSPQDQDVQDNPRGRSAKLRAAIKL

SEQ ID NO: 795292 - protein, 268 aa, Homo sapiens
ARPRNLRLGTRPGCPGRAGLDMLPDCLSAEGELRCRRLLAGATARLRARPASAAVLVPLCSVRGVPALLYTLRSSRLTGRHKGDVSFPGGKCDPADQDVVHTALRETREELGLAVPEEHVWGLLRPVYDPQKATVVPVLAGVGPLDPQSLRPNSEEVELGDMRGLGCSSPLSTLSASCLQVDEVFALPLAHLLQTQNQGYTHFCRGGHFRYTLPVFLHGPHRVWGLTAVITEFALQLLAPGTYQPRLAGLTCSGAEGLARPKQPLASP

SEQ ID NO: 795293 - protein, 244 aa, Homo sapiens
ARPRNLRLGTRPGCPGRAGLDMLPDCLSAEGELRCRRLLAGATARLRARPASAAVLVPLCSVRGVPALLYTLRSSRLTGRHKGDVSFPGGKCDPADQDVVHTALRETREELGLAVPEEHVWGLLRPVYDPQKATVVPVLAGVGPLDPQSLRPNSEEVDEVFALPLAHLLQTQNQGYTHFCRGGHFRYTLPVFLHGPHRVWGLTAVITEFALQLLAPGTYQPRLAGLTCSGAEGLARPKQPLASP

SEQ ID NO: 795294 - protein, 465 aa, Homo sapiens
ARPRNLRLGTRPGCPGRAGLDMLPDCLSAEGELRCRRLLAGATARLRARPASAAVLVPLCSVRGVPALLYTLRSSRLTGRHKGDVRYSGRELLALCRRLQEPGAGRDLWQGTSAPSSLGFRLRKMGLGRVPPPKGCSESQRSVSVGPGAPAGAPRPRRVGPSYASLRARLGRDTPLSCFPLRGGAAPAGDYGEVRAPPAGIKNILEDNVSVAGATIGRIWVSEPQDLLAPAADPLILRCPGPLFLIPIAQGGKLASRGRMACLGPPSKLGAEAGDTSVGQWPPPHCRYPDLSVAPRVQGPDSLCLFSFPGGKCDPADQDVVHTALRETREELGLAVPEEHVWGLLRPVYDPQKATVVPVLAGVGPLDPQSLRPNSEEVDEVFALPLAHLLQTQNQGYTHFCRGGHFRYTLPVFLHGPHRVWGLTAVITEFALQLLAPGTYQPRLAGLTCSGAEGLARPKQPLASP

SEQ ID NO: 795295 - protein, 468 aa, Homo sapiens
MLPDCLSAEGELRCRRLLAGATARLRARPASAAVLVPLCSVRGVPALLYTLRSSRLTGRHKGDVRYSGRELLALCRRLQEPGAGRDLWQGTSAPSSLGFRLRKMGLGRVPPPKGCSESQRSVSVGPGAPAGAPRPRRVGPSYASLRARLGRDTPLSCFPLRGGAAPAGDYGEVRAPPAGIKNILEDNVSVAGATIGRIWVSEPQDLLAPAADPLILRCPGPLFLIPIAQGGKLASRGRMACLGPPSKLGAEAGDTSVGQWPPPHCRYPDLSVAPRVQGPDSLCLFSFPGGKCDPADQDVVHTALRETREELGLAVPEEHVWGLLRPVYDPQKATVVPVLAGVGPLDPQSLRPNSEEVELGDMRGLGCSSPLSTLSASCLQVDEVFALPLAHLLQTQNQGYTHFCRGGHFRYTLPVFLHGPHRVWGLTAVITEFALQLLAPGTYQPRLAGLTCSGAEGLARPKQPLASP

SEQ ID NO: 795296 - protein, 145 aa, Homo sapiens
RCRSAAPQAGRVARAAPSPSQLSEGPGLSAPPRLAPPLPSPDPAPSVSRRAGLDMLPDCLSAEGELRCRRLLAGATARLRARPASAAVLVPLCSVRGVPALLYTLRSSRLTGRHKGDVRYSGRELLALCRRLQEPGAGRDLWQGT

SEQ ID NO: 795297 - protein, 93 aa, Homo sapiens
LRAAGIRYERHFTPAWVTVETPSHIEVIFFVKISIVLLSSSHSTKHLQGQSHDQPPAAAHSWLLVKSRITSLCLRDLFCKIRRLASIKRPLVL

SEQ ID NO: 795298 - protein, 395 aa, Homo sapiens [sequence omitted]

SEQ ID NO: 795299 - protein, 148 aa, Homo sapiens
GRTRPFFSSGTHLHPVCRWRPILEWIKSLERSRCLGRSIQGGMAEQLASSQRSVPCPLLPSIPVASELTGKLAFFFFFLKCSLAVLPRLVWNSWVQATLPPRPPESWGYRHEPLHPAETLLHTGSHPPRPQTPGLLLWEWLSGNDSSV

SEQ ID NO: 795300 - protein, 109 aa, Homo sapiens
NKPLGSKSPAGCTCGFPLSANSSLCSPSAPHFSKAKHLTVICSMLPVRFLYFYSPVCGLSLCGCGRGAGYFYFSGIFLLSWEDFHFLPSLSVLPFMGCSGHETTSPNPS

SEQ ID NO: 795301 - protein, 109 aa, Homo sapiens; identical to SEQ ID NO: 795300

SEQ ID NO: 795302 - protein, 107 aa, Homo sapiens
MKQEWSQGYRALPSLSNHGSQNGLDLGDLLSLPPGTSMSSNSVSNSLPSYLFGTESSHSPYPSPRHSSTRSHSARSKKRALSLSPLSDGIGIDFNTIIRTSPTSLVA

SEQ ID NO: 795303 - protein, 173 aa, Homo sapiens
MVQRLGLISPPASQVSTACNQISPSLQRAMNAANLNIPPSDTRSLISRESLASTTLSLTESQSASSMKQEWSQGYRALPSLSNHGSQNGLDLGDLLSLPPGTSMSSNSVSNSLPSYLFGTESSHSPYPSPRHSSTRSHSARSKKRALSLSPLSDGIGIDFNTIIRTSPTSLVA

SEQ ID NO: 795304 - protein, 158 aa, Homo sapiens
RQQERASGKRGSQPTCVGCSQLPRDLSPGRPWEEKAPSQRLPGRRNPAQEELPGARPGSPPQASRLASPPLPSSCGVCLQPSLDSHAGLTLQRCATALQKPDDSARAGMKCDPAREGGRPLRFGSGRASSLGSGLGLAELRGSLLRAGLLHHLPRVAK

SEQ ID NO: 795305 - protein, 119 aa, Homo sapiens
VKVHSECACVSTGDFTAEEPEAENNFMTLPCSDLAESEPGVSLFFHMTPFTEKFTEELFRGKQPLLAFAYFSLTSLHPGRLSTPLHPTLPHPFPGRSCQSSWAESMNELEFSFNHCLLK

SEQ ID NO: 795306 - protein, 452 aa, Homo sapiens
MLACLQRTQNAPGQHLACPSKSLELRKCEAVASAMHSSRYPSPAELDAYAEKVANSPLSIKIFPTNIRVPQHKHLSRTVNGYDTSGQRYSPYPQHTAGYQGLLAIVKAAVSSSSTAAPAGPAKSVLKSAEGKRTKLSPAAVQVGIAPYPVPSTLGPLAYPKPPEAPAPPPGLPAAATAASVIPLPGRGLPLPPSNLPSIHSLLYQLNQQCQAPGAAPPACQGMAIPHPSPAKHGPVPSFPSMAYSAAAGLPDCRKGTELGQGATQALTLAGAAKPAGYADSGLDYLLWPQKPPPPPPQPLRAYSGSTVASKSPEACGGRAYERASGSPLNCGVGLPTSFTVGQYFAAPWNSVLVTPTSDCYNPAAAVVVTELGPGAARELAGPPADALSGLPSKSVCNTSVLSSSLQSLEYLINDIRPPCIKEQMLGKGYETVAVPRLLDHQHAHIRLPVYR

SEQ ID NO: 795307 - protein, 269 aa, Homo sapiens [sequence omitted]

SEQ ID NO: 795308 - protein, 297 aa, Homo sapiens
MSGEEPGPLRVRATPEGDNPSTSGRTRGLQAAGGRASERKQQRQAAAGAGEMVACVLPVCLPCCCVLEMCAALCELAAVCLMLAWPLMLWCPDVWMCCMLPPCLGLLADQLCATCAGQIAVLPLMLASVCWTPLITVWSVAVEPTLLETVSSLSPSATTDFPGSGDCHVPGADPSGIKRPVQAGNNGWAPILYTKSTVGERDRRSLRKDTPKGEQGALTVLRGGQGPHSLSQAQFFLCWTVVWSFFRGSKHGPAITGPGGQKLDWYHIAVMAYRRVLTANQRFVGIDAAPFYLRSKH

SEQ ID NO: 795309 - protein, 452 aa, Homo sapiens; identical to SEQ ID NO: 795306

SEQ ID NO: 795310 - protein, 370 aa, Homo sapiens
MLACLQRTQNAPGEAGRRTGWAARRGAQPHPVPADAHRGARLAAASLWPDGGWQGNLTYQGPSPPSVAPGHSEGLGAATDAHAFLYLSWQRQGERNHSKTGMVLSGPPGTGAQAKVGCRRKQAHQSQGGGRAAPPGVRQLCLPTLAPQYSGKGVQEADRKSLGPKCLPTSQVKTTLTEAPGTIPVPLFLLPLPPPFLPNTELHPHPHSPNPGLPYSPFPPIHLIGLLGTVVQAVHCTRAPCPRRHHFHPNLYIYYNFLHLEEGASFSCSHKGTTGANSGPAILDPILAFFEGSLGTLLVLTGRPRPTPFLQTTLQGLSHTIKAGKDRQESPHEVLKSWPLWRSGSGTVSLSKAWSSTKCIYKSLRMFFLY

SEQ ID NO: 795311 - protein, 105 aa, Homo sapiens [sequence omitted]

SEQ ID NO: 795312 - protein, 52 aa, Homo sapiens
MNVSQCLAQNRHLINICLMISKLSIVGLMRSQHLLSISFVAHASSLQHLLDL

SEQ ID NO: 795313 - protein, 169 aa, Homo sapiens
MKTSFSYFSDWHPTNLTLSDETCQRSKNLKVDDKCPSVSPSMPENQSATKELGQMNLTEREKMDTGVVLLSGNDTLHDLCQSQLPENKESKEAEQDLELTSEEEQERLKGCENKQPQKTSQEPEMAKDCDREDIPIYPVLPHVQKSEEMWIEQGKLEWKNQLKLVINEL

SEQ ID NO: 795314 - protein, 306 aa, Homo sapiens
RAPRQVQSPLPPNVFSPARLPFFPAEGGPGRSRWREGGYLSQSRSGRLSQEEAAARSAGGMAGAPDERRRGPAAGEQLQQQHVSCQVFPERLAQGNPQQGFFSSFFTSNQKCQLRLLKTLETNPYVKLLLDAMKHSGCAVNKDRHFSCEDCNGNVSGGFDASTSQIVLCQNNIHNQAHMNRVVTHELIHAFDHCRAHVDWFTNIRHLACSEVRAANLSGDCSLVNEIFRLHFGLKQHHQTCVRDRATLSILAVRNISKEVAKKAVDEVFESCFNDHEPFGRIPHNKTYARYAHRDFENRDRYYSNI

SEQ ID NO: 795315 - protein, 306 aa, Homo sapiens; identical to SEQ ID NO: 795314

SEQ ID NO: 795316 - protein, 71 aa, Homo sapiens
FSSFFTSNQKCQLRLLKTLETSRSHDLEAVVPQNGSETGWARKGLGNTWPGASGSAQSLDRLGIMGAGLGA

SEQ ID NO: 795317 - protein, 75 aa, Homo sapiens
HLPPEEFQSLPQGCGVEPRASRVDQVLPLSRTRRLSPAMQLSCSRCLSLRNRETAMSIVDSRSSLGDRVKRHLKK

SEQ ID NO: 795318 - protein, 114 aa, Homo sapiens [sequence omitted]

SEQ ID NO: 795319 - protein, 77 aa, Homo sapiens
MATSRGASRCPRDIANVMQRLQDEQEIVQKRTFTKWINSHLAKRKPPMVVDDLFEDMKDGVKLLALLEVLSGQKLVR

SEQ ID NO: 795320 - protein, 163 aa, Homo sapiens
TWACLICTAPIGGRSPHPILQGRTPGTERQEHRPRSHSQTLWGSRIGTQAAWPQSQHSLCSFRSLCLAAPPSSSSPLSSSHSNQPFLGTPQSEAVSRHIPQPPQSLGLTSLPRQESMARSQLTATSTSQAEAEESLEPRRQRLQGAKNMPLHSSLGNRARLCL

SEQ ID NO: 795321 - protein, 140 aa, Homo sapiens
TWACLICTAPIGGRSPHPILQGRTPGTERQEHRPRSHSQTLWGSRIGTQAAWPQSQHSLCSFRSLCLAAPPSSSSPLSSSHSNQPFLGTPQSEAVSRHIPQPPQSLGLTSLPRQESMARSQLTATSTSQVQEILLPQPPK

SEQ ID NO: 795322 - protein, 301 aa, Homo sapiens
VYLPTTFFFLPLLPSTLLLSFSSSSLYFLLFLVFFLFFLLCFFFFFSSSSSPPPASPPASSPPRVLELPGVPAAAFSDVLNFIYSARLALPGGGGDGAAVAEIGALGRRLGISRLQGLGEGGDAWVPPTPAPMATSQPEEDSFGPGPRPAGEWEGDRAEAQAPDLQCSLPRRPLPCPQCGKSFIHPKRLQTHEAQCRRGASTRGSTGLGAGGAGPGGPAGVDASALPPPVGFRGGPEHVVKVVGGHVLYVCAACERSYVTLSSLKRHSNVHSWRRKYPCRYCEKVFALAEYRTKHEVWHTG

SEQ ID NO: 795323 - protein, 172 aa, Homo sapiens
WGLGVTPRRCRQWDEEAFYPHPPQPLTSRSPRSFRKVDTGTDPVDTLTQTRRRVGLACTQDRKTSRWPGNFFQAKPESSPDTAARRPFCLLARPGPECAPAGKRKRPTAICCEEYIRSQTVDLFSPARSKTTSLRSCAPLRKVQMKELIPLDLSSCSEWRKNIYHPFHQSSA

SEQ ID NO: 795324 - protein, 109 aa, Homo sapiens
WGLGVTPRRCRQWDEEAFYPHPPQPLTSRSPRSFRKVDTGTDPVDTLTQTRRRVGLACTQDRKTSRWPGNFFQAKPESSPDTAARRPFCLLARPGPECAPAGREELRAV

SEQ ID NO: 795325 - protein, 109 aa, Homo sapiens; identical to SEQ ID NO: 795324

SEQ ID NO: 795326 - protein, 107 aa, Homo sapiens
QSQTLAEESISQNLGEEKRPRQGLRVPKQPLKLQELPQKGCYKPRLTTNIRTILLGEGQITGWGDWRRIVCIKDPHISGAFHQSVMCDVYSFILPTLGGLVFIIRKI

SEQ ID NO: 795327 - protein, 81 aa, Homo sapiens
MGSTQFELPSSFAYTVVVKPPAQASATADAPPPTKRHRPRWISDCCCAGSENFKPVDLTFLGSMGVGTAEPDHLAPWLQAP

SEQ ID NO: 795328 - protein, 157 aa, Homo sapiens
FRPVDGLFLNILESLGEREVCSSVGHLCITNTESTASGAWTRSGKSAFFWMPPAFAIICLGGWKLLKRLKEKSLFLLQLIWSYVMCSPSEVSRKLCAVFCPGNNTPAPWPRCIISHSSSLLSMAPEVKSSEMPKLPDVNIFTAWRKPHRSYLTCLGW

SEQ ID NO: 795329 - protein, 136 aa, Homo sapiens
CGRDGEDEQGFYTRRQKGTSAKENENTRPGEAAGMRAVVVLRGRFERVRPLGSWSQAWEKLLHVRPGAVALATSTPPGNPPPRGLSLPRPGPGGAHGSRDLPNNPCRWLHKPQPVLQPGMPFPPGCLLLSLLSLDN

SEQ ID NO: 795330 - protein, 367 aa, Homo sapiens
QRESWVLRERKVVVIDTPDLFSSIACAEDKQRNIQHCLELSAPSLHALLLVIAIGHFTREDEETAKGIQQVFGAEARRHIIIVFTRKDDLGDDLLQDFIEKNKPLKQLVQDYEGRYCIFNNKTNSKDEQITQVLELLRKVESLVNTNGGPYHVNFKTEGSRFQDCVNEAASQEGDKPQGPRERQLQSTGPEQNPGTSELTVLLVGKRGAGKSAAGNSILGRQAFQTGFSEQSVTQSFLSESRSWRKKKVSIIDAPDISSLKNIDSEVRKHICTGPHAFLLVTPLGFYTKNDEAVLSTIQNNFGEKFFEYMIILLTRKEDLGDQDLDTFLRNSNKALYGLIQKCKNRYSAFNYRATGEEEQRQADELL

SEQ ID NO: 795331 - protein, 398 aa, Homo sapiens
MSEQSCQMSELRLLLLGKCRSGKSATGNAILGKHVFKSKFSDQTVIQTPDLFSSIACAEDKQRNIQHCLELSAPSLHALLLVIAIGHFTREDEETAKGIQQVFGAEARRHIIIVFTRKDDLGDDLLQDFIEKNKPLKQLVQDYEGRYCIFNNKTNSKDEQITQVLELLRKVESLVNTNGGPYHVNFKTEGSRFQDCVNEAASQEGDKPQGPRERQLQSTGPEQNPGTSELTVLLVGKRGAGKSAAGNSILGRQAFQTGFSEQSVTQSFLSESRSWRKKKVSIIDAPDISSLKNIDSEVRKHICTGPHAFLLVTPLGFYTKNDEAVLSTIQNNFGEKFFEYMIILLTRKEDLGDQDLDTFLRNSNKALYGLIQKCKNRYSAFNYRATGEEEQRQADELL

SEQ ID NO: 795332 - protein, 147 aa, Homo sapiens
QTPLHTQPRSCLPGLLTAEPPLPAGRAKAKPPGGPRGSRRQHSPHRTRRFHRGAAANRATYSPHPRGRFAPAQVAASASNSQNPPRRRLPFADFGPGAWALPRGWEPGNRFLDLSGARKSAPPARLDWSGRVPWRPLGIAVLAQVER

SEQ ID NO: 795333 - protein, 97 aa, Homo sapiens
SKTSLPRPRAGARPGRGLSSRPGTTPLPTLHSLPKGLEKREEEHQDPPPRHVTRRNADEKTQDSETIKVTEMKLTEPEFQVMILYGFFGAALDLSSD

SEQ ID NO: 795334 - protein, 147 aa, Homo sapiens; identical to SEQ ID NO: 795332

SEQ ID NO: 795335 - protein, 147 aa, Homo sapiens; identical to SEQ ID NO: 795332

SEQ ID NO: 795336 - protein, 97 aa, Homo sapiens; identical to SEQ ID NO: 795333

SEQ ID NO: 795337 - protein, 171 aa, Homo sapiens
MEVCQKLQDALKCQHCRKQFKSKAGLNYHTMAEHSAKPSDAEASEGGEQEERERLRKVLKQMGRLRCPQEGCGAAFSSLMGYQYHQRRCGKPPCEVDSPSFPCTHCGKTYRSKAGHDYHVRSEHTAPPHRESVDALSVGSWAGPRVPKLCAAWGLSTASSCPAVVRLSAAK

SEQ ID NO: 795338 - protein, 1043 aa, Homo sapiens
PPAPARPGPAAAPLGAAEMTDPFCVGGRRLPGSSKSGPGKDGSRKEVRLPMLHDPPKMGMPVVRGGQTVPGQAPLCFDPGSPASDKTEGKKKGRPKAENQALRDIPLSLMNDWKDEFKAHSRVKCPNSGCWLEFPSIYGLKYHYQRCQGGAISDRLAFPCPFCEAAFTSKTQLEKHRIWNHMDRPLPASKPGPISRPVTISRPVGVSKPIGVSKPVTIGKPVGVSKPIGISKPVSVGRPMPVTKAIPVTRPVPVTKPVTVSRPMPVTKAMPVTKPITVTKSVPVTKPVPVTKPITVTKLVTVTKPVPVTKPVTVSRPIVVSKPVTVSRPIAISRHTPPCKMVLLTRSENKAPRATGRNSGKKRAADSLDTCPIPPKQARPENGEYGPSSMGQSSAFQLSADTSSGSLSPGSRPSGGMEALKAAGPASPPEEDPERTKHRRKQKTPKKFTGEQPSISGTFGLKGLVKAEDKARVHRSKKQEGPGPEDARKKVPAAPITVSKEAPAPVAHPAPGGPEEQWQRAIHERGEAVCPTCNVVTRKTLVGLKKHMEVCQKLQDALKCQHCRKQFKSKAGLNYHTMAEHSAKPSDAEASEGGEQEERERLRKVLKQMGRLRCPQEGCGAAFSSLMGYQYHQRRCGKPPCEVDSPSFPCTHCGKTYRSKAGHDYHVRSEHTAPPPEEPTDKSPEAEDPLGVERTPSGRVRRTSAQVAVFHLQEIAEDELARDWTKRRMKDDLVPETARLNYTRPGLPTLNPQLLEAWKNEVKEKGHVNCPNDCCEAIYSSVSGLKAHLASCSKGAHLAGKYRCLLCPKEFSSESGVKYHILKTHAENWFRTSADPPPKHRSQDSLVPKKEKKKNLAGGKKRGRKPKERTPEEPVAKLPPRRDDWPPGCRDKGARGSTGRKVGVSKAPEEVSMVRGAWPPCSRHTALCSRQGQLRDLCPPVLHPPPPPLHPSSGAASHSPFPEGGPSPVKAATGHTWVGAPQGVPSRSAIARRVAPPHGNVSGVLVPQGLQRRVGRWPLAPRLRFLRPCRVPSLATPRLRHPW

SEQ ID NO: 795339 - protein, 175 aa, Homo sapiens
PEDARKKVPAAPITVSKEAPAPVAHPAPGRGCLAGAQGSSRRRVDPTAQGWGLSVELDSVPGVWATQQPPQAFEAPALPTGGPEEQWQRAIHERGEAVCPTCNVVTRKTLVGLKKHMEVCQKVRQLPEGAGREAPWPQAGFSHVGHLQLQDALKCQHCRKQFKSKAGLNYHTMAE

SEQ ID NO: 795340 - protein, 92 aa, Homo sapiens
VTKPVPVTKPITVTKLVTVTKPVPVTKPVTVSRPIVVSKPVTVSRPIAISRHTPPCKMVLLTRSENKAPRATGRNSGKKRYGGSSQVGEEQW

SEQ ID NO: 795341 - protein, 1043 aa, Homo sapiens; identical to SEQ ID NO: 795338

SEQ ID NO: 795342 - protein, 1043 aa, Homo sapiens; identical to SEQ ID NO: 795338

SEQ ID NO: 795343 - protein, 241 aa, Homo sapiens
AVSSPAAGACLVLKAVSSPAAGACLVLKAVSSPAAGACLVLKAVSSPAAGACLVLKAVSSPLLQVLAWSRRLCPALLQVLAWSRRLCPALLQVLAWSRRLCPAPCRCLPGPEGCVQPPAAGACLVLKAVSSPAAGACLVLKADRSSALRLCLAQVLSIQSQVFISAFLSPELVPNISRPTSQTQEPGLIGAQEGKEEKSGRWKEAGPKAQGADPRGACGQAAPAPGRLASRMQRQGGPGLH

SEQ ID NO: 795344 - protein, 134 aa, Homo sapiens
ENFLKSSISSIMPPTTARPAPQSWAARRDTAPHTSFTTMLSSHVLSRPSCCRILLTWRRASRSLQAIEQGVRTCFPGPRDVPSVTHSLPILRCPYRREEKLTQAMARLEQNALEAETQEGPPPLEVPSTLKNKV

SEQ ID NO: 795345 - protein, 111 aa, Homo sapiens
NGALEIVVVIPKAWKKEVFSGPRPVFWPVTVALQCLELRWFFLGVEPGNRDFPAMFCVLLAGEGWLTNSDPAQCFCGSKLENYVQARPRRKDPFRPGVKELPGQHGATPSL

SEQ ID NO: 795346 - protein, 111 aa, Homo sapiens; identical to SEQ ID NO: 795345

SEQ ID NO: 795347 - protein, 111 aa, Homo sapiens; identical to SEQ ID NO: 795345

SEQ ID NO: 795348 - protein, 137 aa, Homo sapiens
MLKRHLGVGRPTREEQQQETVTPPPPYQWGCSQGWRNKGREPRTWTAQGSWSHEADGLTARAATQIWRSGGIPRLLFFLCPPSSSRTFHWVKLIRSQLARGSGACDLPSKILSRTQARNRCDTNQTNDQDTDLSRAA

SEQ ID NO: 795349 - protein, 88 aa, Homo sapiens
ERERSSGDGPQGLRAGGRGSVESGERSSGDDPQRRLAKCGCASPPCPRRKLSHSKGRPEGSAGRLCTDTCPPRGSPPAPGPCRLVLRV

SEQ ID NO: 795350 - protein, 101 aa, Homo sapiens
PSQQKRIRRCPQEGDALPGPPALPQTAPGLTAESVSYIQCHLRVAPNTWLACWPPTTLSATLAALWFLSRLLKGRPLWMLSSTLSKCPHPHPSNIKLMVVP

SEQ ID NO: 795351 - protein, 1241 aa, Homo sapiens
MALGTTLRASLLLLGLLTEGLAQLAIPASVPRGFWALPENLTVVEGASVELRCGVSTPGSAVQWAKDGLLLGPDPRIPGFPRYRLEGDPARGEFHLHIEACDLSDDAEYECQVGRSEMGPELVSPRVILSILVPPKLLLLTPEAGTMVTWVAGQEYVVNCVSGDAKPAPDITILLSGQTISDISANVNEGSQQKLFTVEATARVTPRSSDNRQLLVCEASSPALEAPIKASFTVNVLFPPGPPVIEWPGLDEGHVRAGQSLELPCVARGGNPLATLQWLKNGQPVSTAWGTEHTQAVARSVLVMTVRPEDHGAQLSCEAHNSVSAGTQEHGITLQVTFPPSAIIILGSASQTENKNVTLSCVSKSSRPRVLLRWWLGWRQLLPMEETVMDGLHGGHISMSNLTFLARREDNGLTLTCEAFSEAFTKETFKKSLILNVKYPAQKLWIEGPPEGQKLRAGTRVRLVCLAIGGNPEPSLMWYKDSRTVTESRLPQESRRVHLGSVEKSGSTFSRELVLVTGPSDNQAKFTCKAGQLSASTQLAVQFPPTNVTILANASALRPGDALNLTCVSVSSNPPVNLSWDKEGERLEGVAAPPRRAPFKGSAAARSVLLQVSSRDHGQRVTCRAHSAELRETVSSFYRLNVLYRPEFLGEQVLVVTAVEQGEALLPVSVSANPAPEAFNWTFRGYRLSPAGGPRHRILSSGALHLWNVTRADDGLYQLHCQNSEGTAEARLRLDVHYAPTIRALQDPTEVNVGGSVDIVCTVDANPILPGMFNWERLGEDEEDQSLDDMEKISRGPTGRLRIHHAKLAQAGAYQCIVDNGVAPPARRLLRLVVRFAPQVEHPTPLTKVAAAGDSTSSATLHCRARGVPNIVFTWTKNGVPLDLQDPRYTEHTYHQGGVHSSLLTIANVSAAQDYALFTCTATNALGSDQTNIQLVSISRPDPPSGLKVVSLTPHSVGLEWKPGFDGGLPQRFCIRYEALGTPGFHYVDVVPPQATTFTLTGLQPSTRYRVWLLASNALGDSGLADKGTQLPITTPGLHQPSGEPEDQLPTEPPSGPSGLPLLPVLFALGGLLLLSNASCVGGVLWQRRLRRLAEGISEKTEAGSEEDRVRNEYEESQWTGERDTQSSTVSTTEAEPYYRSLRDFSPQLPPTQEEVSYSRGFTGEDEDMAFPGHLYDEVERTYPPSGAWGPLYDEVQMGPWDLHWPEDTYQDPRGIYDQVAGDLDTLEPDSLPFELRGHLV

SEQ ID NO: 795352 - protein, 1241 aa, Homo sapiens; identical to SEQ ID NO: 795351

SEQ ID NO: 795353 - protein, 1201 aa, Homo sapiens
MALGTTLRASLLLLGLLTEGLAQLAIPASVPRGFWALPENLTVVEGASVELRCGVSTPGSAVQWAKDGLLLGPDPRIPGFPRYRLEGDPARGEFHLHIEACDLSDDAEYECQVGRSEMGPELVSPRVILSILVPPKLLLLTPEAGTMVTWVAGQEYVVNCVSGDAKPAPDITILLSGQTISDISANVNEGSQQKLFTVEATARVTPRSSDNRQLLVCEASSPALEAPIKASFTVNVLFPPGPPVIEWPGLDEGHVRAGQSLELPCVARGGNPLATLQWLKNGQPVSTAWGTEHTQAVARSVLVMTVRPEDHGAQLSCEAHNSVSAGTQEHGITLQVTFPPSAIIILGSASQTENKNVTLSCVSKSSRPRVLLRWWLGWRQLLPMEETVMDGLHGGHISMSNLTFLARREDNGLTLTCEAFSEAFTKETFKKSLILNVKYPAQKLWIEGPPEGQKLRAGTRVRLVCLAIGGNPEPSLMWYKDSRTVTESRLPQESRRVHLGSVEKSGSTFSRELVLVTGPSDNQAKFTCKAGQLSASTQLAVQFPPTNVTILANASALRPGDALNLTCVSVSSNPPVNLSWDKEGERLEGVAAPPRRAPFKGSAAARSVLLQVSSRDHGQRVTCRAHSAELRETVSSFYRLNVLYRPEFLGEQVLVVTAVEQGEALLPVSVSANPAPEAFNWTFRGYRLSPAGGPRHRILSSGALHLWNVTRADDGLYQLHCQNSEGTAEARLRLDVHYAPTIRALQDPTEVNVGGSVDIVCTVDANPILPGMFNWERLGEDEEDQSLDDMEKISRGPTGRLRIHHAKLAQAGAYQCIVDNGVAPPARRLLRLVVRFAPQVEHPTPLTKVAAAGDSTSSATLHCRARGVPNIVFTWTKNGVPLDLQDPRYTEHTYHQGGVHSSLLTIANVSAAQDYALFTCTATNALGSDQTNIQLVSISRPDPPSGLKVVSLTPHSVGLEWKPGFDGGLPQRFCIRYEALGTPGFHYVDVVPPQATTFTLTGLQPSTRYRVWLLASNALGDSGLADKGTQLPITTPGLHQPSGEPEDQLPTEPPSGISEKTEAGSEEDRVRNEYEESQWTGERDTQSSTVSTTEAEPYYRSLRDFSPQLPPTQEEVSYSRGFTGEDEDMAFPGHLYDEVERTYPPSGAWGPLYDEVQMGPWDLHWPEDTYQDPRGIYDQVAGDLDTLEPDSLPFELRGHLV

SEQ ID NO: 795354 - protein, 104 aa, Homo sapiens
PSRHEGCSSLVPHPLLRGLRTNWFFFQTWTVCLVGHPRAGPLHAVDAASCEAQSLRDFASQRYLQFKVMSPAYSQGHLKGTRPSSIPFSEAVTQGWKLMLLPSL

SEQ ID NO: 795355 - protein, 38 aa, Homo sapiens
MVSTVNKAQATQWGCQSQGGESNSLQSQATPIPAFRAW

SEQ ID NO: 795356 - protein, 122 aa, Homo sapiens
NPSVLRRWNELMCTLGIGMTSSPNERSRLSGKRSRRETRAEQCVAARVEEEKRSQWSRFPASLAKRESRAGGGEREELMIILNFSSFPMVLKSPPLKSRYKILARQFHFKSSRGGGHPGSQN

SEQ ID NO: 795357 - protein, 107 aa, Homo sapiens
EGMAGDQSDPEQRPARMSALDPLREKARVTHRRKTKQPKLPGCTGGPKSPEGRRKPETARAGQTLLRPMQIRPTHATWKSGLGSQKTKHMRAGLHERRRRRRLRGSS

SEQ ID NO: 795358 - protein, 93 aa, Homo sapiens
AQYSQVIGGPLEGHFYKKPVAFIVGTLSAHSPREGAARYCSTAERPNGKEPRPASDPPVGLETNFPFFSQAEPSAEVTAMANHLQPPGRLEPR

SEQ ID NO: 795359 - protein, 290 aa, Homo sapiens
MGTAGAKGLSGQQEGHAGPPSCQQHVDHGSRHGDGHSCRFLRILTTVPAECCMNIHMELNQAWAGGWHRERRRDRLGPGPSGHTLAGCGRKSPPAPARICLPRDGTGLGLLYGHRQKRPMSDMTSPLSDCPRPGSPDAGAGLLPERPREVHLRFNGGTAASEARQWVVRSLSSLGSAAEEDWPPRPRPGTGMLGGHGQSSREPLAPWACPQLSRRERFFPTPVADALVKGFAEREHMDFQFFPAGARRPAPSLSSLGRTRVLLDPWPRSLRWAALHPFPPSKGGPWTPLT

SEQ ID NO: 795360 - protein, 238 aa, Homo sapiens [sequence omitted]

SEQ ID NO: 795361 - protein, 262 aa, Homo sapiens
MPKHCFLGFLISFFLTGVAGTQSTHESLKPQRVQFQSRNFHNILQWQPGRALTGNSSVYFVQYKIMFSCSMKSSHQKPSGCWQHISCNFPGCRTLAKYGQRQWKNKEDCWGTQELSCDLTSETSDIQEPYYGRVRAASAGSYSEWSMTPRFTPWWETKIDPPVMNITQVNGSLLVILHAPNLPYRYQKEKNVSIEDYYELLYRVFIINNSLEKEQKVYEGAHRAVEIEALTPHSSYCVVAEIYQPMLDRRSQRSEERCVEIP

SEQ ID NO: 795362 - protein, 129 aa, Homo sapiens
MPKHCFLGFLISFFLTGVAGTQSTHESLKPQRVQFQSRNFHNILQWQPGRALTGNSSVYFVQYKIYGQRQWKNKEDCWGTQELSCDLTSETSDIQEPYYGRVRAASAGSYSEWSMTPRFTPWWERAKGL

SEQ ID NO: 795363 - protein, 230 aa, Homo sapiens
MPKHCFLGFLISFFLTGVAGTQSTHESLKPQRVQFQSRNFHNILQWQPGRALTGNSSVYFVQYKIYGQRQWKNKEDCWGTQELSCDLTSETSDIQEPYYGRVRAASAGSYSEWSMTPRFTPWWETKIDPPVMNITQVNGSLLVILHAPNLPYRYQKEKNVSIEDYYELLYRVFIINNSLEKEQKVYEGAHRAVEIEALTPHSSYCVVAEIYQPMLDRRSQRSEERCVEIP

SEQ ID NO: 795364 - protein, 230 aa, Homo sapiens; identical to SEQ ID NO: 795363

SEQ ID NO: 795365 - protein, 69 aa, Homo sapiens
SRPVQAFQTVAAPSSRCLSSLVAARPTRAATMTRMMSEQTAPHWWTGWVRTRWSSKARWACTTVINLRS

SEQ ID NO: 795366 - protein, 1982 aa, Homo sapiens
MAADDDNGDGTSLFDVFSASPLKNNDEGSLDIYAGLDSAVSDSASKSCVPSRNCLDLYEEILTEEGTAKEATYNDLQVEYGKCQLQMKELMKKFKEIQTQNFSLINENQSLKKNISALIKTARVEINRKDEEISNLHQRLSEFPHFRNNHKTARTFDTVKTKDLKSRSPHLDDCSKTDHRAKSDVSKDVHHSTSLPNLEKEGKPHSDKRSTSHLPTSVEKHCTNGVWSRSHYQVGEGSSNEDSRRGRKDIRHSQFNRGTERVRKDLSTGCGDGEPRILEASQRLQGHPEKYGKGEPKTESKSSKFKSNSDSDYKGERINSSWEKETPGERSHSRVDSQSDKKLERQSERSQNINRKEVKSQDKEERKVDQKPKSVVKDQDHWRRSERASLPHSKNEITFSHNSSKYHLEERRGWEDCKRDKSVNSHSFQDGRCPSSLSNSRTHKNIDSKEVDAMHQWENTPLKAERHRTEDKRKREQESKEENRHIRNEKRVPTEHLQKTNKETKKTTTDLKKQNEPKTDKGEVLDNGVSEGADNKELAMKAESGPNETKNKDLKLSFMKKLNLTLSPAKKQPVSQDNQHKITDIPKSSGVCDSESSMQVKTVAYVPSISEHILGEAAVSEHTMGETKSTLLEPKVALLAVTEPRIGISETNKEDENSLLVRSVDNTMHCEEPICGTETSFPSPMEIQQTESLFPSTGMKQTINNGRAAAPVVMDVLQTDVSQNFGLELDTKRNDNSDYCGISEGMEMKVALSTTVSETTESILQPSIEEADILPIMLSEDNNPKFEPSVIVTPLVESKSCHLEPCLPKETLDSSLQQTELMDHRMATGETNSVYHDDDNSVLSIDLNHLRPIPEAISPLNSPVRPVAKVLRNESPPQVPVYNNSHKDVFLPNSAHSTSKSQSDLNKENQKPIYKSDKCTEADTCKNSPLDELEEGEIRSDSETSKPQESFEKNSKRRVSADVRKSKTIPRRGKSTVCLDKDSRKTHVRIHQTNNKWNKRPDKSSRSSKTEKKDKVMSTSSLEKIVPIIAVPSSEQEIMHMLRMIRKHVRKNYMKFKAKFSLIQFHRIIESAILSFTSLIKHLNLHKISKSVTTLQKNLCDIIESKLKQVKKNGIVDRLFEQQLPDMKKKLWKFVDDQLDYLFAKLKKILVCDSKSFGRDSDEGKLEKTSKQNAQYSNSQKRSVDNSNRELLKEKLSKSEDPVHYKSLVGCKKSEENYQDQNNSSINTVKHDIKKNFNICFDNIKNSQSEERSLEVHCPSTPKSEKNEGSSIEDAQTSQHATLKPERSFEILTEQQASSLTFNLVSDAQMGEIFKSLLQGSDLLDSSVNCTEKSEWELKTPEKQLLETLKCESIPACTTEELVSGVASPCPKMISDDNWSLLSSEKGPSLSSGLSLPVHPDVLDESCMFEVSTNLPLSKDNVCSVEKSKPCVSSILLEDLAVSLTVPSPLKSDGHLSFLKPDMSSSSTPEEVISAHFSEDALLEEEDASEQDIHLALESDNSSSKSSCSSSWTSRSVAPGFQYHPNLPMHAVIMEKSNDHFIVKIRRATPSTSSGLKQSMMPDELLTSLPRHGKEADEGPEKEYISCQNTVFKSVEELENSNKNVDGSKSTHEEQSSMIQTQVPDIYEFLKDASDKMGHSDEVADECFKLHQVWETKVPESIEELPSMEEISHSVGEHLPNTYVDLTKDPVTETKNLGEFIEVTVLHIDQLGCSGGNLNQSAQILDNSLQADTVGAFIDLTQDASSEAKSEGNHPALAVEDLGCGVIQVDEDNCKEEKAQVANRPLKCIVEETYIDLTTESPSSCEVKKDELKSEPGSNCDNSELPGTLHNSHKKRRNISDLNHPHKKQRKETDLTNKEKTKKPTQDSCENTEAHQKKASKKKAPPVTKDPSSLKATPGIKDSSAALATSTSLSAKNVIKKKGEIIILWTRNDDREILLECQKRGPSFKTFAYLAAKLDKNPNQVSERFQQLMKLFEKSKCR

SEQ ID NO: 795367 - protein, 1982 aa, Homo sapiens; identical to SEQ ID NO: 795366

SEQ ID NO: 795368 - protein, 108 aa, Homo sapiens
YRYLWWQGGLVGIFYLPFLSNGKALLTPGKSDPGRGYGAPRCPPELPITTGASLLPCCMSALSLSCLLIALVLVWGGECQVSLVSHLSSIIHNLKHFFLFWGLSTFAH

SEQ ID NO: 795369 - protein, 388 aa, Homo sapiens
MEETNSSSKDMYQSPGEAEGWRWKKGSDRGQNLFRKHSKCLILLIRERFESPHSYICSPVTFQFFYAQSVKHVNVTIDCLPEGAATRGTARTSKPTTKSQKTLPSTSPGHWTQSTPWASALRSSPWTETAAPSETEETLNTGRPPELPARATATWFSASHTLPALATRRVARTQWLTADRQTWASISSVPWAQTISEKKPGGSLWETRSSPPTTAGTEEAMNTTSLLAPAAEIMATPGSPSQASPTSGAFTHGTQTPSPTKATAPRYPQTGDLSAEWPFTAGEEPVLVPRPHQVSRCPQPLFKVGAMAAAPLTLAIQRLNPCLMELCQFFQQCLCMSQRSPRTEDMRYCLEYYSWFLKNATYICQRVKRVSHSHTLKQKCLENICKSV

SEQ ID NO: 795370 - protein, 115 aa, Homo sapiens
MWGAQGTAGQASPWTSRNQNQTAQGPRGEDVSADGQPRLIMASSGSLSVPGERGRWQTGKEATCWDAETRLQELLELAEVTAGTTVASWSLHSPSFHPRVPVTPPKCAHETYEET

SEQ ID NO: 795371 - protein, 158 aa, Homo sapiens
TVTLTKYIPLWTSDTMTELEQTTLLILSNQIIFGKEKRSYGKTPYIKEIIAVLPSLGHLTALTSFCRTLGSEEFVDFQQGPRMRKTASPAHLRAAEQGHAKSSFGSTRKLLPWHLGEEWVIIKCPVSLEKLYSSLKLLPFERTFIRVFSHYNSNIRSL

SEQ ID NO: 795372 - protein, 454 aa, Homo sapiens
MESILGSASCTEPSSALEVNSPPSQPPQPVVPAKPVQCVHHVSTQPSCPGRGKMSKLLNPEEMTSRDYYFDSYAHFGIHEEMLKDEVRTLTYRNSMYHNKHVFKDKVVLDVGSGTGILSMFAAKAGAKKVFGVPSPFLKAWPEASETPSVPLCEYFSREWSLPEAWGQSEGPPSVEIECSSISDYSEKIIKANHLDNIITIFKGKVEEVELPVEKVDIIISEWMGYCLFYESMLNTVIFARDKWLKPGGLMFPDRAALYVVAIEDRQYKDFKIHWLLGNKWPAERRKKNLIPWVICALNDVKVGQSSCGDKTQINPYKGWENVYGFDMTCIRDVAMKEPLVDIVDPKQVVTNACLIKIQRNDYVHALVTYFNIEFTKCHKKMGFSTAPDAPYTHWKQTVFYLEDYLTVRRGEEIYGTISMKPNAKNVRDLDFTVDLDFKGQLCETSVSNDYKMR

SEQ ID NO: 795373 - protein, 394 aa, Homo sapiens
MGMKHSSRCLLLRRKMAENAAESTEVNSPPSQPPQPVVPAKPVQCVHHVSTQPSCPGRGKMSKLLNPEEMTSRDYYFDSYAHFGIHEEMLKDEVRTLTYRNSMYHNKHVFKDKVVLDVGSGTGILSMFAAKAGAKKVFGIECSSISDYSEKIIKANHLDNIITIFKGKVEEVELPVEKVDIIISEWMGYCLFYESMLNTVIFARDKWLKPGGLMFPDRAALYVVAIEDRQYKDFKIHWWENVYGFDMTCIRDVAMKEPLVDIVDPKQVVTNACLIKEVDIYTVKTEELSFTSAFCLQIQRNDYVHALVTYFNIEFTKCHKKMGFSTAPDAPYTHWKQTVFYLEDYLTVRRGEEIYGTISMKPNAKNVRDLDFTVDLDFKGQLCETSVSNDYKMR

SEQ ID NO: 795374 - protein, 2353 aa, Homo sapiens
MTEGARAADEVRVPLGAPPPGPAALVGASPESPGAPGREAERGSELGVSPSESPAAERGAELGADEEQRVPYPALAATVFFCLGQTTRPRSWCLRLVCNPWFEHVSMLVIMLNCVTLGMFRPCEDVECGSERCNILEAFDAFIFAFFAVEMVIKMVALGLFGQKCYLGDTWNRLDFFIVVAGMMEYSLDGHNVSLSAIRTVRVLRPLRAINRVPSMRILVTLLLDTLPMLGNVLLLCFFVFFIFGIVGVQLWAGLLRNRCFLDSAFVRNNNLTFLRPYYQTEEGEENPFICSSRRDNGMQKCSHIPGRRELRMPCTLGWEAYTQPQAEGVGAARNACINWNQYYNVCRSGDSNPHNGAINFDNIGYAWIAIFQVITLEGWVDIMYYVMDAHSFYNFIYFILLIIVGSFFMINLCLVVIATQFSETKQRESQLMREQRARHLSNDSTLASFSEPGSCYEELLKYVGHIFRKVKRRSLRLYARWQSRWRKKVDPSAVQGQGPGHRQRRAGRHTASVHHLVYHHHHHHHHHYHFSHGSPRRPGPEPGACDTRLVRAGAPPSPPSPGRGPPDAESVHSIYHADCHIEGPQERARVAHAAATAAASLRLATGLGTMNYPTILPSGVGSGKGSTSPGPKGKWAGGPPGTGGHGPLSLNSPDPYEKIPHVVGEHGLGQAPGHLSGLSVPCPLPSPPAGTLTCELKSCPYCTRALEDPEGELSGSESGDSDGRGVYEFTQDVRHGDRWDPTRPPRATDTPGPGPGSPQRRAQQRAAPGEPGWMGRLWVTFSGKLRRIVDSKYFSRGIMMAILVNTLSMGVEYHEQPEELTNALEISNIVFTSMFALEMLLKLLACGPLGYIRNPYNIFDGIIVVISVWEIVGQADGGLSVLRTFRLLRVLKLVRFLPALRRQLVVLVKTMDNVATFCTLLMLFIFIFSILGMHLFGCKFSLKTDTGDTVPDRKNFDSLLWAIVTVFQILTQEDWNVVLYNGMASTSSWAALYFVALMTFGNYVLFNLLVAILVEGFQAEGDANRSDTDEDKTSVHFEEDFHKLRELQTTELKMCSLAVTPNGHLEGRGSLSPPLIMCTAATPMPTPKSSPFLDAAPSLPDSRRGSSSSGDPPLGDQKPPASLRSSPCAPWGPSGAWSSRRSSWSSLGRAPSLKRRGQCGERESLLSGEGKGSTDDEAEDGRAAPGPRATPLRRAESLDPRPLRPAALPPTKCRDRDGQVVALPSDFFLRIDSHREDAAELDDDSEDSCCLRLHKVLEPYKPQWCRSREAWALYLFSPQNRFRVSCQKVITHKMFDHVVLVFIFLNCVTIALERPDIDPGSTERVFLSVSNYIFTAIFVAEMMVKVVALGLLSGEHAYLQSSWNLLDGLLVLVSLVDIVVAMASAGGAKILGVLRVLRLLRTLRPLRVISRAPGLKLVVETLISSLRPIGNIVLICCAFFIIFGILGVQLFKGKFYYCEGPDTRNISTKAQCRAAHYRWVRRKYNFDNLGQALMSLFVLSSKDGWVNIMYDGLDAVGVDQQPVQNHNPWMLLYFISFLLIVSFFVLNMFVGVVVENFHKCRQHQEAEEARRREEKRLRRLERRRRSTFPSPEAQRRPYYADYSPTRRSIHSLCTSHYLDLFITFIICVNVITMSMEHYNQPKSLDEALKYCNYVFTIVFVFEAALKLVAFGFRRFFKDRWNQLDLAIVLLSLMGITLEEIEMSAALPINPTIIRIMRVLRIARVLKLLKMATGMRALLDTVVQALPQVGNLGLLFMLLFFIYAALGVELFGRLECSEDNPCEGLSRHATFSNFGMAFLTLFRVSTGDNWNGIMKDTLRECSREDKHCLSYLPALSPVYFVTFVLVAQFVLVNVVVAVLMKHLEESNKEAREDAELDAEIELEMAQGPGSARRVDADRPPLPQESPGARDAPNLVARKVSVSRMLSLPNDSYMFRPVVPASAPHPRPLQEVEMETYGAGTPLGSVASVHSPPAESCASLQIPLAVSSPARSGEPLHALSPRGTARSPSLSRLLCRQEAVHTDSLEGKIDSPRDTLDPAEPGEKTPVRPVTQGGSLQSPPRSPRPASVRTRKHTFGQHCVSSRPAAPGGEEAEASDPADEEVSHITSSACPWQPTAEPHGPEASPVAGGERDLRRLYSVDAQGFLDKPGRADEQWRPSAELGSGEPGEAKAWGPEAEPALGARRKKKMSPPCISVEPPAEDEGSARPSAAEGGSTTLRRRTPSCEATPHRDSLEPTEGSGAGGDPAAKGERWGQASCRAEHLTVPSFAFEPLDLGVPSGDPFLDGSHSVTPESRASSSGAIVPLEPPESEPPMPVGDPPEKRRGLYLTVPQCPLEKPGSPSATPAPGGGADDPV

SEQ ID NO: 795375 - protein, 734 aa, Homo sapiens [sequence omitted]

SEQ ID NO: 795376 - protein, 119 aa, Homo sapiens
LTPECPITRPSRETPQKPQPCTLARQPHTEKYRRTPASGARPTSGGRRPLTRPPGRKMTANRDAALSSHRHPGCAQRPRTPTFASSSQRRSAFGFDDGNFPGLGERSHAPGSRLGARRR

SEQ ID NO: 795377 - protein, 151 aa, Homo sapiens
MTCSDLLLPELTRFKVTDETHMEIFLGWVGQLEDRVFTPERGLENFTQSRCSLLRTPADASQWTLRCIPRVQRVSRLPLEIQHIFFLKEETDGRQEAKRRGRKGIGRRGRKGKGRKRKESELEILQGLKVKKHVSQLSQKIKELLQGQVTG

SEQ ID NO: 795378 - protein, 139 aa, Homo sapiens
SSLPSQPLDPSNWAWNSTFTESSTSDFQMQDTQWERLVASVPALYSDAYDIFQIIELYNLPDENEISSSSFHCLYQYLSPTKYQVGGQGSSLSIFAGPAVGLSPAQTWPNMTSQAFEAYSLTDSLEFQKTSNMVDLGFL

SEQ ID NO: 795379 - protein, 58 aa, Homo sapiens
MDVQEPLWDSDLGQEPQIISRGSALRATRYSRGNRKLMSSFLFWLVLFCYVPQQQKAF

SEQ ID NO: 795380 - protein, 79 aa, Homo sapiens
QGCFARNRWGIRKKPVAGKASADAAFFSCTHPWEGAVRWPGRTRSWTPQNERLTLHRNILGQQAQHILNFEYEQSKLQG

SEQ ID NO: 795381 - protein, 755 aa, Homo sapiens
TFIVTHSTLDSFRRMGLKVIQQNVHKFLQLRFWGWWKLYNKVKPLLNVARQEEEMKAKEEELRKAMAQTQELVNKVKELEEKTATLSQEKNDLTIQLQAEQENLMDAEERLTWMMKTKMDLESQISDMRERLEEEEGMAASLSAAKRKLEGELSDLKRDLEGLETTLAKTEKEKQALDHKVRTLTGDLSLREDSITKLQKEKRALEELHQKTLDDLQAEEDKVNHLTKNNSKLSTQIHELEDNWEQEKKIRAEVEKARRKAESDLKMTIDNLNEMERSKLDLEEVVKKRDLEINSVNSKYEDEQSLNSTLQRKLKEHQDRIEELEEELEAERAMRAKIEQNRKREAELLKLRRELEEAALQSEATASTLRKKHVDSMAELTEHVESLQRVKSKLEKDKQVMKAEIDDLNASMETIQKSKMNAEAHVRKLEDSLSEANAKVAELERNQAEINAIRTRLQAENSELSREYEESQSRLNQILRIKTSLTSQVDDYKRQLDEESKSRSTAVVSLANTKHDLDLVKEQLEEEQGGKSELQRLVSKLNTEVTTWRTKYETDAIQRTEELEETKRKLAARLQEAEEAAETAQARAASLEKNKQRLQAEVEDLTIDLEKANAAAAALDKKQRLFDKMLAEWQQKCEELQVEVDSSQKECRMYMTESFKIKTAYEESLEHLESVKKENKTLQEEIKDLIDQLGEGGRSVHELQKLKKKLEMEKEELQVALEEAESSLEVEESKVIRIQLELAQVKADIDRRIHE

SEQ ID NO: 795382 - protein, 263 aa, Homo sapiens
TFIVTHSTLDSFRRMGLKVIQQNVHKFLQLRFWGWWKLYNKVKPLLNVARQEEEMKAKEEELRKAMAQTQELVNKVKELEEKTATLSQEKNDLTIQLQAEQENLMDAEERLTWMMKTKMDLESQISDMRERLEEEEGMAASLSAAKRKLEGELSDLKRDLEGLETTLAKTEKEKQALDHKVRTLTGDLSLREDSITKLQKEKRALEELHQKTLDDLQAEEDKVNHLTKNNSKLSTQIHEVIPIAVATSTTPRPDPSGGTGSED

SEQ ID NO: 795383 - protein, 107 aa, Homo sapiens
ERGCPRQPRGKEGKRERDRDPPSWPTTLRRGKLAVHAQDPASDQAQQAQAGHVECGALQAAPTQNLGQPASAACSPGSHLCLSLHTSLRAEGVGSSLGQPQRGAPTA

SEQ ID NO: 795384 - protein, 130 aa, Homo sapiens
MGGIGSQQATVECAPACEVAAGPRSHNHANARCVVAKEMGLELPAPRPRAWSAGRVAGVGPGDSEAEWLRPPHAKAPRASPPVRNTWNMFPSHVTPRDASETCRARRHHREPGPRRTPLISCSCKYIQFS

SEQ ID NO: 795385 - protein, 131 aa, Homo sapiens
QTPEKRHKSCPGGLHFLSRSINLHFPKLSISGTYKLKRVLRNLGITKIFSNEADLSGVSQEAPLKLSKAVHVAVLTIDEKGTEATGPPHLEEKAWSKYQTVMFNRPFLVIIKDDITNFPLFIGKVVNPTQK

SEQ ID NO: 795386 - protein, 314 aa, Homo sapiens
GSCSSHCPAQSLPYPTMLVGTPNLLTLDEADATWTLIKDKVIEEHFGPNAVAVPFLSDAACYDLLGVLVKQSRPAHTRLALPGRQGRRALKPVGPLPSLLEQAGSEGAFAHCTREYSPNGRAERAYEETRMLDGQPCKIRLHMGDLRKKVAFLLLPPGQVSLQQTLPWLRSTHSIYVIYQVFSCSWLQLGLTSTAREPQLLRLLRSLPVAFSCLKFSLQSKGVLGPQKPLTKDPLPHGANWVRPNLSIMPPLAPTSASADTTEAADVPPPVPAPPTPPPQEGPEDKPTRFSYKGRNPFWRGPQILSGSILRVRQ

SEQ ID NO: 795387 - protein, 112 aa, Homo sapiens
MYHLLVAMTEAIKMAGIKRLHLSTQLQSLKVTAFHSFPSPFIPGLRASISWRDPLALYFMRLKCKLSHSKPESIMGVLIHSFYLRLGSISKSYPIGFLSGELIALTFQNDIK

SEQ ID NO: 795388 - protein, 371 aa, Homo sapiens
MSFRKVNIIILVLAVALFLLVLHHNFLSLSSLLRNEVTDSGIVGPQPIDFVPNALRHAVDGRQEEIPVVIAASEDRLGGAIAAINSIQHNTRSNVIFYIVTLNNTADHLRSWLNSDSLKSIRYKIVNFDPKLLEGKVKEDPDQGESMKPLTFARFYLPILVPSAKKAIYMDDDVIVQGDILALYNTALKPGHAAAFSEDCDSASTKVVIRGAGNQYNYIGYLDYKKERIRKLSMKASTCSFNPGVFVANLTEWKRQNITNQLEKWMKLNVEEGLYSRTLAGSITTPPLLIVFYQQHSTIDPMWNVRHLGSSAGKRYSPQFVKAAKLLHWNGHLKPWGRTASYTDVWEKWYIPDPTGKFNLIRRYTEISNIK

SEQ ID NO: 795389 - protein, 371 aa, Homo sapiens; identical to SEQ ID NO: 795388

SEQ ID NO: 795390 - protein, 371 aa, Homo sapiens; identical to SEQ ID NO: 795388

SEQ ID NO: 795391 - protein, 371 aa, Homo sapiens; identical to SEQ ID NO: 795388

SEQ ID NO: 795392 - protein, 371 aa, Homo sapiens; identical to SEQ ID NO: 795388

SEQ ID NO: 795393 - protein, 159 aa, Homo sapiens [sequence omitted]

SEQ ID NO: 795394 - protein, 266 aa, Homo sapiens
MPGSKSWLNSDSLKSIRYKIVNFDPKLLEGKVKEDPDQGESMKPLTFARFYLPILVPSAKKAIYMDDDVIVQGDILALYNTALKPGHAAAFSEDCDSASTKVVIRGAGNQYNYIGYLDYKKERIRKLSMKASTCSFNPGVFVANLTEWKRQNITNQLEKWMKLNVEEGLYSRTLAGSITTPPLLIVFYQQHSTIDPMWNVRHLGSSAGKRYSPQFVKAAKLLHWNGHLKPWGRTASYTDVWEKWYIPDPTGKFNLIRRYTEISNIK

SEQ ID NO: 795395 - protein, 68 aa, Homo sapiens
MSFRKVNIIILVLAVALFLLVLHHNFLSLSSLLRNEVTDSGFVGLEPITLAKCFHLLIWSKEKFCVFL

SEQ ID NO: 795396 - protein, 31 aa, Homo sapiens
MSFRKGKLIILVLALRLSSSRQLVHLPPTTD

SEQ ID NO: 795397 - protein, 371 aa, Homo sapiens; identical to SEQ ID NO: 795388

SEQ ID NO: 795398 - protein, 371 aa, Homo sapiens; identical to SEQ ID NO: 795388

SEQ ID NO: 795399 - protein, 371 aa, Homo sapiens; identical to SEQ ID NO: 795388

SEQ ID NO: 795400 - protein, 259 aa, Homo sapiens
MSFRKVNIIILVLAVALFLLVLHHNFLSLSSLLRNEVTDSGIVGPQPIDFVPNALRHAVDGRQEEIPVVIAASEDRLGGAIAAINSIQHNTRSNVIFYIVTLNNTADHLRSWLNSDSLKSIRYKIVNFDPKLLEGKVKEDPDQGESMKPLTFARFYLPILVPSAKKAIYMDDDVIVQGDILALYNTALKPGHAAAFSEDCDSASTKVVIRGAGNQVNCLPNTPLPTILFNGKRLQIQGTLLLQFTLPNHFIPKLKPAFL

SEQ ID NO: 795401 - protein, 67 aa, Homo sapiens
SPTGRYSPCPRPAPSLGDVRFCRAVLPARAAEVVVAAALSRHRAPVKCSPSVLLGAWSRVPRPENCP

SEQ ID NO: 795402 - protein, 178 aa, Homo sapiens
GKNVLIVRREKTTSTPDCTPTYTDVISETLCSMKKRKDNLNQLYQHHWTEWNYFDKHLKELQDNFSREMKNIDPKAADTKKANHMFIPPSAVNEESPDKKTKGSLQREIEFKGCSNKNHGKGRSVNMRGKEEREREEKQKLNISFHSLPSPEELHNLEPGSAYRIRDISATRWSGTRK

SEQ ID NO: 795403 - protein, 424 aa, Homo sapiens
FQRPLNSMNNQKSVWGEVKMDTIFLWSLLLLFFGSQASRCSAQKNTEFAVDLYQEVSLSHKDNIIFSPLGITLVLEMVQLGAKGKAQQQIRQTLKQQETSAGEEFFVLKSFFSAISEKKQEFTFNLANALYLQEGFTVKEQYLHGNKEFFQSAIKLVDFQDAKACAEMISTWVERKTDGKIKDMFSGEEFGPLTRLVLVNAIYFKGDWKQKFRKEDTQLINFTKKNGSTVKIPMMKALLRTKYGYFSESSLNYQVLELSYKGDEFSLIIILPAEGMDIEEVEKLITAQQILKWLSEMQEEEVEISLPRFKVEQKVDFKDVLYSLNITEIFSGGCDLSGITDSSEVYVSQVTQKVFFEINEDGSEAATSTGIHIPVIMSLAQSQFIANHPFLFIMKHNPTESILFMGRVTNPDTQEIKGRDLDSL

SEQ ID NO: 795404 - protein, 424 aa, Homo sapiens; identical to SEQ ID NO: 795403

SEQ ID NO: 795405 - protein, 405 aa, Homo sapiens
MDTIFLWSLLLLFFGSQASRCSAQKNTEFAVDLYQEVSLSHKDNIIFSPLGITLVLEMVQLGAKGKAQQQIRQTLKQQETSAGEEFFVLKSFFSAISEKKQEFTFNLANALYLQEGFTVKEQYLHGNKEFFQSAIKLVDFQDAKACAEMISTWVERKTDGKIKDMFSGEEFGPLTRLVLVNAIYFKGDWKQKFRKEDTQLINFTKKNGSTVKIPMMKALLRTKYGYFSESSLNYQVLELSYKGDEFSLIIILPAEGMDIEEVEKLITAQQILKWLSEMQEEEVEISLPRFKVEQKVDFKDVLYSLNITEIFSGGCDLSGITDSSEVYVSQVTQKVFFEINEDGSEAATSTGIHIPVIMSLAQSQFIANHPFLFIMKHNPTESILFMGRVTNPDTQEIKGRDLDSL

SEQ ID NO: 795406 - protein, 454 aa, Homo sapiens
FQRPLNSMNNQKSVWEDPVLIGLFIRLFSLSITLCFLIRYDPKPDGEVKMDTIFLWSLLLLFFGSQASRCSAQKNTEFAVDLYQEVSLSHKDNIIFSPLGITLVLEMVQLGAKGKAQQQIRQTLKQQETSAGEEFFVLKSFFSAISEKKQEFTFNLANALYLQEGFTVKEQYLHGNKEFFQSAIKLVDFQDAKACAEMISTWVERKTDGKIKDMFSGEEFGPLTRLVLVNAIYFKGDWKQKFRKEDTQLINFTKKNGSTVKIPMMKALLRTKYGYFSESSLNYQVLELSYKGDEFSLIIILPAEGMDIEEVEKLITAQQILKWLSEMQEEEVEISLPRFKVEQKVDFKDVLYSLNITEIFSGGCDLSGITDSSEVYVSQVTQKVFFEINEDGSEAATSTGIHIPVIMSLAQSQFIANHPFLFIMKHNPTESILFMGRVTNPDTQEIKGRDLDSL

SEQ ID NO: 795407 - protein, 386 aa, Homo sapiens
MLLPKKMKLLLFLVSQMAILALFFHMYSHNISSLSMKAQPERMHVLVLSSWRSGSSFVGQLFGQHPDVFYLMEPAWHVWMTFKQSTAWMLHMAVRDLIRAVFLCDMSVFDAYMEPGPRRQSSLFQWENSRALCSAPACDIIPQDEIIPRAHCRLLCSQQPFEVVEKACRSYSHVVLKEVRFFNLQSLYPLLKDPSLNLHIVHLVRDPRAVFRSRERTKGDLMIDSRIVMGQHEQKLKKEDQPYYVMQVICQSQLEIYKTIQSLPKALQERYLLVRYEDLARAPVAQTSRMYEFVGLEFLPHLQTWVHNITRGKGMGDHAFHTNARDALNVSQAWRWSLPYEKVSRLQKACGDAMNLLGYRHVRSEQEQRNLLLDLLSTWTVPEQIH

SEQ ID NO: 795408 - protein, 386 aa, Homo sapiens; identical to SEQ ID NO: 795407

SEQ ID NO: 795409 - protein, 386 aa, Homo sapiens; identical to SEQ ID NO: 795407

SEQ ID NO: 795410 - protein, 416 aa, Homo sapiens
GQKGNRRQTIKQQPNSTLSVCSLKVFHFSTMLLPKKMKLLLFLVSQMAILALFFHMYSHNISSLSMKAQPERMHVLVLSSWRSGSSFVGQLFGQHPDVFYLMEPAWHVWMTFKQSTAWMLHMAVRDLIRAVFLCDMSVFDAYMEPGPRRQSSLFQWENSRALCSAPACDIIPQDEIIPRAHCRLLCSQQPFEVVEKACRSYSHVVLKEVRFFNLQSLYPLLKDPSLNLHIVHLVRDPRAVFRSRERTKGDLMIDSRIVMGQHEQKLKKEDQPYYVMQVICQSQLEIYKTIQSLPKALQERYLLVRYEDLARAPVAQTSRMYEFVGLEFLPHLQTWVHNITRGKGMGDHAFHTNARDALNVSQAWRWSLPYEKVSRLQKACGDAMNLLGYRHVRSEQEQRNLLLDLLSTWTVPEQIH

SEQ ID NO: 795411 - protein, 416 aa, Homo sapiens; identical to SEQ ID NO: 795410

SEQ ID NO: 795412 - protein, 181 aa, Homo sapiens
MDKEKLDVKIEYCNYAMDSSVENMYVNKVWVQCENENCLKWRLLSSEDSAKVDHDEPWYCFMNTDSRYNNCSISEEDFPEESQLHQCGFKIVYSQLPLGSLVLVKLQNWPSWPGILCPDRFKGKYVTYDPDGNVEEYHIEFLGDPHSRSWIKATFVGHYSITLKIMRSMTYIHMLLQTYKK

SEQ ID NO: 795413 - protein, 141 aa, Homo sapiens
PAAAGAAPRLSPQAARCTALSTEKPDRPRPPRRPPAPTPVSAPTLRSAPLDAHRLRERLPESSVGPRAEPARRSRNAAMVSPRHQPATFTRETNRTRSSECRGAEARTARSDLAWRTDSLTKPERRQQCVCGKGSGSQNTK

SEQ ID NO: 795414 - protein, 69 aa, Homo sapiens
  misc_feature (1)..(1): Xaa can be any naturally occurring amino acid
XKPPPGYVYRVPAPMVIPPKKGAPFVVFCSRSRPRPRIRGSVDYGCEKTDRRGLLSAVDYFWKGFSERF

SEQ ID NO: 795415 - protein, 77 aa, Homo sapiens
MQLLPPSSERSRPPGATALEVTSEQWGEGKQGAGRGFAEQQEQRPCRCLVWWPGGASHFLRPLLFSDLRKTMCGFPK

SEQ ID NO: 795416 - protein, 68 aa, Homo sapiens
GHEAEGYGTFPGRERISENARLPQCSSSDAARGYQKFWHLHLHASPWPPPPQDGLASTGGLDVNLCRG

SEQ ID NO: 795417 - protein, 87 aa, Homo sapiens
PAVARSRFNSIGFSADNHNHENAQNGSMNGTIKRPKRWTLAQKLTSQKGQWPAEPWAQLLRIAIGPRVSIPPASTLDLATSSLPWIP

SEQ ID NO: 795418 - protein, 127 aa, Homo sapiens
CLLIDLRMKSRFTKEFLSPLGPGPFFSLIILPAPILRVTGTSRREDILFPYNVLKSLSRSSLFLTKRSSEYSSAHSHRQNRPGPDIVSILEAAMPPITTPTKGATTLTSKYRLFLSVVVLYIKMYAL

SEQ ID NO: 795419 - protein, 102 aa, Homo sapiens
MVPRKQIAAVRSAGLQLIKHPVGNTQLGTHCLCSLLKQSPLFHTGSSAVLSYRPWLSFPSLDDVDPHLVLVPALPYSNIDGLLLAIYTALFHFTSSCLTPKC

SEQ ID NO: 795420 - protein, 115 aa, Homo sapiens [sequence omitted]

SEQ ID NO: 795421 - protein, 73 aa, Homo sapiens
FSKAVLVSEQCICNLENACDSAAQLALQTSPDAPFSALGPASYLQNAAGERAAKAGGLVTQDMEVPLDPGNSN

SEQ ID NO: 795422 - protein, 161 aa, Homo sapiens
CFLLLPFMLLVHLPSPQPGMKSPHVLVFLCLLVALVTGNLVQFGVMIEKMTGKSALQYNDYGCYCGIGGSHWPVDQTDWCCHAHDCCYGRLEKLGCEPKLEKYLFSVSERGIFCAGRTTCQRLTCECDKRAALCFRRNLGTYNRKYAHYPNKLCTGPTPPC

SEQ ID NO: 795423 - protein, 75 aa, Homo sapiens
QRAAGSPLRPGFVVPAPGEGCAGRRGAEGLRATGFKPRVAEARQPREWIAGAVWERRQVPRTQSLQTASGIEGVA

SEQ ID NO: 795424 - protein, 125 aa, Homo sapiens
MRPRCCILALVCWITVFLLQCSKGTTDAPVGSGLWLCQPTPRCGNKIYNPSEQCCYDDAILSLKETRRCGSTCTFWPCFELCCPESFGPQQKFLVKLRVLGMKSQCHLSPISRSCTRNRRHVLYP

SEQ ID NO: 795425 - protein, 74 aa, Homo sapiens
GSNTQKYTRQDMQSGPWSIDPKWKAKWSPIHGEHCGCLHILHAYHCFHTAMRRNGLQLPAAPEGVGSEDAEEGA

SEQ ID NO: 795426 - protein, 21 aa, Homo sapiens
MGKSDGARSDPSENEEFQVVM

SEQ ID NO: 795427 - protein, 395 aa, Homo sapiens
GTRSSWAHGIGRGRFGRVMTDDESESVLSDSHEGSELELPVIQLCGLVEELSYVNSALKTETEMFEKYYAKLEPRDQRPPRLSEIKISAADYAQFRGRRRSKSRTGMDRGVGLTADQKLELVQKEVADMKDDLRHTRANAERDLQHHEAIIEEAEIRWSEVSREVHEFEKDILKAISKKKGSILATQKVMKYIEDMNRRRDNMKEKLRLKNVSLKVQRKKMLLQLRQKEEVSEALHDVDFQQLKIENAQFLETIDARNQELTQLKLSSGNTLQVLNAYKSKLHKAMEIYLNLDKEILLRKELLEKIEKETLQVEEDRAKAEAVNKRLRKQLAEFRAPQVMTYVREKILNADLEKSIRMWERKVEIAEMSLKGHRKAWNRMKITNEQLQADYLAGK

SEQ ID NO: 795428 - protein, 326 aa, Homo sapiens
AVNRARSHLVTAIITKLNISSSYAQFRGRRRSKSRTGMDRGVGLTADQKLELVQKEVADMKDDLRHTRANAERDLQHHEAIIEEAEIRWSEVSREVHEFEKDILKAISKKKGSILATQKVMKYIEDMNRRRDNMKEKLRLKNVSLKVQRKKMLLQLRQKEEVSEALHDVDFQQLKIENAQFLETIDARNQELTQLKLSSGNTLQVLNAYKSKLHKAMEIYLNLDKEILLRKELLEKIEKETLQVEEDRAKAEAVNKRLRKQLAEFRAPQVMTYVREKILNADLEKSIRMWERKVEIAEMSLKGHRKAWNRMKITNEQLQADYLAGK

SEQ ID NO: 795429 - protein, 289 aa, Homo sapiens
MDRGVGLTADQKLELVQKEVADMKDDLRHTRANAERDLQHHEAIIEEAEIRWSEVSREVHEFEKDILKAISKKKGSILATQKVMKYIEDMNRRRDNMKEKLRLKNVSLKVQRKKMLLQLRQKEEVSEALHDVDFQQLKIENAQFLETIDARNQELTQLKLSSGNTLQVLNAYKSKLHKAMEIYLNLDKEILLRKELLEKIEKETLQVEEDRAKAEAVNKRLRKQLAEFRAPQVMTYVREKILNADLEKSIRMWERKVEIAEMSLKGHRKAWNRMKITNEQLQADYLAGK

SEQ ID NO: 795430 - protein, 102 aa, Homo sapiens
MGSKMASASRVVQVVKPHTPLIRFPDRRDNPKPNVSEALRSAGLPSHSSVISQHSKGSKSPDLLMYQGPPDTAEIIKTLPQKYRRKLVSQEEMEFIQRGGPE

SEQ ID NO: 795431 - protein, 353 aa, Homo sapiens
CYLQLKMERARRRGGGGGRGRGGKNVGGSGLSKSRLYPQAQHSHYPHYAASATPNQAGGAAEIQELASKRVDIQKKRFYLDVKQSSRGRFLKIAEVWIGRGRQDNIRKSKLTLSLSVAAELKDCLGDFIEHYAHLGLKGHRQEHGHSKEQGSRRRQKHSAPSPPVSVGSEEHPHSVLKTDYIERDNRKYYLDLKENQRGRFLRIRQTMMRGTGMIGYFGHSLGQEQTIVLPAQGMIEFRDALVQLIEDYGEGDIEERRGGDDDPLELPEGTSFRVDNKRFYFDVGSNKYGIFLKVSEVRPPYRNTITVPFKAWTRFGENFIKYEEEMRKICNSHKEKRMDGRKASGEEQECLD

SEQ ID NO: 795432 - protein, 102 aa, Homo sapiens
QIQKINEAKSWFFEKINKTDKPLARLTKKRREKIQITSLRNETEDITTEIQKIIQGYYEHLYAHKLENLEEMGKFPEKYRSLNQEELDTLNRPISSEIKVVI

SEQ ID NO: 795433 - protein, 372 aa, Homo sapiens
MKAGATSMWASCCGLLNEVMGTGAVRGQQSAFAGATGPFRFTPNPEFSTYPPAATEGPNIVCKACGLSFSVFRKKHVCCDCKKDFCSVCSVLQENLRRCSTCHLLQETAFQRPQLMRLKVKDLRQYLILRNIPIDTCREKEDLVDLVLCHHGLGSEDDMDTSSLNSSRSQTSSFFTRSFFSNYTAPSATMSSFQGELMDGDQTSRSGVPAQVQSEITSANTEDDDDDDDEDDDDEEENAEDRNPGLSKERVRASLSDLSSLDDVEGMSVRQLKEILARNFVNYSGCCEKWELVEKVNRLYKENEENQKSYGERLQLQDEEDDSLCRICMDAVIDCVLLECGHMVTCTKCGKRMSECPICRQYVVRAVHVFKS

SEQ ID NO: 795434 - protein, 372 aa, Homo sapiens; identical to SEQ ID NO: 795433

SEQ ID NO: 795435 - protein, 372 aa, Homo sapiens; identical to SEQ ID NO: 795433

SEQ ID NO: 795436 - protein, 365 aa, Homo sapiens
MWASCCGLLNEVMGTGAVRGQQSAFAGATGPFRFTPNPEFSTYPPAATEGPNIVCKACGLSFSVFRKKHVCCDCKKDFCSVCSVLQENLRRCSTCHLLQETAFQRPQLMRLKVKDLRQYLILRNIPIDTCREKEDLVDLVLCHHGLGSEDDMDTSSLNSSRSQTSSFFTRSFFSNYTAPSATMSSFQGELMDGDQTSRSGVPAQVQSEITSANTEDDDDDDDEDDDDEEENAEDRNPGLSKERVRASLSDLSSLDDVEGMSVRQLKEILARNFVNYSGCCEKWELVEKVNRLYKENEENQKSYGERLQLQDEEDDSLCRICMDAVIDCVLLECGHMVTCTKCGKRMSECPICRQYVVRAVHVFKS

SEQ ID NO: 795437 - protein, 180 aa, Homo sapiens
MKGELMDGDQTSRSGVPAQVQSEITSANTEDDDDDDDEDDDDEEENAEDRNPGLSKERVRASLSDLSSLDDVEGMSVRQLKEILARNFVNYSGCCEKWELVEKVNRLYKENEENQKSYGERLQLQDEEDDSLCRICMDAVIDCVLLECGHMVTCTKCGKRMSECPICRQYVVRAVHVFKS

SEQ ID NO: 795438 - protein, 236 aa, Homo sapiens
MKAGATSMWASCCGLLNEVMGTGAVRGQQSAFAGATGPFRFTPNPEFSTYPPAATEGPNIVCKACGLSFSVFRKKVQSEITSANTEDDDDDDDEDDDDEEENAEDRNPGLSKERVRASLSDLSSLDDVEGMSVRQLKEILARNFVNYSGCCEKWELVEKVNRLYKENEENQKSYGERLQLQDEEDDSLCRICMDAVIDCVLLECGHMVTCTKCGKRMSECPICRQYVVRAVHVFKS

SEQ ID NO: 795439 - protein, 323 aa, Homo sapiens
MKAGATSMWASCCGLLNEVMGTGAVRGQQSAFAGATGPFRFTPNPEFSTYPPAATEGPNIVCKACGLSFSVFRKKHVCCDCKKDFCSVCSVLQENLRRCSTCHLLQETAFQRPQLMRLKVKDLRQYLILRNIPIDTCREKEDLVDLVLCHHGLGSEDDMDTSSLNSSRSQTSSFFTRSFFSNYTAPSATMSSFQGELMDGDQTSRSGVPAQVQSEITSANTEDDDDDDDEDDDDEEENAEDRNPGLSKERVRASLSDLSSLDDVEGMSVRQLKEILARNFVNYSGCCEKWELVEKVNRLYKENEENQKSCRFIFSFFPCSIFP

SEQ ID NO: 795440 - protein, 216 aa, Homo sapiens
MKAGATSMWASCCGLLNEVMGTGAVRGQQSAFAGATGPFRFTPNPEFSTYPPAATEGPNIVCKACGLSFSVFRKKHVCCDCKKDFCSVCSVLQENLRRCSTCHLLQETAFQRPQLMRLKVKDLRQYLILRNIPIDTCREKEDLVDLVLCHHGLGSEDDMDTSSLNSSRSQTSSFFTRSFFSNYTAPSATMSSFQGELMDGDQTSRSGVPAQVRGGN

SEQ ID NO: 795441 - protein, 103 aa, Homo sapiens [sequence omitted]

SEQ ID NO: 795442 - protein, 323 aa, Homo sapiens; identical to SEQ ID NO: 795439

SEQ ID NO: 795443 - protein, 373 aa, Homo sapiens
MRKAGATSMWASCCGLLNEVMGTGAVRGQQSAFAGATGPFRFTPNPEFSTYPPAATEGPNIVCKACGLSFSVFRKKHVCCDCKKDFCSVCSVLQENLRRCSTCHLLQETAFQRPQLMRLKVKDLRQYLILRNIPIDTCREKEDLVDLVLCHHGLGSEDDMDTSSLNSSRSQTSSFFTRSFFSNYTAPSATMSSFQGELMDGDQTSRSGVPAQVQSEITSANTEDDDDDDDEDDDDEEENAEDRNPGLSKERVRASLSDLSSLDDVEGMSVRQLKEILARNFVNYSGCCEKWELVEKVNRLYKENEENQKSYGERLQLQDEEDDSLCRICMDAVIDCVLLECGHMVTCTKCGKRMSECPICRQYVVRAVHVFKS

SEQ ID NO: 795444 - protein, 372 aa, Homo sapiens; identical to SEQ ID NO: 795433

SEQ ID NO: 795445 - protein, 163 aa, Homo sapiens
MKVQSEITSANTEDDDDDDDEDDDDEEENAEDRNPGLSKERVRASLSDLSSLDDVEGMSVRQLKEILARNFVNYSGCCEKWELVEKVNRLYKENEENQKSYGERLQLQDEEDDSLCRICMDAVIDCVLLECGHMVTCTKCGKRMSECPICRQYVVRAVHVFKS

SEQ ID NO: 795446 - protein, 406 aa, Homo sapiens
SRLVPALRCMDHRGPPSQPRGGAAAGALAVVGGQWAMLGAVEGPRWKQAEDIRDIYDFRDVLGTGAFSEVILAEDKRTQKLVAIKCIAKEALEGKEGSMENEIAVLHKIKHPNIVALDDIYESGGHLYLIMQLVSGGELFDRIVEKGFYTERDASRLIFQVLDAVKYLHDLGIVHRDLKPENLLYYSLDEDSKIMISDFGLSKMEDPGSVLSTACGTPGYVAPEVLAQKPYSKAVDCWSIGVIAYILLCGYPPFYDENDAKLFEQILKAEYEFDSPYWDDISDSAKDFIRHLMEKDPEKRFTCEQALQHPWIAGDTALDKNIHQSVSEQIKKNFAKSKWKQAFNATAVVRHMRKLQLGTSQEGQGQTASHGELLTPVAGGPAAGCCCRNCCVEPGTELSPTLPHQL

SEQ ID NO: 795447 - protein, 326 aa, Homo sapiens
MLGAVEGPRWKQAEDIRDIYDFRDVLGTIKHPNIVALDDIYESGGHLYLIMQLVSGGELFDRIVEKGFYTERDASRLIFQVLDAVKYLHDLGIVHRDLKPENLLYYSLDEDSKIMISDFGLSKMEDPGSVLSTACGTPGYVAPEVLAQKPYSKAVDCWSIGVIAYILLCGYPPFYDENDAKLFEQILKAEYEFDSPYWDDISDSAKDFIRHLMEKDPEKRFTCEQALQHPWIAGDTALDKNIHQSVSEQIKKNFAKSKWKQAFNATAVVRHMRKLQLGTSQEGQGQTASHGELLTPVAGGPAAGCCCRNCCVEPGTELSPTLPHQL

SEQ ID NO: 795448 - protein, 792 aa, Homo sapiens
MSSVSTESKLQQAVSLQGVDPETCMIVFKNHWAQVVKILEKHDPLKNTQAKYGSIPPDEASAVQNYVEHMLFLLIEEQAKDAAMGPILEFVVSENIMEKLFLWSLRREFTDETKIEQLKMYEMLVTQSHQPLLHHKPILKPLMMLLSSCSGTTTPTVEEKLVVLLNQLCSILAKDPSILELFFHTSEDQGAANFLIFSLLIPFIHREGSVGQQARDALLFIMSLSAENTMVAHHIVENTYFCPVLATGLSGLYSSLPTKLEEKGEEWHCLLKDDWLLLPSLVQFMNSLEFCNAVIQVAHPLIRNQLVNYIYNGFLVPVLAPALHKVTVEEVMTTTAYLDLFLRSISEPALLEIFLRFILLHQHENVHILDTLTSRINTPFRLCVVSLALFRTLIGLHCEDVMLQLVLRYLIPCNHMMLSQRWAVKERDCYSVSAAKLLALTPVCCSSGITLTLGNQERDYILWSKCMHDTSGPVERPFPEAFSESACIVEYGKALDISYLQYLWEAHTNILRCMRDCRVWSALYDGDSPDPEMFLQSLTEEGSVSSACPVFGLPQQLPRKTGPQLAPRKDKSQTELEWDDSYDTGISSGADVGSPGPYDDLEVSGPPAPIDPPKHIQEMKKNALLLFKGSYIEESDFQDDVMVYRLCAEKDSEDMKDSQEEAARPPAEAQAEVQSVPINNGPLLSTQPETDSEEEWNRDNSDPFHSEPKEPKQEREPEAAPESNSELASPAPEAEHSSNLTAAHPESEELIAQYDQIIKELDSGAEGLMEQNYPTPDPLLLTKEEEGKEESK

SEQ ID NO: 795449 - protein, 792 aa, Homo sapiens; identical to SEQ ID NO: 795448

SEQ ID NO: 795450 - protein, 1167 aa, Homo sapiens
SEQASAPLAKDKQIEELRQECHLLQARVASGPCSDLHTGRGGPCTQWLNVRDLDRLQRESQREVLRLQRQLMLQQGNGGAWPEAGGQSATCEEVRRQMLALERELDQRRRECQELGTQAAPARRRGEEAETQLQAALLKNAWLAEENGRLQAKTDWVRKVEAENSEVRGHLGRACQERDASGLIAEQLLQQAARGQDRQQQLQRDPQKALCDLHPSWKEIQALQCRPGHPPEQPWETSQMPESQVKGSRRPKFHARPEDYAVSQPNRDIQEKREASLEESPVALGESASVPQVSETVPASQPLSKKTSSQSNSSSEGSMWATVPSSPTLDRDTASEVDDLEPDSVSLALEMGGSAAPAAPKLKIFMAQYNYNPFEGPNDHPEGELPLTAGDYIYIFGDMDEDGFYEGELEDGRRGLVPSNFVEQIPDSYIPGCLPAKSPDLGPSQLPAGQDEALEEDSLLSGKAQGMVDRGLCQMVRVGSKTEVATEILDTKTEACQLGLLQSMGKQGLSRPLLGTKGVLRMAPMQLHLQNVTATSANITWVYSSHRHPHVVYLDDREHALTPAGVSCYTFQGLCPGTHYRVRVEVRLPWDLLQVYWGTMSSTVTFDTLLAGPPYPPLDVLVERHASPGVLVVSWLPVTIDSAGSSNGVQVTGYAVYADGLKVCEVADATAGSTVLEFSQLQVPLTWQKVSVRTMSLCGESLDSVPAQIPEDFFMCHRWPETPPFSYTCGDPSTYRVTFPVCPQKLSLAPPSAKASPHNPGSCGEPQAKFLEAFFEEPPRRQSPVSNLGSEGECPSSGAGSQAQELAEAWEGCRKDLLFQKSPQNHRPPSVSDQPGEKENCYQHMGTSKSPAPGFIHLRTECGPRKEPCQEKAALERVLRQKQDAQGFTPPQLGASQQYASDFHNVLKEEQEALCLDLWGTERREERREPEPHSRQGQALGVKRGCQLHEPSSALCPAPSAKVIKMPRGGPQQLGTGANTPARVFVALSDYNPLVMSANLKAAEEELVFQKRQLLRVWGSQDTHDFYLSECNRQVGNIPGRLVAEMEVGTEQTDRRWRSPAQGHLPSVAHLEDFQGLTIPQGSSLVLQGNSKRLPLWTPKIMIAALDYDPGDGQMGGQGKGRLALRAGDVVMVYGPMDDQGFYYGELGGHRGLVPAHLLDHMSLHGH

SEQ ID NO: 795451 - protein, 113 aa, Homo sapiens
MARRLLAMRRSHSCSAPSVPGVPSQATDLPLRKGIEQGVGGDLWGLGPGKWGSGRQNGAGVSAPPRPFLSALVTASLVSTLLTGFSFGLEWASDSCLPQPPSRTPGFSLFLVP

SEQ ID NO: 795452 - protein, 103 aa, Homo sapiens
SQGAMGISGVTKLWGPSRSLCSLLALPSSVELKQRIQLPKVGYGFLMRSCLIESRRTLSSSCPRPTPPPRLAVPVCCGVSPTPWEAPSSLSAPGSLQASFLQL

SEQ ID NO: 795453 - protein, 227 aa, Homo sapiens
TWGGYVGGRGSWFRNKRAGFRLLQPHRSLGPPLLLSASHILSVSLFYVYLCHFSAHFCFLSLCFMALISYCFLPFSLTSLLPIFLVSVSHLFLHLSVSVFSHSFSSLSASQSSFGLSSPHVFYFSFLLSFPSLFLTFISFLHIFSFTLFFVSYLPFSVPFIALCLPALHPLPCAACEVKGSADEKDRDTSPFFPLVRPLAHTPLYPSFLYLHKLQVELRKPPPSEAS

SEQ ID NO: 795454 - protein, 99 aa, Homo sapiens
MERAYPPRCGESRQPTDFSTRRRPPWQHLRIFTLGPCSFSSLKKISTLSRPGDETPPCMPASVQGMGLRQGEGSTAEQVGRHSRIRMKGDELDQSPRGF

SEQ ID NO: 795455 - protein, 212 aa, Homo sapiens
MAGPGPGPGDPDEQYDFLFKLVLVGDASVGKTCVVQRFKTGAFSERQGSTIGVDFTMKTLEIQGKRVKLQIWDTAGQERFRTITQSYYRSANGAILAYDITKRSSFLSVPHWIEDVRKYAGSNIVQLLIGNKSDLSELREVSLAEAQSLAEHYDILCAIETSAKDSSNVEEAFLRVATELIMRHGGPLFSEKSPDHIQLNSKDIGEGWGCGC

SEQ ID NO: 795456 - protein, 203 aa, Homo sapiens
MAGPGPGPGDPDEQYDFLFKLVLVGDASVGKTCVVQRFKTGAFSERQGSTIGVDFTMKTLEIQGKRVKLQIWDTAGQERFRTITQSYYRSANGAILAYDITKRSSFLSVPHWIEDVRKYAGSNIVQLLIGNKSDRSTHRHLPGVWLTALSGPLSFLTKNVASHFHQHSMGSRPTARWGHGPQLGGDCLLAQGPVFCHSGCKIS

SEQ ID NO: 795457 - protein, 188 aa, Homo sapiens
QLQQPGEALELCILWPGCGMEALLEEGEAGYPGGPPCQPAAGPPPSSHSKTGLNPPVWATVGGASSPPCPMPAGSDRFLSWVCFTCGSRLLLSRDVSSALGSSRSSWGSAQSSRARAMRPTDLVPERSSREAPAPSRRGTCFLPSLPPQHSQTSPWGLAHCLIRTSEFSDKKCSFSFSSAQHGVTAHS

SEQ ID NO: 795458 - protein, 32 aa, Homo sapiens
MGNKRRSLWRKVYVPAMGTLIVPEHSVEEAVL

SEQ ID NO: 795459 - protein, 124 aa, Homo sapiens
MLSCPTLGWFSWQTLALKCKSCTARSARTPSGPGQALTYMLGTHFSRQSSHPSGSPAQNGTLSKCQCLGRIHVRSWYNPGNFLWEMHECGTLLIALRVQSVACPASLHNPSVPWMAGARPDAPS

SEQ ID NO: 795460 - protein, 136 aa, Homo sapiens
PWQNLHTHSARGDGSSPRKERFRHPLFLPNVQHVIKLKHFSDCCMSFIDFQSTKIVVLVNFVQTYSCFLGRGFADFSHGCSWKYASTPSVSDSLDPGCNWRICIAQKRSVLQFLPHSLSCSCFHHVKCLLPHCLLP

SEQ ID NO: 795461 - protein, 308 aa, Homo sapiens
MGGPRGAGWVAAGLLLGAGACYCIYRLTRGRRRGDRELGIRSSKSAEDLTDGSYDDVLNAEQLQKLLYLLESTEDPVIIERALITLGNNAAFSVNQAIIRELGGIPIVANKINHSNQSIKEKALNALNNLSVNVENQIKIKIYISQVCEDVFSGPLNSAVQLAGLTLLTNMTVTNDHQHMLHSYITDLFQVLLTGNGNTKVQVLKLLLNLSENPAMTEGLLRAQVDSSFLSLYDSHVAKEILLRVLTLFQNIKNCLKIEGHLAVQPTFTEGSLFFLLHGEECAQKIRALVDHHDAEVKEKVVTIIPKI

SEQ ID NO: 795462 - protein, 308 aa, Homo sapiens; identical to SEQ ID NO: 795461

SEQ ID NO: 795463 - protein, 249 aa, Homo sapiens
MGGPRGAGWVAAGLLLGAGACYCIYRLTRGRRRGDRELGIRSSKSAEDLTDGSYDDVLNAEQLQKLLYLLESTEDPVIIERALITLGNNAAFSVNQAIIRELGGIPIVANKINHSNQSIKEKALNALNNLSVNVENQIKIKVQVLKLLLNLSENPAMTEGLLRAQVDSSFLSLYDSHVAKEILLRVLTLFQNIKNCLKIEGHLAVQPTFTEGSLFFLLHGEECAQKIRALVDHHDAEVKEKVVTIIPKI

SEQ ID NO: 795464 - protein, 354 aa, Homo sapiens
MGGPRGAGWVAAGLLLGAGACYCIYRLTRGRRRGDRELGIRSSKSAGALEEGTSEGQLCGRSARPQTGGTWESQWSKTSQPEDLTDGSYDDVLNAEQLQKLLYLLESTEDPVIIERALITLGNNAAFSVNQIPMKLVTGITFAIIRELGGIPIVANKINHSNQSIKEKALNALNNLSVNVENQIKIKIYISQVCEDVFSGPLNSAVQLAGLTLLTNMTVTNDHQHMLHSYITDLFQVLLTGNGNTKVQVLKLLLNLSENPAMTEGLLRAQVDSSFLSLYDSHVAKEILLRVLTLFQNIKNCLKIEGHLAVQPTFTEGSLFFLLHGEECAQKIRALVDHHDAEVKEKVVTIIPKI

SEQ ID NO: 795465 - protein, 158 aa, Homo sapiens
MGGPRGAGWVAAGLLLGAGACYCIYRLTRGRRRGDRELGIRSSKSAEDLTDGSYDDVLNAEQLQKLLYLLESTEDPVIIERALITLGNNAAFSVNQAIIRELGGIPIVANKINHSNQSIKEKALNALNNLSVNVENQIKIKPRITFRGMENKTEEGGT

SEQ ID NO: 795466 - protein, 193 aa, Homo sapiens
MGGPRGAGWVAAGLLLGAGACYCIYRLTRGRRRGDRELGIRSSKSAGALEEGTSEGQLCGRSARPQTGGTWESQWSKTSQPEDLTDGSYDDVLNAEQLQKLLYLLESTEDPVIIERALITLGNNAAFSVNQAIIRELGGIPIVANKINHSNQSIKEKALNALNNLSVNVENQIKIKPRITFRGMENKTEEGGT

SEQ ID NO: 795467 - protein, 308 aa, Homo sapiens; identical to SEQ ID NO: 795461

SEQ ID NO: 795468 - protein, 271 aa, Homo sapiens
MGGPRGAGWVAAGLLLGAGACYCIYRLTRGRRRGDRELGIRSSKSAGALEEGTSEGQLCGRSARPQTGGTWESQWSKTSQPEDLTDGSYDDVLNAEQLQKLLYLLESTEDPVIIERALITLGNNAAFSVNQIPMKLVTGITFAIIRELGGIPIVANKINHSNQSIKEKALNALNNLSVNVENQIKIKVDSSFLSLYDSHVAKEILLRVLTLFQNIKNCLKIEGHLAVQPTFTEGSLFFLLHGEECAQKIRALVDHHDAEVKEKVVTIIPKI

SEQ ID NO: 795469 - protein, 249 aa, Homo sapiens; identical to SEQ ID NO: 795463

SEQ ID NO: 795470 - protein, 308 aa, Homo sapiens; identical to SEQ ID NO: 795461

SEQ ID NO: 795471 - protein, 308 aa, Homo sapiens; identical to SEQ ID NO: 795461

SEQ ID NO: 795472 - protein, 343 aa, Homo sapiens
MGGPRGAGWVAAGLLLGAGACYCIYRLTRGRRRGDRELGIRSSKSAGALEEGTSEGQLCGRSARPQTGGTWESQWSKTSQPEDLTDGSYDDVLNAEQLQKLLYLLESTEDPVIIERALITLGNNAAFSVNQAIIRELGGIPIVANKINHSNQSIKEKALNALNNLSVNVENQIKIKIYISQVCEDVFSGPLNSAVQLAGLTLLTNMTVTNDHQHMLHSYITDLFQVLLTGNGNTKVQVLKLLLNLSENPAMTEGLLRAQVDSSFLSLYDSHVAKEILLRVLTLFQNIKNCLKIEGHLAVQPTFTEGSLFFLLHGEECAQKIRALVDHHDAEVKEKVVTIIPKI

SEQ ID NO: 795473 - protein, 284 aa, Homo sapiens
MGGPRGAGWVAAGLLLGAGACYCIYRLTRGRRRGDRELGIRSSKSAGALEEGTSEGQLCGRSARPQTGGTWESQWSKTSQPEDLTDGSYDDVLNAEQLQKLLYLLESTEDPVIIERALITLGNNAAFSVNQAIIRELGGIPIVANKINHSNQSIKEKALNALNNLSVNVENQIKIKVQVLKLLLNLSENPAMTEGLLRAQVDSSFLSLYDSHVAKEILLRVLTLFQNIKNCLKIEGHLAVQPTFTEGSLFFLLHGEECAQKIRALVDHHDAEVKEKVVTIIPKI

SEQ ID NO: 795474 - protein, 284 aa, Homo sapiens
MGGPRGAGWVAAGLLLGAGACYCIYRLTRGRRRGDRELGIRSSKSAEDLTDGSYDDVLNAEQLQKLLYLLESTEDPVIIERALITLGNNAAFSVNQAIIRELGGIPIVANKINHSNQSIKEKALNALNNLSVNVENQIKIKIYISQVCEDVFSGPLNSAVQLAGLTLLTNMTVTNDHQHMLHSYITDLFQVLLTGNGNTKVDSSFLSLYDSHVAKEILLRVLTLFQNIKNCLKIEGHLAVQPTFTEGSLFFLLHGEECAQKIRALVDHHDAEVKEKVVTIIPKI

SEQ ID NO: 795475 - protein, 308 aa, Homo sapiens; identical to SEQ ID NO: 795461

SEQ ID NO: 795476 - protein, 191 aa, Homo sapiens
DRELGIRSSKSAEDLTDGSYDDVLNAEQLQKLLYLLESTEDPVIIERALITLGNNAAFSVNQAIIRELGGIPIVANKINHSNQSIKEKALNALNNLSVNVENQIKIKVDSSFLSLYDSHVAKEILLRVLTLFQNIKNCLKIEGHLAVQPTFTEGSLFFLLHGEECAQKIRALVDHHDAEVKEKVVTIIPKI

SEQ ID NO: 795477 - protein, 265 aa, Homo sapiens
MGGPRGAGWVAAGLLLGAGACYCIYRLTRGRRRGDRELGIRSSKSAEDLTDGSYDDVLNAEQLQKLLYLLESTEDPVIIERALITLGNNAAFSVNQAIIRELGGIPIVANKINHSNQSIKEKALNALNNLSVNVENQIKIKIYISQVCEDVFSGPLNSAVQLAGLTLLTNMTVTNDHQHMLHSYITDLFQVLLTGNGNTKVQVLKLLLNLSENPAMTEGLLRAQVDSSFLSLYDSHVAKEILLRVLTLFHDAEVKEKVVTIIPKI

SEQ ID NO: 795478 - protein, 43 aa, Homo sapiens
MLERSCSPATEQSWTENDFEELEKKASDDQITLSYGRTFKPKA

SEQ ID NO: 795479 - protein, 73 aa, Homo sapiens
HQASLTNASLIPRASSLKGLWLCSRVLFMSHYVGRMSQPSAGTGKDGKTGPFQEAEAKVWKITRPSSPIPSLG

SEQ ID NO: 795480 - protein, 472 aa, Homo sapiens
WRRSRPDRRGVGARAGAAVSQSTGSRAASVSVARRVEAGVSRAAGRMTPLCLNCSVLPGDLYPGGARNPMACNGSAARGHFDPEDLNLTDEALRLKYLGPQQTELFMPICATYLLIFVVGAVGNGLTCLVILRHKAMRTPTNYYLFSLAVSDLLVLLVGLPLELYEMWHNYPFLLGVGGCYFRTLLFEMVCLASVLNVTALSVERYVAVVHPLQARSMVTRAHVRRVLGAVWGLAMLCSLPNTSLHGIRQLHVPCRGPVPDSAVCMLVRPRALYNMVVQTTALLFFCLPMAIMSVLYLLIGLRLRRERLLLMQEAKGRGSAAARSRYTCRLQQHDRGRRQVTKMLFVLVVVFGICWAPFHADRVMWSVVSQWTDGLHLAFQHVHVISGIFFYLGSAANPVLYSLMSSRFRETFQEALCLGACCHRLRPRHSSHSLSRMTTGSTLCDVGSLGSWVHPLAGNDGPEAQQETDPS

SEQ ID NO: 795481 - protein, 67 aa, Homo sapiens
MCMNVPCKLVNAIKLEVLEIVGTDVLTKSALQSGFPIFIPHEGSVISERNDTGFLREARDLLGLPPH

SEQ ID NO: 795482 - protein, 65 aa, Homo sapiens
WPTVPQRRSVSGQSSPAQIPPLFPAPLGPGAPGTRALAPHTSAPLSAYSPQDASHMHIPQGHAVP

SEQ ID NO: 795483 - protein, 184 aa, Homo sapiens
MRGCGSRRLCGSWRGCWSWSGKPSTSSRPSPTAALRSWNNENKSALQLERQVKELKLGEPGSYQPAETAAKAQLSLMALPGEGYGGGHLDNEEEAPRPMLNIPGDLESREAMVAFFNSAGASAQEEQSVCCQPLAHPVASSQKKPEAAAPAPETGGESVCGDTHWALQEAMEKLQQLYGRRRWT

SEQ ID NO: 795484 - protein, 387 aa, Homo sapiens
WKESSMNIIELEIPDQNIDVDALQVAFGSLYRDDVLIKPSRVVAILAAACMLQLDGLIQQCGETMKETINVKTVCGYYTSVEIYGLDSVKKKCLEWLLNNLMTHQNVKLFKELSINVMKQLIGSSNLFVMQVEMDVYTTLKKWMFLQLVPSWNGSLKQLLTETDVWFSKQRKDFEGMAFLETEPGKPFVSVFRHLRLQYIISDLASARIIEQDGIVPSEWLSSVYKQQWFAMLRAEQDREVGPQEINKEDLEGSSMRCGRKLAKDGEYYWRWTGFNFGFDLLVIYTNRYIIFKRNTLNQPCSGSVSLQPRRSIAFRLRLASFDSSGKLVCSRTTGYQILILEKDQEQVVMNLDSRFLTFPLYICCNFLYISPEKGIENNRHPEDPEN

SEQ ID NO: 795485 - protein, 140 aa, Homo sapiens
MPSCLHSVSPTPEDQVSAAPLLARALHWGAKGWRPCRWPCPPWASRPLRGWPVLPITSLGQSHHLLSIKLPQRLRPPGLHQPSPLGSVCAGPHPHLWEETEAQEAVWLAGSLGSGPHCSPVKPLWEGSGSRWCPQSSLAC

SEQ ID NO: 795486 - protein, 110 aa, Homo sapiens
MALWMRLLPLLALLALWGPDPAAAFVNQHLCGSHLVEALYLVCGERGFFYTPKTRREAEDLQVGQVELGGGPGAGSLQPLALEGSLQKRGIVEQCCTSICSLYQLENYCN

SEQ ID NO: 795487 - protein, 110 aa, Homo sapiens; identical to SEQ ID NO: 795486

SEQ ID NO: 795488 - protein, 110 aa, Homo sapiens; identical to SEQ ID NO: 795486

SEQ ID NO: 795489 - protein, 110 aa, Homo sapiens; identical to SEQ ID NO: 795486

SEQ ID NO: 795490 - protein, 110 aa, Homo sapiens; identical to SEQ ID NO: 795486

SEQ ID NO: 795491 - protein, 175 aa, Homo sapiens
FQGQDTILDYTLREVDTVKREPRAAPGQETWLLNSRKPSSPGGIEWLQSRVSSGINWMEGKISCRIRHEMRLLPLLALLALWGPDPAAAFVNQHLCGSHLVEALYLVCGERGFFYTPKTRREAEDLQVGQVELGGGPGAGSLQPLALEGSLQKRGIVEQCCTSICSLYQLENYCN

SEQ ID NO: 795492 - protein, 110 aa, Homo sapiens; identical to SEQ ID NO: 795486

SEQ ID NO: 795493 - protein, 110 aa, Homo sapiens; identical to SEQ ID NO: 795486

SEQ ID NO: 795494 - protein, 110 aa, Homo sapiens; identical to SEQ ID NO: 795486

SEQ ID NO: 795495 - protein, 110 aa, Homo sapiens; identical to SEQ ID NO: 795486

SEQ ID NO: 795496 - protein, 110 aa, Homo sapiens; identical to SEQ ID NO: 795486

SEQ ID NO: 795497 - protein, 110 aa, Homo sapiens; identical to SEQ ID NO: 795486

SEQ ID NO: 795498 - protein, 110 aa, Homo sapiens; identical to SEQ ID NO: 795486

SEQ ID NO: 795499 - protein, 110 aa, Homo sapiens; identical to SEQ ID NO: 795486

SEQ ID NO: 795500 - protein, 110 aa, Homo sapiens; identical to SEQ ID NO: 795486

SEQ ID NO: 795501 - protein, 110 aa, Homo sapiens; identical to SEQ ID NO: 795486

SEQ ID NO: 795502 - protein, 110 aa, Homo sapiens; identical to SEQ ID NO: 795486

SEQ ID NO: 795503 - protein, 81 aa, Homo sapiens
WRAGGHCVSLTVSSCVPLPRRCSGTCSARHVLAVGQVELGGGPGAGSLQPLALEGSLQKRGIVEQCCTSICSLYQLENYCN

SEQ ID NO: 795504 - protein, 62 aa, Homo sapiens
MPAPNTTGAAPSSTQWCSPIPAPIRAAVTIAGGIVTAEDLNNYCAELIEHPLNISLGDAVLY

SEQ ID NO: 795505 - protein, 114 aa, Homo sapiens
MALPKDAIPSLSECQCGICMEILVEPVTLPCNHTLCKPCFQSTVEKASLCCPFCRRRVSSWTRYHTRRNSLVNVELWTIIQKHYPRECKLRASGQESEEVGEIWTQRQTRTEGR

SEQ ID NO: 795506 - protein, 301 aa, Homo sapiens
MARHGLPLLPLLSLLVGAWLKLGNGQATSMVQLQGGRFLMGTNSPDSRDGEGPVREATVKPFAIDIFPVTNKDFRDFVREKKYRTEAEMFGWSFVFEDFVSDELRNKATQPMKSVLWWLPVEKAFWRQPAGPGSGIRERLEHPVLHVSWNDARAYCAWRGKRLPTEEEWEFAARGGLKGQVYPWGNWFQPNRTNLWQGKFPKGDKAEDGFHGVSPVNAFPAQNNYGLYDLLGNVWEWTASPYQAAEQDMRVLRGASWIDTADGSANHRARVTTRMGNTPDSASDNLGFRCAADAGRPPGEL

SEQ ID NO: 795507 - protein, 339 aa, Homo sapiens
MARHGLPLLPLLSLLVGAWLKLGNGQATSMVQLQGGRFLMGTNSPDSRDGEGPVREATVKPFAIDIFPVTNKDFRDFVREKKYRTEAEMFGWSFVFEDFVSDELRNKATQPMKSVLWWLPVEKAFWRQPAGPGSGIRERLEHPVLHVSWNDARAYCAWRGKRLPTEEEWEFAARGGLKGQVYPWGNWFQPNRTNLWQGKFPKGDKAEDGFHGVSPVNAFPAQNNYGWATLQIQPQTTSVSAVLQTQAGRQGSCKQPGGDKEKSLLGSLSFPGHVANSAIPSSRASASGKNFPFPVSHPSVAGASHQGRRGLSLLCFGEGAQCVLTMAGGQVFLLEAKYY

SEQ ID NO: 795508 - protein, 260 aa, Homo sapiens
PWVYAAQRGSPDGPAWVTAAAPAVAPGRRVAQARDFVREKKYRTEAEMFGWSFVFEDFVSDELRNKATQPMKSVLWWLPVEKAFWRQPAGPGSGIRERLEHPVLHVSWNDARAYCAWRGKRLPTEEEWEFAARGGLKGQVYPWGNWFQPNRTNLWQGKFPKGDKAEDGFHGVSPVNAFPAQNNYGLYDLLGNVWEWTASPYQAAEQDMRVLRGASWIDTADGSANHRARVTTRMGNTPDSASDNLGFRCAADAGRPPGEL

SEQ ID NO: 795509 - protein, 162 aa, Homo sapiens
GRGCTRRSAAVLMARHGLPLLPLLSLLVGAWLKLGNGQATSMVQLQGGRFLMGTNSPDSRDGEGPVREATVKPFAIDIFPVTNKDFRDFVREKKYRTEAEMFGWSFVFEDFVSDELRNKATQPMKVKFTHGGTGSSQTAPTCGRESSPRETKLRMASMESPQ

SEQ ID NO: 795510 - protein, 160 aa, Homo sapiens
GRGCTRRSAAVLMARHGLPLLPLLSLLVGAWLKLGNGQATSMVQLQGGRFLMGTNSPDSRDGEGPVREATVKPFAIDIFPVTNKDFRDFVREKKYRTEAEMFGWSFVFEDFVSDELRNKATQPMKSVLWWLPVEKAFWRQPAGPGSGIRERLEHPVLHVS

SEQ ID NO: 795511 - protein, 183 aa, Homo sapiens
GRGCTRRSAAVLMARHGLPLLPLLSLLVGAWLKLGNGQATSMVQLQGGRFLMGTNSPDSRDGEGPVREATVKPFAIDIFPVTNKDFRDFVREKKYRTEAEMFGWSFVFEDFVSDELRNKATQPMKVREPGLAAEGIGVGPGQGILWDMGYLGHSGESDLRGGGRGEARETHHGASDQYTLPGS

SEQ ID NO: 795512 - protein, 87 aa, Homo sapiens
  misc_feature (77)..(77): Xaa can be any naturally occurring amino acid
HWPLLCLRGKTTESGSLPPEGLKGQVYPWGNWFQPNRTNLWQGKFPKGDKAEDGFHGVSPVNAFPAQNNYDGLLMHXSWGNSVGEWH

SEQ ID NO: 795513 - protein, 301 aa, Homo sapiens; identical to SEQ ID NO: 795506

SEQ ID NO: 795514 - protein, 238 aa, Homo sapiens
MARHGLPLLPLLSLLVGAWLKLGNGQATSMVQLQGGRFLMGTNSPDSRDGEGPVREATVKPFAIDIFPVTNKDFRDFVREKKYRTEAEMFGWSFVFEDFVSDELRNKATQPMKSVLWWLPVEKAFWRQPAGPGSGIRERLEHPVLHVSWNDARAYCAWRGKRLPTEEEWEFAARGGLKGQVYPWGNWFQPNRTNLWQGKFPKGDKAEDGFHGVSPVNAFPAQNNYVACSHTVTGCHGA

SEQ ID NO: 795515 - protein, 286 aa, Homo sapiens [sequence omitted]

SEQ ID NO: 795516 - protein, 238 aa, Homo sapiens
RSPIQSTNKDLRDFVREKKYRTEAEMFGWSFVFEDFVSDELRNKATQPMKSVLWWLPVEKAFWRQPAGPGSGIRERLEHPVLHVSWNDARAYCAWRGKRLPTEEEWEFAARGGLKGQVYPWGNWFQPNRTNLWQGKFPKGDKAEDGFHGVSPVNAFPAQNNYGLYDLLGNVWEWTASPYQAAEQDMRVLRGASWIDTADGSANHRARVTTRMGNTPDSASDNLGFRCAADAGRPPGEL

SEQ ID NO: 795517 - protein, 220 aa, Homo sapiens
SRSDGCIAISSVEDLADCRMERDENKASQPMKSVLWWLPVEKAFWRQPAGPGSGIRERLEHPVLHVSWNDARAYCAWRGKRLPTEEEWEFAARGGLKGQVYPWGNWFQPNRTNLWQGKFPKGDKAEDGFHGVSPVNAFPAQNNYGLYDLLGNVWEWTASPYQAAEQDMRVLRGASWIDTADGSANHRARVTTRMGNTPDSASDNLGFRCAADAGRPPGEL

SEQ ID NO: 795518 - protein, 177 aa, Homo sapiens
GRGCTRRSAAVLMARHGLPLLPLLSLLVGAWLKLGNGQATSMVQLQGGRFLMGTNSPDSRDGEGPVREATVKPFAIDIFPVTNKDFRDFVREKKYRTEAEMFGWSFVFEDFVSDELRNKATQPMKSVLWWLPVEKAFWRQVKFTHGGTGSSQTAPTCGRESSPRETKLRMASMESPQ

SEQ ID NO: 795519 - protein, 171 aa, Homo sapiens
MLSPPRTTTGSMTSWGTCGSGQHHRTRLLSRTCASSGGHPGSTQLMALPITGPGSPPGWATLQIQPQTTSVSAVLQTQAGRQGSCKQPGGDKEKSLLGSLSFPGHVANSAIPSSRASASGKNFPFPVSHPSVAGASHQGRRGLSLLCFGEGAQCVLTMAGGQVFLLEAKYY

SEQ ID NO: 795520 - protein, 114 aa, Homo sapiens
GRGCTRRSAAVLMARHGLPLLPLLSLLVGAWLKLGNGQATSMVQLQGGRFLMGTNSPDSRDGEGPVREATVKPFAIDIFPVTNKDFRSSLPMGELVPAKPHQPVAGKVPQGRQS

SEQ ID NO: 795521 - protein, 171 aa, Homo sapiens; identical to SEQ ID NO: 795519

SEQ ID NO: 795522 - protein, 63 aa, Homo sapiens
MRSRKPVSLNPGCQPAGPGSGIRERLEHPVLHVSWNDARAYCAWRGKRLPTEEEWEFAARGGL

SEQ ID NO: 795523 - protein, 80 aa, Homo sapiens
GQSSASLRQFPPAELLGAGRVVAQPAHVHRGRLPLRCMRAHAQRGRGCTRRSAAVLMARHGLPLLPLLSLLVGAWLKLGQ

SEQ ID NO: 795524 - protein, 108 aa, Homo sapiens
SPAEPAELCLYRDFVREKKYRTEAEMFGWSFVFEDFVSDELRNKATQPMKVREPGLAAEGIGVGPGQGILWDMGYLGHSGESDLRGGGRGEARETHHGASDQYTLPGS

SEQ ID NO: 795525 - protein, 95 aa, Homo sapiens
LACKFAELKEKIDRRSGKKLEDGPKFLKSGDAAIVDMVPGKPMCVESFSDYPPLGRFAVRDMRQTVAVGVIKAVDKKAAGAGKVTKSAQKAQKAK

SEQ ID NO: 795526 - protein, 692 aa, Homo sapiens
DCEMCQNFFIDSCAAHGPPTFVKDSAVDKGHPNRSALSLPPGLRIGPSGIPQAGLGVWNEASDLPLGLHFGPYEGRITEDEEAANNGYSWLVRRACHFTKGRNCYEYVDGKDKSWANWMRYVNCARDDEEQNLVAFQYHRQIFYRTCRVIRPGCELLVWYGDEYGQELGIKWGSKWKKEEPKPEIHPCPSCCLAFSSQKFLSQHVERNHSSQNFPGPSARKLLQPENPCPGDQNQEQQYPDPHSRNDKTKGQEIKERSKLLNKRTWQREISRAFSSPPKGQMGSCRVGKRIMEEESRTGQKVNPGNTGKLFVGVGISRIAKVKYGECGQGFSVKSDVITHQRTHTGEKLYVCRECGRGFSWKSHLLIHQRIHTGEKPYVCRECGRGFSWQSVLLTHQRTHTGEKPYVCRECGRGFSRQSVLLTHQRRHTGEKPYVCRECGRGFSRQSVLLTHQRRHTGEKPYVCRECGRGFSWQSVLLTHQRTHTGEKPYVCRECGRGFSWQSVLLTHQRTHTGEKPYVCRECGRGFSNKSHLLRHQRTHTGEKPYVCRECGRGFRDKSHLLRHQRTHTGEKPYVCRECGRGFRDKSNLLSHQRTHTGEKPYVCRECGRGFSNKSHLLRHQRTHTGEKPYVCRECGRGFRNKSHLLRHQRTHTGEKPYVCRECGRGFSDRSSLCYHQRTHTGEKPYVCREDE

SEQ ID NO: 795527 - protein, 90 aa, Homo sapiens
SRGRLRENGGVGRPRLLLGPGKPPINEWSGQRREGRGFSEDRALHLRSRVNGCREGKGCPYPSGPTSEPSPVVATLSRETGEARPGARPF

SEQ ID NO: 795528 - protein, 68 aa, Homo sapiens
FLGTVAHMQPRTQPLAQTLPFFLGGAPRDTGLRVPVIKMGTGWEGFQRTLKEVAYILLCCWCIKELLD

SEQ ID NO: 795529 - protein, 92 aa, Homo sapiens
LSFFLISILYPSLTISSKLENKGQVMKTEVKNDHVLFYLENGFGRADSFPFSVEQSNLVFNIQPAPAMVYDYYEKEEYALAFYNIDSSSVSE

SEQ ID NO: 795530 - protein, 101 aa, Homo sapiens
AEPPQETRRLGGVEGSELSGSQERKLPSWALPLAPSTQERQLGPPGPRIPKGAAPRGCVAGTGERTSQYRGWPSDQVGVGGSRAFGRRSGAHRRWDSADAC

SEQ ID NO: 795531 - protein, 101 aa, Homo sapiens; identical to SEQ ID NO: 795530

SEQ ID NO: 795532 - protein, 112 aa, Homo sapiens
MREGDGRTRDWGIGTKVLGTCRALCPYMISVQLSTLETQERSRGCREKQRLETEVWEPLSGTPSPSGKSGTRRSLSESDHCLISPGSGRLQTTCFLSDPGLRSDPCRIENPK

SEQ ID NO: 795533 - protein, 112 aa, Homo sapiens; identical to SEQ ID NO: 795532

SEQ ID NO: 795534 - protein, 143 aa, Homo sapiens
SPSLHLQPGSLVPTAPTPEMSRQCHALQEDMQTRSKQLEEEVKGLRGQLEACQREAAAAREEAEQALGERDQALAQLRAHMADMEAKYEEILHDSLDRLLAKLRAIKQQWDGAALRLHARHKEQQRQFGLTPPGSLRPPAPSL

SEQ ID NO: 795535 - protein, 106 aa, Homo sapiens
SPSCSLSSCLPPEACQREAAAAREEAEQALGERDQALAQLRAHMADMEAKYEEILHDSLDRLLAKLRAIKQQWDGAALRLHARHKEQQRQFGLTPPGSLRPPAPSL

SEQ ID NO: 795536 - protein, 88 aa, Homo sapiens
CRPQCGKNLFLFACVFSIDHQYVGSAGLVSAGSMESSRYLFTMSLNVFLESAPLKCIFLINLKCSQMQFPKAVYILPFCPKCFLRYSS

SEQ ID NO: 795537 - protein, 174 aa, Homo sapiens
NGLGEWAYSAPDLLGAWSWGSCAVYDSGGYVKELGLSLEESRDRLRFLQLHTGWQQEPRCVPGAPRYSPAVGLHAAVTLRLEFPAAGRALAALSVRPFALRRLSAGLSLPLLTSVCLLLFAVHFAVAEARTWHREGRWRVLRLGAWARWLLVALTAATALVRLAQLGAADRQWT

SEQ ID NO: 795538 - protein, 97 aa, Homo sapiens
VPGSCPTFEKNELCSQPEGDQGREEFYQMAEELSTERVPKPLPCFELPYGESQWRGIEDRLLYGPEVIIPTTHEELNPDNNFIGKLGSGFSPKQALR

SEQ ID NO: 795539 - protein, 141 aa, Homo sapiens
ALCLKPEIVNGRLSVDKDQYVESENVTIECDSGYGVVGLKSITCSEKRTWYPEVPRCEWEAPEGCEQVLTGRKLMQCLPSPEDVKVALEVYKLSLEIKQLEKERDKLMNTHQKFSEKEEMKDLFFPSNQHTESSLIHPTLP

SEQ ID NO: 795540 - protein, 871 aa, Homo sapiens
MIKKFDKKDEESGSGSNPFQHLEKSAVLQEARIFNETPINPRRCLHILTKILYLLNQGEHFGTTEATEAFFAMTRLFQSNDQTLRRMCYLTIKEMATISEDVIIVTSSLTKDMTGKEDVYRGPAIRALCRITDGTMLQAIERYMKQAIVDKVSSVSSSALVSSLHMMKISYDVVKRWINEAQEAASSDNIMVQYHALGVLYHLRKNDRLAVSKMLNKFTKSGLKSQFAYCMLIRIASRLLKETEDGHESPLFDFIESCLRNKHEMVIYEAASAIIHLPNCTARELAPAVSVLQLFCSSPKPALRYAAVRTLNKVAMKHPSAVTACNLDLENLITDSNRSIATLAITTLLKTGSESSVDRLMKQISSFVSEISDEFKVVVVQAISALCQKYPRKHSVMMTFLSNMLRDDGGFEYKRAIVDCIISIVEENPESKEAGLAHLCEFIEDCEHTVLATKILHLLGKEGPRTPVPSKYIRFIFNRVVLENEAVRAAAVSALAKFGAQNESLLPSILVLLQRCMMDTDDEVRDRATFYLNVLQQRQMALNATYIFNGLTVSVPGMEKALHQYTLEPSEKPFDMKSIPLAMAPVFEQKAEITLVATKPEKLAPSRQDIFQEQLAAIPEFLNIGPLFKSSEPVQLTEAETEYFVRCIKHMFTNHIVFQFDCTNTLNDQLLEKVTVQMEPSDSYEVLSCIPAPSLPYNQPGICYTLVRLPDDDPTAVAGSFSCTMKFTVRDCDPNTGVPDEDGYDDEYVLEDLEVTVSDHIQKVLKPNFAAAWEEVGDTFEKEETFALSSTKTLEEAVNNIITFLGMQPCERSDKVPENKNSHSLYLAGIFRGGYDLLVRSRLALADGVTMQVTVRSKERTPVDVILASVG

SEQ ID NO: 795541 - protein, 871 aa, Homo sapiens; identical to SEQ ID NO: 795540

SEQ ID NO: 795542 - protein, 140 aa, Homo sapiens
AGSPAAAPGTVAVGLGAGKSSKMIKKFDKKDEESGSGSNPFQHLEKSAVLQEARIFNETPINPRRCLHILTKILYLLNQGEHFGTTEATEAFFAMTRLFQSNDQTLRRMCYLTIKEMATISEGLVVIGHRQDFWNVPSYV

SEQ ID NO: 795543 - protein, 263 aa, Homo sapiens
AQGGPVSICYICGAELGPGKEFQLNVNPASRLGEKEPFFPFLTVYPPAPRARPVDSTGLVATCVLCYHDLLAQWLQHEARSSHHAVSAWSRQYQVETFVCFFCQQEKKRCLGLKSVRVARLPLFLYTLRASHSLLVDDGQQLIIGACVECGTLVCAGQGLTRQGPMSWSSPVAAATKMNRRCFHYDAAPPSLAASLSWHLFYLNYSHLDTEVSEVRRGKVTCPRPHRCQLQGQSAPFSAQLHTGFLYSNSRFGAMGLRDAPSQ

SEQ ID NO: 795544 - protein, 73 aa, Homo sapiens
RTWGRASWWRLQRADIVPLHPANFCVLLVETGFHHVGQAGLELLTSGDPPTSASQSTGITGISHHAWPFILII

SEQ ID NO: 795545 - protein, 74 aa, Homo sapiens
PFDFTENGNAVMKPSAWPSPSLHVCLGGALPSQEPGHAGLQPPRPPPPFWTFIEACTLIRKRICHLPVRLRATT

SEQ ID NO: 795546 - protein, 74 aa, Homo sapiens; identical to SEQ ID NO: 795545

SEQ ID NO: 795547 - protein, 110 aa, Homo sapiens
RSQWLGSLTNVHLSPRVLSQSPGPGTLPCPRCLAQLAQRAHRRWAGKVGKAVWIDLVFPTFDQHTQLGCSRSMVGGGRWEPRFLEMWDWGFTRNHLLKSKKVIIIPSDFR

SEQ ID NO: 795548 - protein, 83 aa, Homo sapiens
LLLLFSTAYDTSRVPSEQLLPLYMKACWGQGKSSIRHDTPKLSCSHLNRTAFNGNHVNASHGMRDKIINLMLRKDVFRVFLEN

SEQ ID NO: 795549 - protein, 848 aa, Homo sapiens
MDEGTGLQPGAGEQLEAPATAEAVQERCEPETLRSKSLPVLSSASCRPSLSPTSGDANPAFGCVDSSGHQELKQGPNPLAPSPSAPSTSAGLGDCNHRVDLSKTFSVSSALAMLQERRCLYVVLTDSRCFLVCMCFLTFIQALMVSGYLSSVITTIERRYSLKSSESGLLVSCFDIGNLVVVVFVSYFGGRGRRPLWLAVGGLLIAFGAALFALPHFISPPYQIQELNASAPNDGLCQGGNSTATLEPPACPKDSGGNNHWVYVALFICAQILIGMGSTPIYTLGPTYLDDNVKKENSSLYLAIMYVMGALGPAVGYLLGGLLIGFYVDPRNPVHLDQNDPRFIGNWWSGFLLCAIAMFLVIFPMFTFPKKLPPRHKKKKKKKFSVDAVSDDDVLKEKSNNSEQADKKVSSMGFGKDVRDLPRAAVRILSNMTFLFVSLSYTAESAIVTAFITFIPKFIESQFGIPASNASIYTGVIIVPSAGVGIVLGGYIIKKLKLGARESAKLAMICSGVSLLCFSTLFIVGCESINLGGINIPYTTGPSLTMPHRNLTGSCNVNCGCKIHEYEPVCGSDGITYFNPCLAGCVNSGNLSTGIRNYTECTCVQSRQVITPPTVGQRSQLRVVIVKTYLNENGYAVSGKCKRTCNTLIPFLVFLFIVTFITACAQPSAIIVTLRSVEDEERPFALGMQFVLLRTLAYIPTPIYFGAVIDTTCMLWQQECGVQGSCWEYNVTSFRFVYFGLAAGLKFVGFIFIFLAWYSIKYKEDGLQRRRQREFPLSTVSERVGHPDNARTRSCPAFSTQGEFHEETGLQKGIQCAAQTYPGPFPEAISSSADPGLEESPAALEPPS

SEQ ID NO: 795550 - protein, 137 aa, Homo sapiens
GGLLIAFGAALFALPHFISPPYQIQELNASAPNDGLCQGGNSTATLEPPACPKDSGGNNHWVYVALFICAQILIGMGSTPIYTLGPTYLDDNVKKENSSLYLGKTFLFSQICFTHTETYFPYKNQKETCSFTFSCIL

SEQ ID NO: 795551 - protein, 826 aa, Homo sapiens
MDEGTGLQPGAGEQLEAPATAEAVQERCEPETLRSKSLPVLSSASCRPSLSPTSGDANPAFGCVDSSGHQELKQGPNPLAPSPSAPSTSAGLGDCNHRVDLSKTFSVSSALAMLQERRCLYVVLTDSRCFLVCMCFLTFIQALMVSGYLSSVITTIERRYSLKSSESGLLVSCFDIGNLVVVVFVSYFGGRGRRPLWLAVGGLLIAFGAALFALPHFISPPYQIQELNASAPNDGLCQGGNSTATLEPPACPKDSGGNNHWVYVALFICAQILIGMGSTPIYTLGPTYLDDNVKKENSSLYLAIMYVMGALGPAVGYLLGGLLIGFYVDPRNPVHLDQNDPRFIGNWWSGFLLCAIAMFLVIFPMFTFPKKLPPRHKKKKKKKFSVDAVSDDDVLKEKSNNSEQADKKVSSMGFGKDVRDLPRAAVRILSNMTFLFVSLSYTAESAIVTAFITFIPKFIESQFGIPASNASIYTGVIIVPSAGVGIVLGGYIIKKLKLGARESAKLAMICSGVSLLCFSTLFIVGCESINLGGINIPYTTGPSLTMPHRNLTGSCNVNCGCKIHEYEPVCGSDGITYFNPCLAGCVNSGNLSTGIRNYTECTCVQSRQVITPPTVGQRSQLRVVIVKTYLNENGYAVSGKCKRTCNTLIPFLVFLFIVTFITACAQPSAIIVTLSIHSYSNLFGAVIDTTCMLWQQECGVQGSCWEYNVTSFRFVYFGLAAGLKFVGFIFIFLAWYSIKYKEDGLQRRRQREFPLSTVSERVGHPDNARTRSCPAFSTQGEFHEETGLQKGIQCAAQTYPGPFPEAISSSADPGLEESPAALEPPS

SEQ ID NO: 795552 - protein, 126 aa, Homo sapiens [sequence omitted]

SEQ ID NO: 795553 - protein, 111 aa, Homo sapiens [sequence omitted]

SEQ ID NO: 795554 - protein, 136 aa, Homo sapiens
NPLRVRPPIPVWLFGGWALCSSLVKPCVLWAAIQKLDGQLRRWEGKGHAAGHPPARRREYLRNKVCENWLCSVLKLGNGLSTWGMCLKCRLKCPFLHSNFSRYESAFLLLTSLPSDSEAGAVLYLDYHRVRLSGYL

SEQ ID NO: 795555 - protein, 106 aa, Homo sapiens
NPLRVRPPIPVWLFGGWALCSSLVKPCVLWAAIQKLDGQLRRWEGKGHAAGHPPARRREYLRNKVCENWLCSVLKLGNGLSTWGMCLKCRLKCPFLHSNFSSAVSC

SEQ ID NO: 795556 - protein, 106 aa, Homo sapiens
MGQLLGVSLLPSQPRPPWPLCLSPALVTDLHAHTRGHLTLLSHQDPPLGSPSPALTHLSGFNRATSADPLSPPSPHPSHCCCLHPPQGWVGISFYRVTGALLTKIS

SEQ ID NO: 795557 - protein, 70 aa, Homo sapiens
RVSLVGELSKFPLPSDSSGGKSSSSFARGALAWCRQRNPNPSCAAAETGARTSLPKERCRGWRLGNWLHK

SEQ ID NO: 795558 - protein, 116 aa, Homo sapiens
MGGRDQITNLGSEGETHPWGYSSPPYPLHTFFIPFLPSGFGGSGLGIPSDNEKHDLQDCVEVSRPEGPAPELPSSLCGWNKISSLCGLGFPSRDPKTWDLAMLLSPWVDFFELQLL

SEQ ID NO: 795559 - protein, 95 aa, Homo sapiens
MCKTCVSRVQVAAIHAAQGWEAARVHQDACDITPAGGQVTGGDPGIGAVARNIRPESHSPAAAEKPPHQRPQLVQIPWHCFQPSELRLFQGRGPA

SEQ ID NO: 795560 - protein, 30 aa, Homo sapiens
MQANILGACKGTKPCILAPPATPAESCQPG

SEQ ID NO: 795561 - protein, 32 aa, Homo sapiens
MLGHAHQVQVTPFAPLTFRAPLGALSRHVLTV

SEQ ID NO: 795562 - protein, 82 aa, Homo sapiens
LKVLSQNTLELGLCRKHAQTGGQFSDSRNRDCRGLQALKLVWFWESEFRSEEGDFETSLPSARGCLWEEVGFMKGIWLTQRM

SEQ ID NO: 795563 - protein, 77 aa, Homo sapiens
RRLGSSNPPISTSQAARTIGTCHHTQQQRQLTMSTMPLAQEPANERTLQWWFREFCKGEESLEDEEHSGRPLEVDND

SEQ ID NO: 795564 - protein, 129 aa, Homo sapiens [sequence omitted]

SEQ ID NO: 795565 - protein, 161 aa, Homo sapiens
MTPPLFSPRLSPASVGTGEKAHQAGLCHLRVGHQGQPAAGAGGTGPEPPAEVEAAAGGFAEQEGDDSAGRAAHPRGPGELPVQGMPLERLRNKIIQATFSISGTKSLANEISDNDILEALQRIISERSDYYNQLKQKGVKVPPLQQSEAFLTSKSKKGTSK

SEQ ID NO: 795566 - protein, 522 aa, Homo sapiens
MSITSDEVNFLVYRYLQESGFSHSAFTFGIESHISQSNINGTLVPPSALISILQKGLQYVEAEISINKDGTVFDSRPIESLSLIVAVIPDVVQMRQQAFGEKLTQQQASAAATEASAMAKAATMTPAAISQQNPPKNREATVNGEENGAHEINNHSKPMEIDGDVEIPPNKATVLRGHESEVFICAWNPVSDLLASGSGDSTARIWNLNENSNGGSTQLVLRHCIREGGHDVPSNKDVTSLDWNSDGTLLAMGSYDGFARIWTENGNLASTLGQHKGPIFALKWNKKGNYVLSAGVDKTTIIWDAHTGEAKQQFPFHSAPALDVDWQNNMTFASCSTDMCIHVCRLGCDHPVKTFQGHTNEVNAIKWDPSGMLLASCSDDMTLKIWSMKQDACVHDLQAHSKEIYTIKWSPTGPATSNPNSSIMLASASFDSTVRLWDVEQGVCTHTLMKHQEPVYSVAFSPDGKYLASGSFDKYVHIWNTQSGSLVHSYQGTGGIFEVCWNARGDKVGASASDGSVCVLDL

SEQ ID NO: 795567 - protein, 522 aa, Homo sapiens; identical to SEQ ID NO: 795566

SEQ ID NO: 795568 - protein, 522 aa, Homo sapiens; identical to SEQ ID NO: 795566

SEQ ID NO: 795569 - protein, 478 aa, Homo sapiens
RLVEPGIISAEAAKMAASCLVLLALCLLLPLLLLGGWKRWRRGRAARHVVAVVLGDVGRSPRMQYHALSLAMHGFSVTLLGFCNSKPHDELLQNNRIQIVGLTELQSLAVGPRVFQYGVKVVLQAMYLLWKLMWREPGAYIFLQNPPGLPSIAVCWFVGCLCGSKLVIDWHNYGYSIMGLVHGPNHPLVLLAKWYEKFFGRLSHLNLCVTNAMREDLADNWHIRAVTVYDKPASFFKETPLDLQHRLFMKLGSMHSPFRARSEPEDPVTERSAFTERDAGSGLVTRLRERPALLVSSTSWTEDEDFSILLAALEKFEQLTLDGHNLPSLVCVITGKGPLREYYSRLIHQKHFQHIQVCTPWLEAEDYPLLLGSADLGVCLHTSSSGLDLPMKVVDMFGCCLPVCAVNFKCLHELVKHEENGLVFEDSEELAAQLQMLFSNFPDPAGKLNQFRKNLRESQQLRWDESWVQTVLPLVMDT

SEQ ID NO: 795570 - protein, 478 aa, Homo sapiens; identical to SEQ ID NO: 795569

SEQ ID NO: 795571 - protein, 409 aa, Homo sapiens
RLVEPGIISAEAAKMAASCLVLLALCLLLPLLLLGGWKRWRRGRAARHVVAVVLGDVGRSPRMQYHALSLAMHGFSVTLLGFCNSKPHDELLQNNRIQIVGLTELQSLAVGPRVFQYGVKVVLQAMYLLWKLMWREPGAYIFLQNPPGLPSIAVCWFVGCLCGSKLVIDWHNYGYSIMGLVHGPNHPLVLLAKWYEKFFGRLSHLNLCVTNAMREDLADNWHIRAVTVYDKPASFFKETPLDLQHRLFMKLGSMHSPFRARSEPEDPVTERSAFTERDAGSGLVTRLRERPALLVSSTSWTEDEDFSILLAALEKFEQLTLDGHNLPSLVCVITGKGPLREYYSRLIHQKHFQHIQVCTPWLEAEDYPLLLGSADLGVCLHTSSSGLDLPMKVVDMFGCCLPVCAVNFK

SEQ ID NO: 795572 - protein, 285 aa, Homo sapiens
MATPSWVWCMAPTIPSFCWPSEDLADNWHIRAVTVYDKPASFFKETPLDLQHRLFMKLGSMHSPFRARSEPEDPVTERSAFTERDAGSGLVTRLRERPALLVSSTSWTEDEDFSILLAALEKFEQLTLDGHNLPSLVCVITGKGPLREYYSRLIHQKHFQHIQVCTPWLEAEDYPLLLGSADLGVCLHTSSSGLDLPMKVVDMFGCCLPVCAVNFKCLHELVKHEENGLVFEDSEELAAQLQMLFSNFPDPAGKLNQFRKNLRESQQLRWDESWVQTVLPLVMDT

SEQ ID NO: 795573 - protein, 351 aa, Homo sapiens
RLVEPGIISAEAAKMAASCLVLLALCLLLPLLLLGGWKRWRRGRAARHVVAVVLGDVGRSPRMQYHALSLAMHGFSVTLLGFCNSKPHDELLQNNRIQIVGLTELQSLAVGPRVFQYGVKVVLQAMYLLWKLMWREPGAYIFLQNPPGLPSIAVCWFVGCLCGSKLVIDWHNYGYSIMGLVHGPNHPLVLLAKWYEKFFGRLSHLNLCVTNAMREDLADNWHIRAVTVYDKPASFFKETPLDLQHRLFMKLGSMHSPFRARSEPEDPVTERSAFTERDAGSGLVTRLRERPALLVSSTSWTEDEDFSILLAALETLVGLDFFSGGLETLPLFFCSSRPMPLLAYYCSVTSL

SEQ ID NO: 795574 - protein, 136 aa, Homo sapiens
ATDNRTSSSSSLCASSSVLPRLCCPSTEEAEDYPLLLGSADLGVCLHTSSSGLDLPMKVVDMFGCCLPVCAVNFKCLHELVKHEENGLVFEDSEELAAQLQMLFSNFPDPAGKLNQASSWSLRANPFEQHLPVARS

SEQ ID NO: 795575 - protein, 431 aa, Homo sapiens
RLPVVKLESLKRWNEERGLWCEKGVQVLLTTVGAFAAFGLMTIAISTDYWLYTRALICNTTNLTAGGDDGTPHRGGGGASEKKDPGGLTHSGLWRICCLEGLKRGVCVKINHFPEDTDYDHDSAEYLLRVVRASSIFPILSAILLLLGGVCVAASRVYKSKRNIILGAGILFVAAGLSNIIGVIVYISANAGEPGPKRDEEKKNHYSYGWSFYFGGLSFILAEVIGVLAVNIYIERSREAHCQSRSDLLKAGGGAGGSGGSGPSAILRLPSYRFRYRRRSRSSSRSSEPSPSRDASPGGPGGPGFASTDISMYTLSRDPSKGSVAAGLAGAGGGGGGAVGAFGGAAGGAGGGGGGGGGAGAERDRGGASGFLTLHNAFPKEAGGGVTVTVTGPPAPPAPAPPAPSAPAPGTLAKEAAASNTNTLNRKTTPV

SEQ ID NO: 795576 - protein, 104 aa, Homo sapiens
MGVSCRRPGTVRLRFPVLPQDSHFAKAPGRGAEVSHQHCGKHTDTFANELVSLWSFHQGGRGKFGFSYCFRRVLYRVGLNEVKGALCRIPRHWIPWLAPALLSS

SEQ ID NO: 795577 - protein, 82 aa, Homo sapiens
MLTKPWSLARCITSVQGENPHMAQAVASELKIFHWPLCISLKFTSHDTSHVGLRRASNCYSFASSGLELKQAKKARIWNSTS

SEQ ID NO: 795578 - protein, 144 aa, Homo sapiens
MEGFDLCPSVLAHFSLCEAPPQSSRASQSAVRGILAGQFVLCGVFALHCSACLPTVCCCLCSPVRRIAFLQILAPRPHFPKCHPPAISFGSRRPRDGFTDDDILFGPALASFSHMWSAWSGCSRCGPHFSCRQKQQPGVPCLVS

SEQ ID NO: 795579 - protein, 71 aa, Homo sapiens
TGGIAGEQQCLRMTGAVQSISCDLRMCQSCPGTTRGRPSAPFTSSLPPHPQQHWLLGVCMAEEGLDTGYPG

SEQ ID NO: 795580 - protein, 346 aa, Homo sapiens
PGFRPVCRQRCGPAHVMAPEENAGTELLLQSFERRFLAARTLRSFPWQSLEAKLRDSSDSELLRDILHKTVKHPVCVKHPPSVKYARCFLSELIKKHEAVHTEPLDELYEALAETLMAKESTQGHRSYLLPSGGSVTLSESTAIISYGTTGLVTWDAALYLAEWAIENPAVFTNRTVLELGSGAGLTGLAICKMCRPRAYIFSDCHSRVLEQLRGNVLLNGLSLEADITAKLDSPRVTVAQLDWDVATVHQLSAFQPDVVIAADVLYCPEAIMSLVGVLRRLAACREHQRAPEVYVAFTVRNPETCQLFTTELGRAGIRWEVEPRHEQKLFPYEEHLEMAMLNLTL

SEQ ID NO: 795581 - protein, 346 aa, Homo sapiens; identical to SEQ ID NO: 795580

SEQ ID NO: 795582 - protein, 346 aa, Homo sapiens; identical to SEQ ID NO: 795580

SEQ ID NO: 795583 - protein, 467 aa, Homo sapiens
PGFRPVCRQRCGPAHVMAPEENAGTELLLQSFERRFLAARTLRSFPWQVGGGASGEARGARGSPGADGRVSVLKPLALPPREFLGSRRSGPRDPVPVPGAWPESLAPLLPRELAGEAGGVSTALGGRRALGVGYSSRSFSRLFKGSNRSGHWDTAALAHSKKSAPSGPQSLEAKLRDSSDSELLRDILHKTVKHPVCVKHPPSVKYARCFLSELIKKHEAVHTEPLDELYEALAETLMAKESTQGHRSYLLPSGGSVTLSESTAIISYGTTGLVTWDAALYLAEWAIENPAVFTNRTVLELGSGAGLTGLAICKMCRPRAYIFSDCHSRVLEQLRGNVLLNGLSLEADITAKLDSPRVTVAQLDWDVATVHQLSAFQPDVVIAADVLYCPEAIMSLVGVLRRLAACREHQRAPEVYVAFTVRNPETCQLFTTELGRAGIRWEVEPRHEQKLFPYEEHLEMAMLNLTL

SEQ ID NO: 795584 - protein, 346 aa, Homo sapiens; identical to SEQ ID NO: 795580

SEQ ID NO: 795585 - protein, 279 aa, Homo sapiens
AVGRRLDSSPRRREENAGTELLLQSFERRFLAARTLRSFPWQSLEAKLRDSSDSELLRDILHKPSGGSVTLSESTAIISYGTTGLVTWDAALYLAEWAIENPAVFTNRTVLELGSGAGLTGLAICKMCRPRAYIFSDCHSRVLEQLRGNVLLNGLSLEADITAKLDSPRVTVAQLDWDVATVHQLSAFQPDVVIAADVLYCPEAIMSLVGVLRRLAACREHQRAPEVYVAFTVRNPETCQLFTTELGRAGIRWEVEPRHEQKLFPYEEHLEMAMLNLTL

SEQ ID NO: 795586 - protein, 141 aa, Homo sapiens
PSDRWTDSLAFSWCSPREARSHSPRARPSSPTVPQAWSHGTPPSTLQNGPSRTRQSSLTGDLGAQGRAPRQAYLPFQSLPHGSVPEPCPVSFRDHRRKTTTSGTKTGPLREGGVWLGHRKPLTPASTLSPLSGGTELCLWS

SEQ ID NO: 795587 - protein, 104 aa, Homo sapiens
LLNGLSLEADITAKLDSPRVTVAQLDWDVATVHQLSAFQPDVVIAAGNAQPRAPCAGGVLAALPSSWLWEKGTMDAVGHGHDGASRRVTLGLQGDITGQGCLLR

SEQ ID NO: 795588 - protein, 334 aa, Homo sapiens
PGFRPVCRQRCGPAHVMAPEENAGTELLLQSFERRFLAARTLRSFPWQSLEAKLRDSSDSELLRDILHKTVKHPVCVKHPPSVKYARCFLSELIKKHEAVHTEPLDELYEALAETLMAKESTQGHRSYLLPSGGSVTLSESTAIISYGTTGLVTWDAALYLAEWAIENPAVFTNSDLGAQGRAPRQAYPGAVADTVPFPPARTVLELGSGAGLTGLAICKMCRPRAYIFSDCHSRVLEQLRGNVLLNGLSLEADITAKLDSPRVTVAQLDWDVATVHQLSAFQPDVVIAADVLELAQKAIMFAGAGNRGEEESLAGGTKGTLKDNAGIYGRNPK

SEQ ID NO: 795589 - protein, 365 aa, Homo sapiens
GCRSPFGFVTQASRGERGDRTLAAEFRAPLPGGTHTALLPLAGSNRSGHWDTAALAHSKKSAPSGPQSLEAKLRDSSDSELLRDILHKTVKHPVCVKHPPSVKYARCFLSELIKKHEAVHTEPLDELYEALAETLMAKESTQGHRSYLLPSGGSVTLSESTAIISYGTTGLVTWDAALYLAEWAIENPAVFTNRTVLELGSGAGLTGLAICKMCRPRAYIFSDCHSRVLEQLRGNVLLNGLSLEADITAKLDSPRVTVAQLDWDVATVHQLSAFQPDVVIAADVLYCPEAIMSLVGVLRRLAACREHQRAPEVYVAFTVRNPETCQLFTTELGRAGIRWEVEPRHEQKLFPYEEHLEMAMLNLTL

SEQ ID NO: 795590 - protein, 312 aa, Homo sapiens
PGFRPVCRQRCGPAHVMAPEENAGTELLLQSFERRFLAARTLRSFPWQSLEAKLRDSSDSELLRDILHKTVKHPVCVKHPPSVKYARCFLSELIKKPSGGSVTLSESTAIISYGTTGLVTWDAALYLAEWAIENPAVFTNRTVLELGSGAGLTGLAICKMCRPRAYIFSDCHSRVLEQLRGNVLLNGLSLEADITAKLDSPRVTVAQLDWDVATVHQLSAFQPDVVIAADVLYCPEAIMSLVGVLRRLAACREHQRAPEVYVAFTVRNPETCQLFTTELGRAGIRWEVEPRHEQKLFPYEEHLEMAMLNLTL

SEQ ID NO: 795591 - protein, 331 aa, Homo sapiens
GCRSPFGFVTQASRGERGDRTLAAEFRAPLPGGTHTALLPLAGSNRSGHWDTAALAHSKKSAPSGPQSLEAKLRDSSDSELLRDILHKTVKHPVCVKHPPSVKYARCFLSELIKKPSGGSVTLSESTAIISYGTTGLVTWDAALYLAEWAIENPAVFTNRTVLELGSGAGLTGLAICKMCRPRAYIFSDCHSRVLEQLRGNVLLNGLSLEADITAKLDSPRVTVAQLDWDVATVHQLSAFQPDVVIAADVLYCPEAIMSLVGVLRRLAACREHQRAPEVYVAFTVRNPETCQLFTTELGRAGIRWEVEPRHEQKLFPYEEHLEMAMLNLTL

SEQ ID NO: 795592 - protein, 284 aa, Homo sapiens
MSVAVWIRHPGVARRTRGPNSCCRVSSAASWRHAHCAPSPGRWAAGRAERPAGLAGVQGQTGRVSVLKPLALPPREFLGSRRSGPRDPVPVPGAWPESLAPLLPRELAGEAGGVSTALGGRRALGVGYSSRSFSRLFKGSNRSGHWDTAALAHSKKSAPSGPQSLEAKLRDSSDSELLRDILHKTVKHPVCVKHPPSVKYARCFLSELIKKPSGGSVTLSESTAIISYGTTGLVTWDAALYLAEWAIENPAVFTNRCAVLPRSHHVAGRRPAEAGCLPGAPAGS

SEQ ID NO: 795593 - protein, 121 aa, Homo sapiens
MGLTVLSSPGLKMSMLGRPPTPPQLTQVPTSGCVDLQKGPLLSPVRHPRGHTGPQILPQAWEPTGRRVRQCRGPQTFPKRPESKYFRLCGPQVLCCKTQFCYCSSKAAVDNSEGNECVVSQ

SEQ ID NO: 795594 - protein, 112 aa, Homo sapiens [sequence omitted]

SEQ ID NO: 795595 - protein, 66 aa, Homo sapiens
EGKELSTFHRIFSRKTNSIKLALANSQDANPHALRSENAIIRVAFHEIFLLQNSHFLPKMSLFPKT

SEQ ID NO: 795596 - protein, 226 aa, Homo sapiens
RRRKHGSGPSRGAGTRLPAERLQLGDLPHGRSPAGQGNRRGGGLLVRPSPPNSGPLAAPGDHRVRPSPGRAQSWTPPPSVTACIFSPFPSQPAERRQPQSRCLHPLLMPAVFMLASSSALQCGRGVPRFPRTEVGAGHSVNEETKAEKVGNQTSVIPATSRQAALGTSWTQRRTQPLQERSHWHPRGNNASGMGGHRMFPGPLRGPAAQVLENECGSLGRAAEGRS

SEQ ID NO: 795597 - protein, 226 aa, Homo sapiens; identical to SEQ ID NO: 795596

SEQ ID NO: 795598 - protein, 226 aa, Homo sapiens; identical to SEQ ID NO: 795596

SEQ ID NO: 795599 - protein, 101 aa, Homo sapiens
GPATESAFATETSGHAVVPRDHLHNVHVFIWGLARRPPSLPVAMEIAPVKENVICLKQQDTSYRRMTPDAPSRCCMLQAWAGCWVEHLQRKMEARVPVLDS

SEQ ID NO: 795600 - protein, 155 aa, Homo sapiens
SPLLPIPRMSTSALAQSSHLYQALPHLWSETSAGGFGFENKPGSLGGLFSVCLPGSLLNSSPPLPLSTERGGPCSSQLNLAWQRWSHGATGAEGRWKLLGGPDRGLQVAGWDQWFIQTFTVRLAGSQDPGRNPRLPSFTGVPHSWVPQSLQHSPP

SEQ ID NO: 795601 - protein, 179 aa, Homo sapiens
RRRPRSPSTRACAWVLAALPLAVPVPGGPFWPSSMVDYYEVLDVPRQASSEAIKKAYRKLALKWHPDKNPENKEEAERRFKQVAEAYEVLSDAKKRDIYDRYGEAGAEGGCTGGRPFEDPFEYVFSFRDPADVFREFFGGQDPFSFDLLGNPLENILGGSEELLGKQKQSVCTPFLCLQ

SEQ ID NO: 795602 - protein, 179 aa, Homo sapiens; identical to SEQ ID NO: 795601

SEQ ID NO: 795603 - protein, 112 aa, Homo sapiens
RRRPRSPSTRACAWVLAALPLAVPVPGGPFWPSSMVDYYEVLDVPRQASSEAIKKAYRKLALKWHPDKNPENKEEADFVPLAPWEVGAFLPSACPTVVMGQAASSPCRLPLK

SEQ ID NO: 795604 - protein, 112 aa, Homo sapiens; identical to SEQ ID NO: 795603

SEQ ID NO: 795605 - protein, 142 aa, Homo sapiens
RRRPRSPSTRACAWVLAALPLAVPVPGGPFWPSSMVDYYEVLDVPRQASSEAIKKAYRKLALKWHPDKNPENKEEAERRFKQVAEAYEVLSDAKKRDIYDRYGEAGAEGGCTGGRPFEDPFEISFLWLPGKWGPFFLLHVLR

SEQ ID NO: 795606 - protein, 411 aa, Homo sapiens
MADQIPLYPVRSAAAAAANRKRAAYYSAAGPRPGADRHSRNEHPAPLCMYPTMTARLGWMSPLLTWSALTPPGQWGECLPTAGACGSPGFTHSLLFKYQLEDESAHLDEMPLMMSEEGFENEESDYHTLPRARIMQRKRGLEWFVCDGWKFLCTSCCGWLINICRRKKELKARTVWLGCPEKCEEKHPRNSIKNQKYNVFTFIPGVLYEQFKFFLNLYFLVISCSQFVPALKIGYLYTYWAPLGFVLAVTMTREAIDEFRRFQRDKEVNSQLYSKLTVRGKVQVKSSDIQVGDLIIVEKNQRIPSDMVFLRTSEKAGSCFIRTDQLDGETDWKLKVAVSCTQQLPALGDLFSISAYVYAQKPQMGIHSFEGTFTREDSDPPIHESLSIENTLWQHHCCISTVIGVTGSELD

SEQ ID NO: 795607 - protein, 354 aa, Homo sapiens
MADQIPLYPVRSAAAAAANRKRAAYYSAAGPRPGADRHSRYQLEDESAHLDEMPLMMSEEGFENEESDYHTLPRARIMQRKRGLEWFVCDGWKFLCTSCCGWLINICRRKKELKARTVWLGCPEKCEEKHPRNSIKNQKYNVFTFIPGVLYEQFKFFLNLYFLVISCSQFVPALKIGYLYTYWAPLGFVLAVTMTREAIDEFRRFQRDKEVNSQLYSKLTVRGKVQVKSSDIQVGDLIIVEKNQRIPSDMVFLRTSEKAGSCFIRTDQLDGETDWKLKVAVSCTQQLPALGDLFSISAYVYAQKPQMGIHSFEGTFTREDSDPPIHESLSIENTLWQHHCCISTVIGVTGSELD

SEQ ID NO: 795608 - protein, 1938 aa, Homo sapiens
MSSDAEMAIFGEAAPYLRKPEKERIEAQNRPFDSKKACFVADNKEMYVKGMIQTRENDKVIVKTLDDRMLTLNNDQVFPMNPPKFDKIEDMAMMTHLHEPAVLYNLKERYAAWMIYTYSGLFCVTVNPYKWLPVYKPEVVAAYRGKKRQEAPPHIFSISDNAYQFMLTDRDNQSILITGESGAGKTVNTKRVIQYFATIAVTGDKKKETQPGKMQGTLEDQIIQANPLLEAFGNAKTVRNDNSSRFGKFIRIHFGATGKLASADIETYLLEKSRVTFQLSSERSYHIFYQIMSNKKPELIDLLLISTNPFDFPFVSQGEVTVASIDDSEELLATDNAIDILGFSSEEKVGIYKLTGAVMHYGNMKFKQKQREEQAEPDGTEVADKAGYLMGLNSAEMLKGLCCPRVKVGNEYVTKGQNVQQVTNSVGALAKAVYEKMFLWMVTRINQQLDTKQPRQYFIGVLDIAGFEIFDFNSLEQLCINFTNEKLQQFFNHHMFVLEQEEYKKEGIEWEFIDFGMDLAACIELIEKPMGIFSILEEECMFPKATDTSFKNKLYDQHLGKSNNFQKPKPAKGKAEAHFSLVHYAGTVDYNIAGWLDKNKDPLNETVVGLYQKSSLKLLSFLFSNYAGAETGDSGGSKKGGKKKGSSFQTVSAVFRENLNKLMTNLRSTHPHFVRCLIPNETKTPGVMDHYLVMHQLRCNGVLEGIRICRKGFPSRILYADFKQRYRILNASAIPEGQFIDSKNASEKLLNSIDVDREQFRFGNTKVFFKAGLLGLLEEMRDEKLVTLMTSTQAVCRGYLMRVEFKKMMERRDSIFCIQYNIRSFMNVKHWPWMNLFFKIKPLLKSAEAEKEMATMKEDFERTKEELARSEARRKELEEKMVSLLQEKNDLQLQVQSETENLMDAEERCEGLIKSKILLEAKVKELTERLEEEEEMNSELVAKKRNLEDKCSSLKRDIDDLELTLTKVEKEKHATENKVKNLSEEMTALEENISKLTKEKKSLQEAHQQTLDDLQVEEDKVNGLIKINAKLEQQTDDLEGSLEQEKKLRADLERAKRKLEGDLKMSQESIMDLENEKQQIEEKLKKKEFELSQLQARIDDEQVHSLQFQKKIKELQARIEELEEEIEAEHTLRAKIEKQRSDLARELEEISERLEEASGATSAQIEMNKKREAEFQKMRRDLEEATLQHEATAATLRKKQADSVAELGEQIDNLQRVKQKLEKEKSELKMEIDDMASNIEALSKSKSNIERTCRTVEDQFSEIKAKDEQQTQLIHDLNMQKARLQTQNGELSHRVEEKESLISQLTKSKQALTQQLEELKRQMEEETKAKNAMAHALQSSRHDCDLLREQYEEEQEAKAELQRALSKANSEVAQWKTKYETDAIQRTEELEEAKKKLAQRLQEAEEKTETANSKCASLEKTKQRLQGEVEDLMRDLERSHTACATLDKKQRNFDKVLAEWKQKLDESQAELEAAQKESRSLSTELFKMRNAYEEVVDQLETLRRENKNLQEEISDLTEQIAETGKNLQEAEKTKKLVEQEKSDLQVALEEVEGSLEHEESKILRVQLELSQVKSELDRKVIEKDEEIEQLKRNSQRAAEALQSVLDAEIRSRNDALRLKKKMEGDLNEMEIQLGHSNRQMAETQRHLRTVQGQLKDSQLHLDDALRSNEDLKEQLAIVERRNGLLLEELEEMKVALEQTERTRRLSEQELLDASDRVQLLHSQNTSLINTKKKLEADIAQCQAEVENSIQESRNAEEKAKKAITDAAMMAEELKKEQDTSAHLERMKKNLEQTVKDLQHRLDEAEQLALKGGKKQIQKLENRVRELENELDVEQKRGAEALKGAHKYERKVKEMTYQAEEDRKNILRLQDLVDKLQAKVKSYKRQAEEAEEQANTQLSRCRRVQHELEEAAERADIAESQVNKLRAKSRDVGSQKMEE

SEQ ID NO: 795609 - protein, 447 aa, Homo sapiens
FKVAAERRASEEEENKASEEYIQRLLAEEEEEEKRQAEKRRRAMEEQLKSDEELARKLSIDINNFCEGSISASPLNSRKSDPVTPKSEKKSKNKQRNTGDIQKYLTPKSQFGSASHSEAVQEVRKDSVSKDIDSSDRKSPTGQDTEIEDMPTLSPQISLGVGEQGADSSIESPMPWLCACGAEWYHEGNVKTRPSNHGKELCVLSHERPKTRVPYSKETAVMPCGRTESGCAPTSGVTQTNGNNTGETENEESCLLISKEISKRKNQESSFEAVKDPCFSAKRRKVSPESSPDQEETEINFTQKLIDLEHLLFERHKQEEQDRLLALQLQKEVDKEQMVPNRQKGSPDEYHLRATSSPPDKVLNGQRKNPKDGNFKRQTHTKHPTPERGSRDKNRQVSLKMQLKQSVNRRKMPNSTRDHCKVSKSAHSLQPSISQKSVFQMFQRCTK

SEQ ID NO: 795610 - protein, 131 aa, Homo sapiens
DCSGTISAHCKLHLLGSSDSPASASRVTGITGACHHAWLIFVFLVQMRFYHVGQAGLELLTSGDPPTLASQRAGITGVSHRVWPYTSLPKPALPFPYAIEALGRGGGGNGTGIHHLILVPSLTWLLFINAY

SEQ ID NO: 795611 - protein, 107 aa, Homo sapiens [sequence omitted]

SEQ ID NO: 795612 - protein, 157 aa, Homo sapiens
MNPQREAAPKSYAIRDSRQMVWVLSGNSLIAAPLSRSIKPVTLHLIACRDTEFSDKEKGNMVYLGIKGKDLCLFCAEIQGKPTLQLKEKNIMDLYVEKKAQKPFLFFHNKEGSTSVFQSVSYPGWFIATSTTSGQPIFLTKERGITNNTNFYLDSVE

SEQ ID NO: 795613 - protein, 164 aa, Homo sapiens
MNPQREAAPKSYAIRDSRQMVWVLSGNSLIAAPLSRSIKPVTLHLIACRDTEFSDKEKGNMVYLGIKGKDLCLFCAEIQGKPTLQLKLQGSQDNIGKDTCWKLVGIHTCINLDVRESCFMGTLDQWGIGVGRKKWKSSFQHHHLRKKDKDFSSMRTNIGMPGRM

SEQ ID NO: 795614 - protein, 119 aa, Homo sapiens
PHWSPCSYLNGPGIFLTDCLCLNQFLESSFFSYHCSYPPSRPLFIEAYFDYLKLQLPYSNCNLHFLNGTPDLLVLLHSFPLTVDNLIIFLGYCLSLYIECKFHRAGLKQCLAYTAKFLQ

SEQ ID NO: 795615 - protein, 109 aa, Homo sapiens
LELSSAGGHVLLVLPGALGCSLRKAQGEIRGPEKCHCLHPAKAHFFLLLLFLFFFSSCSLIAPSPPHSCSLLLHLQFLNNPDVFLISGPSVESVFKDEYFLLCYCYFFR

SEQ ID NO: 795616 - protein, 109 aa, Homo sapiens
TLQSLLPIFPQAFFPINPRINLPYATKALLSVFPIYALYFDCHPFLTLHSSLGDRARLRFNIYVYIIFVLLYVHDPFFTKIKNMFSESHKTKNAFASLKLGLTHHDKAV

SEQ ID NO: 795617 - protein, 94 aa, Homo sapiens
MLRHQKLLLFSVTLYLLTTALPPYRRNGQTSESYRFLPPVTSHDLLWVNCFLYIFVSPSKSHILLYLKDKYVLKHLKYSPFGGCSFSWKTKQLR

SEQ ID NO: 795618 - protein, 34 aa, Homo sapiens
RWARVSSYSRSQTWDSVLTGNPKHQSNKNQGNSS

SEQ ID NO: 795619 - protein, 89 aa, Homo sapiens
MDPNCSCAAGGSYACAGSCKCKKCKCTSCKKSCCSCCPLGCAKCAQGCIRKGASEKAAAVPDVGTALLSDENRMTRKVRDFFFYNPDPF

SEQ ID NO: 795620 - protein, 58 aa, Homo sapiens
MKTQDDGVLPPYDVNQLLGWDLNLSLFLGLCLMLLLAGSCLPSPGITGLSHGSNREDR

SEQ ID NO: 795621 - protein, 158 aa, Homo sapiens
MEKALKIDTPQQGSIQDINHRVWVLQDQTLIAVPRKDRMSPVTIALISCRHVETLEKDRGNPIYLGLNGLNLCLMCAKVGDQPTLQLKEKDIMDLYNQPEPVKSFLFYHSQSGRNSTFESVAFPGWFIAVSSEGGCPLILTQELGKANTTDFGLTMLF

SEQ ID NO: 795622 - protein, 120 aa, Homo sapiens
YSCKLLASPSVKNSASRSFNSSPKKSPVHSLLTSSVEGSIGSTSQYRSAKPIHSSDSVKDSQSPPIETTGKTCRKLQNRLESLQTLVEDLQLKNQAMSSMIRNQEKRIQKVKDQEKMLLK

SEQ ID NO: 795623 - protein, 124 aa, Homo sapiens
YSCKLLASPSVKNSASRSFNSSPKKSPVHSLLTSSVEGSIGSTSQYRSAKPIHSSDSVKDSQSPPIETTGKTCRKLQNRLESLQTLVEDLQLKNQVCSCSGSWSKSQQCESPHVALSIQVGAAR

SEQ ID NO: 795624 - protein, 353 aa, Homo sapiens
MAHFVQGTSRMIAAESSTEHKECAEPSTRKNLMNSLEQKIRCLEKQRKELLEVNQQWDQQFRSMKELYERKVAELKTKLDAAERFLSTREKDPHQRQRKDDRQREDDRQRDLTRDRLQREEKEKERLNEELHELKEENKLLKGKNTLANKEKEHYECEIKRLNKALQDALNIKCSFSEDCLRKSRVEFCHEEMRTEMEVLKQQVQIYEEDFKKERSDRERLNQEKEELQQINETSQSQLNRLNSQIKACQMEKEKLEKQLKQMYCPPCNCGLVFHLQDPWVPTGPGAVQKQREHPPDYQWYALDQLPPDVQHKANDGVLLHLQSVARLVSNSWPQVILLPLAPKVLKFQVYPQ

SEQ ID NO: 795625 - protein, 325 aa, Homo sapiens
MAHFVQGTSRMIAAESSTEHKECAEPSTRKNLMNSLEQKIRCLEKQRKELLEVNQQWDQQFRSMKELYERKVAELKTKLDAAERFLSTREKDPHQRQRKDDRQREDDRQRDLTRDRLQREEKEKERLNEELHELKEENKLLKGKNTLANKEKEHYECEIKRLNKALQDALNIKCSFSEDCLRKSRVEFCHEEMRTEMEVLKQQVQIYEEDFKKERSDRERLNQEKEELQQINETSQSQLNRLNSQIKACQMEKEKLEKQLKQMYCPPCNCGLVFHLQDPWVPTGPGAVQKQREHPPDYQWYALDQLPPDVQHKANGLSSVKKVHP

SEQ ID NO: 795626 - protein, 32 aa, Homo sapiens
MTQTTHSVSTSPLFSNCEVLIHGQEIKQLSRV

SEQ ID NO: 795627 - protein, 158 aa, Homo sapiens
MAAGPRPGAPCRAGAPTIVLTSGRRQTLSHGSSSPARATLGKPLVLNDLFTELKKYGLHIFQVYMWLIWEAEHSSPNLLVMSATTACWPAFTVLGEARGDQVDWSRLYRDTGLVKMSRKPRASSPFSNNHPSTPKRFPRQPRREKGPVKEVPGTKGSP

SEQ ID NO: 795628 - protein, 153 aa, Homo sapiens
MAAGPRPGAPCRAGAPTIVLTSGRRQTLSHGSSSPARATLGKPLVLNDLFTELKKYGLHIFQVYMWLIWEAEHSSPNLLVMSATTACWPAFTVLGEARGDQVDWSRLYRDTGLVKMSRKPRASSPFSNNHPSTPKRRGRGKHPLIPGPEALSK

SEQ ID NO: 795629 - protein, 175 aa, Homo sapiens
MAAGPRPGAPCRAGAPTIVLTSGRRQTLSHGSSSPARATLGKPLVLNDLFTELKKYGLHIFQVYMWLIWEAEHSSPNLLVMSATTACWPAFTVLGEARGDQVDWSRLYRDTGLVKMSRKPRASSPFSNNHPSTPKRRGRGKHPLIPGPEALSKFPRQPRREKGPVKEVPGTKGSP

SEQ ID NO: 795630 - protein, 175 aa, Homo sapiens; identical to SEQ ID NO: 795629

SEQ ID NO: 795631 - protein, 775 aa, Homo sapiens
MLQGLLPVSLLLSVAVSAIKELPGVKKYEVVYPIRLHPLHKREAKEPEQQEQFETELKYKMTINGKIAVLYLKKNKNLLAPGYTETYYNSTGKEITTSPQIMDDCYYQGHILNEKVSDASISTCRGLRGYFSQGDQRYFIEPLSPIHRDGQEHALFKYNPDEKNYDSTCGMDGVLWAHDLQQNIALPATKLVKLKDRKVQEHEKYIEYYLVLDNGEFKRYNENQDEIRKRVFEMANYVNMLYKKLNTHVALVGMEIWTDKDKIKITPNASFTLENFSKWRGSVLSRRKRHDIAQLITATELAGTTVGLAFMSTMCSPYSVGVVQDHSDNLLRVAGTMAHEMGHNFGMFHDDYSCKCPSTICVMDKALSFYIPTDFSSCSRLSYDKFFEDKLSNCLFNAPLPTDIISTPICGNQLVEMGEDCDCGTSEECTNICCDAKTCKIKATFQCALGECCEKCQFKKAGMVCRPAKDECDLPEMCNGKSGNCPDDRFQVNGFPCHHGKGHCLMGTCPTLREQCTELWGPGTEVADKSCYNRNEGGSKYGYCRRVDDTLIPCKANDTMCGKLFCQGGSDNLPWKGRIVTFLTCKTFDPEDTSQEIGMVANGTKCGDNKVCINAECVDIEKAYKSTNCSSKCKGHAVCDHELQCQCEEGWIPPDCDDSSVVFHFSIVVGVLFPMAVIFVVVAMVIRHQSSREKQKKDQRPLSTTGTRPHKQKRKPQMVKAVQPQEMSQMKPHVYDLPVEGNEPPASFHKDTNALPPTVFKDNPMSTPKDSNPEA

SEQ ID NO: 795632 - protein, 775 aa, Homo sapiens; identical to SEQ ID NO: 795631

SEQ ID NO: 795633 - protein, 540 aa, Homo sapiens
MLQGLLPVSLLLSVAVSAIKELPGVKKYEVVYPIRLHPLHKREAKEPEQQEQFETELKYKMTINGKIAVLYLKKNKNLLAPGYTETYYNSTGKEITTSPQIMDDCYYQGHILNEKVSDASISTCRGLRGYFSQGDQRYFIEPLSPIHRDGQEHALFKYNPDEKNYDSTCGMDGVLWAHDLQQNIALPATKLVKLKDRKVQEHEKYIEYYLVLDNGEFKRYNENQDEIRKRVFEMANYVNMLYKKLNTHVALVGMEIWTDKDKIKITPNASFTLENFSKWRGSVLSRRKRHDIAQLITATELAGTTVGLAFMSTMCSPYSVGVVQDHSDNLLRVAGTMAHEMGHNFGMFHDDYSCKCPSTICVMDKALSFYIPTDFSSCSRLSYDKFFEDKLSNCLFNAPLPTDIISTPICGNQLVEMGEDCDCGTSEECTNICCDAKTCKIKATFQCALGECCEKCQFKKAGMVCRPAKDECDLPEMCNGKSGNCPDDRFQVNGFPCHHGKGHCLMGTCPTLREQCTELWGPGRRTNPFPCACAKENHFR

SEQ ID NO: 795634 - protein, 124 aa, Homo sapiens
MDDCYYQGHILNEKVSDASISTCRGLRGYFSQGDQRYFIEPLSPIHRDGQEHALFKYNPDEKNYDSTCGMDGVLWAHDLQQNIALPATKLVKLKDRKVQEHEKYIEYYLVLDNGEFHRYNEEIR

SEQ ID NO: 795635 - protein, 552 aa, Homo sapiens
EERCRGKLLLTRIGVCQLYKKLNTHVALVGMEIWTDKDKIKITPNASFTLENFSKWRGSVLSRRKRHDIAQLITATELAGTTVGLAFMSTMCSPYSVGVVQDHSDNLLRVAGTMAHEMGHNFGMFHDDYSCKCPSTICVMDKALSFYIPTDFSSCSRLSYDKFFEDKLSNCLFNAPLPTDIISTPICGNQLVEMGEDCDCGTSEECTNICCDAKTCKIKATFQCALGECCEKCQFKKAGMVCRPAKDECDLPEMCNGKSGNCPDDRFQVNGFPCHHGKGHCLMGTCPTLREQCTELWGPGTEVADKSCYNRNEGGSKYGYCRRVDDTLIPCKANDTMCGKLFCQGGSDNLPWKGRIVTFLTCKTFDPEDTSQEIGMVANGTKCGDNKVCINAECVDIEKAYKSTNCSSKCKGHAVCDHELQCQCEEGWIPPDCDDSSVVFHFSIVVGVLFPMAVIFVVVAMVIRHQSSREKQKKDQRPLSTTGTRPHKQKRKPQMVKAVQPQEMSQMKPHVYDLPVEGNEPPASFHKDTNALPPTVFKDNPMSTPKDSNPEA

SEQ ID NO: 795636 - protein, 1203 aa, Homo sapiens
AAAPFPDRPPAHLVSSRRSAPPGSREPRGTGHLHPPLGVSGSSWCLACVSWMPCGFSPSPVAHHLVPGPPDTPAQQLRCGWTVGGWLLSLVRGLLPCLPPGARTAEGPIMVLAGPLAVSLLLPSLTLLVSHLSSSQDVSSEPSSEQQLCALSKHPTVAFEDLQPWVSNFTYPGARDFSQLALDPSGNQLIVGARNYLFRLSLANVSLLQATEWASSEDTRRSCQSKGKTEEECQNYVRVLIVAGRKVFMCGTNAFSPMCTSRQVGNLSRTTEKINGVARCPYDPRHNSTAVISSQGELYAATVIDFSGRDPAIYRSLGSGPPLRTAQYNSKWLNEPNFVAAYDIGLFAYFFLRENAVEHDCGRTVYSRVARVCKNDVGGRFLLEDTWTTFMKARLNCSRPGEVPFYYNELQSAFHLPEQDLIYGVFTTNVNSIAASAVCAFNLSAISQAFNGPFRYQENPRAAWLPIANPIPNFQCGTLPETGPNENLTERSLQDAQRLFLMSEAVQPVTPEPCVTQDSVRFSHLVVDLVQAKDTLYHVLYIGTESGTILKALSTASRSLHGCYLEELHVLPPGRREPLRSLRILHSARALFVGLRDGVLRVPLERCAAYRSQGACLGARDPYCGWDGKQQRCSTLEDSSNMSLWTQNITACPVRNVTRDGGFGPWSPWQPCEHLDGDNSGSCLCRARSCDSPRPRCGGLDCLGPAIHIANCSRNGAVDPVVIVGRCAATSCGIGFQVRQRSCSNPAPRHGGRICVGKSREERFCNENTPCPVPIFWASWGSWSKCSSNCGGGMQSRRRACENGNSCLGCGVEFKTCNPEGCPEVRRNTPWTPWLPVNVTQGGARQEQRFRFTCRAPLADPHGLQFGRRRTETRTCPADGSGSCDTDALVEVLLRSGSTSPHTVSGGWAAWGPWSSCSRDCELGFRVRKRTCTNPEPRNGGLPCVGDAAEYQDCNPQACPVRGAWSCWTSWSPCSASCGGGHYQRTRSCTSPAPSPGEDICLGLHTEEALCATQACPEGWSPWSEWSKCTDDGAQSRSRHCEELLPGSSACAGNSSQSRPCPYSEIRVILPASSMEEATDCAGFNLIHLVATGISCFLGSGLLTLAVYLSCQHCQRQSQESTLVHPATPNHLHYKGGGTPKNEKYTPMEFKTLNKNNLIPDDRANFYPLQQTNVYTTTYYPSPLNKHSFRPEASPGQRCFPNS

SEQ ID NO: 795637 - protein, 1240 aa, Homo sapiens
AAAPFPDRPPAHLVSSRRSAPPGSREPRGTGHLHPPLGVSGSSWCLACVSWMPCGFSPSPVAHHLVPGPPDTPAQQLRCGWTVGGWLLSLVRGRKPSGDFEWRQGWRGPGEEDWPESPSPKVLMDSAGGLLPCLPPGARTAEGPIMVLAGPLAVSLLLPSLTLLVSHLSSSQDVSSEPSSEQQLCALSKHPTVAFEDLQPWVSNFTYPGARDFSQLALDPSGNQLIVGARNYLFRLSLANVSLLQATEWASSEDTRRSCQSKGKTEEECQNYVRVLIVAGRKVFMCGTNAFSPMCTSRQVGNLSRTTEKINGVARCPYDPRHNSTAVISSQGELYAATVIDFSGRDPAIYRSLGSGPPLRTAQYNSKWLNEPNFVAAYDIGLFAYFFLRENAVEHDCGRTVYSRVARVCKNDVGGRFLLEDTWTTFMKARLNCSRPGEVPFYYNELQSAFHLPEQDLIYGVFTTNVNSIAASAVCAFNLSAISQAFNGPFRYQENPRAAWLPIANPIPNFQCGTLPETGPNENLTERSLQDAQRLFLMSEAVQPVTPEPCVTQDSVRFSHLVVDLVQAKDTLYHVLYIGTESGTILKALSTASRSLHGCYLEELHVLPPGRREPLRSLRILHSARALFVGLRDGVLRVPLERCAAYRSQGACLGARDPYCGWDGKQQRCSTLEDSSNMSLWTQNITACPVRNVTRDGGFGPWSPWQPCEHLDGDNSGSCLCRARSCDSPRPRCGGLDCLGPAIHIANCSRNGGRGPRGASWAAVQARPVASGFQVRQRSCSNPAPRHGGRICVGKSREERFCNENTPCPVPIFWASWGSWSKCSSNCGGGMQSRRRACENGNSCLGCGVEFKTCNPEGCPEVRRNTPWTPWLPVNVTQGGARQEQRFRFTCRAPLADPHGLQFGRRRTETRTCPADGSGSCDTDALVEVLLRSGSTSPHTVSGGWAAWGPWSSCSRDCELGFRVRKRTCTNPEPRNGGLPCVGDAAEYQDCNPQACPVRGAWSCWTSWSPCSASCGGGHYQRTRSCTSPAPSPGEDICLGLHTEEALCATQACPEGWSPWSEWSKCTDDGAQSRSRHCEELLPGSSACAGNSSQSRPCPYSEIRVILPASSMEEATDCAGFNLIHLVATGISCFLGSGLLTLAVYLSCQHCQRQSQESTLVHPATPNHLHYKGGGTPKNEKYTPMEFKTLNKNNLIPDDRANFYPLQQTNVYTTTYYPSPLNKHSFRPEASPGQRCFPNS

SEQ ID NO: 795638 - protein, 1095 aa, Homo sapiens
MVLAGPLAVSLLLPSLTLLVSHLSSSQDVSSEPSSEQQLCALSKHPTVAFEDLQPWVSNFTYPGARDFSQLALDPSGNQLIVGARNYLFRLSLANVSLLQATEWASSEDTRRSCQSKGKTEEECQNYVRVLIVAGRKVFMCGTNAFSPMCTSRQVGNLSRTTEKINGVARCPYDPRHNSTAVISSQGELYAATVIDFSGRDPAIYRSLGSGPPLRTAQYNSKWLNEPNFVAAYDIGLFAYFFLRENAVEHDCGRTVYSRVARVCKNDVGGRFLLEDTWTTFMKARLNCSRPGEVPFYYNELQSAFHLPEQDLIYGVFTTNVNSIAASAVCAFNLSAISQAFNGPFRYQENPRAAWLPIANPIPNFQCGTLPETGPNENLTERSLQDAQRLFLMSEAVQPVTPEPCVTQDSVRFSHLVVDLVQAKDTLYHVLYIGTESGTILKALSTASRSLHGCYLEELHVLPPGRREPLRSLRILHSARALFVGLRDGVLRVPLERCAAYRSQGACLGARDPYCGWDGKQQRCSTLEDSSNMSLWTQNITACPVRNVTRDGGFGPWSPWQPCEHLDGDNSGSCLCRARSCDSPRPRCGGLDCLGPAIHIANCSRNGGRGPRGASWAAVQARPVASGFQVRQRSCSNPAPRHGGRICVGKSREERFCNENTPCPVPIFWASWGSWSKCSSNCGGGMQSRRRACENGNSCLGCGVEFKTCNPEGCPEVRRNTPWTPWLPVNVTQGGARQEQRFRFTCRAPLADPHGLQFGRRRTETRTCPADGSGSCDTDALVEVLLRSGSTSPHTVSGGWAAWGPWSSCSRDCELGFRVRKRTCTNPEPRNGGLPCVGDAAEYQDCNPQACPVRGAWSCWTSWSPCSASCGGGHYQRTRSCTSPAPSPGEDICLGLHTEEALCATQACPEGWSPWSEWSKCTDDGAQSRSRHCEELLPGSSACAGNSSQSRPCPYSEIRVILPASSMEEATDCAGFNLIHLVATGISCFLGSGLLTLAVYLSCQHCQRQSQESTLVHPATPNHLHYKGGGTPKNEKYTPMEFKTLNKNNLIPDDRANFYPLQQTNVYTTTYYPSPLNKHSFRPEASPGQRCFPNS

SEQ ID NO: 795639 - protein, 1248 aa, Homo sapiens
RPPHSQTGRQPIWLAPAAPRRPGVGSRGEPGTCTRLWEPAWVRVALGPARAVVGASGLQRRWGPGTQAWRRRRTSEAEGRRDRVSGSSWCLACVSWMPCGFSPSPVAHHLVPGPPDTPAQQLRCGWTVGGWLLSLVRGLLPCLPPGARTAEGPIMVLAGPLAVSLLLPSLTLLVSHLSSSQDVSSEPSSEQQLCALSKHPTVAFEDLQPWVSNFTYPGARDFSQLALDPSGNQLIVGARNYLFRLSLANVSLLQATEWASSEDTRRSCQSKGKTEEECQNYVRVLIVAGRKVFMCGTNAFSPMCTSRQVGNLSRTTEKINGVARCPYDPRHNSTAVISSQGELYAATVIDFSGRDPAIYRSLGSGPPLRTAQYNSKWLNEPNFVAAYDIGLFAYFFLRENAVEHDCGRTVYSRVARVCKNDVGGRFLLEDTWTTFMKARLNCSRPGEVPFYYNELQSAFHLPEQDLIYGVFTTNVNSIAASAVCAFNLSAISQAFNGPFRYQENPRAAWLPIANPIPNFQCGTLPETGPNENLTERSLQDAQRLFLMSEAVQPVTPEPCVTQDSVRFSHLVVDLVQAKDTLYHVLYIGTESGTILKALSTASRSLHGCYLEELHVLPPGRREPLRSLRILHSARALFVGLRDGVLRVPLERCAAYRSQGACLGARDPYCGWDGKQQRCSTLEDSSNMSLWTQNITACPVRNVTRDGGFGPWSPWQPCEHLDGDNSGSCLCRARSCDSPRPRCGGLDCLGPAIHIANCSRNGAVDPVVIVGRCAATSCGIGFQVRQRSCSNPAPRHGGRICVGKSREERFCNENTPCPVPIFWASWGSWSKCSSNCGGGMQSRRRACENGNSCLGCGVEFKTCNPEGCPEVRRNTPWTPWLPVNVTQGGARQEQRFRFTCRAPLADPHGLQFGRRRTETRTCPADGSGSCDTDALVEVLLRSGSTSPHTVSGGWAAWGPWSSCSRDCELGFRVRKRTCTNPEPRNGGLPCVGDAAEYQDCNPQACPVRGAWSCWTSWSPCSASCGGGHYQRTRSCTSPAPSPGEDICLGLHTEEALCATQACPEGWSPWSEWSKCTDDGAQSRSRHCEELLPGSSACAGNSSQSRPCPYSEIRVILPASSMEEATDCAGFNLIHLVATGISCFLGSGLLTLAVYLSCQHCQRQSQESTLVHPATPNHLHYKGGGTPKNEKYTPMEFKTLNKNNLIPDDRANFYPLQQTNVYTTTYYPSPLNKHSFRPEASPGQRCFPNS

SEQ ID NO: 795640 - protein, 1150 aa, Homo sapiens
AAAPFPDRPPAHLVSSRRSAPPGSREPRGTGHLHPPLGGLLPCLPPGARTAEGPIMVLAGPLAVSLLLPSLTLLVSHLSSSQDVSSEPSSEQQLCALSKHPTVAFEDLQPWVSNFTYPGARDFSQLALDPSGNQLIVGARNYLFRLSLANVSLLQATEWASSEDTRRSCQSKGKTEEECQNYVRVLIVAGRKVFMCGTNAFSPMCTSRQVGNLSRTTEKINGVARCPYDPRHNSTAVISSQGELYAATVIDFSGRDPAIYRSLGSGPPLRTAQYNSKWLNEPNFVAAYDIGLFAYFFLRENAVEHDCGRTVYSRVARVCKNDVGGRFLLEDTWTTFMKARLNCSRPGEVPFYYNELQSAFHLPEQDLIYGVFTTNVNSIAASAVCAFNLSAISQAFNGPFRYQENPRAAWLPIANPIPNFQCGTLPETGPNENLTERSLQDAQRLFLMSEAVQPVTPEPCVTQDSVRFSHLVVDLVQAKDTLYHVLYIGTESGTILKALSTASRSLHGCYLEELHVLPPGRREPLRSLRILHSARALFVGLRDGVLRVPLERCAAYRSQGACLGARDPYCGWDGKQQRCSTLEDSSNMSLWTQNITACPVRNVTRDGGFGPWSPWQPCEHLDGDNSGSCLCRARSCDSPRPRCGGLDCLGPAIHIANCSRNGAVDPVVHRGPLCSHVLWHAASRSASEVAATLLPATGAASAWARAWEERFCNENTPCPVPIFWASWGSWSKCSSNCGGGMQSRRRACENGNSCLGCGVEFKTCNPEGCPEVRRNTPWTPWLPVNVTQGGARQEQRFRFTCRAPLADPHGLQFGRRRTETRTCPADGSGSCDTDALVEVLLRSGSTSPHTVSGGWAAWGPWSSCSRDCELGFRVRKRTCTNPEPRNGGLPCVGDAAEYQDCNPQACPVRGAWSCWTSWSPCSASCGGGHYQRTRSCTSPAPSPGEDICLGLHTEEALCATQACPEGWSPWSEWSKCTDDGAQSRSRHCEELLPGSSACAGNSSQSRPCPYSEIRVILPASSMEEATDCAGFNLIHLVATGISCFLGSGLLTLAVYLSCQHCQRQSQESTLVHPATPNHLHYKGGGTPKNEKYTPMEFKTLNKNNLIPDDRANFYPLQQTNVYTTTYYPSPLNKHSFRPEASPGQRCFPNS

SEQ ID NO: 795641 - protein, 1211 aa, Homo sapiens
AAAPFPDRPPAHLVSSRRSAPPGSREPRGTGHLHPPLGVSGSSWCLACVSWMPCGFSPSPVAHHLVPGPPDTPAQQLRCGWTVGGWLLSLVRGLLPCLPPGARTAEGPIMVLAGPLAVSLLLPSLTLLVSHLSSSQDVSSEPSSEQQLCALSKHPTVAFEDLQPWVSNFTYPGARDFSQLALDPSGNQLIVGARNYLFRLSLANVSLLQATEWASSEDTRRSCQSKGKTEEECQNYVRVLIVAGRKVFMCGTNAFSPMCTSRQVGNLSRTTEKINGVARCPYDPRHNSTAVISSQGELYAATVIDFSGRDPAIYRSLGSGPPLRTAQYNSKWLNEPNFVAAYDIGLFAYFFLRENAVEHDCGRTVYSRVARVCKNDVGGRFLLEDTWTTFMKARLNCSRPGEVPFYYNELQSAFHLPEQDLIYGVFTTNVNSIAASAVCAFNLSAISQAFNGPFRYQENPRAAWLPIANPIPNFQCGTLPETGPNENLTERSLQDAQRLFLMSEAVQPVTPEPCVTQDSVRFSHLVVDLVQAKDTLYHVLYIGTESGTILKALSTASRSLHGCYLEELHVLPPGRREPLRSLRILHSARALFVGLRDGVLRVPLERCAAYRSQGACLGARDPYCGWDGKQQRCSTLEDSSNMSLWTQNITACPVRNVTRDGGFGPWSPWQPCEHLDGDNSGSCLCRARSCDSPRPRCGGLDCLGPAIHIANCSRNGAVDPVVIVGRCAATSCGIGFQVRQRSCSNPAPRHGGRICVGKSREERFCNENTPCPVPIFWASWGSWSKCSSNCGGGMQSRRRACENGNSCLGCGVEFKTCNPEGCPEVRRNTPWTPWLPVNVTQGGARQEQRFRFTCRAPLADPHGLQFGRRRTETRTCPADGSGSCDTDALVEVLLRSGSTSPHTVSGGWAAWGPWSSCSRDCELGFRVRKRTCTNPEPRNGGLPCVGDAAEYQDCNPQACPVRGAWSCWTSWSPCSASCGGGHYQRTRSCTSPAPSPGEDICLGLHTEEALCATQACPEGWSPWSEWSKCTDDGAQSRSRHCEELLPGSSACAGNSSQSRPCPYSEIRVILPASSMEEATDCAGFNLIHLVATGISCFLGSGLLTLAVYLSCQHCQRQSQESTLVHPATPNHLHYKGGGTPKNEKYTPMEFKTLNKNNLIPDDRANFYPLQQTNASAGYPPLPGSLYSTQGIPLVRGSEYWELEADLCLEVL

SEQ ID NO: 795642 - protein, 125 aa, Homo sapiens
  misc_feature (121)..(121): Xaa can be any naturally occurring amino acid
KAKSADLITDISQLFSSDHLETLPMSFQNNVLRTIGEVAIKTIFPLQTGVGTLANAILFFHNIFPILTEHQMRPTHKILTHMAVANSLVLLSTGIPHTMVSFVLWKPLSSLECKLVFTGLXVLTW

SEQ ID NO: 795643 - protein, 113 aa, Homo sapiens
MDSRQAAALLVLLLLIDGGCAEGPGGQQEDQLSAEEDSEPLPPQDAQTSGSLLHYLLQAMERPGRSQAFLFQPQRFGRNTQGSWRNEWLSPRAGEGLNSQFWSLAAPQRFGKK

SEQ ID NO: 795644 - protein, 1023 aa, Homo sapiens
MTLNNCASMKLEVHFQSKQNEDSEEEEQCTISSHWAFQQESKCWSPMGSSDLLAPPSPGLPATSSCESVLTELSATSLPVITVSLPPEPADLPLPGRAPSSSDRPLLSPTQGQEGPQDKAKKRHRNRSFLKHLESLRRKEKSGSQQAEPKHSPATSEKVSKASSFRSCRGFLSAGFYRAKNWAATSAGGSGANTRKAWEAWPVASFRHPQWTHRGDCLVHVPGDHKPGTFPRSLSIESLCPEDGHRLADWQPGRRWGCEGRRGSCGSTGSHASTYDNLPELYPAEPVMVGAEAEDEDDEESGGSYAHLDDILQHVWGLQQRVELWSRAMYPDLGPGDEEEEEATSSVEIATVEVKCQAEALSQMEVPAHGESPAWAQAEVQPAVLAPAQAPAEAEPVAQEEAEAPAPAPAPAPAQDSEQEAHSGGEPTFASSLSVEEGHSISDTVASSSELDSSGNSMNEAEAAGSLAGLQASMPRERRDSGVGASLTRPCRKLRWHSFQNSHRPSLNSESLEINRQFAGQINLLHKGSLLRLTAFMEKYTVPHKQGWVWSMPKFMRRNKTPDYRGQHVFGVPPLIHVQRTGQPLPQSIQQAMRYLRSQCLDQVGIFRKSGVKSRIQNLRQMNETSPDNVCYEGQSAYDVADLLKQYFRDLPEPIFTSKLTTTFLQIYQLLPKDQWLAAAQAATLLLPDENREVLQTLLYFLSDIASAEENQMTAGNLAVCLAPSIFHLNVSKKDSPSPRIKSKRSLIGRPGPRDLSDNMAATQGLSHMISDCKKLFQVPQDMVLQLCSSYSAAELSPPGPALAELRQAQAAGVSLSLYMEENIQDLLRDAAERFKGWMSVPGPQHTELACRKAPDGHPLRLWKASTEVAAPPAVVLHRVLRERALWDEDLLRAQVLEALMPGVELYHYVTDSMAPHPCRDFVVLRMWRSDLPRGGCLLVSQSLDPEQPVPESGVRALMLTSQYLMEPCGLGRSRLTHICRADLRGRSPDWYNKVFGHLCAMEVAKIRDSFPTLQAAGPETKL

SEQ ID NO: 795645 - protein, 53 aa, Homo sapiens
ACQNAAQPQLTYQGAFASNHCHSTFFGGPPTPPYWNEEEALWWEAVSKSTPVD

SEQ ID NO: 795646 - protein, 120 aa, Homo sapiens
MTLWHAEYFELKEIGRPQKQPRKQSLPLISCPSVSCPSFVPEVSHRNQNSSPAQLNLDSPPIKCSTATCAVVPTWSSIHPEMQILMRTVLVTELLSNLCPLVRTSAPGEETELHKVAVWV

SEQ ID NO: 795647 - protein, 202 aa, Homo sapiens
PDLPLLLLLLQALDGQLPRAPPGTPASSAALSPEAGIFINKEDSLLYSTESGQETPKLGTLAEGSLQLHLQDQADRVGSTASRQRQKAEMEQRRQKQLESLEQMEHPDMSLEIHYKAELEKERREQRRARLAHLKSSSTRAQERERGSELSTTSPSGTSLADDDRHSQMIRDQQQQILQQNRLHKQFLEEARKCLREFQNIC

SEQ ID NO: 795648 - protein, 151 aa, Homo sapiens
MSIPFSNTHYRIPQGFGNLLEGLTREILREQPDNIPAFAAAYFESLLEKREKTNFDPAEWGSKVEDRFYNNHAFEEQEPPEKSDPKQEESQISGKEEETSVTILDSSEEDKEKEEVAAVKIQAAFRGHIAREEAKKMKTNSLQNEEKEENK

SEQ ID NO: 795649 - protein, 151 aa, Homo sapiens; identical to SEQ ID NO: 795648

SEQ ID NO: 795650 - protein, 151 aa, Homo sapiens; identical to SEQ ID NO: 795648

SEQ ID NO: 795651 - protein, 151 aa, Homo sapiens; identical to SEQ ID NO: 795648

SEQ ID NO: 795652 - protein, 105 aa, Homo sapiens
MDHCGALFLCLCLLTLQNATTETWEELLSYMENMQVSRGRSSVFSSRQLHQLEQMLLNTSFPGYNLTLQTPTIQSLAFKLSCDFSGLSLTSATLKRVPQVRGCGL

SEQ ID NO: 795653 - protein, 221 aa, Homo sapiens
MDHCGALFLCLCLLTLQNATTETWEELLSYMENMQVSRGRSSVFSSRQLHQLEQMLLNTSFPGYNLTLQTPTIQSLAFKLSCDFSGLSLTSATLKRVPQAGGQHARGQHAMQFPAELTRDACKTRPRELRLICIYFSNTHFFKDENNSSLLNNYVLGAQLSHGHVNNLRDPVNISFWHNQSLVLLGAPPFPLHPCPSVTLLLNTGLTRPKPVEPSWKSITL

SEQ ID NO: 795654 - protein, 126 aa, Homo sapiens [sequence omitted]

SEQ ID NO: 795655 - protein, 139 aa, Homo sapiens
LLCKVPYSQVSGLRMWMFSKGIILSVTVLQVSSCGTSLKSRGLSCPCSSLAHHRVSFPSFRFTAFDVPSFLNFFHLSLPMEWKPRAGRGLTCLVFHCSWTWLHYFECFLGSEQTLCETPSHFFHIGPALSYKCQNNFCF

SEQ ID NO: 795656 - protein, 126 aa, Homo sapiens [sequence omitted]

SEQ ID NO: 795657 - protein, 207 aa, Homo sapiens
MSTKPDMIQKCLWLEILMGIFIAGTLSLDCNLLNVHLRRVTWQNLRHLSSMSNSFPVECLRENIAFELPQEFLQYTQPMKRDIKKAFYEMSLQAFNIFSQHTFKYWKERHLKQIQIGLDQQAEYLNQCLEEDENENEDMKEMKENEMKPSEARVPQLSSLELRRYFHRIDNFLKEKKYSDCAWEIVRVEIRRCLYYFYKFTALFRRK

SEQ ID NO: 795658 - protein, 135 aa, Homo sapiens
MKVVLPGPKSLSSGPLRKASQATATQTPAQGCTVAMETVGRGTGEGVRLPLRRRTREQPRRSGTAEIQAQGARSDAARAPGKLRLLPPTPLQVHSAPPPCTWLRCRVTQACVRERGRELSWKADTDSEGWLDWSR

SEQ ID NO: 795659 - protein, 524 aa, Homo sapiens
MAKRPGPPGSREMGLLTFRDIAIEFSLEEWQCLDCAQRNLYRHVMLENYRNLVSLGIAVSKPDLITCLEQNKESQNIKRNEMVAKRPVTHSHFTQDLQPEQGIKDSLQKVIPRTYGKCGHEKLQFKKCCKSVGECEVPKRGYSEVNQCLSTTQNKIFQTHKYVKVFGKFSNSNRDKTRYTGKKHFKCNKYGKSFCMLSHLNQHQVIHTREKSYKCKECGKSFNCSSNHTTHKIIHTGEKPYRCEECGKAFSWSANLTRHKRIHTGEKPYTCEECGQAFRRSSALTNHKRIHTGGRPYKCEECGKAFSVSSTLTDHKRIHTGEKPCRCEECGKAFSWSSNLTRHKRIHTREKPYACEECGQAFSLSSNLTRHKRIHTGEKPYTYEECGQDFRRSSALTIHKRIHTGERPYKCEECGKVFSLSSTLTDHKRIHTGERPYKCEECGKAFSLSSTLTDHKRIHTGERPYTCEECGKAFNCSSTLMQHKRIHTGEKPYKCEECDQAFKWHSSLAKHKIIHTGEKPYKCE

SEQ ID NO: 795660 - protein, 114 aa, Homo sapiens
GAAASQGRSRWPLANSLDSTSGLLGSSRSPHLEEGEGWSNRTALGLGGVWNPSPQWLRASVLQRGLLSSWECRGEKPVSARVQHCGRVGTVVLFLFEMEPHSVTQAGVQWCNLS

SEQ ID NO: 795661 - protein, 68 aa, Homo sapiens
HSHPDTLDQWFSTCNDCAPPGDISLCLEMHLAVTARRQGMTGTQWVKTRVAAKHPTMHRKAPYSQIII

SEQ ID NO: 795662 - protein, 67 aa, Homo sapiens
LPVGGGGDGAVGGRLAARASPAGLEDRKKRHRRVLEAGAGACASAARLAAVGGEIRDRSSATVVEMW

SEQ ID NO: 795663 - protein, 67 aa, Homo sapiens; identical to SEQ ID NO: 795662

SEQ ID NO: 795664 - protein, 67 aa, Homo sapiens; identical to SEQ ID NO: 795662

SEQ ID NO: 795665 - protein, 110 aa, Homo sapiens
MIRTAITYKAANPSLEGKKINTSCQSFGCTTGTLKQYEPFFVIGYINALSLKSESILLVRDCLLKLLGFFFFFFEMEFHSFRLGWSAVAHSPLTATSSSWVLAILLPQPP

SEQ ID NO: 795666 - protein, 102 aa, Homo sapiens
LNFKGLAVSPSLEYSGMIWVHCNLCLPGSDHPPASASQSVGITGVSLAPGIISESESESPELWRLWSSHSCFGIHASSLSAGATPHHTQDGVCCFSRCDAKL

SEQ ID NO: 795667 - protein, 219 aa, Homo sapiens
RSGVSRRNSTAMGEPAFTSFPSLPVLGKLKRNMMPWALQKKREIHMAKAHRRRAARSALPMRLTSCIFRRPVTRIRSHPDNQVRRRKGDEHLEKPQQLCAYRRLQALQPCSSQGEGSSPLHLESVLSILAPGTASESLDRAGAERVRSPLEPTPGRFPAVAGGPTPGMGCQLPPPLSGQLVTPADIRRQARRVKKARERLAKALQADRLARQAEMLTCR

SEQ ID NO: 795668 - protein, 111 aa, Homo sapiens
HRKVCGQLPEGSRVLNPDAILTHRSHGNKNKNSYENSSWPKTCHAFPHLIIPRSLEFSHFTGEERVFRMAKGLTPLKEEHALSSKNVPKLNRRSESKACAPPTAACGGLFP

SEQ ID NO: 795669 - protein, 120 aa, Homo sapiens [sequence omitted]

SEQ ID NO: 795670 - protein, 69 aa, Homo sapiens
AYARMQCRVCIPKADEILQNGCLTRQSQEDRPRRERLMCLHYQEIGFSKPARHPIQQYETGHISLRCQR

SEQ ID NO: 795671 - protein, 109 aa, Homo sapiens
SGEEGVLFSPLRTSELAALTSSETHVLSHGHRFSPAVWPYAPAYHSHPRRPVLGGEALVSDLSALKSYPALMATPRLGGTSNIAVEGPMFAFCTLPSLTLDTIKTIFSS

SEQ ID NO: 795672 - protein, 99 aa, Homo sapiens
MRLREPCVEGGEYGIPPCNPQLKQFLPYILPIQEFAILAISFGKGISRMGRKMFGHAEGIREEMTAIPRDKNICMEATKTAHDEAKHMSSISKKEGAEA

SEQ ID NO: 795673 - protein, 102 aa, Homo sapiens
AAGPPSAAYICSPPALSSQEAPHLSLPEEYGSQGGLLQAFLSTHALPPSLPASKELISRETLPSCPTFPSASSRNCPLTSLCLGLLVTLVHTKTVLPFPVSH

SEQ ID NO: 795674 - protein, 155 aa, Homo sapiens
MKIAEFLNRETKASANLSETVTKPPLPQKNTAQVGASSQTRKPNKLAPHPAVPAFVKNTCPSRPRERQTHFLRPRPEDRMVALKPIEIVLPPVFMPFSSPQGIRSRMPTQHLYCRWVAPKALVPTCLPTHSLSRKEEKPKDDTPSSLLRPPRRWL

SEQ ID NO: 795675 - protein, 116 aa, Homo sapiens
MAPYRVLPYCWKGMTPEQQAAIRKEQEVQRSKKQAHRQAEKTLDTEWKSQTMSSAQAVLELEEQERELCAVFQRGLGSFNQQLANEQKAQQDYLNSVIYTNQPTAQYHQQFNTSSR

SEQ ID NO: 795676 - protein, 108 aa, Homo sapiens
HQSTSDLLTETPRVAQHPMAPYRVLPYCWKGMTPEQQAAIRKEQEVQRSKKQAHRQAEKTLDTEWKSQTMSSAQAVLELEEQERELCAVFQRGLGSFNQQLANEQKAQ

SEQ ID NO: 795677 - protein, 177 aa, Homo sapiens
LCGLVPEGTLPGAPWRGAVALAAEVPERTVAQWLAEACTQPPEEFVWAVALLLLQLSAALKFLEAWGAALVELRPENLLLVAPRGCATTGPPRLLLTDFGRVCLQPPGPPGSPGPHAPQLGSLLRALLSLAAPSTTPLAAGLELLAAQLTRLRPSASRTRGALQALLWGPGPELRGR

SEQ ID NO: 795678 - protein, 83 aa, Homo sapiens
GEKSTTNHILADKLNWMWFIKDIPKPQNWISRVHLWPRVHNHTPRHRHGSWFMRYPRTQDSDPDCRPVPGEKQRVPPPHRPPS

SEQ ID NO: 795679 - protein, 70 aa, Homo sapiens
EKRKHKKKLLVQSPNSYFMDVKCPGCDKITTVFSHAQTVVLCVGCSTVLCQPTGGKARLTEGCSFRRKQH

SEQ ID NO: 795680 - protein, 72 aa, Homo sapiens
CIVLAGARQKTPKESYPLSRGEVKLISNCSKSYGNRLYDKEMDVQSLALCPKLECSGAISAHCNIHPPPGFK

SEQ ID NO: 795681 - protein, 159 aa, Homo sapiens
VKWGDHCHPTEPGAWCCWTARTPKAKSWAPWGPPCQALPWDAALASSQGPAPPPTTPCSQDPHLSVHQNYLGSFINVKAQAPPRNSESGACPGLQMLYVARTGAPGFPTTHVVQPSRYTLQRPFLVLTPAHFPVAQTWPQDKAARPTLQGRPSHTCHCI

SEQ ID NO: 795682 - protein, 126 aa, Homo sapiens
RRLLAEKEELLSENRIITEKLHKCLEEAAHTEMSLNEKITYLTSEKEMASQKMTELKKQQDSLLKEKSSLETQNGALLAERENSIKAIGDLKRQCDQESANRSLVVQENMKLLGNIDALKKELQER

SEQ ID NO: 795683 - protein, 117 aa, Homo sapiens
LRWCTHMPGRLVLAVGGRPQFPTTWTPLQSCLSVLTTWQLAAPEEVIQGEQGRNHVFYGLALDIISAVLLVARWVLFSEEGTLQDVTTGAHWAASQSCHHAAAWLAHLEHLVFSHLV

SEQ ID NO: 795684 - protein, 314 aa, Homo sapiens
MDAFKGGMSLERLPEGLRPPPPPPHDMGPAFHLARPADPREPLENSASESSDTELPEKERGGEPKGPEDSGAGGTGCGGADDPAKKKKQRRQRTHFTSQQLQELEATFQRNRYPDMSMREEIAVWTNLTEPRVRVWFKNRRAKWRKRERNQQLDLCKGGYVPQFSGLVQPYEDVYAAGYSYNNWAAKSLAPAPLSTKSFTFFNSMSPLSSQSMFSAPSSISSMTMPSSMGPGAVPGMPNSGLNNINNLTGSSLNSAMSPGACPYGTPASPYSVYRDTCNSSLASLRLKSKQHSSFGYGGLQGPASGLNACQYNS

SEQ ID NO: 795685 - protein, 70 aa, Homo sapiens
GRRPLDEDTAGSCRNGPRALPPPRRWLEGARSVRSCSANIHSSWAVLARAGDFEAAETGVDSRRNKSFEA

SEQ ID NO: 795686 - protein, 314 aa, Homo sapiens; identical to SEQ ID NO: 795684

SEQ ID NO: 795687 - protein, 293 aa, Homo sapiens
ARGGPHVMGWRRRRPADPREPLENSASESSDTELPEKERGGEPKGPEDSGAGGTGCGGADDPAKKKKQRRQRTHFTSQQLQELEATFQRNRYPDMSMREEIAVWTNLTEPRVRVWFKNRRAKWRKRERNQQLDLCKGGYVPQFSGLVQPYEDVYAAGYSYNNWAAKSLAPAPLSTKSFTFFNSMSPLSSQSMFSAPSSISSMTMPSSMGPGAVPGMPNSGLNNINNLTGSSLNSAMSPGACPYGTPASPYSVYRDTCNSSLASLRLKSKQHSSFGYGGLQGPASGLNACQYNS

SEQ ID NO: 795688 - protein, 354 aa, Homo sapiens
RSRDPAHVRGRSPEQPGSGPRPGSCASPSALPFFVRAGAFFQQRTGPAGGRRGQWGSESAAQRSRPGSGGAPSSPVWAPLLRSFLNTQLNVSLHFLKKERGGEPKGPEDSGAGGTGCGGADDPAKKKKQRRQRTHFTSQQLQELEATFQRNRYPDMSMREEIAVWTNLTEPRVRVWFKNRRAKWRKRERNQQLDLCKGGYVPQFSGLVQPYEDVYAAGYSYNNWAAKSLAPAPLSTKSFTFFNSMSPLSSQSMFSAPSSISSMTMPSSMGPGAVPGMPNSGLNNINNLTGSSLNSAMSPGACPYGTPASPYSVYRDTCNSSLASLRLKSKQHSSFGYGGLQGPASGLNACQYNS

SEQ ID NO: 795689 - protein, 246 aa, Homo sapiens
MDAFKGGMSLERLPEGLRPPPPPPHDMGPAFHLARPADPREPLENSASESSDTELPEKERGGEPKGPEDSGAGGTGCGGADDPAKKKKQRRQRTHFTSQQLQELEATFQRNRYPDMSMREEIAVWTNLTEPRVRVWFKNRRAKWRKRERNQQLDLCKGGYVPQFSGLVQPYEDVYAAGYSYNNWAAKSLAPAPLSTKSFTFFNSMSPLSSQSMFSSLLKHSPALASAGPHVSHACVTRYPRSCRGL

SEQ ID NO: 795690 - protein, 314 aa, Homo sapiens; identical to SEQ ID NO: 795684

SEQ ID NO: 795691 - protein, 288 aa, Homo sapiens [sequence omitted]

SEQ ID NO: 795692 - protein, 283 aa, Homo sapiens
AVRWSRDGVQRGVSPGDPLPVLPTAEKERGGEPKGPEDSGAGGTGCGGADDPAKKKKQRRQRTHFTSQQLQELEATFQRNRYPDMSMREEIAVWTNLTEPRVRVWFKNRRAKWRKRERNQQLDLCKGGYVPQFSGLVQPYEDVYAAGYSYNNWAAKSLAPAPLSTKSFTFFNSMSPLSSQSMFSAPSSISSMTMPSSMGPGAVPGMPNSGLNNINNLTGSSLNSAMSPGACPYGTPASPYSVYRDTCNSSLASLRLKSKQHSSFGYGGLQGPASGLNACQYNS

SEQ ID NO: 795693 - protein, 159 aa, Homo sapiens [sequence omitted]

SEQ ID NO: 795694 - protein, 88 aa, Homo sapiens
PLFLVCETVTDLVPALTESLLGSRNGTYLVHTFLCCLGPRAASPLCYKNAVVPNNCLLLGDWLYDCSQLRNGVVIPEVSVVHNAEVGS

SEQ ID NO: 795695 - protein, 117 aa, Homo sapiens
GSSDSHTSASPVAAITDTHHHTQLIFYIFSRGKVLPYWPGWSGTPDLKRSACFPKYWDYRRERPHLANFYFKTMRGVHGRAVVSNPGCVRVVPTPSVPLFLPSREFSYGSTRMTSSP

SEQ ID NO: 795696 - protein, 120 aa, Homo sapiens
LWKLLVRSLHVWPPGLRAYREVSSMLLGGQRSQLRSLPPSGGGSRGVGSLLLQPCFPPCDPPRVPSVSHLMSTLCPALCPVCVPPCVCPLFTLCPSRARLCPPSSSSLGAAPTHLPSQPL

SEQ ID NO: 795697 - protein, 80 aa, Homo sapiens
SFELSMGFHSAQKFQLHTRDDEAATQKHRQRCGAQSKPWGEIFSPGLHQDESISSPPSSKAKLALQPSMQETGFCLVPAL

SEQ ID NO: 795698 - protein, 130 aa, Homo sapiens [sequence omitted]

SEQ ID NO: 795699 - protein, 770 aa, Homo sapiens
MVESAGRAGQKRPGFLEGGLLLLLLLVTAALVALGVLYADRRGKQLPRLASRLCFLQEERTFVKRKPRGIPEAQEVSEVCTTPGCVIAAARILQNMDPTTEPCDDFYQFACGGWLRRHVIPETNSRYSIFDVLRDELEVILKAVLENSTAKDRPAVEKARTLYRSCMNQSVIEKRGSQPLLDILEVVGGWPVAMDRWNETVGLEWELERQLALMNSQFNRRVLIDLFIWNDDQNSSRHIIYIDQPTLGMPSREYYFNGGSNRKVREAYLQFMVSVATLLREDANLPRDSCLVQEDMVQVLELETQLAKATVPQEERHDVIALYHRMGLEELQSQFGLKGFNWTLFIQTVLSSVKIKLLPDEEVVVYGIPYLQNLENIIDTYSARTIQNYLVWRLVLDRIGSLSQRFKDTRVNYRKALFGTMVEEVRWRECVGYVNSNMENAVGSLYVREAFPGDSKSMVRELIDKVRTVFVETLDELGWMDEESKKKAQEKAMSIREQIGHPDYILEEMNRRLDEEYSNLNFSEDLYFENSLQNLKVGAQRSLRKLREKVDPNLWIIGAAVVNAFYSPNRNQIVFPAGILQPPFFSKEQPQALNFGGIGMVIGHEITHGFDDNGRNFDKNGNMMDWWSNFSTQHFREQSECMIYQYGNYSWDLADEQNVNGFNTLGENIADNGGVRQAYKAYLKWMAEGGKDQQLPGLDLTHEQLFFINYAQVWCGSYRPEFAIQSIKTDVHSPLKYRVLGSLQNLAAFADTFHCARGTPMHPKERCRVW

SEQ ID NO: 795700 - protein, 114 aa, Homo sapiens
MCRASTPHGCDVGQPVPRKGSWHSKGWPDMCIPTLSELWGERVSVWKEQASVLFPQSSQQTQSLVQGLDAPVLMGSGTRLPPLARSLAPSAWSAPTLGTWAVDTAPGPQLPCQR

SEQ ID NO: 795701 - protein, 202 aa, Homo sapiens
HKQNLQNRFSFPSHQLLELELSAMAALQKSVSSFLMGTLATSCLLLLALLVQGGAAAPISSHCRLDKSNFQQPYITNRTFMLAKEASLADNNTDVRLIGEKLFHGVSMSERCYLMKQVLNFTLEEVLFPQSDRFQPYMQEVVPFLARLSNRLSTCHIEGDDLHIQRNVQKLKDTVKKLGESGEIKAIGELDLLFMSLRNACI

SEQ ID NO: 795702 - protein, 123 aa, Homo sapiens [sequence omitted]

SEQ ID NO: 795703 - protein, 318 aa, Homo sapiens
VRTVALDHGRPAFPPPVLGVGPSQPPLLTFCPILEPQVLCPFPIIAKLMMLRLLSSLLLVAVASGYGPPSSRPSSRVVNGEDAVPYSWPWQVSLQYEKSGSFYHTCGGSLIAPDWVVTAGHCISSSWTYQVVLGEYDRAVKEGPEQVIPINSGDLFVHPLWNRSCVACGNDIALIKLSRSAQLGDAVQLASLPPAGDILPNETPCYITGWGRLYTNGPLPDKLQEALLPVVDYEHCSRWNWWGSSVKKTMVCAGGDIRSGCNGDSGGPLNCPTEDGGWQVHGVTSFVSAFGCNTRRKPTVFTRVSAFIDWIEETIASH

SEQ ID NO: 795704 - protein, 150 aa, Homo sapiens
GRSYCHSHTRRSAQLGDAVQLASLPPAGDILPNETPCYITGWGRLYTNGPLPDKLQEALLPVVDYEHCSRWNWWGSSVKKTMVCAGGDIRSGCNGDSGGPLNCPTEDGGWQVHGVTSFVSAFGCNTRRKPTVFTRVSAFIDWIEETIASH

SEQ ID NO: 795705 - protein, 177 aa, Homo sapiens
VRTVALDHGRPAFPPPVLGVGPSQPPLLTFCPILEPQVLCPFPIIAKLMMLRLLSSLLLVAVACYITGWGRLYTNGPLPDKLQEALLPVVDYEHCSRWNWWGSSVKKTMVCAGGDIRSGCNGDSGGPLNCPTEDGGWQVHGVTSFVSAFGCNTRRKPTVFTRVSAFIDWIEETIASH

SEQ ID NO: 795706 - protein, 137 aa, Homo sapiens
  misc_feature (3)..(4): Xaa can be any naturally occurring amino acid
AGXXERLLSSLLLVAVASGYGPPSSRPSSRVVNGEDAVPYSWPWQVSLQYEKSGSFYHTCGGSLIAPDWVVTAGHCISSSWTYQVVLGEYDRAVKEGPEQVIPINSGDLFVHPLWNRSCVACGNDIALIKLSTIASH

SEQ ID NO: 795707 - protein, 87 aa, Homo sapiens
  misc_feature (4)..(4): Xaa can be any naturally occurring amino acid
KEKXKNPPPHGGVGGGPWEKGGTKPGSGVANGDSGGPLNCPTEDGGWQVHGVTSFVSAFGCNTRRKPTVFTRVSAFIDWIEETIASH

SEQ ID NO: 795708 - protein, 318 aa, Homo sapiens; identical to SEQ ID NO: 795703

SEQ ID NO: 795709 - protein, 318 aa, Homo sapiens; identical to SEQ ID NO: 795703

SEQ ID NO: 795710 - protein, 318 aa, Homo sapiens; identical to SEQ ID NO: 795703

SEQ ID NO: 795711 - protein, 325 aa, Homo sapiens
VRTVALDHGRPAFPPPVLGVGPSQPPLLTFCPILEPQVLCPFPIIAKLMMLRLLSSLLLVAVASGYGPPSSRPSSRVVNGEDAVPYSWPWQVSLQYEKSGSFYHTCGGSLIAPDWVVTAGHCISSSWTYQVVLGEYDRAVKEGPEQVIPINSGDLFVHPLWNRSCVACGNDIALIKLSRSAQLGDAVQLASLPPAGDILPNETPCYITGWGRLYTNGPLPDKLQEALLPVVDYEHCSRWNWWGSSVKKTMVCAGGDIRSGCNGDSGGPLNCPTEDGGWQVHGVTSFVSAFGCNTRRKPTVFTRVSAFIDWIEEKLQGNKAPESRT

SEQ ID NO: 795712 - protein, 286 aa, Homo sapiens
MRSCYVAQAGLKLPGSSDPPASASQSTRITASGYGPPSSRPSSRVVNGEDAVPYSWPWQVSLQYEKSGSFYHTCGGSLIAPDWVVTAGHCISSSWTYQVVLGEYDRAVKEGPEQVIPINSGDLFVHPLWNRSCVACGNDIALIKLSRSAQLGDAVQLASLPPAGDILPNETPCYITGWGRLYTNGPLPDKLQEALLPVVDYEHCSRWNWWGSSVKKTMVCAGGDIRSGCNGDSGGPLNCPTEDGGWQVHGVTSFVSAFGCNTRRKPTVFTRVSAFIDWIEETIASH

SEQ ID NO: 795713 - protein, 272 aa, Homo sapiens
  misc_feature (3)..(4): Xaa can be any naturally occurring amino acid
AGXXERLLSSLLLVAVASGYGPPSSRPSSRVVNGEDAVPYSWPWQVSLQYEKSGSFYHTCGGSLIAPDWVVTAGHCISSSWTYQVVLGEYDRAVKEGPEQVIPINSGDLFVHPLWNRSCVACGNDIALIKLSRSAQLGDAVQLASLPPAGDILPNETPCYITGWGRLYTNGPLPDKLQEALLPVVDYEHCSRWNWWGSSVKKTMVCAGGDIRSGCNGDSGGPLNCPTEDGGWQVHGVTSFVSAFGCNTRRKPTVFTRVSAFIDWIEETIASH

SEQ ID NO: 795714 - protein, 74 aa, Homo sapiens
LLHPSHPAAAARMASGYRRTHNCPKSPSAPFLPCTTSAFTAVQESPYSFLTTPQWKGSCYHLILWMTKLRHRVD

SEQ ID NO: 795715 - protein, 45 aa, Homo sapiens
LILINSHQFLTFRDVCDQSSYEENSKCCMAKNPRTPGPNRMQLPT

SEQ ID NO: 795716 - protein, 102 aa, Homo sapiens
DVGRQLNSAPGKMEAAETEAEAAALEVLAEVAGILEPVGLQEEAELPAKILVEFVVDSQKKDKLLCSQLQVADFLQNILAQEDTGVSFKAVGLQPAGDVNLP

SEQ ID NO: 795717 - protein, 252 aa, Homo sapiens
DVGRQLNSAPGKMEAAETEAEAAALEVLAEVAGILEPVGLQEEAELPAKILVEFVVDSQKKDKLLCSQLQVADFLQNILAQEDTAKGLDPLASEDTSRQKAIAAKEQWKELKATYREHVEAIKIGLTKALTQMEEAQRKRTQLREAFEQLQAKKQMAMEKRRAVQNQWQLQQEKHLQHLAEVSAEVRERKTGTQQELDGVFQKLGNLKQQAEPGADKLQRYQTFLQVLYTCRIGVSWSDVEKISNDNQSDYH

SEQ ID NO: 795718 - protein, 118 aa, Homo sapiens
DVGRQLNSAPGKMEAAETEAEAAALEVLAEVAGILEPVGLQEEAELPAKILVEFVVDSQKKDKLLCSQLQVADFLQNILAQEDTAKGLDPLASEDTSRQKAIAAEAENLPDDKPQQRT

SEQ ID NO: 795719 - protein, 101 aa, Homo sapiens
ARKEMQIKTTVGHHYIYKLIGKNLSLEIPSVGEKVEQLELSTKLLRVQTSTAALEGSSASSAKVEGVYPLWHSSSSVTCVLTDTSIYVHQHNVCKNLRWHV

SEQ ID NO: 795720 - protein, 126 aa, Homo sapiens [sequence omitted]

SEQ ID NO: 795721 - protein, 70 aa, Homo sapiens [sequence omitted]

SEQ ID NO: 795722 - protein, 232 aa, Homo sapiens
SSAGLGAPSRPRLLPGAAPLPLGRPVVAGYGKLALNLVPGHNKDEFVFLALVEHMGPHSHPVRLERLLQRERHGGSGFSPRGRAAGPARPRTPRWLRRAPRSPSPGAFSHLSAPAGSPGSFACPSAPRPPSSFVARIERRTISVPGAGSSHGHLRPDLFTSSALPQRLAAARRPPREAVELRLRRSGGEARVPRGQAGAVCVPVARPGQDPRPRPWCCCRKPGAGLTDEPVS

SEQ ID NO: 795723 - protein, 1944 aa, Homo sapiens
MSNFYEERTTMIAARDLQEFVPFGRDHCKHHPNALNLQLRQLQPASELWSSDGAAGLVGSLQEVTIHEKQKESWQLRKGVSEIGEDVDYDEELYVAGNMVIWSKGSKSQALAVYKAFTVDSPVQQALWCDFIISQDKSEKAYSSNEVEKCICILQSSCINMHSIEGKDYIASLPFQVANVWPTKYGLLFERSASSHEVPPGSPREPLPTMFSMLHPLDEITPLVCKSGSLFGSSRVQYVVDHAMKIVFLNTDPSIVMTYDAVQNVHSVWTLRRVKSEEENVVLKFSEQGGTPQNVATSSSLTAHLRSLSKGDSPVTSPFQNYSSIHSQSRSTSSPSLHSRSPSISNMAALSRAHSPALGVHSFSGVQRFNISSHNQSPKRHSISHSPNSNSNGSFLAPETEPIVPELCIDHLWTETITNIREKNSQASKVFITSDLCGQKFLCFLVESQLQLRCVKFQESNDKTQLIFGSVTNIPAKDAAPVEKIDTMLVLEGSGNLVLYTGVVRVGKVFIPGLPAPSLTMSNTMPRPSTPLDGVSTPKPLSKLLGSLDEVVLLSPVPELRDSSKLHDSLYNEDCTFQQLGTYIHSIRDPVHNRVTLELSNGSMVRITIPEIATSELVQTCLQAIKFILPKEIAVQMLVKWYNVHSAPGGPSYHSEWNLFVTCLMNMMGYNTDRLAWTRNFDFEGSLSPVIAPKKARPSETGSDDDWEYLLNSDYHQNVESHLLNRSLCLSPSEASQMKDEDFSQNLSLDSSTLLFTHIPAIFFVLHLVYEELKLNTLMGEGICSLVELLVQLARDLKLGPYVDHYYRDYPTLVRTTGQVCTIDPGQTGFMHHPSFFTSEPPSIYQWVSSCLKGEGMPPYPYLPGICERSRLVVLSIALYILGDESLVSDESSQYLTRITIAPQKLQVEQEENRFSFRHSTSVSSLAERLVVWMTNVGFTLRDLETLPFGIALPIRDAIYHCREQPASDWPEAVCLLIGRQDLSKQACEGNLPKGKSVLSSDVPSGTETEEEDDGMNDMNHEVMSLIWSEDLRVQDVRRLLQSAHPVRVNVVQYPELSDHEFIEEKENRLLQLCQRTMALPVGRGMFTLFSYHPVPTEPLPIPKLNLTGRAPPRNTTVDLNSGNIDVPPNMTSWASFHNGVAAGLKIAPASQIDSAWIVYNKPKHAELANEYAGFLMALGLNGHLTKLATLNIHDYLTKGHEMTSIGLLLGVSAAKLGTMDMSITRLLSIHIPALLPPTSTELDVPHNVQVAAVVGIGLVYQGTAHRHTAEVLLAEIGRPPGPEMEYCTDRESYSLAAGLALGMVCLGHGSNLIGMSDLNVPEQLYQYMVGGHRRFQTGMHREKHKSPSYQIKEGDTINVDVTCPGATLALAMIYLKTNNRSIADWLRAPDTMYLLDFVKPEFLLLRTLARCLILWDDILPNSKWVDSNVPQIIRENSISLSEIELPCSEDLNLETLSQAHVYIIAGACLSLGFRFAGSENLSAFNCLHKFAKDFMTYLSAPNASVTGPHNLETCLSVVLLSLAMVMAGSGNLKVLQLCRFLHMKTGGEMNYGFHLAHHMALGLLFLGGGRYSLSTSNSSIAALLCALYPHFPAHSTDNRYHLQALRHLYVLAAEPRLLVPVDVDTNTPCYALLEVTYKGTQWYEQTKEELMAPTLLPELHLLKQIKVKGPRYWELLIDLSKGTQHLKSILSKDGVLYVKLRAGQLSYKEDPMGWQSLLAQTVANRNSEARAFKPETISAFTSDPALLSFAEYFCKPTVNMGQKQEILDLFSSVLYECVTQETPEMLPAYIAMDQAIRRLGRREMSETSELWQIKLVLEFFSSRSHQERLQNHPKRGLFMNSEFLPVVKCTIDNTLDQWLQVGGDMCVHAYLSGQPLEESQLSMLACFLVYHSVPAPQHLPPIGLEGSTSFAELLFKFKQLKMPVRALLRLAPLLLGNPQPMVM

SEQ ID NO: 795724 - protein, 72 aa, Homo sapiens
HEASCRVHLNVSHAFLPLALEPAAVARSSSGIREGEGMISCCGPRVTVKDPAAALGPPRPLRLRGAAGARRA

SEQ ID NO: 795725 - protein, 2062 aa, Homo sapiens
KGTFAHLSELDCDKPHVDPENFKLLGNVLVTALAIQVLYSIPKEVSTFLPCALTLGLPMMEEAEDRLSKLSKNLWVHVVDNQEPSQGLTSSIFHIHHAPQACDRRTELYRNNVDIWKPMSNFYEERTTMIAARDLQEFVPFGRDHCKHHPNALNLQLRQLQPASELWSSDGAAGLVGSLQEVTIHEKQKESWQLRKGVSEIGEDVDYDEELYVAGNMVIWSKGSKSQALAVYKAFTVDSPVQQALWCDFIISQDKSEKAYSSNEVEKCICILQSSCINMHSIEGKDYIASLPFQVANVWPTKYGLLFERSASSHEVPPGSPREPLPTMFSMLHPLDEITPLVCKSGSLFGSSRVQYVVDHAMKIVFLNTDPSIVMTYDAVQNVHSVWTLRRVKSEEENVVLKFSEQGGTPQNVATSSSLTAHLRSLSKGDSPVTSPFQNYSSIHSQSRSTSSPSLHSRSPSISNMAALSRAHSPALGVHSFSGVQRFNISSHNQSPKRHSISHSPNSNSNGSFLAPETEPIVPELCIDHLWTETITNIREKNSQASKVFITSDLCGQKFLCFLVESQLQLRCVKFQESNDKTQLIFGSVTNIPAKDAAPVEKIDTMLVLEGSGNLVLYTGVVRVGKVFIPGLPAPSLTMSNTMPRPSTPLDGVSTPKPLSKLLGSLDEVVLLSPVPELRDSSKLHDSLYNEDCTFQQLGTYIHSIRDPVHNRVTLELSNGSMVRITIPEIATSELVQTCLQAIKFILPKEIAVQMLVKWYNVHSAPGGPSYHSEWNLFVTCLMNMMGYNTDRLAWTRNFDFEGSLSPVIAPKKARPSETGSDDDWEYLLNSDYHQNVESHLLNRSLCLSPSEASQMKDEDFSQNLSLDSSTLLFTHIPAIFFVLHLVYEELKLNTLMGEGICSLVELLVQLARDLKLGPYVDHYYRDYPTLVRTTGQVCTIDPGQTGFMHHPSFFTSEPPSIYQWVSSCLKGEGMPPYPYLPGICERSRLVVLSIALYILGDESLVSDESSQYLTRITIAPQKLQVEQEENRFSFRHSTSVSSLAERLVVWMTNVGFTLRDLETLPFGIALPIRDAIYHCREQPASDWPEAVCLLIGRQDLSKQACEGNLPKGKSVLSSDVPSGTETEEEDDGMNDMNHEVMSLIWSEDLRVQDVRRLLQSAHPVRVNVVQYPELSDHEFIEEKENRLLQLCQRTMALPVGRGMFTLFSYHPVPTEPLPIPKLNLTGRAPPRNTTVDLNSGNIDVPPNMTSWASFHNGVAAGLKIAPASQIDSAWIVYNKPKHAELANEYAGFLMALGLNGHLTKLATLNIHDYLTKGHEMTSIGLLLGVSAAKLGTMDMSITRLLSIHIPALLPPTSTELDVPHNVQVAAVVGIGLVYQGTAHRHTAEVLLAEIGRPPGPEMEYCTDRESYSLAAGLALGMVCLGHGSNLIGMSDLNVPEQLYQYMVGGHRRFQTGMHREKHKSPSYQIKEGDTINVDVTCPGATLALAMIYLKTNNRSIADWLRAPDTMYLLDFVKPEFLLLRTLARCLILWDDILPNSKWVDSNVPQIIRENSISLSEIELPCSEDLNLETLSQAHVYIIAGACLSLGFRFAGSENLSAFNCLHKFAKDFMTYLSAPNASVTGPHNLETCLSVVLLSLAMVMAGSGNLKVLQLCRFLHMKTGGEMNYGFHLAHHMALGLLFLGGGRYSLSTSNSSIAALLCALYPHFPAHSTDNRYHLQALRHLYVLAAEPRLLVPVDVDTNTPCYALLEVTYKGTQWYEQTKEELMAPTLLPELHLLKQIKVKGPRYWELLIDLSKGTQHLKSILSKDGVLYVKLRAGQLSYKEDPMGWQSLLAQTVANRNSEARAFKPETISAFTSDPALLSFAEYFCKPTVNMGQKQEILDLFSSVLYECVTQETPEMLPAYIAMDQAIRRLGRREMSETSELWQIKLVLEFFSSRSHQERLQNHPKRGLFMNSEFLPVVKCTIDNTLDQWLQVGGDMCVHAYLSGQPLEESQLSMLACFLVYHSVPAPQHLPPIGLEGSTSFAELLFKFKQLKMPVRALLRLAPLLLGNPQPMVM

SEQ ID NO: 795726 - protein, 131 aa, Homo sapiens
GKMTSPPRGPGTHRTAELARAEELLEQQLELYQALLEGQEGAWEAQALVLKIQKLKEQMRRHHGCCSQNPKASMEEQTNSRGNGKMTSPPRGPGTHRTAELAGSAVLVPFPFDLTAGRAPRPYRNSPWTMP

SEQ ID NO: 795727 - protein, 109 aa, Homo sapiens
AARSAPECPGLVSLGCGPGHRALCSSEVIPAHSPGQAQRSATIGTQQRAAAISNNGSSNAQRTHGADTHQMKTRRPERWGSPGAAQRVRGQPWAEPGHTLPQGFTVSPK

SEQ ID NO: 795728 - protein, 81 aa, Homo sapiens
ILFTFFIESKTRRIFQVLLTRTEQIQVAIVAKPLVHVWRDQRGHPHVVMPQASGALDQSQCSPWQLVKHNLGQMEALAMSR

SEQ ID NO: 795729 - protein, 348 aa, Homo sapiens
MLHSSFPTSHPHPYPIPSSRPLPPAPCSCPVLALPPHLPAASHRARKAGTQTLASAQAPVQTPAPTLPGPALPGPFPGGRVVRLHPVLLASTVDSYERRNKGAARVIGTLLGTVNKHSVEVTNCFSVSYNESDEVVVDMEFAKNMYELHKKVSPNELILGWYAAGHDITEHSVLIHEYYSREAPNPIHLTVDTSLQNGHMSIKAYVSTLMGVPGRTVGVFTPLTVKYAYYDTECIRVDLIMKTCFSPNRVVGLSSDLQQVGGASAHIQDALSIVLQYAEDILSAKVSADNTIRKVGHFLMSLVNQVPKIVPDDFETMLHSNINDLLMVAYLANLTQSQIALNEKRVNL

SEQ ID NO: 795730 - protein, 445 aa, Homo sapiens
TATASSPPQTPSQGARWRPRALARVPARRLRKPGMNAETCVSYCESPAAAMDAYYSPVSQSREGSSPFRAFPGGDKFGTTFLSAAAKAQGFGDAKSRARYGAGQQDLATPLESGAGARGSFNKFQPQPSTPQPQPPPQPQPQQQQPQPQPPAQPHLYLQRGACKTPPDGSLKLQEGSSGHSAALQVPCYAKESSLGEPELPPDSDTVGMDSSYLSVKEAGVKGPQDRASSDLPSPLEKADSESNKGKKRRNRTTFTSYQLEELEKVFQKTHYPDVYAREQLAMRTDLTEARVQVWFQNRRAKWRKRERFGQMQQVRTHFSTAYELPLLTRAENYAQIQNPSWLGNNGAASPVPACVVPCDPVPACMSPHAHPPGSGASSVTDFLSVSGAGSHVGQTHMGSLFGAASLSPGLNGYELNGEPDRKTSSIAALRMKAKEHSAAISWAT

SEQ ID NO: 795731 - protein, 769 aa, Homo sapiens
PLQEGEVGSEISPREVHFPGTLPFPRRRRGKMTKFQEAVTFKDVAVAFTEEELGLLDSAQRKLYRDVMLENFRNLVSVGHQSFKPDMISQLEREEKLWMKELQTQRGKHSGDRNQNEMATLHKAGLRCFSLGELSCWQIKRHIASKLARSQDSTINIEGKSSQFPKHHDSPCQVGAGESIQASVDDNCLVNHIGDHSSIIENQEFPTGKVPNSWSKIYLNETQNYQRSCKQTQMKNKLCIFAPYVDIFSCISHHHDDNIVHKRDKVHSNSDCGKDTLKVSPLTQRSIHTGQKTYQGNECEEAFNDSSSLELHKQVHLGKKSPACSTHEKDTSYSSGIPVQQSVRTGKKRYWCHECGKGFSQSSNLQTHQRVHTGEKPYTCHECGKSFNQSSHLYAHLPIHTGEKPYRCDSCGKGFSRSTDLNIHCRVHTGEKPYKCEVCGKGFTQRSHLQAHERIHTGEKPYKCGDCGKRFSCSSNLHTHQRVHTEEKPYKCDECGKCFSLSFNLHSHQRVHTGEKPYKCEECGKGFSSASSFQSHQRVHTGEKPFRCNVCGKGFSQSSYFQAHQRVHTGEKPYKCEVCGKRFNWSLNLHNHQRVHTGEKPYKCEECGKGFSQASNLQAHQSVHTGEKPFKCDACQKRFSQASHLQAHQRVHTGEKPYKCDTCGKAFSQRSNLQVHQIIHTGEKPFKCEECGKEFSWSAGLSAHQRVHTGEKPYTCQQCGKGFSQASHFHTHQRVHTGERPYICDVCCKGFSQRSHLIYHQRVHTGGNL

SEQ ID NO: 795732 - protein, 112 aa, Homo sapiens
PLQEGEVGSEISPREVHFPGTLPFPRRRRGKMTKFQEAVTFKDVAVAFTEEELGLLDSAQRKLYRDVMLENFRNLVSVGHQSFKPDMISQLEREEKLWMKELQTQRGKHSET

SEQ ID NO: 795733 - protein, 118 aa, Homo sapiens
PLQEGEVGSEISPREVHFPGTLPFPRRRRGKMTKFQEAVTFKDVAVAFTEEELGLLDSAQRKLYRDVMLENFRNLVSVGHQSFKPDMISQLEREEKLWMKELQTQRGKHSGFLCCVFS

SEQ ID NO: 795734 - protein, 112 aa, Homo sapiens; identical to SEQ ID NO: 795732

SEQ ID NO: 795735 - protein, 235 aa, Homo sapiens
MLSLLLLALPVLASPAYVAPAPGQALQQTGIVGGQEAPRSKWPWQVSLRVRGPYWMHFCGGSLIHPQWVLTAAHCVEPDIKDLAALRVQLREQHLYYQDQLLPVSRIIVHPQFYIIQTGADIALLELEEPVNISSHIHTVTLPPASETFPPGMPCWVTGWGDVDNNVHLPPPYPLKEVEVPVVENHLCNAEYHTGLHTGHSFQIVRDDMLCAGSENHDSCQGDSGGPLVCKVNGT

SEQ ID NO: 795736 - protein, 76 aa, Homo sapiens
AFLTGAAIMAVGITLSHLSAFLSSLQGTLKSRVPSQGQHGAVAFYSACCGKKMAAPFVPIIAESGALAGAPWARPS

SEQ ID NO: 795737 - protein, 68 aa, Homo sapiens
MGLEEARRKGCHRTLGKLSRPILDGAASDGCRGSPGSSPSPPPQQQRRLRAGVGAPWAPQTLRSRRRP

SEQ ID NO: 795738 - protein, 160 aa, Homo sapiens
APVKLSLNLLASSDPPEAASWLLCEVSGFSPPNILLMWLEDQREVNTSGFAPARPPPQPGSTTFWAWSVLRVPAPPSPQPATYTCVVSHEDSRTLLNASRSLEVSYLAMTPLIPQSKDENSDDYTTFDDVGSLWTTLSTFVALFILTLLYSGIVTFIKVK

SEQ ID NO: 795739 - protein, 401 aa, Homo sapiens
MVHCAGCERPILDRFLLNVLDRAWHIKCVQCCECKTNLSEKCFSREGKLYCKNDFFRRFGTKCAGCAQGISPSDLVRKARSKVFHLNCFTCMVCNKQLSTGEELYVIDENKFVCKDDYLSSSSLKEGSLNSVSSCTDRSLSPDLQDALQDDPKETDNSTSSDKETANNENEEQNSGTKRRGPRTTIKAKQLETLKAAFAATPKPTRHIREQLAQETGLNMRVIQVWFQNRRSKERRMKQLSALGARRHAFFRSPRRMRPLGGRLDESEMLGSTPYTYYGDYQGDYYAPGSNYDFFAHGPPSQAQSPADSSFLAASGPGSTPLGALEPPLAGPHAADNPRFTDMISHPDTPSPEPGLPGTLHPMPGEVFSGGPSPPFPMSGTSGYSGPLSHPNPELNEAAVW

SEQ ID NO: 795740 - protein, 33 aa, Homo sapiens
MVPAFEKFGVVPPAATFPAFCSQNLFVADENRP

SEQ ID NO: 795741 - protein, 106 aa, Homo sapiens
MSSSDESTILHLSHENSIEDLQYVKIDKEENSGTEFGDTDMKYLLYEDEKDFKDYVNLGPLGVKLMSVESKKMPIHFQEKEIPVKLYKDVRSPESHITYKMMKSFL

SEQ ID NO: 795742 - protein, 327 aa, Homo sapiens
GLCSFGVFALLGSLLKTISSYTAFSRLILILRALHVNNDRAKVILKPDKTTITEPHHIWPTLTDEEWIKVEVQLKDLILADYGKKNNVNVASLTQSEIRDIILGMEISAPSQQRQQIAEIEKQTKEQSQLTATQTRTVNKHGDEIITSTTSNYETQTFSSKTEWRVRAISAANLHLRTNHIYVSSDDIKETGYTYILPKNVLKKFICISDLRAQIAGYLYGVSPPDNPQVKEIRCIVMVPQWGTHQTVHLPGQLPQHEYLKEIGPFGGVPLGPMSPAFHPVVQPGKYGGTLWWGRLSPGVAGLTRVRAQGMGRTTGTGLLKREVVVF

SEQ ID NO: 795743 - protein, 146 aa, Homo sapiens
MKADIMERQTQHWEYASGSGEYPQHPQMAKRPGQLCNLPKGLPQHEYLKEMEPLGWIHTQPNESPQLSPQDVTTHAKIMADNPSWDGEKTIIITCSFTPGSCTLTAYKLTPSGYEWGRQNTDKGNNPKGYLPSHYERVQMLLSDRC

SEQ ID NO: 795744 - protein, 378 aa, Homo sapiens
MAGVFPYRGPGNPVPGPLAPLPDYMSEEKLQEKARKWQQLQAKRYAEKRKFGFVDAQKEDMPPEHVRKIIRDHGDMTNRKFRHDKRVYLGALKYMPHAVLKLLENMPMPWEQIRDVPVLYHITGAISFVNEIPWVIEPVYISQWGSMWIMMRREKRDRRHFKRMRFPPFDDEEPPLDYADNILDVEPLEAIQLELDPEEDAPVLDWFYDHQPLRDSRKYVNGFHLPALAVHTTYDVTTHAKIMADNPSWDGEKTIIITCSFTPGSCTLTAYKLTPSGYEWGRQNTDKGNNPKGYLPSHYERVQMLLSDRFLGFFMVPAQSSWNYNFMGVRHDPNMKYELQLANPKEFYHEVHRPSHFLNFALLQEGEVYSADREDLYA

SEQ ID NO: 795745 - protein, 2335 aa, Homo sapiens
MAGVFPYRGPGNPVPGPLAPLPDYMSEEKLQEKARKWQQLQAKRYAEKRKFGFVDAQKEDMPPEHVRKIIRDHGDMTNRKFRHDKRVYLGALKYMPHAVLKLLENMPMPWEQIRDVPVLYHITGAISFVNEIPWVIEPVYISQWGSMWIMMRREKRDRRHFKRMRFPPFDDEEPPLDYADNILDVEPLEAIQLELDPEEDAPVLDWFYDHQPLRDSRKYVNGSTYQRWQFTLPMMSTLYRLANQLLTDLVDDNYFYLFDLKAFFTSKALNMAIPGGPKFEPLVRDINLQDEDWNEFNDINKIIIRQPIRTEYKIAFPYLYNNLPHHVHLTWYHTPNVVFIKTEDPDLPAFYFDPLINPISHRHSVKSQEPLPDDDEEFELPEFVEPFLKDTPLYTDNTANGIALLWAPRPFNLRSGRTRRALDIPLVKNWYREHCPAGQPVKVRVSYQKLLKYYVLNALKHRPPKAQKKRYLFRSFKATKFFQSTKLDWVEVGLQVCRQGYNMLNLLIHRKNLNYLHLDYNFNLKPVKTLTTKERKKSRFGNAFHLCREVLRLTKLVVDSHVQYRLGNVDAFQLADGLQYIFAHVGQLTGMYRYKYKLMRQIRMCKDLKHLIYYRFNTGPVGKGPGCGFWAAGWRVWLFFMRGITPLLERWLGNLLARQFEGRHSKGVAKTVTKQRVESHFDLELRAAVMHDILDMMPEGIKQNKARTILQHLSEAWRCWKANIPWKVPGLPTPIENMILRYVKAKADWWTNTAHYNRERIRRGATVDKTVCKKNLGRLTRLYLKAEQERQHNYLKDGPYITAEEAVAVYTTTVHWLESRRFSPIPFPPLSYKHDTKLLILALERLKEAYSVKSRLNQSQREELGLIEQAYDNPHEALSRIKRHLLTQRAFKEVGIEFMDLYSHLVPVYDVEPLEKITDAYLDQYLWYEADKRRLFPPWIKPADTEPPPLLVYKWCQGINNLQDVWETSEGECNVMLESRFEKMYEKIDLTLLNRLLRLIVDHNIADYMTAKNNVVINYKDMNHTNSYGIIRGLQFASFIVQYYGLVMDLLVLGLHRASEMAGPPQMPNDFLSFQDIATEAAHPIRLFCRYIDRIHIFFRFTADEARDLIQRYLTEHPDPNNENIVGYNNKKCWPRDARMRLMKHDVNLGRAVFWDIKNRLPRSVTTVQWENSFVSVYSKDNPNLLFNMCGFECRILPKCRTSYEEFTHKDGVWNLQNEVTKERTAQCFLRVDDESMQRFHNRVRQILMASGSTTFTKIVNKWNTALIGLMTYFREAVVNTQELLDLLVKCENKIQTRIKIGLNSKMPSRFPPVVFYTPKELGGLGMLSMGHVLIPQSDLRWSKQTDVGITHFRSGMSHEEDQLIPNLYRYIQPWESEFIDSQRVWAEYALKRQEAIAQNRRLTLEDLEDSWDRGIPRINTLFQKDRHTLAYDKGWRVRTDFKQYQVLKQNPFWWTHQRHDGKLWNLNNYRTDMIQALGGVEGILEHTLFKGTYFPTWEGLFWEKASGFEESMKWKKLTNAQRSGLNQIPNRRFTLWWSPTINRANVYVGFQVQLDLTGIFMHGKIPTLKISLIQIFRAHLWQKIHESIVMDLCQVFDQELDALEIETVQKETIHPRKSYKMNSSCADILLFASYKWNVSRPSLLADSKDVMDSTTTQKYWIDIQLRWGDYDSHDIERYARAKFLDYTTDNMSIYPSPTGVLIAIDLAYNLHSAYGNWFPGSKPLIQQAMAKIMKANPALYVLRERIRKGLQLYSSEPTEPYLSSQNYGELFSNQIIWFVDDTNVYRVTIHKTFEGNLTTKPINGAIFIFNPRTGQLFLKIIHTSVWAGQKRLGQLAKWKTAEEVAALIRSLPVEEQPKQIIVTRKGMLDPLEVHLLDFPNIVIKGSELQLPFQACLKVEKFGDLILKATEPQMVLFNLYDDWLKTISSYTAFSRLILILRALHVNNDRAKVILKPDKTTITEPHHIWPTLTDEEWIKVEVQLKDLILADYGKKNNVNVASLTQSEIRDIILGMEISAPSQQRQQIAEIEKQTKEQSQLTATQTRTVNKHGDEIITSTTSNYETQTFSSKTEWRVRAISAANLHLRTNHIYVSSDDIKETGYTYILPKNVLKKFICISDLRAQIAGYLYGVSPPDNPQVKEIRCIVMVPQWGTHQTVHLPGQLPQHEYLKEMEPLGWIHTQPNESPQLSPQDVTTHAKIMADNPSWDGEKTIIITCSFTPGSCTLTAYKLTPSGYEWGRQNTDKGNNPKGYLPSHYERVQMLLSDRFLGFFMVPAQSSWNYNFMGVRHDPNMKYELQLANPKEFYHEVHRPSHFLNFALLQEGEVYSADREDLYA

SEQ ID NO: 795746 - protein, 2466 aa, Homo sapiens
MAGVFPYRGPGNPVPGPLAPLPDYMSEEKLQEKARKWQQLQAKRYAEKRKFGFVDAQKEDMPPEHVRKIIRDHGDMTNRKFRHDKRVYLGALKYMPHAVLKLLENMPMPWEQIRDVPVLYHITGAISFVNEIPWVIEPVYISQWGSMWIMMRREKRDRRHFKRMRFPPFDDEEPPLDYADNILDVEPLEAIQLELDPEEDAPVLDWFYDHQPLRDSRKYVNGSTYQRWQFTLPMMSTLYRLANQLLTDLVDDNYFYLFDLKAFFTSKALNMAIPGGPKFEPLVRDINLQDEDWNEFNDINKIIIRQPIRTEYKIAFPYLYNNLPHHVHLTWYHTPNVVFIKTEDPDLPAFYFDPLINPISHRHSVKSQEPLPDDDEEFELPEFVEPFLKDTPLYTDNTANGIALLWAPRPFNLRSGRTRRALDIPLVKNWYREHCPAGQPVKVRVSYQKLLKYYVLNALKHRPPKAQKKRYLFRSFKATKFFQSTKLDWVEVGLQVCRQGYNMLNLLIHRKNLNYLHLDYNFNLKPVKTLTTKERKKSRFGNAFHLCREVLRLTKLVVDSHVQYRLGNVDAFQLADGLQYIFAHVGQLTGMYRYKYKLMRQIRMCKDLKHLIYYRFNTGPVGKGPGCGFWAAGWRVWLFFMRGITPLLERWLGNLLARQFEGEWFSLCPTSPVIASKVPAPVGVCSLLLYEHSSYWIAFRSSSEMSLTSILFLGLPSGALRGSHAFAGVEIPQKHSCECFKVARLFAYAGHRDALLIPNFINNHNELRSMKVETLIESKESSLESPWDTLLPGRHSKGVAKTVTKQRVESHFDLELRAAVMHDILDMMPEGIKQNKARTILQHLSEAWRCWKANIPWKVPGLPTPIENMILRYVKAKADWWTNTAHYNRERIRRGATVDKTVCKKNLGRLTRLYLKAEQERQHNYLKDGPYITAEEAVAVYTTTVHWLESRRFSPIPFPPLSYKHDTKLLILALERLKEAYSVKSRLNQSQREELGLIEQAYDNPHEALSRIKRHLLTQRAFKEVGIEFMDLYSHLVPVYDVEPLEKITDAYLDQYLWYEADKRRLFPPWIKPADTEPPPLLVYKWCQGINNLQDVWETSEGECNVMLESRFEKMYEKIDLTLLNRLLRLIVDHNIADYMTAKNNVVINYKDMNHTNSYGIIRGLQFASFIVQYYGLVMDLLVLGLHRASEMAGPPQMPNDFLSFQDIATEAAHPIRLFCRYIDRIHIFFRFTADEARDLIQRYLTEHPDPNNENIVGYNNKKCWPRDARMRLMKHDVNLGRAVFWDIKNRLPRSVTTVQWENSFVSVYSKDNPNLLFNMCGFECRILPKCRTSYEEFTHKDGVWNLQNEVTKERTAQCFLRVDDESMQRFHNRVRQILMASGSTTFTKIVNKWNTALIGLMTYFREAVVNTQELLDLLVKCENKIQTRIKIGLNSKMPSRFPPVVFYTPKELGGLGMLSMGHVLIPQSDLRWSKQTDVGITHFRSGMSHEEDQLIPNLYRYIQPWESEFIDSQRVWAEYALKRQEAIAQNRRLTLEDLEDSWDRGIPRINTLFQKDRHTLAYDKGWRVRTDFKQYQVLKQNPFWWTHQRHDGKLWNLNNYRTDMIQALGGVEGILEHTLFKGTYFPTWEGLFWEKASGFEESMKWKKLTNAQRSGLNQIPNRRFTLWWSPTINRANVYVGFQVQLDLTGIFMHGKIPTLKISLIQIFRAHLWQKIHESIVMDLCQVFDQELDALEIETVQKETIHPRKSYKMNSSCADILLFASYKWNVSRPSLLADSKDVMDSTTTQKYWIDIQLRWGDYDSHDIERYARAKFLDYTTDNMSIYPSPTGVLIAIDLAYNLHSAYGNWFPGSKPLIQQAMAKIMKANPALYVLRERIRKGLQLYSSEPTEPYLSSQNYGELFSNQIIWFVDDTNVYRVTIHKTFEGNLTTKPINGAIFIFNPRTGQLFLKIIHTSVWAGQKRLGQLAKWKTAEEVAALIRSLPVEEQPKQIIVTRKGMLDPLEVHLLDFPNIVIKGSELQLPFQACLKVEKFGDLILKATEPQMVLFNLYDDWLKTISSYTAFSRLILILRALHVNNDRAKVILKPDKTTITEPHHIWPTLTDEEWIKVEVQLKDLILADYGKKNNVNVASLTQSEIRDIILGMEISAPSQQRQQIAEIEKQTKEQSQLTATQTRTVNKHGDEIITSTTSNYETQTFSSKTEWRVRAISAANLHLRTNHIYVSSDDIKETGYTYILPKNVLKKFICISDLRAQIAGYLYGVSPPDNPQVKEIRCIVMVPQWGTHQTVHLPGQLPQHEYLKEMEPLGWIHTQPNESPQLSPQDVTTHAKIMADNPSWDGEKTIIITCSFTPGSCTLTAYKLTPSGYEWGRQNTDKGNNPKGYLPSHYERVQMLLSDRFLGFFMVPAQSSWNYNFMGVRHDPNMKYELQLANPKEFYHEVHRPSHFLNFALLQEGEVYSADREDLYA

SEQ ID NO: 795747 - protein, 2504 aa, Homo sapiens
MAGVFPYRGPGNPVPGPLAPLPDYMSEEKLQEKARKWQQLQAKRYAEKRKFGFVDAQKEDMPPEHVRKIIRDHGDMTNRKFRHDKRVYLGALKYMPHAVLKLLENMPMPWEQIRDVPVLYHITGAISFVNEIPWVIEPVYISQWGSMWIMMRREKRDRRHFKRMRFPPFDDEEPPLDYADNILDVEPLEAIQLELDPEEDAPVLDWFYDHQPLRDSRKYVNGSTYQRWQFTLPMMSTLYRLANQLLTDLVDDNYFYLFDLKAFFTSKALNMAIPGGPKFEPLVRDINLQDEDWNEFNDINKIIIRQPIRTEYKIAFPYLYNNLPHHVHLTWYHTPNVVFIKTEDPDLPAFYFDPLINPISHRHSVKSQEPLPDDDEEFELPEFVEPFLKDTPLYTDNTANGIALLWAPRPFNLRSGRTRRALDIPLVKNWYREHCPAGQPVKVRVSYQKLLKYYVLNALKHRPPKAQKKRYLFRSFKATKFFQSTKLDWVEVGLQVCRQGYNMLNLLIHRKNLNYLHLDYNFNLKPVKTLTTKERKKSRFGNAFHLCREVLRLTKLVVDSHVQYRLGNVDAFQLADGLQYIFAHVGQLTGMYRYKYKLMRQIRMCKDLKHLIYYRFNTGPVGKGPGCGFWAAGWRVWLFFMRGITPLLERWLGNLLARQFEGEWFSLCPTSPVIASKVPAPVGVCSLLLYEHSSYWIAFRSSSEMSLTSILFLGLPSGALRGSHAFAGVEIPQKHSCECFKVARLFAYAGHRDALLIPNFINNHNELRSMKVETLIESKESSLESPWDTLLPGRHSKGVAKTVTKQRVESHFDLELRAAVMHDILDMMPEGIKQNKARTILQHLSEAWRCWKANIPWKVPGLPTPIENMILRYVKAKADWWTNTAHYNRERIRRGATVDKTVCKKNLGRLTRLYLKAEQERQHNYLKDGPYITAEEAVAVYTTTVHWLESRRFSPIPFPPLSYKHDTKLLILALERLKEAYSVKSRLNQSQREELGLIEQAYDNPHEALSRIKRHLLTQRAFKEVSEASQVFFLVLPKVAVAFGSTKGSSWWIGVNQPPCPQVGIEFMDLYSHLVPVYDVEPLEKITDAYLDQYLWYEADKRRLFPPWIKPADTEPPPLLVYKWCQGINNLQDVWETSEGECNVMLESRFEKMYEKIDLTLLNRLLRLIVDHNIADYMTAKNNVVINYKDMNHTNSYGIIRGLQFASFIVQYYGLVMDLLVLGLHRASEMAGPPQMPNDFLSFQDIATEAAHPIRLFCRYIDRIHIFFRFTADEARDLIQRYLTEHPDPNNENIVGYNNKKCWPRDARMRLMKHDVNLGRAVFWDIKNRLPRSVTTVQWENSFVSVYSKDNPNLLFNMCGFECRILPKCRTSYEEFTHKDGVWNLQNEVTKERTAQCFLRVDDESMQRFHNRVRQILMASGSTTFTKIVNKWNTALIGLMTYFREAVVNTQELLDLLVKCENKIQTRIKIGLNSKMPSRFPPVVFYTPKELGGLGMLSMGHVLIPQSDLRWSKQTDVGITHFRSGMSHEEDQLIPNLYRYIQPWESEFIDSQRVWAEYALKRQEAIAQNRRLTLEDLEDSWDRGIPRINTLFQKDRHTLAYDKGWRVRTDFKQYQVLKQNPFWWTHQRHDGKLWNLNNYRTDMIQALGGVEGILEHTLFKGTYFPTWEGLFWEKASGFEESMKWKKLTNAQRSGLNQIPNRRFTLWWSPTINRANVYVGFQVQLDLTGIFMHGKIPTLKISLIQIFRAHLWQKIHESIVMDLCQVFDQELDALEIETVQKETIHPRKSYKMNSSCADILLFASYKWNVSRPSLLADSKDVMDSTTTQKYWIDIQLRWGDYDSHDIERYARAKFLDYTTDNMSIYPSPTGVLIAIDLAYNLHSAYGNWFPGSKPLIQQAMAKIMKANPALYVLRERIRKGLQLYSSEPTEPYLSSQNYGELFSNQIIWFVDDTNVYRVTIHKTFEGNLTTKPINGAIFIFNPRTGQLFLKIIHTSVWAGQKRLGQLAKWKTAEEVAALIRSLPVEEQPKQIIVTRKGMLDPLEVHLLDFPNIVIKGSELQLPFQACLKVEKFGDLILKATEPQMVLFNLYDDWLKTISSYTAFSRLILILRALHVNNDRAKVILKPDKTTITEPHHIWPTLTDEEWIKVEVQLKDLILADYGKKNNVNVASLTQSEIRDIILGMEISAPSQQRQQIAEIEKQTKEQSQLTATQTRTVNKHGDEIITSTTSNYETQTFSSKTEWRVRAISAANLHLRTNHIYVSSDDIKETGYTYILPKNVLKKFICISDLRAQIAGYLYGVSPPDNPQVKEIRCIVMVPQWGTHQTVHLPGQLPQHEYLKEMEPLGWIHTQPNESPQLSPQDVTTHAKIMADNPSWDGEKTIIITCSFTPGSCTLTAYKLTPSGYEWGRQNTDKGNNPKGYLPSHYERVQMLLSDRFLGFFMVPAQSSWNYNFMGVRHDPNMKYELQLANPKEFYHEVHRPSHFLNFALLQEGEVYSADREDLYA

SEQ ID NO: 795748 - protein, 2521 aa, Homo sapiens
MAGVFPYRGPGNPVPGPLAPLPDYMSEEKLQEKARKWQQLQAKRYAEKRKFGFVDAQKEDMPPEHVRKIIRDHGDMTNRKFRHDKRVYLGALKYMPHAVLKLLENMPMPWEQIRDVPVLYHITGAISFVNEIPWVIEPVYISQWGSMWIMMRREKRDRRHFKRMRFPPFDDEEPPLDYADNILDVEPLEAIQLELDPEEDAPVLDWFYDHQPLRDSRKYVNGSTYQRWQFTLPMMSTLYRLANQLLTDLVDDNYFYLFDLKAFFTSKALNMAIPGGPKFEPLVRDINLQDEDWNEFNDINKIIIRQPIRTEYKIAFPYLYNNLPHHVHLTWYHTPNVVFIKTEDPDLPAFYFDPLINPISHRHSVKSQEPLPDDDEEFELPEFVEPFLKDTPLYTDNTANGIALLWAPRPFNLRSGRTRRALDIPLVKNWYREHCPAGQPVKVRVSYQKLLKYYVLNALKHRPPKAQKKRYLFRSFKATKFFQSTKLDWVEVGLQVCRQGYNMLNLLIHRKNLNYLHLDYNFNLKPVKTLTTKERKKSRFGNAFHLCREVLRLTKLVVDSHVQYRLGNVDAFQLADGLQYIFAHVGQLTGMYRYKYKLMRQIRMCKDLKHLIYYRFNTGPVGKGPGCGFWAAGWRVWLFFMRGITPLLERWLGNLLARQFEGEWFSLCPTSPVIASKVPAPVGVCSLLLYEHSSYWIAFRSSSEMSLTSILFLGLPSGALRGSHAFAGVEIPQKHSCECFKVARLFAYAGHRDALLIPNFINNHNELRSMKVETLIESKESSLESPWDTLLPGRHSKGVAKTVTKQRVESHFDLELRAAVMHDILDMMPEGIKQNKARTILQHLSEAWRCWKANIPWKVPGLPTPIENMILRYVKAKADWWTNTAHYNRERIRRGATVDKTVCKKNLGRLTRLYLKAEQERQHNYLKDGPYITAEEAVAVYTTTVHWLESRRFSPIPFPPLSYKHDTKLLILALERLKEAYSVKSRLNQSQREELGLIEQAYDNPHEALSRIKRHLLTQRAFKEVGIEFMDLYSHLVPVYDVEPLEKITDAYLDQYLWYEADKRRLFPPWIKPADTEPPPLLVYKWCQGINNLQDVWETSEGECNVMLESRFEKMYEKIDLTLLNRLLRLIVDHNIADYMTAKNNVVINYKDMNHTNSYGIIRGLQFASFIVQYYGLVMDLLVLGLHRASEMAGPPQMPNDFLSFQDIATEAAHPIRLFCRYIDRIHIFFRFTADEARDLIQRYLTEHPDPNNENIVGYNNKKCWPRDARMRLMKHDVNLGRAVFWDIKNRLPRSVTTVQWENSFVSVYSKDNPNLLFNMCGFECRILPKCRTSYEEFTHKDGVWNLQNEVTKERTAQCFLRVDDESMQRFHNRVRQILMASGSTTFTKIVNKWNTALIGLMTYFREAVVNTQELLDLLVKCENKIQTRIKIGLNSKMPSRFPPVVFYTPKELGGLGMLSMGHVLIPQSDLRWSKQTDVGITHFRSGMSHEEDQLIPNLYRYIQPWESEFIDSQRVWAEYALKRQEAIAQNRRLTLEDLEDSWDRGIPRINTLFQKDRHTLAYDKGWRVRTDFKQYQVLKQNPFWWTHQRHDGKLWNLNNYRTDMIQALGGVEGILEHTLFKGTYFPTWEGLFWGGFSSLRGTCHNPLSSSLVCLCDFLWCFPDSHLQEVSSVLGNGRISPHLLLLLPREKASGFEESMKWKKLTNAQRSGLNQIPNRRFTLWWSPTINRANVYVGFQVQLDLTGIFMHGKIPTLKISLIQIFRAHLWQKIHESIVMDLCQVFDQELDALEIETVQKETIHPRKSYKMNSSCADILLFASYKWNVSRPSLLADSKDVMDSTTTQKYWIDIQLRWGDYDSHDIERYARAKFLDYTTDNMSIYPSPTGVLIAIDLAYNLHSAYGNWFPGSKPLIQQAMAKIMKANPALYVLRERIRKGLQLYSSEPTEPYLSSQNYGELFSNQIIWFVDDTNVYRVTIHKTFEGNLTTKPINGAIFIFNPRTGQLFLKIIHTSVWAGQKRLGQLAKWKTAEEVAALIRSLPVEEQPKQIIVTRKGMLDPLEVHLLDFPNIVIKGSELQLPFQACLKVEKFGDLILKATEPQMVLFNLYDDWLKTISSYTAFSRLILILRALHVNNDRAKVILKPDKTTITEPHHIWPTLTDEEWIKVEVQLKDLILADYGKKNNVNVASLTQSEIRDIILGMEISAPSQQRQQIAEIEKQTKEQSQLTATQTRTVNKHGDEIITSTTSNYETQTFSSKTEWRVRAISAANLHLRTNHIYVSSDDIKETGYTYILPKNVLKKFICISDLRAQIAGYLYGVSPPDNPQVKEIRCIVMVPQWGTHQTVHLPGQLPQHEYLKEMEPLGWIHTQPNESPQLSPQDVTTHAKIMADNPSWDGEKTIIITCSFTPGSCTLTAYKLTPSGYEWGRQNTDKGNNPKGYLPSHYERVQMLLSDRFLGFFMVPAQSSWNYNFMGVRHDPNMKYELQLANPKEFYHEVHRPSHFLNFALLQEGEVYSADREDLYA

SEQ ID NO: 795749 - protein, 2525 aa, Homo sapiens
MAGVFPYRGPGNPVPGPLAPLPDYMSEEKLQEKARKWQQLQAKRYAEKRKFGFVDAQKEDMPPEHVRKIIRDHGDMTNRKFRHDKRVYLGALKYMPHAVLKLLENMPMPWEQIRDVPVLYHITGAISFVNEIPWVIEPVYISQWGSMWIMMRREKRDRRHFKRMRFPPFDDEEPPLDYADNILDVEPLEAIQLELDPEEDAPVLDWFYDHQPLRDSRKYVNGSTYQRWQFTLPMMSTLYRLANQLLTDLVDDNYFYLFDLKAFFTSKALNMAIPGGPKFEPLVRDINLQDEDWNEFNDINKIIIRQPIRTEYKIAFPYLYNNLPHHVHLTWYHTPNVVFIKTEDPDLPAFYFDPLINPISHRHSVKSQEPLPDDDEEFELPEFVEPFLKDTPLYTDNTANGIALLWAPRPFNLRSGRTRRALDIPLVKNWYREHCPAGQPVKVRVSYQKLLKYYVLNALKHRPPKAQKKRYLFRSFKATKFFQSTKLDWVEVGLQVCRQGYNMLNLLIHRKNLNYLHLDYNFNLKPVKTLTTKERKKSRFGNAFHLCREVLRLTKLVVDSHVQYRLGNVDAFQLADGLQYIFAHVGQLTGMYRYKYKLMRQIRMCKDLKHLIYYRFNTGPVGKGPGCGFWAAGWRVWLFFMRGITPLLERWLGNLLARQFEGEWFSLCPTSPVIASKVPAPVGVCSLLLYEHSSYWIAFRSSSEMSLTSILFLGLPSGALRGSHAFAGVEIPQKHSCECFKVARLFAYAGHRDALLIPNFINNHNELRSMKVETLIESKESSLESPWDTLLPGRHSKGVAKTVTKQRVESHFDLELRAAVMHDILDMMPEGIKQNKARTILQHLSEAWRCWKANIPWKVPGLPTPIENMILRYVKAKADWWTNTAHYNRERIRRGATVDKTVCKKNLGRLTRLYLKAEQERQHNYLKDGPYITAEEAVAVYTTTVHWLESRRFSPIPFPPLSYKHDTKLLILALERLKEAYSVKSRLNQSQREELGLIEQAYDNPHEALSRIKRHLLTQRAFKEVGIEFMDLYSHLVPVYDVEPLEKITDAYLDQYLWYEADKRRLFPPWIKPADTEPPPLLVYKWCQGINNLQDVWETSEGECNVMLESRFEKMYEKIDLTLLNRLLRLIVDHNIADYMTAKNNVVINYKDMNHTNSYGIIRGLQFASFIVQYYGLVMDLLVLGLHRASEMAGPPQMPNDFLSFQDIATEAAHPIRLFCRYIDRIHIFFRFTADEARDLIQRYLTEHPDPNNENIVGYNNKKCWPRDARMRLMKHDVNFESRLGLCELEGHKLRAQRGHTWGCVLGGRGVAVSGCHQLAFEGKFLPRNCCDHVFSVGRGRAVFWDIKNRLPRSVTTVQWENSFVSVYSKDNPNLLFNMCGFECRILPKCRTSYEEFTHKDGVWNLQNEVTKERTAQCFLRVDDESMQRFHNRVRQILMASGSTTFTKIVNKWNTALIGLMTYFREAVVNTQELLDLLVKCENKIQTRIKIGLNSKMPSRFPPVVFYTPKELGGLGMLSMGHVLIPQSDLRWSKQTDVGITHFRSGMSHEEDQLIPNLYRYIQPWESEFIDSQRVWAEYALKRQEAIAQNRRLTLEDLEDSWDRGIPRINTLFQKDRHTLAYDKGWRVRTDFKQYQVLKQNPFWWTHQRHDGKLWNLNNYRTDMIQALGGVEGILEHTLFKGTYFPTWEGLFWEKASGFEESMKWKKLTNAQRSGLNQIPNRRFTLWWSPTINRANVYVGFQVQLDLTGIFMHGKIPTLKISLIQIFRAHLWQKIHESIVMDLCQVFDQELDALEIETVQKETIHPRKSYKMNSSCADILLFASYKWNVSRPSLLADSKDVMDSTTTQKYWIDIQLRWGDYDSHDIERYARAKFLDYTTDNMSIYPSPTGVLIAIDLAYNLHSAYGNWFPGSKPLIQQAMAKIMKANPALYVLRERIRKGLQLYSSEPTEPYLSSQNYGELFSNQIIWFVDDTNVYRVTIHKTFEGNLTTKPINGAIFIFNPRTGQLFLKIIHTSVWAGQKRLGQLAKWKTAEEVAALIRSLPVEEQPKQIIVTRKGMLDPLEVHLLDFPNIVIKGSELQLPFQACLKVEKFGDLILKATEPQMVLFNLYDDWLKTISSYTAFSRLILILRALHVNNDRAKVILKPDKTTITEPHHIWPTLTDEEWIKVEVQLKDLILADYGKKNNVNVASLTQSEIRDIILGMEISAPSQQRQQIAEIEKQTKEQSQLTATQTRTVNKHGDEIITSTTSNYETQTFSSKTEWRVRAISAANLHLRTNHIYVSSDDIKETGYTYILPKNVLKKFICISDLRAQIAGYLYGVSPPDNPQVKEIRCIVMVPQWGTHQTVHLPGQLPQHEYLKEMEPLGWIHTQPNESPQLSPQDVTTHAKIMADNPSWDGEKTIIITCSFTPGSCTLTAYKLTPSGYEWGRQNTDKGNNPKGYLPSHYERVQMLLSDRFLGFFMVPAQSSWNYNFMGVRHDPNMKYELQLANPKEFYHEVHRPSHFLNFALLQEGEVYSADREDLYA

SEQ ID NO: 795750 - protein, 1725 aa, Homo sapiens
MGGIVHEGGPVGKGPGCGFWAAGWRVWLFFMRGITPLLERWLGNLLARQFEGRHSKGVAKTVTKQRVESHFDLELRAAVMHDILDMMPEGIKQNKARTILQHLSEAWRCWKANIPWKVPGLPTPIENMILRYVKAKADWWTNTAHYNRERIRRGATVDKTVCKKNLGRLTRLYLKAEQERQHNYLKDGPYITAEEAVAVYTTTVHWLESRRFSPIPFPPLSYKHDTKLLILALERLKEAYSVKSRLNQSQREELGLIEQAYDNPHEALSRIKRHLLTQRAFKEVGIEFMDLYSHLVPVYDVEPLEKITDAYLDQYLWYEADKRRLFPPWIKPADTEPPPLLVYKWCQGINNLQDVWETSEGECNVMLESRFEKMYEKIDLTLLNRLLRLIVDHNIADYMTAKNNVVINYKDMNHTNSYGIIRGLQFASFIVQYYGLVMDLLVLGLHRASEMAGPPQMPNDFLSFQDIATEAAHPIRLFCRYIDRIHIFFRFTADEARDLIQRYLTEHPDPNNENIVGYNNKKCWPRDARMRLMKHDVNLGRAVFWDIKNRLPRSVTTVQWENSFVSVYSKDNPNLLFNMCGFECRILPKCRTSYEEFTHKDGVWNLQNEVTKERTAQCFLRVDDESMQRFHNRVRQILMASGSTTFTKIVNKWNTALIGLMTYFREAVVNTQELLDLLVKCENKIQTRIKIGLNSKMPSRFPPVVFYTPKELGGLGMLSMGHVLIPQSDLRWSKQTDVGITHFRSGMSHEEDQLIPNLYRYIQPWESEFIDSQRVWAEYALKRQEAIAQNRRLTLEDLEDSWDRGIPRINTLFQKDRHTLAYDKGWRVRTDFKQYQVLKQNPFWWTHQRHDGKLWNLNNYRTDMIQALGGVEGILEHTLFKGTYFPTWEGLFWEKASGFEESMKWKKLTNAQRSGLNQIPNRRFTLWWSPTINRANVYVGFQVQLDLTGIFMHGKIPTLKISLIQIFRAHLWQKIHESIVMDLCQVFDQELDALEIETVQKETIHPRKSYKMNSSCADILLFASYKWNVSRPSLLADSKDVMDSTTTQKYWIDIQLRWGDYDSHDIERYARAKFLDYTTDNMSIYPSPTGVLIAIDLAYNLHSAYGNWFPGSKPLIQQAMAKIMKANPALYVLRERIRKGLQLYSSEPTEPYLSSQNYGELFSNQIIWFVDDTNVYRVTIHKTFEGNLTTKPINGAIFIFNPRTGQLFLKIIHTSVWAGQKRLGQLAKWKTAEEVAALIRSLPVEEQPKQIIVTRKGMLDPLEVHLLDFPNIVIKGSELQLPFQACLKVEKFGDLILKATEPQMVLFNLYDDWLKTISSYTAFSRLILILRALHVNNDRAKVILKPDKTTITEPHHIWPTLTDEEWIKVEVQLKDLILADYGKKNNVNVASLTQSEIRDIILGMEISAPSQQRQQIAEIEKQTKEQSQLTATQTRTVNKHGDEIITSTTSNYETQTFSSKTEWRVRAISAANLHLRTNHIYVSSDDIKETGYTYILPKNVLKKFICISDLRAQIAGYLYGVSPPDNPQVKEIRCIVMVPQWGTHQTVHLPGQLPQHEYLKEMEPLGWIHTQPNESPQLSPQDVTTHAKIMADNPSWDGEKTIIITCSFTPGSCTLTAYKLTPSGYEWGRQNTDKGNNPKGYLPSHYERVQMLLSDRFLGFFMVPAQSSWNYNFMGVRHDPNMKYELQLANPKEFYHEVHRPSHFLNFALLQEGEVYSADREDLYA

SEQ ID NO: 795751 - protein, 1646 aa, Homo sapiens [sequence omitted]

SEQ ID NO: 795752 - protein, 2578 aa, Homo sapiens
MAGVFPYRGPGNPVPGPLAPLPDYMSEEKLQEKARKWQQLQAKRYAEKRKFGFVDAQKEDMPPEHVRKIIRDHGDMTNRKFRHDKRVYLGALKYMPHAVLKLLENMPMPWEQIRDVPVLYHITGAISFVNEIPWVIEPVYISQWGSMWIMMRREKRDRRHFKRMRFPPFDDEEPPLDYADNILDVEPLEAIQLELDPEEDAPVLDWFYDHQPLRDSRKYVNGSTYQRWQFTLPMMSTLYRLANQLLTDLVDDNYFYLFDLKAFFTSKALNMAIPGGPKFEPLVRDINLQDEDWNEFNDINKIIIRQPIRTEYKIAFPYLYNNLPHHVHLTWYHTPNVVFIKTEDPDLPAFYFDPLINPISHRHSVKSQEPLPDDDEEFELPEFVEPFLKDTPLYTDNTANGIALLWAPRPFNLRSGRTRRALDIPLVKNWYREHCPAGQPVKVRVSYQKLLKYYVLNALKHRPPKAQKKRYLFRSFKATKFFQSTKLDWVEVGLQVCRQGYNMLNLLIHRKNLNYLHLDYNFNLKPVKTLTTKERKKSRFGNAFHLCREVLRLTKLVVDSHVQYRLGNVDAFQLADGLQYIFAHVGQLTGMYRYKYKLMRQIRMCKDLKHLIYYRFNTGPVGKGPGCGFWAAGWRVWLFFMRGITPLLERWLGNLLARQFEGEWFSLCPTSPVIASKVPAPVGVCSLLLYEHSSYWIAFRSSSEMSLTSILFLGLPSGALRGSHAFAGVEIPQKHSCECFKVARLFAYAGHRDALLIPNFINNHNELRSMKVETLIESKESSLESPWDTLLPGRHSKGVAKTVTKQRVESHFDLELRAAVMHDILDMMPEGIKQNKARTILQHLSEAWRCWKANIPWKVPGLPTPIENMILRYVKAKADWWTNTAHYNRERIRRGATVDKTVCKKNLGRLTRLYLKAEQERQHNYLKDGPYITAEEAVAVYTTTVHWLESRRFSPIPFPPLSYKHDTKLLILALERLKEAYSVKSRLNQSQREELGLIEQAYDNPHEALSRIKRHLLTQRAFKEVGIEFMDLYSHLVPVYDVEPLEKITDAYLDQYLWYEADKRRLFPPWIKPADTEPPPLLVYKWCQGINNLQDVWETSEGECNVMLESRFEKMYEKIDLTLLNRLLRLIVDHNIADYMTAKNNVVINYKDMNHTNSYGIIRGLQFASFIVQYYGLVMDLLVLGLHRASEMAGPPQMPNDFLSFQDIATEAAHPIRLFCRYIDRIHIFFRFTADEARDLIQRYLTEHPDPNNENIVGYNNKKCWPRDARMRLMKHDVNFESRLGLCELEGHKLRAQRGHTWGCVLGGRGVAVSGCHQLAFEGKFLPRNCCDHVFSVGRGRAVFWDIKNRLPRSVTTVQWENSFVSVYSKDNPNLLFNMCGFECRILPKCRTSYEEFTHKDGVWNLQNEVQPGRGWECHERACTSWVSHRSLVGWKDLNGGHSWLLLLWEFLGHVNLDFVVYVTKERTAQCFLRVDDESMQRFHNRVRQILMASGSTTFTKIVNKWNTALIGLMTYFREAVVNTQELLDLLVKCENKIQTRIKIGLNSKMPSRFPPVVFYTPKELGGLGMLSMGHVLIPQSDLRWSKQTDVGITHFRSGMSHEEDQLIPNLYRYIQPWESEFIDSQRVWAEYALKRQEAIAQNRRLTLEDLEDSWDRGIPRINTLFQKDRHTLAYDKGWRVRTDFKQYQVLKQNPFWWTHQRHDGKLWNLNNYRTDMIQALGGVEGILEHTLFKGTYFPTWEGLFWEKASGFEESMKWKKLTNAQRSGLNQIPNRRFTLWWSPTINRANVYVGFQVQLDLTGIFMHGKIPTLKISLIQIFRAHLWQKIHESIVMDLCQVFDQELDALEIETVQKETIHPRKSYKMNSSCADILLFASYKWNVSRPSLLADSKDVMDSTTTQKYWIDIQLRWGDYDSHDIERYARAKFLDYTTDNMSIYPSPTGVLIAIDLAYNLHSAYGNWFPGSKPLIQQAMAKIMKANPALYVLRERIRKGLQLYSSEPTEPYLSSQNYGELFSNQIIWFVDDTNVYRVTIHKTFEGNLTTKPINGAIFIFNPRTGQLFLKIIHTSVWAGQKRLGQLAKWKTAEEVAALIRSLPVEEQPKQIIVTRKGMLDPLEVHLLDFPNIVIKGSELQLPFQACLKVEKFGDLILKATEPQMVLFNLYDDWLKTISSYTAFSRLILILRALHVNNDRAKVILKPDKTTITEPHHIWPTLTDEEWIKVEVQLKDLILADYGKKNNVNVASLTQSEIRDIILGMEISAPSQQRQQIAEIEKQTKEQSQLTATQTRTVNKHGDEIITSTTSNYETQTFSSKTEWRVRAISAANLHLRTNHIYVSSDDIKETGYTYILPKNVLKKFICISDLRAQIAGYLYGVSPPDNPQVKEIRCIVMVPQWGTHQTVHLPGQLPQHEYLKEMEPLGWIHTQPNESPQLSPQDVTTHAKIMADNPSWDGEKTIIITCSFTPGSCTLTAYKLTPSGYEWGRQNTDKGNNPKGYLPSHYERVQMLLSDRFLGFFMVPAQSSWNYNFMGVRHDPNMKYELQLANPKEFYHEVHRPSHFLNFALLQEGEVYSADREDLYA

SEQ ID NO: 795753 - protein, 1459 aa, Homo sapiens
RLLRSPCYLLTQRAFKEVGIEFMDLYSHLVPVYDVEPLEKITDAYLDQYLWYEADKRRLFPPWIKPADTEPPPLLVYKWCQGINNLQDVWETSEGECNVMLESRFEKMYEKIDLTLLNRLLRLIVDHNIADYMTAKNNVVINYKDMNHTNSYGIIRGLQFASFIVQYYGLVMDLLVLGLHRASEMAGPPQMPNDFLSFQDIATEAAHPIRLFCRYIDRIHIFFRFTADEARDLIQRYLTEHPDPNNENIVGYNNKKCWPRDARMRLMKHDVNLGRAVFWDIKNRLPRSVTTVQWENSFVSVYSKDNPNLLFNMCGFECRILPKCRTSYEEFTHKDGVWNLQNEVTKERTAQCFLRVDDESMQRFHNRVRQILMASGSTTFTKIVNKWNTALIGLMTYFREAVVNTQELLDLLVKCENKIQTRIKIGLNSKMPSRFPPVVFYTPKELGGLGMLSMGHVLIPQSDLRWSKQTDVGITHFRSGMSHEEDQLIPNLYRYIQPWESEFIDSQRVWAEYALKRQEAIAQNRRLTLEDLEDSWDRGIPRINTLFQKDRHTLAYDKGWRVRTDFKQYQVLKQNPFWWTHQRHDGKLWNLNNYRTDMIQALGGVEGILEHTLFKGTYFPTWEGLFWEKASGFEESMKWKKLTNAQRSGLNQIPNRRFTLWWSPTINRANVYVGFQVQLDLTGIFMHGKIPTLKISLIQIFRAHLWQKIHESIVMDLCQVFDQELDALEIETVQKETIHPRKSYKMNSSCADILLFASYKWNVSRPSLLADSKDVMDSTTTQKYWIDIQLRWGDYDSHDIERYARAKFLDYTTDNMSIYPSPTGVLIAIDLAYNLHSAYGNWFPGSKPLIQQAMAKIMKANPALYVLRERIRKGLQLYSSEPTEPYLSSQNYGELFSNQIIWFVDDTNVYRVTIHKTFEGNLTTKPINGAIFIFNPRTGQLFLKIIHTSVWAGQKRLGQLAKWKTAEEVAALIRSLPVEEQPKQIIVTRKGMLDPLEVHLLDFPNIVIKGSELQLPFQACLKVEKFGDLILKATEPQMVLFNLYDDWLKTISSYTAFSRLILILRALHVNNDRAKVILKPDKTTITEPHHIWPTLTDEEWIKVEVQLKDLILADYGKKNNVNVASLTQSEIRDIILGMEISAPSQQRQQIAEIEKQTKEQSQLTATQTRTVNKHGDEIITSTTSNYETQTFSSKTEWRVRAISAANLHLRTNHIYVSSDDIKETGYTYILPKNVLKKFICISDLRAQIAGYLYGVSPPDNPQVKEIRCIVMVPQWGTHQTVHLPGQLPQHEYLKEMEPLGWIHTQPNESPQLSPQDVTTHAKIMADNPSWDGEKTIIITCSFTPGSCTLTAYKLTPSGYEWGRQNTDKGNNPKGYLPSHYERVQMLLSDRFLGFFMVPAQSSWNYNFMGVRHDPNMKYELQLANPKEFYHEVHRPSHFLNFALLQEGEVYSADREDLYA

SEQ ID NO: 795754 - protein, 2466 aa, Homo sapiens; identical to SEQ ID NO: 795746

SEQ ID NO: 795755 - protein, 1343 aa, Homo sapiens
MSSVRIAILDHNIADYMTAKNNVVINYKDMNHTNSYGIIRGLQFASFIVQYYGLVMDLLVLGLHRASEMAGPPQMPNDFLSFQDIATEAAHPIRLFCRYIDRIHIFFRFTADEARDLIQRYLTEHPDPNNENIVGYNNKKCWPRDARMRLMKHDVNLGRAVFWDIKNRLPRSVTTVQWENSFVSVYSKDNPNLLFNMCGFECRILPKCRTSYEEFTHKDGVWNLQNEVTKERTAQCFLRVDDESMQRFHNRVRQILMASGSTTFTKIVNKWNTALIGLMTYFREAVVNTQELLDLLVKCENKIQTRIKIGLNSKMPSRFPPVVFYTPKELGGLGMLSMGHVLIPQSDLRWSKQTDVGITHFRSGMSHEEDQLIPNLYRYIQPWESEFIDSQRVWAEYALKRQEAIAQNRRLTLEDLEDSWDRGIPRINTLFQKDRHTLAYDKGWRVRTDFKQYQVLKQNPFWWTHQRHDGKLWNLNNYRTDMIQALGGVEGILEHTLFKGTYFPTWEGLFWEKASGFEESMKWKKLTNAQRSGLNQIPNRRFTLWWSPTINRANVYVGFQVQLDLTGIFMHGKIPTLKISLIQIFRAHLWQKIHESIVMDLCQVFDQELDALEIETVQKETIHPRKSYKMNSSCADILLFASYKWNVSRPSLLADSKDVMDSTTTQKYWIDIQLRWGDYDSHDIERYARAKFLDYTTDNMSIYPSPTGVLIAIDLAYNLHSAYGNWFPGSKPLIQQAMAKIMKANPALYVLRERIRKGLQLYSSEPTEPYLSSQNYGELFSNQIIWFVDDTNVYRVTIHKTFEGNLTTKPINGAIFIFNPRTGQLFLKIIHTSVWAGQKRLGQLAKWKTAEEVAALIRSLPVEEQPKQIIVTRKGMLDPLEVHLLDFPNIVIKGSELQLPFQACLKVEKFGDLILKATEPQMVLFNLYDDWLKTISSYTAFSRLILILRALHVNNDRAKVILKPDKTTITEPHHIWPTLTDEEWIKVEVQLKDLILADYGKKNNVNVASLTQSEIRDIILGMEISAPSQQRQQIAEIEKQTKEQSQLTATQTRTVNKHGDEIITSTTSNYETQTFSSKTEWRVRAISAANLHLRTNHIYVSSDDIKETGYTYILPKNVLKKFICISDLRAQIAGYLYGVSPPDNPQVKEIRCIVMVPQWGTHQTVHLPGQLPQHEYLKEMEPLGWIHTQPNESPQLSPQDVTTHAKIMADNPSWDGEKTIIITCSFTPGSCTLTAYKLTPSGYEWGRQNTDKGNNPKGYLPSHYERVQMLLSDRFLGFFMVPAQSSWNYNFMGVRHDPNMKYELQLANPKEFYHEVHRPSHFLNFALLQEGEVYSADREDLYA

SEQ ID NO: 795756 - protein, 2487 aa, Homo sapiens
MAGVFPYRGPGNPVPGPLAPLPDYMSEEKLQEKARKWQQLQAKRYAEKRKFGFVDAQKEDMPPEHVRKIIRDHGDMTNRKFRHDKRVYLGALKYMPHAVLKLLENMPMPWEQIRDVPVLYHITGAISFVNEIPWVIEPVYISQWGSMWIMMRREKRDRRHFKRMRFPPFDDEEPPLDYADNILDVEPLEAIQLELDPEEDAPVLDWFYDHQPLRDSRKYVNGSTYQRWQFTLPMMSTLYRLANQLLTDLVDDNYFYLFDLKAFFTSKALNMAIPGGPKFEPLVRDINLQDEDWNEFNDINKIIIRQPIRTEYKIAFPYLYNNLPHHVHLTWYHTPNVVFIKTEDPDLPAFYFDPLINPISHRHSVKSQEPLPDDDEEFELPEFVEPFLKDTPLYTDNTANGIALLWAPRPFNLRSGRTRRALDIPLVKNWYREHCPAGQPVKVRVSYQKLLKYYVLNALKHRPPKAQKKRYLFRSFKATKFFQSTKLDWVEVGLQVCRQGYNMLNLLIHRKNLNYLHLDYNFNLKPVKTLTTKERKKSRFGNAFHLCREVLRLTKLVVDSHVQYRLGNVDAFQLADGLQYIFAHVGQLTGMYRYKYKLMRQIRMCKDLKHLIYYRFNTGPVGKGPGCGFWAAGWRVWLFFMRGITPLLERWLGNLLARQFEGRHSKGVAKTVTKQRVESHFDLELRAAVMHDILDMMPEGIKQNKARTILQHLSEAWRCWKANIPWKVPGLPTPIENMILRYVKAKADWWTNTAHYNRERIRRGATVDKTVCKKNLGRLTRLYLKAEQERQHNYLKDGPYITAEEAVAVYTTTVHWLESRRFSPIPFPPLSYKHDTKLLILALERLKEAYSVKSRLNQSQREELGLIEQAYDNPHEALSRIKRHLLTQRAFKEVSEASQVFFLVLPKVAVAFGSTKGSSWWIGVNQPPVSQEEVGIEFMDLYSHLVPVYDVEPLEKITDAYLDQYLWYEADKRRLFPPWIKPADTEPPPLLVYKWCQGINNLQDVWETSEGECNVMLESRFEKMYEKIDLTLLNRLLRLIVDHNIADYMTAKNNVVINYKDMNHTNSYGIIRGLQFASFIVQYYGLVMDLLVLGLHRASEMAGPPQMPNDFLSFQDIATEAAHPIRLFCRYIDRIHIFFRFTADEARDLIQRYLTEHPDPNNENIVGYNNKKCWPRDARMRLMKHDVNFESRLGLCELEGHKLRAQRGHTWGCVLGGRGVAVSGCHQLAFEGKFLPRNCCDHVFSVGRGRAVFWDIKNRLPRSVTTVQWENSFVSVYSKDNPNLLFNMCGFECRILPKCRTSYEEFTHKDGVWNLQNEVQPGRGWECHERACTSWVSHRSLVGWKDLNGGHSWLLLLWEFLGHVNLDFVVYVTKERTAQCFLRVDDESMQRFHNRVRQILMASGSTTFTKIVNKWNTALIGLMTYFREAVVNTQELLDLLVKCENKIQTRIKIGLNSKMPSRFPPVVFYTPKELGGLGMLSMGHVLIPQSDLRWSKQTDVGITHFRSGMSHEEDQLIPNLYRYIQPWESEFIDSQRVWAEYALKRQEAIAQNRRLTLEDLEDSWDRGIPRINTLFQKDRHTLAYDKGWRVRTDFKQYQVLKQNPFWWTHQRHDGKLWNLNNYRTDMIQALGGVEGILEHTLFKGTYFPTWEGLFWEKASGFEESMKWKKLTNAQRSGLNQIPNRRFTLWWSPTINRANVYVGFQVQLDLTGIFMHGKIPTLKISLIQIFRAHLWQKIHESIVMDLCQVFDQELDALEIETVQKETIHPRKSYKMNSSCADILLFASYKWNVSRPSLLADSKDVMDSTTTQKYWIDIQLRWGDYDSHDIERYARAKFLDYTTDNMSIYPSPTGVLIAIDLAYNLHSAYGNWFPGSKPLIQQAMAKIMKANPALYVLRERIRKGLQLYSSEPTEPYLSSQNYGELFSNQIIWFVDDTNVYRVTIHKTFEGNLTTKPINGAIFIFNPRTGQLFLKIIHTSVWAGQKRLGQLAKWKTAEEVAALIRSLPVEEQPKQIIVTRKGMLDPLEVHLLDFPNIVIKGSELQLPFQACLKVEKFGDLILKATEPQMVLFNLYDDWLKTISSYTAFSRLILILRALHVNNDRAKVILKPDKTTITEPHHIWPTLTDEEWIKVEVQLKDLILADYGKKNNVNVASLTQSEIRDIILGMEISAPSQQRQQIAEIEKQTKEQSQLTATQTRTVNKHGDEIITSTTSNYETQTFSSKTEWRVRAISAANLHLRTNHIYVSSDDIKETGYTYILPKNVLKKFICISDLRAQIAGYLYGVSPPDNPQVKEIRCIVMVPQWGTHQTVHLPGQLPQHEYLKEMEPLGWIHTQPNESPQLSPQDVTTHAKIMADNPSWDGEKTIIITCSFTPGSCTLTAYKLTPSGYEWGRQNTDKGNNPKGYLPSHYERVQMLLSDRFLGFFMVPAQSSWNYNFMGVRHDPNMKYELQLANPKEFYHEVHRPSHFLNFALLQEGEVYSADREDLYA

SEQ ID NO: 795757 - protein, 1324 aa, Homo sapiens
MAGVKSDEEDMNHTNSYGIIRGLQFASFIVQYYGLVMDLLVLGLHRASEMAGPPQMPNDFLSFQDIATEAAHPIRLFCRYIDRIHIFFRFTADEARDLIQRYLTEHPDPNNENIVGYNNKKCWPRDARMRLMKHDVNLGRAVFWDIKNRLPRSVTTVQWENSFVSVYSKDNPNLLFNMCGFECRILPKCRTSYEEFTHKDGVWNLQNEVTKERTAQCFLRVDDESMQRFHNRVRQILMASGSTTFTKIVNKWNTALIGLMTYFREAVVNTQELLDLLVKCENKIQTRIKIGLNSKMPSRFPPVVFYTPKELGGLGMLSMGHVLIPQSDLRWSKQTDVGITHFRSGMSHEEDQLIPNLYRYIQPWESEFIDSQRVWAEYALKRQEAIAQNRRLTLEDLEDSWDRGIPRINTLFQKDRHTLAYDKGWRVRTDFKQYQVLKQNPFWWTHQRHDGKLWNLNNYRTDMIQALGGVEGILEHTLFKGTYFPTWEGLFWEKASGFEESMKWKKLTNAQRSGLNQIPNRRFTLWWSPTINRANVYVGFQVQLDLTGIFMHGKIPTLKISLIQIFRAHLWQKIHESIVMDLCQVFDQELDALEIETVQKETIHPRKSYKMNSSCADILLFASYKWNVSRPSLLADSKDVMDSTTTQKYWIDIQLRWGDYDSHDIERYARAKFLDYTTDNMSIYPSPTGVLIAIDLAYNLHSAYGNWFPGSKPLIQQAMAKIMKANPALYVLRERIRKGLQLYSSEPTEPYLSSQNYGELFSNQIIWFVDDTNVYRVTIHKTFEGNLTTKPINGAIFIFNPRTGQLFLKIIHTSVWAGQKRLGQLAKWKTAEEVAALIRSLPVEEQPKQIIVTRKGMLDPLEVHLLDFPNIVIKGSELQLPFQACLKVEKFGDLILKATEPQMVLFNLYDDWLKTISSYTAFSRLILILRALHVNNDRAKVILKPDKTTITEPHHIWPTLTDEEWIKVEVQLKDLILADYGKKNNVNVASLTQSEIRDIILGMEISAPSQQRQQIAEIEKQTKEQSQLTATQTRTVNKHGDEIITSTTSNYETQTFSSKTEWRVRAISAANLHLRTNHIYVSSDDIKETGYTYILPKNVLKKFICISDLRAQIAGYLYGVSPPDNPQVKEIRCIVMVPQWGTHQTVHLPGQLPQHEYLKEMEPLGWIHTQPNESPQLSPQDVTTHAKIMADNPSWDGEKTIIITCSFTPGSCTLTAYKLTPSGYEWGRQNTDKGNNPKGYLPSHYERVQMLLSDRFLGFFMVPAQSSWNYNFMGVRHDPNMKYELQLANPKEFYHEVHRPSHFLNFALLQEGEVYSADREDLYA

SEQ ID NO: 795758 - protein, 2466 aa, Homo sapiens; identical to SEQ ID NO: 795746

SEQ ID NO: 795759 - protein, 2497 aa, Homo sapiens
MAGVFPYRGPGNPVPGPLAPLPDYMSEEKLQEKARKWQQLQAKRYAEKRKFGFVDAQKEDMPPEHVRKIIRDHGDMTNRKFRHDKRVYLGALKYMPHAVLKLLENMPMPWEQIRDVPVLYHITGAISFVNEIPWVIEPVYISQWGSMWIMMRREKRDRRHFKRMRFPPFDDEEPPLDYADNILDVEPLEAIQLELDPEEDAPVLDWFYDHQPLRDSRKYVNGSTYQRWQFTLPMMSTLYRLANQLLTDLVDDNYFYLFDLKAFFTSKALNMAIPGGPKFEPLVRDINLQDEDWNEFNDINKIIIRQPIRTEYKIAFPYLYNNLPHHVHLTWYHTPNVVFIKTEDPDLPAFYFDPLINPISHRHSVKSQEPLPDDDEEFELPEFVEPFLKDTPLYTDNTANGIALLWAPRPFNLRSGRTRRALDIPLVKNWYREHCPAGQPVKVRVSYQKLLKYYVLNALKHRPPKAQKKRYLFRSFKATKFFQSTKLDWVEVGLQVCRQGYNMLNLLIHRKNLNYLHLDYNFNLKPVKTLTTKERKKSRFGNAFHLCREVLRLTKLVVDSHVQYRLGNVDAFQLADGLQYIFAHVGQLTGMYRYKYKLMRQIRMCKDLKHLIYYRFNTGPVGKGPGCGFWAAGWRVWLFFMRGITPLLERWLGNLLARQFEGEWFSLCPTSPVIASKVPAPVGVCSLLLYEHSSYWIAFRSSSEMSLTSILFLGLPSGALRGSHAFAGVEIPQKHSCECFKVARLFAYAGHRDALLIPNFINNHNELRSMKVETLIESKESSLESPWDTLLPGRHSKGVAKTVTKQRVESHFDLELRAAVMHDILDMMPEGIKQNKARTILQHLSEAWRCWKANIPWKVPGLPTPIENMILRYVKAKADWWTNTAHYNRERIRRGATVDKTVCKKNLGRLTRLYLKAEQERQHNYLKDGPYITAEEAVAVYTTTVHWLESRRFSPIPFPPLSYKHDTKLLILALERLKEAYSVKSRLNQSQREELGLIEQAYDNPHEALSRIKRHLLTQRAFKEVGIEFMDLYSHLVPVYDVEPLEKITDAYLDQYLWYEADKRRLFPPWIKPADTEPPPLLVYKWCQGINNLQDVWETSEGECNVMLESRFEKMYEKIDLTLLNRLLRLIVDHNIADYMTAKNNVVINYKDMNHTNSYGIIRGLQFASFIVQYYGLVMDLLVLGLHRASEMAGPPQMPNDFLSFQDIATEAAHPIRLFCRYIDRIHIFFRFTADEARDLIQRYLTEHPDPNNENIVGYNNKKCWPRDARMRLMKHDVNLGRAVFWDIKNRLPRSVTTVQWENSFVSVYSKDNPNLLFNMCGFECRILPKCRTSYEEFTHKDGVWNLQNEVTKERTAQCFLRVDDESMQRFHNRVRQILMASGSTTFTKIVNKWNTALIGLMTYFREAVVNTQELLDLLVKCENKIQTRIKIGLNSKMPSRFPPVVFYTPKELGGLGMLSMGHVLIPQSDLRWSKQTDVGITHFRSGMSHEEDQLIPNLYRYIQPWESEFIDSQRVWAEYALKRQEAIAQNRRLTLEDLEDSWDRGIPRINTLFQKDRHTLAYDKGWRVRTDFKQYQVLKQNPFWWTHQRHDGKLWNLNNYRTDMIQALGGVEGILEHTLFKGTYFPTWEGLFWEKASGFEESMKWKKLTNAQRSGLNQIPNRRFTLWWSPTINRANVYVGFQVQLDLTGIFMHGKIPTLKISLIQIFRAHLWQKIHESIVMDLCQVFDQELDALEIETVQKETIHPRKSYKMNSSCADILLFASYKWNVSRPSLLADSKDVMDSTTTQKYWIDIQLRWGDYDSHDIERYARAKFLDYTTDNMSIYPSPTGVLIAIDLAYNLHSAYGNWFPGSKPLIQQAMAKIMKANPALYVLRERIRKGLQLYSSEPTEPYLSSQNYGELFSNQIIWFVDDTNVYRVTIHKTFEGNLTTKPINGAIFIFNPRTGQLFLKIIHTSVWAGQKRLGQLAKWKTAEEVAALIRSLPVEEQPKQIIVTRKGMLDPLEVHLLDFPNIVIKGSELQLPFQACLKVEKFGDLILKATEPQMVLFNLYDDWLKTISSYTAFSRLILILRALHVNNDRAKVILKPDKTTITEPHHIWPTLTDEEWIKVEVQLKDLILADYGKKNNVNVASLTQSEIRDIILGMEISAPSQQRQQIAEIEKQTKEQSQLTATQTRTVNKHGDEIITSTTSNYETQTFSSKTEWRVRAISAANLHLRTNHIYVSSDDIKETGYTYILPKNVLKKFICISDLRAQIAGYLYGVSPPDNPQVKEIRCIVMVPQWGTHQTVHLPGQLPQHEYLKVMGSDGAWECGKAGAIPVCGWDSALYSSLPKEMEPLGWIHTQPNESPQLSPQDVTTHAKIMADNPSWDGEKTIIITCSFTPGSCTLTAYKLTPSGYEWGRQNTDKGNNPKGYLPSHYERVQMLLSDRFLGFFMVPAQSSWNYNFMGVRHDPNMKYELQLANPKEFYHEVHRPSHFLNFALLQEGEVYSADREDLYA

SEQ ID NO: 795760 - protein, 2466 aa, Homo sapiens; identical to SEQ ID NO: 795746

SEQ ID NO: 795761 - protein, 965 aa, Homo sapiens
MPQYRNPFEKGDLYIKLVWVDPVVFQETARTRLTLEDLEDSWDRGIPRINTLFQKDRHTLAYDKGWRVRTDFKQYQVLKQNPFWWTHQRHDGKLWNLNNYRTDMIQALGGVEGILEHTLFKGTYFPTWEGLFWEKASGFEESMKWKKLTNAQRSGLNQIPNRRFTLWWSPTINRANVYVGFQVQLDLTGIFMHGKIPTLKISLIQIFRAHLWQKIHESIVMDLCQVFDQELDALEIETVQKETIHPRKSYKMNSSCADILLFASYKWNVSRPSLLADSKDVMDSTTTQKYWIDIQLRWGDYDSHDIERYARAKFLDYTTDNMSIYPSPTGVLIAIDLAYNLHSAYGNWFPGSKPLIQQAMAKIMKANPALYVLRERIRKGLQLYSSEPTEPYLSSQNYGELFSNQIIWFVDDTNVYRVTIHKTFEGNLTTKPINGAIFIFNPRTGQLFLKIIHTSVWAGQKRLGQLAKWKTAEEVAALIRSLPVEEQPKQIIVTRKGMLDPLEVHLLDFPNIVIKGSELQLPFQACLKVEKFGDLILKATEPQMVLFNLYDDWLKTISSYTAFSRLILILRALHVNNDRAKVILKPDKTTITEPHHIWPTLTDEEWIKVEVQLKDLILADYGKKNNVNVASLTQSEIRDIILGMEISAPSQQRQQIAEIEKQTKEQSQLTATQTRTVNKHGDEIITSTTSNYETQTFSSKTEWRVRAISAANLHLRTNHIYVSSDDIKETGYTYILPKNVLKKFICISDLRAQIAGYLYGVSPPDNPQVKEIRCIVMVPQWGTHQTVHLPGQLPQHEYLKEMEPLGWIHTQPNESPQLSPQDVTTHAKIMADNPSWDGEKTIIITCSFTPGSCTLTAYKLTPSGYEWGRQNTDKGNNPKGYLPSHYERVQMLLSDRFLGFFMVPAQSSWNYNFMGVRHDPNMKYELQLANPKEFYHEVHRPSHFLNFALLQEGEVYSADREDLYA

SEQ ID NO: 795762 - protein, 950 aa, Homo sapiens
MALQPGRKIKRPLLRTRLTLEDLEDSWDRGIPRINTLFQKDRHTLAYDKGWRVRTDFKQYQVLKQNPFWWTHQRHDGKLWNLNNYRTDMIQALGGVEGILEHTLFKGTYFPTWEGLFWEKASGFEESMKWKKLTNAQRSGLNQIPNRRFTLWWSPTINRANVYVGFQVQLDLTGIFMHGKIPTLKISLIQIFRAHLWQKIHESIVMDLCQVFDQELDALEIETVQKETIHPRKSYKMNSSCADILLFASYKWNVSRPSLLADSKDVMDSTTTQKYWIDIQLRWGDYDSHDIERYARAKFLDYTTDNMSIYPSPTGVLIAIDLAYNLHSAYGNWFPGSKPLIQQAMAKIMKANPALYVLRERIRKGLQLYSSEPTEPYLSSQNYGELFSNQIIWFVDDTNVYRVTIHKTFEGNLTTKPINGAIFIFNPRTGQLFLKIIHTSVWAGQKRLGQLAKWKTAEEVAALIRSLPVEEQPKQIIVTRKGMLDPLEVHLLDFPNIVIKGSELQLPFQACLKVEKFGDLILKATEPQMVLFNLYDDWLKTISSYTAFSRLILILRALHVNNDRAKVILKPDKTTITEPHHIWPTLTDEEWIKVEVQLKDLILADYGKKNNVNVASLTQSEIRDIILGMEISAPSQQRQQIAEIEKQTKEQSQLTATQTRTVNKHGDEIITSTTSNYETQTFSSKTEWRVRAISAANLHLRTNHIYVSSDDIKETGYTYILPKNVLKKFICISDLRAQIAGYLYGVSPPDNPQVKEIRCIVMVPQWGTHQTVHLPGQLPQHEYLKEMEPLGWIHTQPNESPQLSPQDVTTHAKIMADNPSWDGEKTIIITCSFTPGSCTLTAYKLTPSGYEWGRQNTDKGNNPKGYLPSHYERVQMLLSDRFLGFFMVPAQSSWNYNFMGVRHDPNMKYELQLANPKEFYHEVHRPSHFLNFALLQEGEVYSADREDLYA

SEQ ID NO: 795763 - protein, 2461 aa, Homo sapiens
MAGVFPYRGPGNPVPGPLAPLPDYMSEEKLQEKARKWQQLQAKRYAEKRKFGFVDAQKEDMPPEHVRKIIRDHGDMTNRKFRHDKRVYLGALKYMPHAVLKLLENMPMPWEQIRDVPVLYHITGAISFVNEIPWVIEPVYISQWGSMWIMMRREKRDRRHFKRMRFPPFDDEEPPLDYADNILDVEPLEAIQLELDPEEDAPVLDWFYDHQPLRDSRKYVNGSTYQRWQFTLPMMSTLYRLANQLLTDLVDDNYFYLFDLKAFFTSKALNMAIPGGPKFEPLVRDINLQDEDWNEFNDINKIIIRQPIRTEYKIAFPYLYNNLPHHVHLTWYHTPNVVFIKTEDPDLPAFYFDPLINPISHRHSVKSQEPLPDDDEEFELPEFVEPFLKDTPLYTDNTANGIALLWAPRPFNLRSGRTRRALDIPLVKNWYREHCPAGQPVKVRVSYQKLLKYYVLNALKHRPPKAQKKRYLFRSFKATKFFQSTKLDWVEVGLQVCRQGYNMLNLLIHRKNLNYLHLDYNFNLKPVKTLTTKERKKSRFGNAFHLCREVLRLTKLVVDSHVQYRLGNVDAFQLADGLQYIFAHVGQLTGMYRYKYKLMRQIRMCKDLKHLIYYRFNTGPVGKGPGCGFWAAGWRVWLFFMRGITPLLERWLGNLLARQFEGEWFSLCPTSPVIASKVPAPVGVCSLLLYEHSSYWIAFRSSSEMSLTSILFLGLPSGALRGSHAFAGVEIPQKHSCECFKVARLFAYAGHRDALLIPNFINNHNELRSMKVETLIESKESSLESPWDTLLPGRHSKGVAKTVTKQRVESHFDLELRAAVMHDILDMMPEGIKQNKARTILQHLSEAWRCWKANIPWKVPGLPTPIENMILRYVKAKADWWTNTAHYNRERIRRGATVDKTVCKKNLGRLTRLYLKAEQERQHNYLKDGPYITAEEAVAVYTTTVHWLESRRFSPIPFPPLSYKHDTKLLILALERLKEAYSVKSRLNQSQREELGLIEQAYDNPHEALSRIKRHLLTQRAFKEVGIEFMDLYSHLVPVYDVEPLEKITDAYLDQYLWYEADKRRLFPPWIKPADTEPPPLLVYKWCQGINNLQDVWETSEGECNVMLESRFEKMYEKIDLTLLNRLLRLIVDHNIADYMTAKNNVVINYKDMNHTNSYGIIRGLQFASFIVQYYGLVMDLLVLGLHRASEMAGPPQMPNDFLSFQDIATEAAHPIRLFCRYIDRIHIFFRFTADEARDLIQRYLTEHPDPNNENIVGYNNKKCWPRDARMRLMKHDVNLGRAVFWDIKNRLPRSVTTVQWENSFVSVYSKDNPNLLFNMCGFECRILPKCRTSYEEFTHKDGVWNLQNEVTKERTAQCFLRVDDESMQRFHNRVRQILMASGSTTFTKIVNKWNTALIGLMTYFREAVVNTQELLDLLVKCENKIQTRIKIGLNSKMPSRFPPVVFYTPKELGGLGMLSMGHVLIPQSDLRWSKQTDVGITHFRSGMSHEEDQLIPNLYRYIQPWESEFIDSQRVWAEYALKRQEAIAQNRRLTLEDLEDSWDRGIPRINTLFQKDRHTLAYDKGWRVRTDFKQYQVLKQNPFWWTHQRHDGKLWNLNNYRTDMIQALGGVEGILEHTLFKGTYFPTWEGLFWEKASGFEESMKWKKLTNAQRSGLNQIPNRRFTLWWSPTINRANVYVGFQVQLDLTGIFMHGKIPTLKISLIQIFRAHLWQKIHESIVMDLCQVFDQELDALEIETVQKETIHPRKSYKMNSSCADILLFASYKWNVSRPSLLADSKDVMDSTTTQKYWIDIQLRWGDYDSHDIERYARAKFLDYTTDNMSIYPSPTGVLIAIDLAYNLHSAYGNWFPGSKPLIQQAMAKIMKANPALYVLRERIRKGLQLYSSEPTEPYLSSQNYGELFSNQIIWFVDDTNVYRVTIHKTFEGNLTTKPINGAIFIFNPRTGQLFLKIIHTSVWAGQKRLGQLAKWKTAEEVAALIRSLPVEEQPKQIIVTRKGMLDPLEVHLLDFPNIVIKGSELQLPFQACLKVEKFGDLILKATEPQMVLFNLYDDWLKTISSYTAFSRLILILRALHVNNDRAKVILKPDKTTITEPHHIWPTLTDEEWIKVEVQLKDLILADYGKKNNVNVASLTQSEIRDIILGMEISAPSQQRQQIAEIEKQTKEQSQLTATQTRTVNKHGDEIITSTTSNYETQTFSSKTEWRVRAISAANLHLRTNHIYVSSDDIKETGYTYILPKNVLKKFICISDLRAQIAGYLYGVSPPDNPQVKEIRCIVMVPQWGTHQTVHLPGQLPQHEYLKEMEPLGWIHTQPNESPQLSPQDVTTHAKIMADNPSWDGEKTIIITCSFTPGSCTLTAYKLTPSGYEWGRQNTDKGNNPKGYLPSHYERVQMLLSDRFLGFFMVPAQSSWNYNFMGVRHDPNMKYELQLANPKEFYHEVHRPSHFLNFALDPQSNHPSWCN

SEQ ID NO: 795764 - protein, 2457 aa, Homo sapiens
MAGVFPYRGPGNPVPGPLAPLPDYMSEEKLQEKARKWQQLQAKRYAEKRKFGFVDAQKEDMPPEHVRKIIRDHGDMTNRKFRHDKRVYLGALKYMPHAVLKLLENMPMPWEQIRDVPVLYHITGAISFVNEIPWVIEPVYISQWGSMWIMMRREKRDRRHFKRMRFPPFDDEEPPLDYADNILDVEPLEAIQLELDPEEDAPVLDWFYDHQPLRDSRKYVNGSTYQRWQFTLPMMSTLYRLANQLLTDLVDDNYFYLFDLKAFFTSKALNMAIPGGPKFEPLVRDINLQDEDWNEFNDINKIIIRQPIRTEYKIAFPYLYNNLPHHVHLTWYHTPNVVFIKTEDPDLPAFYFDPLINPISHRHSVKSQEPLPDDDEEFELPEFVEPFLKDTPLYTDNTANGIALLWAPRPFNLRSGRTRRALDIPLVKNWYREHCPAGQPVKVRVSYQKLLKYYVLNALKHRPPKAQKKRYLFRSFKATKFFQSTKLDWVEVGLQVCRQGYNMLNLLIHRKNLNYLHLDYNFNLKPVKTLTTKERKKSRFGNAFHLCREVLRLTKLVVDSHVQYRLGNVDAFQLADGLQYIFAHVGQLTGMYRYKYKLMRQIRMCKDLKHLIYYRFNTGPVGKGPGCGFWAAGWRVWLFFMRGITPLLERWLGNLLARQFEGEWFSLCPTSPVIASKVPAPVGVCSLLLYEHSSYWIAFRSSSEMSLTSILFLGLPSGALRGSHAFAGVEIPQKHSCECFKVARLFAYAGHRDALLIPNFINNHNELRSMKVETLIESKESSLESPWDTLLPGRHSKGVAKTVTKQRVESHFDLELRAAVMHDILDMMPEGIKQNKARTILQHLSEAWRCWKANIPWKVPGLPTPIENMILRYVKAKADWWTNTAHYNRERIRRGATVDKTVCKKNLGRLTRLYLKAEQERQHNYLKDGPYITAEEAVAVYTTTVHWLESRRFSPIPFPPLSYKHDTKLLILALERLKEAYSVKSRLNQSQREELGLIEQAYDNPHEALSRIKRHLLTQRAFKEVGIEFMDLYSHLVPVYDVEPLEKITDAYLDQYLWYEADKRRLFPPWIKPADTEPPPLLVYKWCQGINNLQDVWETSEGECNVMLESRFEKMYEKIDLTLLNRLLRLIVDHNIADYMTAKNNVVINYKDMNHTNSYGIIRGLQFASFIVQYYGLVMDLLVLGLHRASEMAGPPQMPNDFLSFQDIATEAAHPIRLFCRYIDRIHIFFRFTADEARDLIQRYLTEHPDPNNENIVGYNNKKCWPRDARMRLMKHDVNLGRAVFWDIKNRLPRSVTTVQWENSFVSVYSKDNPNLLFNMCGFECRILPKCRTSYEEFTHKDGVWNLQNEVTKERTAQCFLRVDDESMQRFHNRVRQILMASGSTTFTKIVNKWNTALIGLMTYFREAVVNTQELLDLLVKCENKIQTRIKIGLNSKMPSRFPPVVFYTPKELGGLGMLSMGHVLIPQSDLRWSKQTDVGITHFRSGMSHEEDQLIPNLYRYIQPWESEFIDSQRVWAEYALKRQEAIAQNRRLTLEDLEDSWDRGIPRINTLFQKDRHTLAYDKGWRVRTDFKQYQVLKQNPFWWTHQRHDGKLWNLNNYRTDMIQALGGVEGILEHTLFKGTYFPTWEGLFWEKASGFEESMKWKKLTNAQRSGLNQIPNRRFTLWWSPTINRANVYVGFQVQLDLTGIFMHGKIPTLKISLIQIFRAHLWQKIHESIVMDLCQVFDQELDALEIETVQKETIHPRKSYKMNSSCADILLFASYKWNVSRPSLLADSKDVMDSTTTQKYWIDIQLRWGDYDSHDIERYARAKFLDYTTDNMSIYPSPTGVLIAIDLAYNLHSAYGNWFPGSKPLIQQAMAKIMKANPALYVLRERIRKGLQLYSSEPTEPYLSSQNYGELFSNQIIWFVDDTNVYRVTIHKTFEGNLTTKPINGAIFIFNPRTGQLFLKIIHTSVWAGQKRLGQLAKWKTAEEVAALIRSLPVEEQPKQIIVTRKGMLDPLEVHLLDFPNIVIKGSELQLPFQACLKVEKFGDLILKATEPQMVLFNLYDDWLKTISSYTAFSRLILILRALHVNNDRAKVILKPDKTTITEPHHIWPTLTDEEWIKVEVQLKDLILADYGKKNNVNVASLTQSEIRDIILGMEISAPSQQRQQIAEIEKQTKEQSQLTATQTRTVNKHGDEIITSTTSNYETQTFSSKTEWRVRAISAANLHLRTNHIYVSSDDIKETGYTYILPKNVLKKFICISDLRAQIAGYLYGVSPPDNPQVKEIRCIVMVPQWGTHQTVHLPGQLPQHEYLKEMEPLGWIHTQPNESPQLSPQDVTTHAKIMADNPSWDGEKTIIITCSFTPGSCTLTAYKLTPSGYEWGRQNTDKGNNPKGYLPSHYERVQMLLSDRFLGFFMVPAQSSWNYNFMGVRHDPNMKYELQLANPKEFYHEVHRPSHFLNFALQGTAARN

SEQ ID NO: 795765 - protein, 823 aa, Homo sapiens
MKWKKLTNAQRSGLNQIPNRRFTLWWSPTINRANVYVGFQVQLDLTGIFMHGKIPTLKISLIQIFRAHLWQKIHESIVMDLCQVFDQELDALEIETVQKETIHPRKSYKMNSSCADILLFASYKWNVSRPSLLADSKDVMDSTTTQKYWIDIQLRWGDYDSHDIERYARAKFLDYTTDNMSIYPSPTGVLIAIDLAYNLHSAYGNWFPGSKPLIQQAMAKIMKANPALYVLRERIRKGLQLYSSEPTEPYLSSQNYGELFSNQIIWFVDDTNVYRVTIHKTFEGNLTTKPINGAIFIFNPRTGQLFLKIIHTSVWAGQKRLGQLAKWKTAEEVAALIRSLPVEEQPKQIIVTRKGMLDPLEVHLLDFPNIVIKGSELQLPFQACLKVEKFGDLILKATEPQMVLFNLYDDWLKTISSYTAFSRLILILRALHVNNDRAKVILKPDKTTITEPHHIWPTLTDEEWIKVEVQLKDLILADYGKKNNVNVASLTQSEIRDIILGMEISAPSQQRQQIAEIEKQTKEQSQLTATQTRTVNKHGDEIITSTTSNYETQTFSSKTEWRVRAISAANLHLRTNHIYVSSDDIKETGYTYILPKNVLKKFICISDLRAQIAGYLYGVSPPDNPQVKEIRCIVMVPQWGTHQTVHLPGQLPQHEYLKEMEPLGWIHTQPNESPQLSPQDVTTHAKIMADNPSWDGEKTIIITCSFTPGSCTLTAYKLTPSGYEWGRQNTDKGNNPKGYLPSHYERVQMLLSDRFLGFFMVPAQSSWNYNFMGVRHDPNMKYELQLANPKEFYHEVHRPSHFLNFALLQEGEVYSADREDLYA

SEQ ID NO: 795766 - protein, 2432 aa, Homo sapiens
MAGVFPYRGPGNPVPGPLAPLPDYMSEEKLQEKARKWQQLQAKRYAEKRKFGFVDAQKEDMPPEHVRKIIRDHGDMTNRKFRHDKRVYLGALKYMPHAVLKLLENMPMPWEQIRDVPVLYHITGAISFVNEIPWVIEPVYISQWGSMWIMMRREKRDRRHFKRMRFPPFDDEEPPLDYADNILDVEPLEAIQLELDPEEDAPVLDWFYDHQPLRDSRKYVNGSTYQRWQFTLPMMSTLYRLANQLLTDLVDDNYFYLFDLKAFFTSKALNMAIPGGPKFEPLVRDINLQDEDWNEFNDINKIIIRQPIRTEYKIAFPYLYNNLPHHVHLTWYHTPNVVFIKTEDPDLPAFYFDPLINPISHRHSVKSQEPLPDDDEEFELPEFVEPFLKDTPLYTDNTANGIALLWAPRPFNLRSGRTRRALDIPLVKNWYREHCPAGQPVKVRVSYQKLLKYYVLNALKHRPPKAQKKRYLFRSFKATKFFQSTKLDWVEVGLQVCRQGYNMLNLLIHRKNLNYLHLDYNFNLKPVKTLTTKERKKSRFGNAFHLCREVLRLTKLVVDSHVQYRLGNVDAFQLADGLQYIFAHVGQLTGMYRYKYKLMRQIRMCKDLKHLIYYRFNTGPVGKGPGCGFWAAGWRVWLFFMRGITPLLERWLGNLLARQFEGEWFSLCPTSPVIASKVPAPVGVCSLLLYEHSSYWIAFRSSSEMSLTSILFLGLPSGALRGSHAFAGVEIPQKHSCECFKVARLFAYAGHRDALLIPNFINNHNELRSMKVETLIESKESSLESPWDTLLPGRHSKGVAKTVTKQRVESHFDLELRAAVMHDILDMMPEGIKQNKARTILQHLSEAWRCWKANIPWKVPGLPTPIENMILRYVKAKADWWTNTAHYNRERIRRGATVDKTVCKKNLGRLTRLYLKAEQERQHNYLKDGPYITAEEAVAVYTTTVHWLESRRFSPIPFPPLSYKHDTKLLILALERLKEAYSVKSRLNQSQREELGLIEQAYDNPHEALSRIKRHLLTQRAFKEVGIEFMDLYSHLVPVYDVEPLEKITDAYLDQYLWYEADKRRLFPPWIKPADTEPPPLLVYKWCQGINNLQDVWETSEGECNVMLESRFEKMYEKIDLTLLNRLLRLIVDHNIADYMTAKNNVVINYKDMNHTNSYGIIRGLQFASFIVQYYGLVMDLLVLGLHRASEMAGPPQMPNDFLSFQDIATEAAHPIRLFCRYIDRIHIFFRFTADEARDLIQRYLTEHPDPNNENIVGYNNKKCWPRDARMRLMKHDVNLGRAVFWDIKNRLPRSVTTVQWENSFVSVYSKDNPNLLFNMCGFECRILPKCRTSYEEFTHKDGVWNLQNEVTKERTAQCFLRVDDESMQRFHNRVRQILMASGSTTFTKIVNKWNTALIGLMTYFREAVVNTQELLDLLVKCENKIQTRIKIGLNSKMPSRFPPVVFYTPKELGGLGMLSMGHVLIPQSDLRWSKQTDVGITHFRSGMSHEEDQLIPNLYRYIQPWESEFIDSQRVWAEYALKRQEAIAQNRRLTLEDLEDSWDRGIPRINTLFQKDRHTLAYDKGWRVRTDFKQYQVLKQNPFWWTHQRHDGKLWNLNNYRTDMIQALGGVEGILEHTLFKGTYFPTWEGLFWEKASGFEESMKWKKLTNAQRSGLNQIPNRRFTLWWSPTINRANVYVGFQVQLDLTGIFMHGKIPTLKISLIQIFRAHLWQKIHESIVMDLCQVFDQELDALEIETVQKETIHPRKSYKMNSSCADILLFASYKWNVSRPSLLADSKDVMDSTTTQKYWIDIQLRWGDYDSHDIERYARAKFLDYTTDNMSIYPSPTGVLIAIDLAYNLHSAYGNWFPGSKPLIQQAMAKIMKANPALYVLRERIRKGLQLYSSEPTEPYLSSQNYGELFSNQIIWFVDDTNVYRVTIHKTFEGNLTTKPINGAIFIFNPRTGQLFLKIIHTSVWAGQKRLGQLAKWKTAEEVAALIRSLPVEEQPKQIIVTRKGMLDPLEVHLLDFPNIVIKGSELQLPFQACLKVEKFGDLILKATEPQMVLFNLYDDWLKTISSYTAFSRLILILRALHVNNDRAKVILKPDKTTITEPHHIWPTLTDEEWIKVEVQLKDLILADYGKKNNVNVASLTQSEIRDIILGMEISAPSQQRQQIAEIEKQTKEQSQLTATQTRTVNKHGDEIITSTTSNYETQTFSSKTEWRVRAISAANLHLRTNHIYVSSDDIKETGYTYILPKNVLKKFICISDLRAQIAGYLYGVSPPDNPQVKEIRCIVMVPQWGTHQTVHLPGQLPQHEYLKEMEPLGWIHTQPNESPQLSPQDVTTHAKIMADNPSWDGEKTIIITCSFTPGSCTLTAYKLTPSGYEWGRQNTDKGNNPKGYLPSHYERVQMLLSDRFLGFFMVPAQSSWNYNFMGLQEGEVYSADREDLYA

SEQ ID NO: 795767 - protein, 2410 aa, Homo sapiens
MAGVFPYRGPGNPVPGPLAPLPDYMSEEKLQEKARKWQQLQAKRYAEKRKFGFVDAQKEDMPPEHVRKIIRDHGDMTNRKFRHDKRVYLGALKYMPHAVLKLLENMPMPWEQIRDVPVLYHITGAISFVNEIPWVIEPVYISQWGSMWIMMRREKRDRRHFKRMRFPPFDDEEPPLDYADNILDVEPLEAIQLELDPEEDAPVLDWFYDHQPLRDSRKYVNGSTYQRWQFTLPMMSTLYRLANQLLTDLVDDNYFYLFDLKAFFTSKALNMAIPGGPKFEPLVRDINLQDEDWNEFNDINKIIIRQPIRTEYKIAFPYLYNNLPHHVHLTWYHTPNVVFIKTEDPDLPAFYFDPLINPISHRHSVKSQEPLPDDDEEFELPEFVEPFLKDTPLYTDNTANGIALLWAPRPFNLRSGRTRRALDIPLVKNWYREHCPAGQPVKVRVSYQKLLKYYVLNALKHRPPKAQKKRYLFRSFKATKFFQSTKLDWVEVGLQVCRQGYNMLNLLIHRKNLNYLHLDYNFNLKPVKTLTTKERKKSRFGNAFHLCREVLRLTKLVVDSHVQYRLGNVDAFQLADGLQYIFAHVGQLTGMYRYKYKLMRQIRMCKDLKHLIYYRFNTGPVGKGPGCGFWAAGWRVWLFFMRGITPLLERWLGNLLARQFEGEWFSLCPTSPVIASKVPAPVGVCSLLLYEHSSYWIAFRSSSEMSLTSILFLGLPSGALRGSHAFAGVEIPQKHSCECFKVARLFAYAGHRDALLIPNFINNHNELRSMKVETLIESKESSLESPWDTLLPGRHSKGVAKTVTKQRVESHFDLELRAAVMHDILDMMPEGIKQNKARTILQHLSEAWRCWKANIPWKVPGLPTPIENMILRYVKAKADWWTNTAHYNRERIRRGATVDKTVCKKNLGRLTRLYLKAEQERQHNYLKDGPYITAEEAVAVYTTTVHWLESRRFSPIPFPPLSYKHDTKLLILALERLKEAYSVKSRLNQSQREELGLIEQAYDNPHEALSRIKRHLLTQRAFKEVGIEFMDLYSHLVPVYDVEPLEKITDAYLDQYLWYEADKRRLFPPWIKPADTEPPPLLVYKWCQGINNLQDVWETSEGECNVMLESRFEKMYEKIDLTLLNRLLRLIVDHNIADYMTAKNNVVINYKDMNHTNSYGIIRGLQFASFIVQYYGLVMDLLVLGLHRASEMAGPPQMPNDFLSFQDIATEAAHPIRLFCRYIDRIHIFFRFTADEARDLIQRYLTEHPDPNNENIVGYNNKKCWPRDARMRLMKHDVNLGRAVFWDIKNRLPRSVTTVQWENSFVSVYSKDNPNLLFNMCGFECRILPKCRTSYEEFTHKDGVWNLQNEVTKERTAQCFLRVDDESMQRFHNRVRQILMASGSTTFTKIVNKWNTALIGLMTYFREAVVNTQELLDLLVKCENKIQTRIKIGLNSKMPSRFPPVVFYTPKELGGLGMLSMGHVLIPQSDLRWSKQTDVGITHFRSGMSHEEDQLIPNLYRYIQPWESEFIDSQRVWAEYALKRQEAIAQNRRLTLEDLEDSWDRGIPRINTLFQKDRHTLAYDKGWRVRTDFKQYQVLKQNPFWWTHQRHDGKLWNLNNYRTDMIQALGGVEGILEHTLFKGTYFPTWEGLFWEKASGFEESMKWKKLTNAQRSGLNQIPNRRFTLWWSPTINRANVYVGFQVQLDLTGIFMHGKIPTLKISLIQIFRAHLWQKIHESIVMDLCQVFDQELDALEIETVQKETIHPRKSYKMNSSCADILLFASYKWNVSRPSLLADSKDVMDSTTTQKYWIDIQLRWGDYDSHDIERYARAKFLDYTTDNMSIYPSPTGVLIAIDLAYNLHSAYGNWFPGSKPLIQQAMAKIMKANPALYVLRERIRKGLQLYSSEPTEPYLSSQNYGELFSNQIIWFVDDTNVYRVTIHKTFEGNLTTKPINGAIFIFNPRTGQLFLKIIHTSVWAGQKRLGQLAKWKTAEEVAALIRSLPVEEQPKQIIVTRKGMLDPLEVHLLDFPNIVIKGSELQLPFQACLKVEKFGDLILKATEPQMVLFNLYDDWLKTISSYTAFSRLILILRALHVNNDRAKVILKPDKTTITEPHHIWPTLTDEEWIKVEVQLKDLILADYGKKNNVNVASLTQSEIRDIILGMEISAPSQQRQQIAEIEKQTKEQSQLTATQTRTVNKHGDEIITSTTSNYETQTFSSKTEWRVRAISAANLHLRTNHIYVSSDDIKETGYTYILPKNVLKKFICISDLRAQIAGYLYGVSPPDNPQVKEIRCIVMVPQWGTHQTVHLPGQLPQHEYLKEMEPLGWIHTQPNESPQLSPQDVTTHAKIMADNPSWDGEKTIIITCSFTPGSCTLTAYKLTPSGYEWGRQNTDKGNNPKGYLPSHYERVQMLLSDRSLLSSSQDPARVT

SEQ ID NO: 795768 - protein, 786 aa, Homo sapiens
MADSVRIPPRRVMHGKIPTLKISLIQIFRAHLWQKIHESIVMDLCQVFDQELDALEIETVQKETIHPRKSYKMNSSCADILLFASYKWNVSRPSLLADSKDVMDSTTTQKYWIDIQLRWGDYDSHDIERYARAKFLDYTTDNMSIYPSPTGVLIAIDLAYNLHSAYGNWFPGSKPLIQQAMAKIMKANPALYVLRERIRKGLQLYSSEPTEPYLSSQNYGELFSNQIIWFVDDTNVYRVTIHKTFEGNLTTKPINGAIFIFNPRTGQLFLKIIHTSVWAGQKRLGQLAKWKTAEEVAALIRSLPVEEQPKQIIVTRKGMLDPLEVHLLDFPNIVIKGSELQLPFQACLKVEKFGDLILKATEPQMVLFNLYDDWLKTISSYTAFSRLILILRALHVNNDRAKVILKPDKTTITEPHHIWPTLTDEEWIKVEVQLKDLILADYGKKNNVNVASLTQSEIRDIILGMEISAPSQQRQQIAEIEKQTKEQSQLTATQTRTVNKHGDEIITSTTSNYETQTFSSKTEWRVRAISAANLHLRTNHIYVSSDDIKETGYTYILPKNVLKKFICISDLRAQIAGYLYGVSPPDNPQVKEIRCIVMVPQWGTHQTVHLPGQLPQHEYLKEMEPLGWIHTQPNESPQLSPQDVTTHAKIMADNPSWDGEKTIIITCSFTPGSCTLTAYKLTPSGYEWGRQNTDKGNNPKGYLPSHYERVQMLLSDRFLGFFMVPAQSSWNYNFMGVRHDPNMKYELQLANPKEFYHEVHRPSHFLNFALLQEGEVYSADREDLYA

SEQ ID NO: 795769 - protein, 769 aa, Homo sapiens
MVGDHQRVNLRLGIWFSPDLLSIVMDLCQVFDQELDALEIETVQKETIHPRKSYKMNSSCADILLFASYKWNVSRPSLLADSKDVMDSTTTQKYWIDIQLRWGDYDSHDIERYARAKFLDYTTDNMSIYPSPTGVLIAIDLAYNLHSAYGNWFPGSKPLIQQAMAKIMKANPALYVLRERIRKGLQLYSSEPTEPYLSSQNYGELFSNQIIWFVDDTNVYRVTIHKTFEGNLTTKPINGAIFIFNPRTGQLFLKIIHTSVWAGQKRLGQLAKWKTAEEVAALIRSLPVEEQPKQIIVTRKGMLDPLEVHLLDFPNIVIKGSELQLPFQACLKVEKFGDLILKATEPQMVLFNLYDDWLKTISSYTAFSRLILILRALHVNNDRAKVILKPDKTTITEPHHIWPTLTDEEWIKVEVQLKDLILADYGKKNNVNVASLTQSEIRDIILGMEISAPSQQRQQIAEIEKQTKEQSQLTATQTRTVNKHGDEIITSTTSNYETQTFSSKTEWRVRAISAANLHLRTNHIYVSSDDIKETGYTYILPKNVLKKFICISDLRAQIAGYLYGVSPPDNPQVKEIRCIVMVPQWGTHQTVHLPGQLPQHEYLKEMEPLGWIHTQPNESPQLSPQDVTTHAKIMADNPSWDGEKTIIITCSFTPGSCTLTAYKLTPSGYEWGRQNTDKGNNPKGYLPSHYERVQMLLSDRFLGFFMVPAQSSWNYNFMGVRHDPNMKYELQLANPKEFYHEVHRPSHFLNFALLQEGEVYSADREDLYA

SEQ ID NO: 795770 - protein, 652 aa, Homo sapiens
RHSLFPRVKPLCTLSTGVLIAIDLAYNLHSAYGNWFPGSKPLIQQAMAKIMKANPALYVLRERIRKGLQLYSSEPTEPYLSSQNYGELFSNQIIWFVDDTNVYRVTIHKTFEGNLTTKPINGAIFIFNPRTGQLFLKIIHTSVWAGQKRLGQLAKWKTAEEVAALIRSLPVEEQPKQIIVTRKGMLDPLEVHLLDFPNIVIKGSELQLPFQACLKVEKFGDLILKATEPQMVLFNLYDDWLKTISSYTAFSRLILILRALHVNNDRAKVILKPDKTTITEPHHIWPTLTDEEWIKVEVQLKDLILADYGKKNNVNVASLTQSEIRDIILGMEISAPSQQRQQIAEIEKQTKEQSQLTATQTRTVNKHGDEIITSTTSNYETQTFSSKTEWRVRAISAANLHLRTNHIYVSSDDIKETGYTYILPKNVLKKFICISDLRAQIAGYLYGVSPPDNPQVKEIRCIVMVPQWGTHQTVHLPGQLPQHEYLKEMEPLGWIHTQPNESPQLSPQDVTTHAKIMADNPSWDGEKTIIITCSFTPGSCTLTAYKLTPSGYEWGRQNTDKGNNPKGYLPSHYERVQMLLSDRFLGFFMVPAQSSWNYNFMGVRHDPNMKYELQLANPKEFYHEVHRPSHFLNFALLQEGEVYSADREDLYA

SEQ ID NO: 795771 - protein, 645 aa, Homo sapiens
SSVQCTPQTGVLIAIDLAYNLHSAYGNWFPGSKPLIQQAMAKIMKANPALYVLRERIRKGLQLYSSEPTEPYLSSQNYGELFSNQIIWFVDDTNVYRVTIHKTFEGNLTTKPINGAIFIFNPRTGQLFLKIIHTSVWAGQKRLGQLAKWKTAEEVAALIRSLPVEEQPKQIIVTRKGMLDPLEVHLLDFPNIVIKGSELQLPFQACLKVEKFGDLILKATEPQMVLFNLYDDWLKTISSYTAFSRLILILRALHVNNDRAKVILKPDKTTITEPHHIWPTLTDEEWIKVEVQLKDLILADYGKKNNVNVASLTQSEIRDIILGMEISAPSQQRQQIAEIEKQTKEQSQLTATQTRTVNKHGDEIITSTTSNYETQTFSSKTEWRVRAISAANLHLRTNHIYVSSDDIKETGYTYILPKNVLKKFICISDLRAQIAGYLYGVSPPDNPQVKEIRCIVMVPQWGTHQTVHLPGQLPQHEYLKEMEPLGWIHTQPNESPQLSPQDVTTHAKIMADNPSWDGEKTIIITCSFTPGSCTLTAYKLTPSGYEWGRQNTDKGNNPKGYLPSHYERVQMLLSDRFLGFFMVPAQSSWNYNFMGVRHDPNMKYELQLANPKEFYHEVHRPSHFLNFALLQEGEVYSADREDLYA

SEQ ID NO: 795772 - protein, 609 aa, Homo sapiens
SIAALEIPGKPPALYVLRERIRKGLQLYSSEPTEPYLSSQNYGELFSNQIIWFVDDTNVYRVTIHKTFEGNLTTKPINGAIFIFNPRTGQLFLKIIHTSVWAGQKRLGQLAKWKTAEEVAALIRSLPVEEQPKQIIVTRKGMLDPLEVHLLDFPNIVIKGSELQLPFQACLKVEKFGDLILKATEPQMVLFNLYDDWLKTISSYTAFSRLILILRALHVNNDRAKVILKPDKTTITEPHHIWPTLTDEEWIKVEVQLKDLILADYGKKNNVNVASLTQSEIRDIILGMEISAPSQQRQQIAEIEKQTKEQSQLTATQTRTVNKHGDEIITSTTSNYETQTFSSKTEWRVRAISAANLHLRTNHIYVSSDDIKETGYTYILPKNVLKKFICISDLRAQIAGYLYGVSPPDNPQVKEIRCIVMVPQWGTHQTVHLPGQLPQHEYLKEMEPLGWIHTQPNESPQLSPQDVTTHAKIMADNPSWDGEKTIIITCSFTPGSCTLTAYKLTPSGYEWGRQNTDKGNNPKGYLPSHYERVQMLLSDRFLGFFMVPAQSSWNYNFMGVRHDPNMKYELQLANPKEFYHEVHRPSHFLNFALLQEGEVYSADREDLYA

SEQ ID NO: 795773 - protein, 665 aa, Homo sapiens
STRSVWAEQKRLGQLAKWKTAEEVAALIRSLPAGGAAQADHCHQEGHAGPTGGALTGLPQYCHQRIGAPTPFPGVSQGGKIREISSEPTEPYLSSQNYGELFSNQIIWFVDDTNVYRVTIHKTFEGNLTTKPINGAIFIFNPRTGQLFLKIIHTSVWAGQKRLGQLAKWKTAEEVAALIRSLPVEEQPKQIIVTRKGMLDPLEVHLLDFPNIVIKGSELQLPFQACLKVEKFGDLILKATEPQMVLFNLYDDWLKTISSYTAFSRLILILRALHVNNDRAKVILKPDKTTITEPHHIWPTLTDEEWIKVEVQLKDLILADYGKKNNVNVASLTQSEIRDIILGMEISAPSQQRQQIAEIEKQTKEQSQLTATQTRTVNKHGDEIITSTTSNYETQTFSSKTEWRVRAISAANLHLRTNHIYVSSDDIKETGYTYILPKNVLKKFICISDLRAQIAGYLYGVSPPDNPQVKEIRCIVMVPQWGTHQTVHLPGQLPQHEYLKEMEPLGWIHTQPNESPQLSPQDVTTHAKIMADNPSWDGEKTIIITCSFTPGSCTLTAYKLTPSGYEWGRQNTDKGNNPKGYLPSHYERVQMLLSDRFLGFFMVPAQSSWNYNFMGVRHDPNMKYELQLANPKEFYHEVHRPSHFLNFALLQEGEVYSADREDLYA

SEQ ID NO: 795774 - protein, 574 aa, Homo sapiens
MVEAGGNLAEVSNQIIWFVDDTNVYRVTIHKTFEGNLTTKPINGAIFIFNPRTGQLFLKIIHTSVWAGQKRLGQLAKWKTAEEVAALIRSLPVEEQPKQIIVTRKGMLDPLEVHLLDFPNIVIKGSELQLPFQACLKVEKFGDLILKATEPQMVLFNLYDDWLKTISSYTAFSRLILILRALHVNNDRAKVILKPDKTTITEPHHIWPTLTDEEWIKVEVQLKDLILADYGKKNNVNVASLTQSEIRDIILGMEISAPSQQRQQIAEIEKQTKEQSQLTATQTRTVNKHGDEIITSTTSNYETQTFSSKTEWRVRAISAANLHLRTNHIYVSSDDIKETGYTYILPKNVLKKFICISDLRAQIAGYLYGVSPPDNPQVKEIRCIVMVPQWGTHQTVHLPGQLPQHEYLKEMEPLGWIHTQPNESPQLSPQDVTTHAKIMADNPSWDGEKTIIITCSFTPGSCTLTAYKLTPSGYEWGRQNTDKGNNPKGYLPSHYERVQMLLSDRFLGFFMVPAQSSWNYNFMGVRHDPNMKYELQLANPKEFYHEVHRPSHFLNFALLQEGEVYSADREDLYA

SEQ ID NO: 795775 - protein, 2319 aa, Homo sapiens
MAGVFPYRGPGNPVPGPLAPLPDYMSEEKLQEKARKWQQLQAKRYAEKRKFGFVDAQKEDMPPEHVRKIIRDHGDMTNRKFRHDKRVYLGALKYMPHAVLKLLENMPMPWEQIRDVPVLYHITGAISFVNEIPWVIEPVYISQWGSMWIMMRREKRDRRHFKRMRFPPFDDEEPPLDYADNILDVEPLEAIQLELDPEEDAPVLDWFYDHQPLRDSRKYVNGSTYQRWQFTLPMMSTLYRLANQLLTDLVDDNYFYLFDLKAFFTSKALNMAIPGGPKFEPLVRDINLQDEDWNEFNDINKIIIRQPIRTEYKIAFPYLYNNLPHHVHLTWYHTPNVVFIKTEDPDLPAFYFDPLINPISHRHSVKSQEPLPDDDEEFELPEFVEPFLKDTPLYTDNTANGIALLWAPRPFNLRSGRTRRALDIPLVKNWYREHCPAGQPVKVRVSYQKLLKYYVLNALKHRPPKAQKKRYLFRSFKATKFFQSTKLDWVEVGLQVCRQGYNMLNLLIHRKNLNYLHLDYNFNLKPVKTLTTKERKKSRFGNAFHLCREVLRLTKLVVDSHVQYRLGNVDAFQLADGLQYIFAHVGQLTGMYRYKYKLMRQIRMCKDLKHLIYYRFNTGPVGKGPGCGFWAAGWRVWLFFMRGITPLLERWLGNLLARQFEGEWFSLCPTSPVIASKVPAPVGVCSLLLYEHSSYWIAFRSSSEMSLTSILFLGLPSGALRGSHAFAGVEIPQKHSCECFKVARLFAYAGHRDALLIPNFINNHNELRSMKVETLIESKESSLESPWDTLLPGRHSKGVAKTVTKQRVESHFDLELRAAVMHDILDMMPEGIKQNKARTILQHLSEAWRCWKANIPWKVPGLPTPIENMILRYVKAKADWWTNTAHYNRERIRRGATVDKTVCKKNLGRLTRLYLKAEQERQHNYLKDGPYITAEEAVAVYTTTVHWLESRRFSPIPFPPLSYKHDTKLLILALERLKEAYSVKSRLNQSQREELGLIEQAYDNPHEALSRIKRHLLTQRAFKEVGIEFMDLYSHLVPVYDVEPLEKITDAYLDQYLWYEADKRRLFPPWIKPADTEPPPLLVYKWCQGINNLQDVWETSEGECNVMLESRFEKMYEKIDLTLLNRLLRLIVDHNIADYMTAKNNVVINYKDMNHTNSYGIIRGLQFASFIVQYYGLVMDLLVLGLHRASEMAGPPQMPNDFLSFQDIATEAAHPIRLFCRYIDRIHIFFRFTADEARDLIQRYLTEHPDPNNENIVGYNNKKCWPRDARMRLMKHDVNLGRAVFWDIKNRLPRSVTTVQWENSFVSVYSKDNPNLLFNMCGFECRILPKCRTSYEEFTHKDGVWNLQNEVTKERTAQCFLRVDDESMQRFHNRVRQILMASGSTTFTKIVNKWNTALIGLMTYFREAVVNTQELLDLLVKCENKIQTRIKIGLNSKMPSRFPPVVFYTPKELGGLGMLSMGHVLIPQSDLRWSKQTDVGITHFRSGMSHEEDQLIPNLYRYIQPWESEFIDSQRVWAEYALKRQEAIAQNRRLTLEDLEDSWDRGIPRINTLFQKDRHTLAYDKGWRVRTDFKQYQVLKQNPFWWTHQRHDGKLWNLNNYRTDMIQALGGVEGILEHTLFKGTYFPTWEGLFWEKASGFEESMKWKKLTNAQRSGLNQIPNRRFTLWWSPTINRANVYVGFQVQLDLTGIFMHGKIPTLKISLIQIFRAHLWQKIHESIVMDLCQVFDQELDALEIETVQKETIHPRKSYKMNSSCADILLFASYKWNVSRPSLLADSKDVMDSTTTQKYWIDIQLRWGDYDSHDIERYARAKFLDYTTDNMSIYPSPTGVLIAIDLAYNLHSAYGNWFPGSKPLIQQAMAKIMKANPALYVLRERIRKGLQLYSSEPTEPYLSSQNYGELFSNQIIWFVDDTNVYRVTIHKTFEGNLTTKPINGAIFIFNPRTGQLFLKIIHTSVWAGQKRLGQLAKWKTAEEVAALIRSLPVEEQPKQIIVTRKGMLDPLEVHLLDFPNIVIKGSELQLPFQACLKVEKFGDLILKATEPQMVLFNLYDDWLKTISSYTAFSRLILILRALHVNNDRAKVILKPDKTTITEPHHIWPTLTDEEWIKVEVQLKDLILADYGKKNNVNVASLTQSEIRDIILGMEISAPSQQRQQIAEIEKQTKEQSQLTATQTRTVNKHGDEIITSTTSNYETQTFSSKTEWRVRAISAANLHLRTNHIYVSSDDIKETGYTYILPKNVLKKFICISDLRAQIAGYLYGVSPPDNPQVKEIRCIVMVPQWGTHQTVHLPGQLPQHEYLKEMEPLGWIHTQPKGQICR

SEQ ID NO: 795776 - protein, 538 aa, Homo sapiens
MPLLRAQGAIFIFNPRTGQLFLKIIHTSVWAGQKRLGQLAKWKTAEEVAALIRSLPVEEQPKQIIVTRKGMLDPLEVHLLDFPNIVIKGSELQLPFQACLKVEKFGDLILKATEPQMVLFNLYDDWLKTISSYTAFSRLILILRALHVNNDRAKVILKPDKTTITEPHHIWPTLTDEEWIKVEVQLKDLILADYGKKNNVNVASLTQSEIRDIILGMEISAPSQQRQQIAEIEKQTKEQSQLTATQTRTVNKHGDEIITSTTSNYETQTFSSKTEWRVRAISAANLHLRTNHIYVSSDDIKETGYTYILPKNVLKKFICISDLRAQIAGYLYGVSPPDNPQVKEIRCIVMVPQWGTHQTVHLPGQLPQHEYLKEMEPLGWIHTQPNESPQLSPQDVTTHAKIMADNPSWDGEKTIIITCSFTPGSCTLTAYKLTPSGYEWGRQNTDKGNNPKGYLPSHYERVQMLLSDRFLGFFMVPAQSSWNYNFMGVRHDPNMKYELQLANPKEFYHEVHRPSHFLNFALLQEGEVYSADREDLYA

SEQ ID NO: 795777 - protein, 500 aa, Homo sapiens
GSFSVGRSSVAALIRSLPVEEQPKQIIVTRKGMLDPLEVHLLDFPNIVIKGSELQLPFQACLKVEKFGDLILKATEPQMVLFNLYDDWLKTISSYTAFSRLILILRALHVNNDRAKVILKPDKTTITEPHHIWPTLTDEEWIKVEVQLKDLILADYGKKNNVNVASLTQSEIRDIILGMEISAPSQQRQQIAEIEKQTKEQSQLTATQTRTVNKHGDEIITSTTSNYETQTFSSKTEWRVRAISAANLHLRTNHIYVSSDDIKETGYTYILPKNVLKKFICISDLRAQIAGYLYGVSPPDNPQVKEIRCIVMVPQWGTHQTVHLPGQLPQHEYLKEMEPLGWIHTQPNESPQLSPQDVTTHAKIMADNPSWDGEKTIIITCSFTPGSCTLTAYKLTPSGYEWGRQNTDKGNNPKGYLPSHYERVQMLLSDRFLGFFMVPAQSSWNYNFMGVRHDPNMKYELQLANPKEFYHEVHRPSHFLNFALLQEGEVYSADREDLYA

SEQ ID NO: 795778 - protein, 2276 aa, Homo sapiens
MAGVFPYRGPGNPVPGPLAPLPDYMSEEKLQEKARKWQQLQAKRYAEKRKFGFVDAQKEDMPPEHVRKIIRDHGDMTNRKFRHDKRVYLGALKYMPHAVLKLLENMPMPWEQIRDVPVLYHITGAISFVNEIPWVIEPVYISQWGSMWIMMRREKRDRRHFKRMRFPPFDDEEPPLDYADNILDVEPLEAIQLELDPEEDAPVLDWFYDHQPLRDSRKYVNGSTYQRWQFTLPMMSTLYRLANQLLTDLVDDNYFYLFDLKAFFTSKALNMAIPGGPKFEPLVRDINLQDEDWNEFNDINKIIIRQPIRTEYKIAFPYLYNNLPHHVHLTWYHTPNVVFIKTEDPDLPAFYFDPLINPISHRHSVKSQEPLPDDDEEFELPEFVEPFLKDTPLYTDNTANGIALLWAPRPFNLRSGRTRRALDIPLVKNWYREHCPAGQPVKVRVSYQKLLKYYVLNALKHRPPKAQKKRYLFRSFKATKFFQSTKLDWVEVGLQVCRQGYNMLNLLIHRKNLNYLHLDYNFNLKPVKTLTTKERKKSRFGNAFHLCREVLRLTKLVVDSHVQYRLGNVDAFQLADGLQYIFAHVGQLTGMYRYKYKLMRQIRMCKDLKHLIYYRFNTGPVGKGPGCGFWAAGWRVWLFFMRGITPLLERWLGNLLARQFEGEWFSLCPTSPVIASKVPAPVGVCSLLLYEHSSYWIAFRSSSEMSLTSILFLGLPSGALRGSHAFAGVEIPQKHSCECFKVARLFAYAGHRDALLIPNFINNHNELRSMKVETLIESKESSLESPWDTLLPGRHSKGVAKTVTKQRVESHFDLELRAAVMHDILDMMPEGIKQNKARTILQHLSEAWRCWKANIPWKVPGLPTPIENMILRYVKAKADWWTNTAHYNRERIRRGATVDKTVCKKNLGRLTRLYLKAEQERQHNYLKDGPYITAEEAVAVYTTTVHWLESRRFSPIPFPPLSYKHDTKLLILALERLKEAYSVKSRLNQSQREELGLIEQAYDNPHEALSRIKRHLLTQRAFKEVGIEFMDLYSHLVPVYDVEPLEKITDAYLDQYLWYEADKRRLFPPWIKPADTEPPPLLVYKWCQGINNLQDVWETSEGECNVMLESRFEKMYEKIDLTLLNRLLRLIVDHNIADYMTAKNNVVINYKDMNHTNSYGIIRGLQFASFIVQYYGLVMDLLVLGLHRASEMAGPPQMPNDFLSFQDIATEAAHPIRLFCRYIDRIHIFFRFTADEARDLIQRYLTEHPDPNNENIVGYNNKKCWPRDARMRLMKHDVNLGRAVFWDIKNRLPRSVTTVQWENSFVSVYSKDNPNLLFNMCGFECRILPKCRTSYEEFTHKDGVWNLQNEVTKERTAQCFLRVDDESMQRFHNRVRQILMASGSTTFTKIVNKWNTALIGLMTYFREAVVNTQELLDLLVKCENKIQTRIKIGLNSKMPSRFPPVVFYTPKELGGLGMLSMGHVLIPQSDLRWSKQTDVGITHFRSGMSHEEDQLIPNLYRYIQPWESEFIDSQRVWAEYALKRQEAIAQNRRLTLEDLEDSWDRGIPRINTLFQKDRHTLAYDKGWRVRTDFKQYQVLKQNPFWWTHQRHDGKLWNLNNYRTDMIQALGGVEGILEHTLFKGTYFPTWEGLFWEKASGFEESMKWKKLTNAQRSGLNQIPNRRFTLWWSPTINRANVYVGFQVQLDLTGIFMHGKIPTLKISLIQIFRAHLWQKIHESIVMDLCQVFDQELDALEIETVQKETIHPRKSYKMNSSCADILLFASYKWNVSRPSLLADSKDVMDSTTTQKYWIDIQLRWGDYDSHDIERYARAKFLDYTTDNMSIYPSPTGVLIAIDLAYNLHSAYGNWFPGSKPLIQQAMAKIMKANPALYVLRERIRKGLQLYSSEPTEPYLSSQNYGELFSNQIIWFVDDTNVYRVTIHKTFEGNLTTKPINGAIFIFNPRTGQLFLKIIHTSVWAGQKRLGQLAKWKTAEEVAALIRSLPVEEQPKQIIVTRKGMLDPLEVHLLDFPNIVIKGSELQLPFQACLKVEKFGDLILKATEPQMVLFNLYDDWLKTISSYTAFSRLILILRALHVNNDRAKVILKPDKTTITEPHHIWPTLTDEEWIKVEVQLKDLILADYGKKNNVNVASLTQSEIRDIILGMEISAPSQQRQQIAEIEKQTKEQSQLTATQTRTVNKHGDEIITSTTSNYETQTFSSKTEWRVRAISAANLHLRTNHIYVSSDDIKETGYTYILPKNVLKKFICISDLRAQVSKWTQLGHSVCPTHFVPKTQT

SEQ ID NO: 795779 - protein, 2304 aa, Homo sapiens
MAGVFPYRGPGNPVPGPLAPLPDYMSEEKLQEKARKWQQLQAKRYAEKRKFGFVDAQKEDMPPEHVRKIIRDHGDMTNRKFRHDKRVYLGALKYMPHAVLKLLENMPMPWEQIRDVPVLYHITGAISFVNEIPWVIEPVYISQWGSMWIMMRREKRDRRHFKRMRFPPFDDEEPPLDYADNILDVEPLEAIQLELDPEEDAPVLDWFYDHQPLRDSRKYVNGSTYQRWQFTLPMMSTLYRLANQLLTDLVDDNYFYLFDLKAFFTSKALNMAIPGGPKFEPLVRDINLQDEDWNEFNDINKIIIRQPIRTEYKIAFPYLYNNLPHHVHLTWYHTPNVVFIKTEDPDLPAFYFDPLINPISHRHSVKSQEPLPDDDEEFELPEFVEPFLKDTPLYTDNTANGIALLWAPRPFNLRSGRTRRALDIPLVKNWYREHCPAGQPVKVRVSYQKLLKYYVLNALKHRPPKAQKKRYLFRSFKATKFFQSTKLDWVEVGLQVCRQGYNMLNLLIHRKNLNYLHLDYNFNLKPVKTLTTKERKKSRFGNAFHLCREVLRLTKLVVDSHVQYRLGNVDAFQLADGLQYIFAHVGQLTGMYRYKYKLMRQIRMCKDLKHLIYYRFNTGPVGKGPGCGFWAAGWRVWLFFMRGITPLLERWLGNLLARQFEGEWFSLCPTSPVIASKVPAPVGVCSLLLYEHSSYWIAFRSSSEMSLTSILFLGLPSGALRGSHAFAGVEIPQKHSCECFKVARLFAYAGHRDALLIPNFINNHNELRSMKVETLIESKESSLESPWDTLLPGRHSKGVAKTVTKQRVESHFDLELRAAVMHDILDMMPEGIKQNKARTILQHLSEAWRCWKANIPWKVPGLPTPIENMILRYVKAKADWWTNTAHYNRERIRRGATVDKTVCKKNLGRLTRLYLKAEQERQHNYLKDGPYITAEEAVAVYTTTVHWLESRRFSPIPFPPLSYKHDTKLLILALERLKEAYSVKSRLNQSQREELGLIEQAYDNPHEALSRIKRHLLTQRAFKEVGIEFMDLYSHLVPVYDVEPLEKITDAYLDQYLWYEADKRRLFPPWIKPADTEPPPLLVYKWCQGINNLQDVWETSEGECNVMLESRFEKMYEKIDLTLLNRLLRLIVDHNIADYMTAKNNVVINYKDMNHTNSYGIIRGLQFASFIVQYYGLVMDLLVLGLHRASEMAGPPQMPNDFLSFQDIATEAAHPIRLFCRYIDRIHIFFRFTADEARDLIQRYLTEHPDPNNENIVGYNNKKCWPRDARMRLMKHDVNLGRAVFWDIKNRLPRSVTTVQWENSFVSVYSKDNPNLLFNMCGFECRILPKCRTSYEEFTHKDGVWNLQNEVTKERTAQCFLRVDDESMQRFHNRVRQILMASGSTTFTKIVNKWNTALIGLMTYFREAVVNTQELLDLLVKCENKIQTRIKIGLNSKMPSRFPPVVFYTPKELGGLGMLSMGHVLIPQSDLRWSKQTDVGITHFRSGMSHEEDQLIPNLYRYIQPWESEFIDSQRVWAEYALKRQEAIAQNRRLTLEDLEDSWDRGIPRINTLFQKDRHTLAYDKGWRVRTDFKQYQVLKQNPFWWTHQRHDGKLWNLNNYRTDMIQALGGVEGILEHTLFKGTYFPTWEGLFWEKASGFEESMKWKKLTNAQRSGLNQIPNRRFTLWWSPTINRANVYVGFQVQLDLTGIFMHGKIPTLKISLIQIFRAHLWQKIHESIVMDLCQVFDQELDALEIETVQKETIHPRKSYKMNSSCADILLFASYKWNVSRPSLLADSKDVMDSTTTQKYWIDIQLRWGDYDSHDIERYARAKFLDYTTDNMSIYPSPTGVLIAIDLAYNLHSAYGNWFPGSKPLIQQAMAKIMKANPALYVLRERIRKGLQLYSSEPTEPYLSSQNYGELFSNQIIWFVDDTNVYRVTIHKTFEGNLTTKPINGAIFIFNPRTGQLFLKIIHTSVWAGQKRLGQLAKWKTAEEVAALIRSLPVEEQPKQIIVTRKGMLDPLEVHLLDFPNIVIKGSELQLPFQACLKVEKFGDLILKATEPQMVLFNLYDDWLKTISSYTAFSRLILILRALHVNNDRAKVILKPDKTTITEPHHIWPTLTDEEWIKVEVQLKDLILADYGKKNNVNVASLTQSEIRDIILGMEISAPSQQRQQIAEIEKQTKEQSQLTATQTRTVNKHGDEIITSTTSNYETQTFSSKTEWRVRAISAANLHLRTNHIYVSSDDIKETGYTYILPKNVLKKFICISDLRAQIAGYLYGVSPPPRNTGLTSSCAGGTMILTTLSATPGLKFLDIHHRQRLRG

SEQ ID NO: 795780 - protein, 2281 aa, Homo sapiens
MAGVFPYRGPGNPVPGPLAPLPDYMSEEKLQEKARKWQQLQAKRYAEKRKFGFVDAQKEDMPPEHVRKIIRDHGDMTNRKFRHDKRVYLGALKYMPHAVLKLLENMPMPWEQIRDVPVLYHITGAISFVNEIPWVIEPVYISQWGSMWIMMRREKRDRRHFKRMRFPPFDDEEPPLDYADNILDVEPLEAIQLELDPEEDAPVLDWFYDHQPLRDSRKYVNGSTYQRWQFTLPMMSTLYRLANQLLTDLVDDNYFYLFDLKAFFTSKALNMAIPGGPKFEPLVRDINLQDEDWNEFNDINKIIIRQPIRTEYKIAFPYLYNNLPHHVHLTWYHTPNVVFIKTEDPDLPAFYFDPLINPISHRHSVKSQEPLPDDDEEFELPEFVEPFLKDTPLYTDNTANGIALLWAPRPFNLRSGRTRRALDIPLVKNWYREHCPAGQPVKVRVSYQKLLKYYVLNALKHRPPKAQKKRYLFRSFKATKFFQSTKLDWVEVGLQVCRQGYNMLNLLIHRKNLNYLHLDYNFNLKPVKTLTTKERKKSRFGNAFHLCREVLRLTKLVVDSHVQYRLGNVDAFQLADGLQYIFAHVGQLTGMYRYKYKLMRQIRMCKDLKHLIYYRFNTGPVGKGPGCGFWAAGWRVWLFFMRGITPLLERWLGNLLARQFEGEWFSLCPTSPVIASKVPAPVGVCSLLLYEHSSYWIAFRSSSEMSLTSILFLGLPSGALRGSHAFAGVEIPQKHSCECFKVARLFAYAGHRDALLIPNFINNHNELRSMKVETLIESKESSLESPWDTLLPGRHSKGVAKTVTKQRVESHFDLELRAAVMHDILDMMPEGIKQNKARTILQHLSEAWRCWKANIPWKVPGLPTPIENMILRYVKAKADWWTNTAHYNRERIRRGATVDKTVCKKNLGRLTRLYLKAEQERQHNYLKDGPYITAEEAVAVYTTTVHWLESRRFSPIPFPPLSYKHDTKLLILALERLKEAYSVKSRLNQSQREELGLIEQAYDNPHEALSRIKRHLLTQRAFKEVGIEFMDLYSHLVPVYDVEPLEKITDAYLDQYLWYEADKRRLFPPWIKPADTEPPPLLVYKWCQGINNLQDVWETSEGECNVMLESRFEKMYEKIDLTLLNRLLRLIVDHNIADYMTAKNNVVINYKDMNHTNSYGIIRGLQFASFIVQYYGLVMDLLVLGLHRASEMAGPPQMPNDFLSFQDIATEAAHPIRLFCRYIDRIHIFFRFTADEARDLIQRYLTEHPDPNNENIVGYNNKKCWPRDARMRLMKHDVNLGRAVFWDIKNRLPRSVTTVQWENSFVSVYSKDNPNLLFNMCGFECRILPKCRTSYEEFTHKDGVWNLQNEVTKERTAQCFLRVDDESMQRFHNRVRQILMASGSTTFTKIVNKWNTALIGLMTYFREAVVNTQELLDLLVKCENKIQTRIKIGLNSKMPSRFPPVVFYTPKELGGLGMLSMGHVLIPQSDLRWSKQTDVGITHFRSGMSHEEDQLIPNLYRYIQPWESEFIDSQRVWAEYALKRQEAIAQNRRLTLEDLEDSWDRGIPRINTLFQKDRHTLAYDKGWRVRTDFKQYQVLKQNPFWWTHQRHDGKLWNLNNYRTDMIQALGGVEGILEHTLFKGTYFPTWEGLFWEKASGFEESMKWKKLTNAQRSGLNQIPNRRFTLWWSPTINRANVYVGFQVQLDLTGIFMHGKIPTLKISLIQIFRAHLWQKIHESIVMDLCQVFDQELDALEIETVQKETIHPRKSYKMNSSCADILLFASYKWNVSRPSLLADSKDVMDSTTTQKYWIDIQLRWGDYDSHDIERYARAKFLDYTTDNMSIYPSPTGVLIAIDLAYNLHSAYGNWFPGSKPLIQQAMAKIMKANPALYVLRERIRKGLQLYSSEPTEPYLSSQNYGELFSNQIIWFVDDTNVYRVTIHKTFEGNLTTKPINGAIFIFNPRTGQLFLKIIHTSVWAGQKRLGQLAKWKTAEEVAALIRSLPVEEQPKQIIVTRKGMLDPLEVHLLDFPNIVIKGSELQLPFQACLKVEKFGDLILKATEPQMVLFNLYDDWLKTISSYTAFSRLILILRALHVNNDRAKVILKPDKTTITEPHHIWPTLTDEEWIKVEVQLKDLILADYGKKNNVNVASLTQSEIRDIILGMEISAPSQQRQQIAEIEKQTKEQSQLTATQTRTVNKHGDEIITSTTSNYETQTFSSKTEWRVRAISAANLHLRTNHIYVSSDDIKETGYTYILPWAADAHREYDPSNVKAKADWWTNTAHYNRERIRRGATVDKTVC

SEQ ID NO: 795781 - protein, 2341 aa, Homo sapiens
MAGVFPYRGPGNPVPGPLAPLPDYMSEEKLQEKARKWQQLQAKRYAEKRKFGFVDAQKEDMPPEHVRKIIRDHGDMTNRKFRHDKRVYLGALKYMPHAVLKLLENMPMPWEQIRDVPVLYHITGAISFVNEIPWVIEPVYISQWGSMWIMMRREKRDRRHFKRMRFPPFDDEEPPLDYADNILDVEPLEAIQLELDPEEDAPVLDWFYDHQPLRDSRKYVNGSTYQRWQFTLPMMSTLYRLANQLLTDLVDDNYFYLFDLKAFFTSKALNMAIPGGPKFEPLVRDINLQDEDWNEFNDINKIIIRQPIRTEYKIAFPYLYNNLPHHVHLTWYHTPNVVFIKTEDPDLPAFYFDPLINPISHRHSVKSQEPLPDDDEEFELPEFVEPFLKDTPLYTDNTANGIALLWAPRPFNLRSGRTRRALDIPLVKNWYREHCPAGQPVKVRVSYQKLLKYYVLNALKHRPPKAQKKRYLFRSFKATKFFQSTKLDWVEVGLQVCRQGYNMLNLLIHRKNLNYLHLDYNFNLKPVKTLTTKERKKSRFGNAFHLCREVLRLTKLVVDSHVQYRLGNVDAFQLADGLQYIFAHVGQLTGMYRYKYKLMRQIRMCKDLKHLIYYRFNTGPVGKGPGCGFWAAGWRVWLFFMRGITPLLERWLGNLLARQFEGEWFSLCPTSPVIASKVPAPVGVCSLLLYEHSSYWIAFRSSSEMSLTSILFLGLPSGALRGSHAFAGVEIPQKHSCECFKVARLFAYAGHRDALLIPNFINNHNELRSMKVETLIESKESSLESPWDTLLPGRHSKGVAKTVTKQRVESHFDLELRAAVMHDILDMMPEGIKQNKARTILQHLSEAWRCWKANIPWKVPGLPTPIENMILRYVKAKADWWTNTAHYNRERIRRGATVDKTVCKKNLGRLTRLYLKAEQERQHNYLKDGPYITAEEAVAVYTTTVHWLESRRFSPIPFPPLSYKHDTKLLILALERLKEAYSVKSRLNQSQREELGLIEQAYDNPHEALSRIKRHLLTQRAFKEVGIEFMDLYSHLVPVYDVEPLEKITDAYLDQYLWYEADKRRLFPPWIKPADTEPPPLLVYKWCQGINNLQDVWETSEGECNVMLESRFEKMYEKIDLTLLNRLLRLIVDHNIADYMTAKNNVVINYKDMNHTNSYGIIRGLQFASFIVQYYGLVMDLLVLGLHRASEMAGPPQMPNDFLSFQDIATEAAHPIRLFCRYIDRIHIFFRFTADEARDLIQRYLTEHPDPNNENIVGYNNKKCWPRDARMRLMKHDVNLGRAVFWDIKNRLPRSVTTVQWENSFVSVYSKDNPNLLFNMCGFECRILPKCRTSYEEFTHKDGVWNLQNEVTKERTAQCFLRVDDESMQRFHNRVRQILMASGSTTFTKIVNKWNTALIGLMTYFREAVVNTQELLDLLVKCENKIQTRIKIGLNSKMPSRFPPVVFYTPKELGGLGMLSMGHVLIPQSDLRWSKQTDVGITHFRSGMSHEEDQLIPNLYRYIQPWESEFIDSQRVWAEYALKRQEAIAQNRRLTLEDLEDSWDRGIPRINTLFQKDRHTLAYDKGWRVRTDFKQYQVLKQNPFWWTHQRHDGKLWNLNNYRTDMIQALGGVEGILEHTLFKGTYFPTWEGLFWEKASGFEESMKWKKLTNAQRSGLNQIPNRRFTLWWSPTINRANVYVGFQVQLDLTGIFMHGKIPTLKISLIQIFRAHLWQKIHESIVMDLCQVFDQELDALEIETVQKETIHPRKSYKMNSSCADILLFASYKWNVSRPSLLADSKDVMDSTTTQKYWIDIQLRWGDYDSHDIERYARAKFLDYTTDNMSIYPSPTGVLIAIDLAYNLHSAYGNWFPGSKPLIQQAMAKIMKANPALYVLRERIRKGLQLYSSEPTEPYLSSQNYGELFSNQIIWFVDDTNVYRVTIHKTFEGNLTTKPINGAIFIFNPRTGQLFLKIIHTSVWAGQKRLGQLAKWKTAEEVAALIRSLPVEEQPKQIIVTRKGMLDPLEVHLLDFPNIVIKGSELQLPFQACLKVEKFGDLILKATEPQMVLFNLYDDWLKTISSYTAFSRLILILRALHVNNDRAKVILKPDKTTITEPHHIWPTLTDEEWIKVEVQLKDLILADYGKKNNVNVASLTQSEIRDIILGMEISAPSQQRQQIAEIEKQTKEQSQLTATQTRTVNKHGDEIITSTTSNYETQTFSSKTEWRVRAISAANLHLRTNHIYVSSDGAQRWALVTIARLEVILELGWAQPCDVWSIGCILFEYYRGFTLFQTHENREHLVMMEKILGPIPSHMIHRTRKQKYFYKGGLVWDENSSDGRYVKENCKPPEEFMLQDSLEHVQL

SEQ ID NO: 795782 - protein, 2248 aa, Homo sapiens
MAGVFPYRGPGNPVPGPLAPLPDYMSEEKLQEKARKWQQLQAKRYAEKRKFGFVDAQKEDMPPEHVRKIIRDHGDMTNRKFRHDKRVYLGALKYMPHAVLKLLENMPMPWEQIRDVPVLYHITGAISFVNEIPWVIEPVYISQWGSMWIMMRREKRDRRHFKRMRFPPFDDEEPPLDYADNILDVEPLEAIQLELDPEEDAPVLDWFYDHQPLRDSRKYVNGSTYQRWQFTLPMMSTLYRLANQLLTDLVDDNYFYLFDLKAFFTSKALNMAIPGGPKFEPLVRDINLQDEDWNEFNDINKIIIRQPIRTEYKIAFPYLYNNLPHHVHLTWYHTPNVVFIKTEDPDLPAFYFDPLINPISHRHSVKSQEPLPDDDEEFELPEFVEPFLKDTPLYTDNTANGIALLWAPRPFNLRSGRTRRALDIPLVKNWYREHCPAGQPVKVRVSYQKLLKYYVLNALKHRPPKAQKKRYLFRSFKATKFFQSTKLDWVEVGLQVCRQGYNMLNLLIHRKNLNYLHLDYNFNLKPVKTLTTKERKKSRFGNAFHLCREVLRLTKLVVDSHVQYRLGNVDAFQLADGLQYIFAHVGQLTGMYRYKYKLMRQIRMCKDLKHLIYYRFNTGPVGKGPGCGFWAAGWRVWLFFMRGITPLLERWLGNLLARQFEGEWFSLCPTSPVIASKVPAPVGVCSLLLYEHSSYWIAFRSSSEMSLTSILFLGLPSGALRGSHAFAGVEIPQKHSCECFKVARLFAYAGHRDALLIPNFINNHNELRSMKVETLIESKESSLESPWDTLLPGRHSKGVAKTVTKQRVESHFDLELRAAVMHDILDMMPEGIKQNKARTILQHLSEAWRCWKANIPWKVPGLPTPIENMILRYVKAKADWWTNTAHYNRERIRRGATVDKTVCKKNLGRLTRLYLKAEQERQHNYLKDGPYITAEEAVAVYTTTVHWLESRRFSPIPFPPLSYKHDTKLLILALERLKEAYSVKSRLNQSQREELGLIEQAYDNPHEALSRIKRHLLTQRAFKEVGIEFMDLYSHLVPVYDVEPLEKITDAYLDQYLWYEADKRRLFPPWIKPADTEPPPLLVYKWCQGINNLQDVWETSEGECNVMLESRFEKMYEKIDLTLLNRLLRLIVDHNIADYMTAKNNVVINYKDMNHTNSYGIIRGLQFASFIVQYYGLVMDLLVLGLHRASEMAGPPQMPNDFLSFQDIATEAAHPIRLFCRYIDRIHIFFRFTADEARDLIQRYLTEHPDPNNENIVGYNNKKCWPRDARMRLMKHDVNLGRAVFWDIKNRLPRSVTTVQWENSFVSVYSKDNPNLLFNMCGFECRILPKCRTSYEEFTHKDGVWNLQNEVTKERTAQCFLRVDDESMQRFHNRVRQILMASGSTTFTKIVNKWNTALIGLMTYFREAVVNTQELLDLLVKCENKIQTRIKIGLNSKMPSRFPPVVFYTPKELGGLGMLSMGHVLIPQSDLRWSKQTDVGITHFRSGMSHEEDQLIPNLYRYIQPWESEFIDSQRVWAEYALKRQEAIAQNRRLTLEDLEDSWDRGIPRINTLFQKDRHTLAYDKGWRVRTDFKQYQVLKQNPFWWTHQRHDGKLWNLNNYRTDMIQALGGVEGILEHTLFKGTYFPTWEGLFWEKASGFEESMKWKKLTNAQRSGLNQIPNRRFTLWWSPTINRANVYVGFQVQLDLTGIFMHGKIPTLKISLIQIFRAHLWQKIHESIVMDLCQVFDQELDALEIETVQKETIHPRKSYKMNSSCADILLFASYKWNVSRPSLLADSKDVMDSTTTQKYWIDIQLRWGDYDSHDIERYARAKFLDYTTDNMSIYPSPTGVLIAIDLAYNLHSAYGNWFPGSKPLIQQAMAKIMKANPALYVLRERIRKGLQLYSSEPTEPYLSSQNYGELFSNQIIWFVDDTNVYRVTIHKTFEGNLTTKPINGAIFIFNPRTGQLFLKIIHTSVWAGQKRLGQLAKWKTAEEVAALIRSLPVEEQPKQIIVTRKGMLDPLEVHLLDFPNIVIKGSELQLPFQACLKVEKFGDLILKATEPQMVLFNLYDDWLKTISSYTAFSRLILILRALHVNNDRAKVILKPDKTTITEPHHIWPTLTDEEWIKVEVQLKDLILADYGKKNNVNVASLTQSEIRDIILGMEISAPSQQRQQIAEIEKQTKEQSQLTATQTRTVNKHGDEIITSTTSNYETQTFSSKTEWRVRAISAANLHLRTNHIYVSSDGIQEETIHIPNDQAGDLDMYEI

SEQ ID NO: 795783 - protein, 426 aa, Homo sapiens
GLCSFGVFALLGSLLKTISSYTAFSRLILILRALHVNNDRAKVILKPDKTTITEPHHIWPTLTDEEWIKVEVQLKDLILADYGKKNNVNVASLTQSEIRDIILGMEISAPSQQRQQIAEIEKQTKEQSQLTATQTRTVNKHGDEIITSTTSNYETQTFSSKTEWRVRAISAANLHLRTNHIYVSSDDIKETGYTYILPKNVLKKFICISDLRAQIAGYLYGVSPPDNPQVKEIRCIVMVPQWGTHQTVHLPGQLPQHEYLKEMEPLGWIHTQPNESPQLSPQDVTTHAKIMADNPSWDGEKTIIITCSFTPGSCTLTAYKLTPSGYEWGRQNTDKGNNPKGYLPSHYERVQMLLSDRFLGFFMVPAQSSWNYNFMGVRHDPNMKYELQLANPKEFYHEVHRPSHFLNFALLQEGEVYSADREDLYA

SEQ ID NO: 795784 - protein, 1617 aa, Homo sapiens
MAGVFPYRGPGNPVPGPLAPLPDYMSEEKLQEKARKWQQLQAKRYAEKRKFGFVDAQKEDMPPEHVRKIIRDHGDMTNRKFRHDKRVYLGALKYMPHAVLKLLENMPMPWEQIRDVPVLYHITGAISFVNEIPWVIEPVYISQWGSMWIMMRREKRDRRHFKRMRFPPFDDEEPPLDYADNILDVEPLEAIQLELDPEEDAPVLDWFYDHQPLRDSRKYVNGSTYQRWQFTLPMMSTLYRLANQLLTDLVDDNYFYLFDLKAFFTSKALNMAIPGGPKFEPLVRDINLQDEDWNEFNDINKIIIRQPIRTEYKIAFPYLYNNLPHHVHLTWYHTPNVVFIKTEDPDLPAFYFDPLINPISHRHSVKSQEPLPDDDEEFELPEFVEPFLKDTPLYTDNTANGIALLWAPRPFNLRSGRTRRALDIPLVKNWYREHCPAGQPVKVRVSYQKLLKYYVLNALKHRPPKAQKKRYLFRSFKATKFFQSTKLDWVEVGLQVCRQGYNMLNLLIHRKNLNYLHLDYNFNLKPVKTLTTKERKKSRFGNAFHLCREVLRLTKLVVDSHVQYRLGNVDAFQLADGLQYIFAHVGQLTGMYRYKYKLMRQIRMCKDLKHLIYYRFNTGPVGKGPGCGFWAAGWRVWLFFMRGITPLLERWLGNLLARQFEGEWFSLCPTSPVIASKVPAPVGVCSLLLYEHSSYWIAFRSSSEMSLTSILFLGLPSGALRGSHAFAGVEIPQKHSCECFKVARLFAYAGHRDALLIPNFINNHNELRSMKVETLIESKESSLESPWDTLLPGRHSKGVAKTVTKQRVESHFDLELRAAVMHDILDMMPEGIKQNKARTILQHLSEAWRCWKANIPWKVPGLPTPIENMILRYVKAKADWWTNTAHYNRERIRRGATVDKTVCKKNLGRLTRLYLKAEQERQHNYLKDGPYITAEEAVAVYTTTVHWLESRRFSPIPFPPLSYKHDTKLLILALERLKEAYSVKSRLNQSQREELGLIEQAYDNPHEALSRIKRHLLTQRAFKEVGIEFMDLYSHLVPVYDVEPLEKITDAYLDQYLWYEADKRRLFPPWIKPADTEPPPLLVYKWCQGINNLQDVWETSEGECNVMLESRFEKMYEKIDLTLLNRLLRLIVDHNIADYMTAKNNVVINYKDMNHTNSYGIIRGLQFASFIVQYYGLVMDLLVLGLHRASEMAGPPQMPNDFLSFQDIATEAAHPIRLFCRYIDRIHIFFSEGFPGFLALQGTEACALPLKSAIVPEFDLTAVGALKWNEAAGCGYSTPVIPALWEAEAGGSRGQEIETILANTVNPVSTKNNKKLAAARVTATQTRTVNKHGDEIITSTTSNYETQTFSSKTEWRVRAISAANLHLRTNHIYVSSDDIKETGYTYILPKNVLKKFICISDLRAQIAGYLYGVSPPDNPQVKEIRCIVMVPQWGTHQTVHLPGQLPQHEYLKEMEPLGWIHTQPNESPQLSPQDVTTHAKIMADNPSWDGEKTIIITCSFTPGSCTLTAYKLTPSGYEWGRQNTDKGNNPKGYLPSHYERVQMLLSDRFLGFFMVPAQSSWNYNFMGVRHDPNMKYELQLANPKEFYHEVHRPSHFLNFALLQEGEVYSADREDLYA

SEQ ID NO: 795785 - protein, 2043 aa, Homo sapiens
MAGVFPYRGPGNPVPGPLAPLPDYMSEEKLQEKARKWQQLQAKRYAEKRKFGFVDAQKEDMPPEHVRKIIRDHGDMTNRKFRHDKRVYLGALKYMPHAVLKLLENMPMPWEQIRDVPVLYHITGAISFVNEIPWVIEPVYISQWGSMWIMMRREKRDRRHFKRMRFPPFDDEEPPLDYADNILDVEPLEAIQLELDPEEDAPVLDWFYDHQPLRDSRKYVNGSTYQRWQFTLPMMSTLYRLANQLLTDLVDDNYFYLFDLKAFFTSKALNMAIPGGPKFEPLVRDINLQDEDWNEFNDINKIIIRQPIRTEYKIAFPYLYNNLPHHVHLTWYHTPNVVFIKTEDPDLPAFYFDPLINPISHRHSVKSQEPLPDDDEEFELPEFVEPFLKDTPLYTDNTANGIALLWAPRPFNLRSGRTRRALDIPLVKNWYREHCPAGQPVKVRVSYQKLLKYYVLNALKHRPPKAQKKRYLFRSFKATKFFQSTKLDWVEVGLQVCRQGYNMLNLLIHRKNLNYLHLDYNFNLKPVKTLTTKERKKSRFGNAFHLCREVLRLTKLVVDSHVQYRLGNVDAFQLADGLQYIFAHVGQLTGMYRYKYKLMRQIRMCKDLKHLIYYRFNTGPVGKGPGCGFWAAGWRVWLFFMRGITPLLERWLGNLLARQFEGEWFSLCPTSPVIASKVPAPVGVCSLLLYEHSSYWIAFRSSSEMSLTSILFLGLPSGALRGSHAFAGVEIPQKHSCECFKVARLFAYAGHRDALLIPNFINNHNELRSMKVETLIESKESSLESPWDTLLPGRHSKGVAKTVTKQRVESHFDLELRAAVMHDILDMMPEGIKQNKARTILQHLSEAWRCWKANIPWKVPGLPTPIENMILRYVKAKADWWTNTAHYNRERIRRGATVDKTVCKKNLGRLTRLYLKAEQERQHNYLKDGPYITAEEAVAVYTTTVHWLESRRFSPIPFPPLSYKHDTKLLILALERLKEAYSVKSRLNQSQREELGLIEQAYDNPHEALSRIKRHLLTQRAFKEVGIEFMDLYSHLVPVYDVEPLEKITDAYLDQYLWYEADKRRLFPPWIKPADTEPPPLLVYKWCQGINNLQDVWETSEGECNVMLESRFEKMYEKIDLTLLNRLLRLIVDHNIADYMTAKNNVVINYKDMNHTNSYGIIRGLQFASFIVQYYGLVMDLLVLGLHRASEMAGPPQMPNDFLSFQDIATEAAHPIRLFCRYIDRIHIFFRFTADEARDLIQRYLTEHPDPNNENIVGYNNKKCWPRDARMRLMKHDVNLGRAVFWDIKNRLPRSVTTVQWENSFVSVYSKDNPNLLFNMCGFECRILPKCRTSYEEFTHKDGVWNLQNEVTKERTAQCFLRVDDESMQRFHNRVRQILMASGSTTFTKIVNKWNTALIGLMTYFREAVVNTQELLDLLVKCENKIQTRIKIGLNSKMPSRFPPVVFYTPKELGGLGMLSMGHVLIPQSDLRWSKQTDVGITHFRSGMSHEEDQLIPNLYRYIQPWESEFIDSQRVWAEYALKRQEAIAQNRRLTLEDLEDSWDRGIPRINTLFQKDRHTLAYDKGWRVRTDFKQYQVLKQNPFWWTHQRHDGKLWNLNNYRTDMIQALGGVEGILEHTLFKGTYFPTWEGLFWEKASGFEESMKWKKLTNAQRSGLNQIPNRRFTLWWSPTINRANVYVGFQVQLDLTGIFMHGKIPTLKISLIQIFRAHLWQKIHESIVMDLCQVFDQELDALEIETVQKETIHPRKSYKMNSSCADILLFASYKWNVSRPSLLADSKDVMDSTTTQKYWIDIQLRWGDYDSHDIERYARAKFLDYTTDNMSIYPSPTGVLIAIDLAYNLHSAYGNWFPGSKPLIQQAMAKIMKANPALYVLRERIRKGLQLYSSEPTEPYLSSQNYGELFSNQIIWFVDDTNVYRVTIHKTFEGNLTTKPINGAIFIFNPRTGQLFLKIIHTSVWAGQKRLGQLAKWKTAEEVAALIRSLPVEEQPKQIIVTRKGMLDPLECLYWTSPILSQGPELHPSGVFRGNPGSLNLGPWFLLLGS

SEQ ID NO: 795786 - protein, 359 aa, Homo sapiens
  misc_feature (5)..(5): Xaa can be any naturally occurring amino acid
KLPQXIVLRQLDSGGGDKRQDYRESCQCGGCIGEVGTPFFEDLAAPVPPAHGAESAALMQRTLTATQTRTVNKHGDEIITSTTSNYETQTFSSKTEWRVRAISAANLHLRTNHIYVSSDDIKETGYTYILPKNVLKKFICISDLRAQIAGYLYGVSPPDNPQVKEIRCIVMVPQWGTHQTVHLPGQLPQHEYLKEMEPLGWIHTQPNESPQLSPQDVTTHAKIMADNPSWDGEKTIIITCSFTPGSCTLTAYKLTPSGYEWGRQNTDKGNNPKGYLPSHYERVQMLLSDRFLGFFMVPAQSSWNYNFMGVRHDPNMKYELQLANPKEFYHEVHRPSHFLNFALLQEGEVYSADREDLYA

SEQ ID NO: 795787 - protein, 310 aa, Homo sapiens
SLHRAQGGCWKPDVTATQTRTVNKHGDEIITSTTSNYETQTFSSKTEWRVRAISAANLHLRTNHIYVSSDDIKETGYTYILPKNVLKKFICISDLRAQIAGYLYGVSPPDNPQVKEIRCIVMVPQWGTHQTVHLPGQLPQHEYLKEMEPLGWIHTQPNESPQLSPQDVTTHAKIMADNPSWDGEKTIIITCSFTPGSCTLTAYKLTPSGYEWGRQNTDKGNNPKGYLPSHYERVQMLLSDRFLGFFMVPAQSSWNYNFMGVRHDPNMKYELQLANPKEFYHEVHRPSHFLNFALLQEGEVYSADREDLYA

SEQ ID NO: 795788 - protein, 1989 aa, Homo sapiens
  misc_feature (1970)..(1970): Xaa can be any naturally occurring amino acid
  misc_feature (1973)..(1973): Xaa can be any naturally occurring amino acid
MAGVFPYRGPGNPVPGPLAPLPDYMSEEKLQEKARKWQQLQAKRYAEKRKFGFVDAQKEDMPPEHVRKIIRDHGDMTNRKFRHDKRVYLGALKYMPHAVLKLLENMPMPWEQIRDVPVLYHITGAISFVNEIPWVIEPVYISQWGSMWIMMRREKRDRRHFKRMRFPPFDDEEPPLDYADNILDVEPLEAIQLELDPEEDAPVLDWFYDHQPLRDSRKYVNGSTYQRWQFTLPMMSTLYRLANQLLTDLVDDNYFYLFDLKAFFTSKALNMAIPGGPKFEPLVRDINLQDEDWNEFNDINKIIIRQPIRTEYKIAFPYLYNNLPHHVHLTWYHTPNVVFIKTEDPDLPAFYFDPLINPISHRHSVKSQEPLPDDDEEFELPEFVEPFLKDTPLYTDNTANGIALLWAPRPFNLRSGRTRRALDIPLVKNWYREHCPAGQPVKVRVSYQKLLKYYVLNALKHRPPKAQKKRYLFRSFKATKFFQSTKLDWVEVGLQVCRQGYNMLNLLIHRKNLNYLHLDYNFNLKPVKTLTTKERKKSRFGNAFHLCREVLRLTKLVVDSHVQYRLGNVDAFQLADGLQYIFAHVGQLTGMYRYKYKLMRQIRMCKDLKHLIYYRFNTGPVGKGPGCGFWAAGWRVWLFFMRGITPLLERWLGNLLARQFEGEWFSLCPTSPVIASKVPAPVGVCSLLLYEHSSYWIAFRSSSEMSLTSILFLGLPSGALRGSHAFAGVEIPQKHSCECFKVARLFAYAGHRDALLIPNFINNHNELRSMKVETLIESKESSLESPWDTLLPGRHSKGVAKTVTKQRVESHFDLELRAAVMHDILDMMPEGIKQNKARTILQHLSEAWRCWKANIPWKVPGLPTPIENMILRYVKAKADWWTNTAHYNRERIRRGATVDKTVCKKNLGRLTRLYLKAEQERQHNYLKDGPYITAEEAVAVYTTTVHWLESRRFSPIPFPPLSYKHDTKLLILALERLKEAYSVKSRLNQSQREELGLIEQAYDNPHEALSRIKRHLLTQRAFKEVGIEFMDLYSHLVPVYDVEPLEKITDAYLDQYLWYEADKRRLFPPWIKPADTEPPPLLVYKWCQGINNLQDVWETSEGECNVMLESRFEKMYEKIDLTLLNRLLRLIVDHNIADYMTAKNNVVINYKDMNHTNSYGIIRGLQFASFIVQYYGLVMDLLVLGLHRASEMAGPPQMPNDFLSFQDIATEAAHPIRLFCRYIDRIHIFFRFTADEARDLIQRYLTEHPDPNNENIVGYNNKKCWPRDARMRLMKHDVNLGRAVFWDIKNRLPRSVTTVQWENSFVSVYSKDNPNLLFNMCGFECRILPKCRTSYEEFTHKDGVWNLQNEVTKERTAQCFLRVDDESMQRFHNRVRQILMASGSTTFTKIVNKWNTALIGLMTYFREAVVNTQELLDLLVKCENKIQTRIKIGLNSKMPSRFPPVVFYTPKELGGLGMLSMGHVLIPQSDLRWSKQTDVGITHFRSGMSHEEDQLIPNLYRYIQPWESEFIDSQRVWAEYALKRQEAIAQNRRLTLEDLEDSWDRGIPRINTLFQKDRHTLAYDKGWRVRTDFKQYQVLKQNPFWWTHQRHDGKLWNLNNYRTDMIQALGGVEGILEHTLFKGTYFPTWEGLFWEKASGFEESMKWKKLTNAQRSGLNQIPNRRFTLWWSPTINRANVYVGFQVQLDLTGIFMHGKIPTLKISLIQIFRAHLWQKIHESIVMDLCQVFDQELDALEIETVQKETIHPRKSYKMNSSCADILLFASYKWNVSRPSLLADSKDVMDSTTTQKYWIDIQLRWGDYDSHDIERYARAKFLDYTTDNMSIYPSPTGVLIAIDLAYNLHSAYGNWFPGSKPLIQQAMAKIMKANPALYVLRERIRKGLQLYSSEPTEPYLSSQNYGELFSNQIIWFVDDTNVYRVTIHKTFEGNLTTKPINGAIFIFNPRTGQLFLKIIHTSVWAGQKRLGQIGLXWEXNLRKVGPAPGTRTFGL

SEQ ID NO: 795789 - protein, 267 aa, Homo sapiens
RGRGYSDEAISAANLHLRTNHIYVSSDDIKETGYTYILPKNVLKKFICISDLRAQIAGYLYGVSPPDNPQVKEIRCIVMVPQWGTHQTVHLPGQLPQHEYLKEMEPLGWIHTQPNESPQLSPQDVTTHAKIMADNPSWDGEKTIIITCSFTPGSCTLTAYKLTPSGYEWGRQNTDKGNNPKGYLPSHYERVQMLLSDRFLGFFMVPAQSSWNYNFMGVRHDPNMKYELQLANPKEFYHEVHRPSHFLNFALLQEGEVYSADREDLYA

SEQ ID NO: 795790 - protein, 274 aa, Homo sapiens
DAWVDPRVRTEWRVRAISAANLHLRTNHIYVSSDDIKETGYTYILPKNVLKKFICISDLRAQIAGYLYGVSPPDNPQVKEIRCIVMVPQWGTHQTVHLPGQLPQHEYLKEMEPLGWIHTQPNESPQLSPQDVTTHAKIMADNPSWDGEKTIIITCSFTPGSCTLTAYKLTPSGYEWGRQNTDKGNNPKGYLPSHYERVQMLLSDRFLGFFMVPAQSSWNYNFMGVRHDPNMKYELQLANPKEFYHEVHRPSHFLNFALLQEGEVYSADREDLYA

SEQ ID NO: 795791 - protein, 254 aa, Homo sapiens
TRGSTHASGLSGGSDIKETGYTYILPKNVLKKFICISDLRAQIAGYLYGVSPPDNPQVKEIRCIVMVPQWGTHQTVHLPGQLPQHEYLKEMEPLGWIHTQPNESPQLSPQDVTTHAKIMADNPSWDGEKTIIITCSFTPGSCTLTAYKLTPSGYEWGRQNTDKGNNPKGYLPSHYERVQMLLSDRFLGFFMVPAQSSWNYNFMGVRHDPNMKYELQLANPKEFYHEVHRPSHFLNFALLQEGEVYSADREDLYA

SEQ ID NO: 795792 - protein, 246 aa, Homo sapiens
MTLTTFTETGLLPYYLAHEECLRITSSIHTFGSQIAGYLYGVSPPDNPQVKEIRCIVMVPQWGTHQTVHLPGQLPQHEYLKEMEPLGWIHTQPNESPQLSPQDVTTHAKIMADNPSWDGEKTIIITCSFTPGSCTLTAYKLTPSGYEWGRQNTDKGNNPKGYLPSHYERVQMLLSDRFLGFFMVPAQSSWNYNFMGVRHDPNMKYELQLANPKEFYHEVHRPSHFLNFALLQEGEVYSADREDLYA

SEQ ID NO: 795793 - protein, 227 aa, Homo sapiens
PSFRSFNSISDLRAQIAGYLYGVSPPDNPQVKEIRCIVMVPQWGTHQTVHLPGQLPQHEYLKEMEPLGWIHTQPNESPQLSPQDVTTHAKIMADNPSWDGEKTIIITCSFTPGSCTLTAYKLTPSGYEWGRQNTDKGNNPKGYLPSHYERVQMLLSDRFLGFFMVPAQSSWNYNFMGVRHDPNMKYELQLANPKEFYHEVHRPSHFLNFALLQEGEVYSADREDLYA

SEQ ID NO: 795794 - protein, 1634 aa, Homo sapiens
MAGVFPYRGPGNPVPGPLAPLPDYMSEEKLQEKARKWQQLQAKRYAEKRKFGFVDAQKEDMPPEHVRKIIRDHGDMTNRKFRHDKRVYLGALKYMPHAVLKLLENMPMPWEQIRDVPVLYHITGAISFVNEIPWVIEPVYISQWGSMWIMMRREKRDRRHFKRMRFPPFDDEEPPLDYADNILDVEPLEAIQLELDPEEDAPVLDWFYDHQPLRDSRKYVNGSTYQRWQFTLPMMSTLYRLANQLLTDLVDDNYFYLFDLKAFFTSKALNMAIPGGPKFEPLVRDINLQDEDWNEFNDINKIIIRQPIRTEYKIAFPYLYNNLPHHVHLTWYHTPNVVFIKTEDPDLPAFYFDPLINPISHRHSVKSQEPLPDDDEEFELPEFVEPFLKDTPLYTDNTANGIALLWAPRPFNLRSGRTRRALDIPLVKNWYREHCPAGQPVKVRVSYQKLLKYYVLNALKHRPPKAQKKRYLFRSFKATKFFQSTKLDWVEVGLQVCRQGYNMLNLLIHRKNLNYLHLDYNFNLKPVKTLTTKERKKSRFGNAFHLCREVLRLTKLVVDSHVQYRLGNVDAFQLADGLQYIFAHVGQLTGMYRYKYKLMRQIRMCKDLKHLIYYRFNTGPVGKGPGCGFWAAGWRVWLFFMRGITPLLERWLGNLLARQFEGEWFSLCPTSPVIASKVPAPVGVCSLLLYEHSSYWIAFRSSSEMSLTSILFLGLPSGALRGSHAFAGVEIPQKHSCECFKVARLFAYAGHRDALLIPNFINNHNELRSMKVETLIESKESSLESPWDTLLPGRHSKGVAKTVTKQRVESHFDLELRAAVMHDILDMMPEGIKQNKARTILQHLSEAWRCWKANIPWKVPGLPTPIENMILRYVKAKADWWTNTAHYNRERIRRGATVDKTVCKKNLGRLTRLYLKAEQERQHNYLKDGPYITAEEAVAVYTTTVHWLESRRFSPIPFPPLSYKHDTKLLILALERLKEAYSVKSRLNQSQREELGLIEQAYDNPHEALSRIKRHLLTQRAFKEVGIEFMDLYSHLVPVYDVEPLEKITDAYLDQYLWYEADKRRLFPPWIKPADTEPPPLLVYKWCQGINNLQDVWETSEGECNVMLESRFEKMYEKIDLTLLNRLLRLIVDHNIADYMTAKNNVVINYKDMNHTNSYGIIRGLQFASFIVQYYGLVMDLLVLGLHRASEMAGPPQMPNDFLSFQDIATEAAHPIRLFCRYIDRIHIFFRFTADEARDLIQRYLTEHPDPNNENIVGYNNKKCWPRDARMRLMKHDVNLGRAVFWDIKNRLPRSVTTVQWENSFVSVYSKDNPNLLFNMCGFECRILPKCRTSYEEFTHKDGVWNLQNEVTKERTAQCFLRVDDESMQRFHNRVRQILMASGSTTFTKIVNKWNTALIGLMTYFREAVVNTQELLDLLVKCENKIQTRIKIGLNSKMPSRFPPVVFYTPKELGGLGMLSMGHVLIPQSDLRWSKQTDVGITHFRSGMSHEEDQLIPNLYRYIQPWESEFIDSQRVWAEYALKRQEAIAQNRRLTLEDLEDSWDRGIPRINTLFQKDRHTLAYDKGWRVRTDFKQYQVLKQNPFWWTHQRHDGKLWNLNNYRTDMIQALGGVEGILEHTLFKGTYFPTWEGLFW

SEQ ID NO: 795795 - protein, 1545 aa, Homo sapiens
MAGVFPYRGPGNPVPGPLAPLPDYMSEEKLQEKARKWQQLQAKRYAEKRKFGFVDAQKEDMPPEHVRKIIRDHGDMTNRKFRHDKRVYLGALKYMPHAVLKLLENMPMPWEQIRDVPVLYHITGAISFVNEIPWVIEPVYISQWGSMWIMMRREKRDRRHFKRMRFPPFDDEEPPLDYADNILDVEPLEAIQLELDPEEDAPVLDWFYDHQPLRDSRKYVNGSTYQRWQFTLPMMSTLYRLANQLLTDLVDDNYFYLFDLKAFFTSKALNMAIPGGPKFEPLVRDINLQDEDWNEFNDINKIIIRQPIRTEYKIAFPYLYNNLPHHVHLTWYHTPNVVFIKTEDPDLPAFYFDPLINPISHRHSVKSQEPLPDDDEEFELPEFVEPFLKDTPLYTDNTANGIALLWAPRPFNLRSGRTRRALDIPLVKNWYREHCPAGQPVKVRVSYQKLLKYYVLNALKHRPPKAQKKRYLFRSFKATKFFQSTKLDWVEVGLQVCRQGYNMLNLLIHRKNLNYLHLDYNFNLKPVKTLTTKERKKSRFGNAFHLCREVLRLTKLVVDSHVQYRLGNVDAFQLADGLQYIFAHVGQLTGMYRYKYKLMRQIRMCKDLKHLIYYRFNTGPVGKGPGCGFWAAGWRVWLFFMRGITPLLERWLGNLLARQFEGEWFSLCPTSPVIASKVPAPVGVCSLLLYEHSSYWIAFRSSSEMSLTSILFLGLPSGALRGSHAFAGVEIPQKHSCECFKVARLFAYAGHRDALLIPNFINNHNELRSMKVETLIESKESSLESPWDTLLPGRHSKGVAKTVTKQRVESHFDLELRAAVMHDILDMMPEGIKQNKARTILQHLSEAWRCWKANIPWKVPGLPTPIENMILRYVKAKADWWTNTAHYNRERIRRGATVDKTVCKKNLGRLTRLYLKAEQERQHNYLKDGPYITAEEAVAVYTTTVHWLESRRFSPIPFPPLSYKHDTKLLILALERLKEAYSVKSRLNQSQREELGLIEQAYDNPHEALSRIKRHLLTQRAFKEVGIEFMDLYSHLVPVYDVEPLEKITDAYLDQYLWYEADKRRLFPPWIKPADTEPPPLLVYKWCQGINNLQDVWETSEGECNVMLESRFEKMYEKIDLTLLNRLLRLIVDHNIADYMTAKNNVVINYKDMNHTNSYGIIRGLQFASFIVQYYGLVMDLLVLGLHRASEMAGPPQMPNDFLSFQDIATEAAHPIRLFCRYIDRIHIFFRFTADEARDLIQRYLTEHPDPNNENIVGYNNKKCWPRDARMRLMKHDVNLGRAVFWDIKNRLPRSVTTVQWENSFVSVYSKDNPNLLFNMCGFECRILPKCRTSYEEFTHKDGVWNLQNEVTKERTAQCFLRVDDESMQRFHNRVRQILMASGSTTFTKIVNKWNTALIGLMTYFREAVVNTQELLDLLVKCENKIQTRIKIGLNSKMPSRFPPVVFYTPKELGGLGMLSMGHVLIPQSDLRWSKQTDVGITHFRSGMSHEEDQLIPNLYRYIQPWESEFIDSQRVWAEYALKRQEAIAQNRRPDCQTSVEYASS

SEQ ID NO: 795796 - protein, 1448 aa, Homo sapiens
MAGVFPYRGPGNPVPGPLAPLPDYMSEEKLQEKARKWQQLQAKRYAEKRKFGFVDAQKEDMPPEHVRKIIRDHGDMTNRKFRHDKRVYLGALKYMPHAVLKLLENMPMPWEQIRDVPVLYHITGAISFVNEIPWVIEPVYISQWGSMWIMMRREKRDRRHFKRMRFPPFDDEEPPLDYADNILDVEPLEAIQLELDPEEDAPVLDWFYDHQPLRDSRKYVNGSTYQRWQFTLPMMSTLYRLANQLLTDLVDDNYFYLFDLKAFFTSKALNMAIPGGPKFEPLVRDINLQDEDWNEFNDINKIIIRQPIRTEYKIAFPYLYNNLPHHVHLTWYHTPNVVFIKTEDPDLPAFYFDPLINPISHRHSVKSQEPLPDDDEEFELPEFVEPFLKDTPLYTDNTANGIALLWAPRPFNLRSGRTRRALDIPLVKNWYREHCPAGQPVKVRVSYQKLLKYYVLNALKHRPPKAQKKRYLFRSFKATKFFQSTKLDWVEVGLQVCRQGYNMLNLLIHRKNLNYLHLDYNFNLKPVKTLTTKERKKSRFGNAFHLCREVLRLTKLVVDSHVQYRLGNVDAFQLADGLQYIFAHVGQLTGMYRYKYKLMRQIRMCKDLKHLIYYRFNTGPVGKGPGCGFWAAGWRVWLFFMRGITPLLERWLGNLLARQFEGEWFSLCPTSPVIASKVPAPVGVCSLLLYEHSSYWIAFRSSSEMSLTSILFLGLPSGALRGSHAFAGVEIPQKHSCECFKVARLFAYAGHRDALLIPNFINNHNELRSMKVETLIESKESSLESPWDTLLPGRHSKGVAKTVTKQRVESHFDLELRAAVMHDILDMMPEGIKQNKARTILQHLSEAWRCWKANIPWKVPGLPTPIENMILRYVKAKADWWTNTAHYNRERIRRGATVDKTVCKKNLGRLTRLYLKAEQERQHNYLKDGPYITAEEAVAVYTTTVHWLESRRFSPIPFPPLSYKHDTKLLILALERLKEAYSVKSRLNQSQREELGLIEQAYDNPHEALSRIKRHLLTQRAFKEVGIEFMDLYSHLVPVYDVEPLEKITDAYLDQYLWYEADKRRLFPPWIKPADTEPPPLLVYKWCQGINNLQDVWETSEGECNVMLESRFEKMYEKIDLTLLNRLLRLIVDHNIADYMTAKNNVVINYKDMNHTNSYGIIRGLQFASFIVQYYGLVMDLLVLGLHRASEMAGPPQMPNDFLSFQDIATEAAHPIRLFCRYIDRIHIFFRFTADEARDLIQRYLTEHPDPNNENIVGYNNKKCWPRDARMRLMKHDVNLGRAVFWDIKNRLPRSVTTVQWENSFVSVYSKDNPNLLFNMCGFECRILPKCRTSYEEFTHKDGVWNLQNEVTKERTAQCFLRVDDESMQRFHNRVRQILMASGSTTFTKVQGRHAQLPSCPLLSSAHFTPLSLRPLLAASFSSLLSVPVSMLCAIVAYSMSGHFIVIF

SEQ ID NO: 795797 - protein, 1358 aa, Homo sapiens
MAGVFPYRGPGNPVPGPLAPLPDYMSEEKLQEKARKWQQLQAKRYAEKRKFGFVDAQKEDMPPEHVRKIIRDHGDMTNRKFRHDKRVYLGALKYMPHAVLKLLENMPMPWEQIRDVPVLYHITGAISFVNEIPWVIEPVYISQWGSMWIMMRREKRDRRHFKRMRFPPFDDEEPPLDYADNILDVEPLEAIQLELDPEEDAPVLDWFYDHQPLRDSRKYVNGSTYQRWQFTLPMMSTLYRLANQLLTDLVDDNYFYLFDLKAFFTSKALNMAIPGGPKFEPLVRDINLQDEDWNEFNDINKIIIRQPIRTEYKIAFPYLYNNLPHHVHLTWYHTPNVVFIKTEDPDLPAFYFDPLINPISHRHSVKSQEPLPDDDEEFELPEFVEPFLKDTPLYTDNTANGIALLWAPRPFNLRSGRTRRALDIPLVKNWYREHCPAGQPVKVRVSYQKLLKYYVLNALKHRPPKAQKKRYLFRSFKATKFFQSTKLDWVEVGLQVCRQGYNMLNLLIHRKNLNYLHLDYNFNLKPVKTLTTKERKKSRFGNAFHLCREVLRLTKLVVDSHVQYRLGNVDAFQLADGLQYIFAHVGQLTGMYRYKYKLMRQIRMCKDLKHLIYYRFNTGPVGKGPGCGFWAAGWRVWLFFMRGITPLLERWLGNLLARQFEGEWFSLCPTSPVIASKVPAPVGVCSLLLYEHSSYWIAFRSSSEMSLTSILFLGLPSGALRGSHAFAGVEIPQKHSCECFKVARLFAYAGHRDALLIPNFINNHNELRSMKVETLIESKESSLESPWDTLLPGRHSKGVAKTVTKQRVESHFDLELRAAVMHDILDMMPEGIKQNKARTILQHLSEAWRCWKANIPWKVPGLPTPIENMILRYVKAKADWWTNTAHYNRERIRRGATVDKTVCKKNLGRLTRLYLKAEQERQHNYLKDGPYITAEEAVAVYTTTVHWLESRRFSPIPFPPLSYKHDTKLLILALERLKEAYSVKSRLNQSQREELGLIEQAYDNPHEALSRIKRHLLTQRAFKEVGIEFMDLYSHLVPVYDVEPLEKITDAYLDQYLWYEADKRRLFPPWIKPADTEPPPLLVYKWCQGINNLQDVWETSEGECNVMLESRFEKMYEKIDLTLLNRLLRLIVDHNIADYMTAKNNVVINYKDMNHTNSYGIIRGLQFASFIVQYYGLVMDLLVLGLHRASEMAGPPQMPNDFLSFQDIATEAAHPIRLFCRYIDRIHIFFRFTADEARDLIQRYLTEHPDPNNENIVGYNNKKCWPRDARMRLMKHDVNLGRAVFWDIKNRLPRSVTTVQWENSFVSVYSKDNPNLLFNMCGFECRILPKCRTSYEEFTHKDGVWNLQNEVQPGRGWE

SEQ ID NO: 795798 - protein, 1319 aa, Homo sapiens
MAGVFPYRGPGNPVPGPLAPLPDYMSEEKLQEKARKWQQLQAKRYAEKRKFGFVDAQKEDMPPEHVRKIIRDHGDMTNRKFRHDKRVYLGALKYMPHAVLKLLENMPMPWEQIRDVPVLYHITGAISFVNEIPWVIEPVYISQWGSMWIMMRREKRDRRHFKRMRFPPFDDEEPPLDYADNILDVEPLEAIQLELDPEEDAPVLDWFYDHQPLRDSRKYVNGSTYQRWQFTLPMMSTLYRLANQLLTDLVDDNYFYLFDLKAFFTSKALNMAIPGGPKFEPLVRDINLQDEDWNEFNDINKIIIRQPIRTEYKIAFPYLYNNLPHHVHLTWYHTPNVVFIKTEDPDLPAFYFDPLINPISHRHSVKSQEPLPDDDEEFELPEFVEPFLKDTPLYTDNTANGIALLWAPRPFNLRSGRTRRALDIPLVKNWYREHCPAGQPVKVRVSYQKLLKYYVLNALKHRPPKAQKKRYLFRSFKATKFFQSTKLDWVEVGLQVCRQGYNMLNLLIHRKNLNYLHLDYNFNLKPVKTLTTKERKKSRFGNAFHLCREVLRLTKLVVDSHVQYRLGNVDAFQLADGLQYIFAHVGQLTGMYRYKYKLMRQIRMCKDLKHLIYYRFNTGPVGKGPGCGFWAAGWRVWLFFMRGITPLLERWLGNLLARQFEGEWFSLCPTSPVIASKVPAPVGVCSLLLYEHSSYWIAFRSSSEMSLTSILFLGLPSGALRGSHAFAGVEIPQKHSCECFKVARLFAYAGHRDALLIPNFINNHNELRSMKVETLIESKESSLESPWDTLLPGRHSKGVAKTVTKQRVESHFDLELRAAVMHDILDMMPEGIKQNKARTILQHLSEAWRCWKANIPWKVPGLPTPIENMILRYVKAKADWWTNTAHYNRERIRRGATVDKTVCKKNLGRLTRLYLKAEQERQHNYLKDGPYITAEEAVAVYTTTVHWLESRRFSPIPFPPLSYKHDTKLLILALERLKEAYSVKSRLNQSQREELGLIEQAYDNPHEALSRIKRHLLTQRAFKEVGIEFMDLYSHLVPVYDVEPLEKITDAYLDQYLWYEADKRRLFPPWIKPADTEPPPLLVYKWCQGINNLQDVWETSEGECNVMLESRFEKMYEKIDLTLLNRLLRLIVDHNIADYMTAKNNVVINYKDMNHTNSYGIIRGLQFASFIVQYYGLVMDLLVLGLHRASEMAGPPQMPNDFLSFQDIATEAAHPIRLFCRYIDRIHIFFRFTADEARDLIQRYLTEHPDPNNENIVGYNNKKCWPRDARMRLMKHDVNLGRADPGHQTASTGRDYSQGEQSGLGQEGNHLRQRGPGHT

SEQ ID NO: 795799 - protein, 1158 aa, Homo sapiens
MAGVFPYRGPGNPVPGPLAPLPDYMSEEKLQEKARKWQQLQAKRYAEKRKFGFVDAQKEDMPPEHVRKIIRDHGDMTNRKFRHDKRVYLGALKYMPHAVLKLLENMPMPWEQIRDVPVLYHITGAISFVNEIPWVIEPVYISQWGSMWIMMRREKRDRRHFKRMRFPPFDDEEPPLDYADNILDVEPLEAIQLELDPEEDAPVLDWFYDHQPLRDSRKYVNGSTYQRWQFTLPMMSTLYRLANQLLTDLVDDNYFYLFDLKAFFTSKALNMAIPGGPKFEPLVRDINLQDEDWNEFNDINKIIIRQPIRTEYKIAFPYLYNNLPHHVHLTWYHTPNVVFIKTEDPDLPAFYFDPLINPISHRHSVKSQEPLPDDDEEFELPEFVEPFLKDTPLYTDNTANGIALLWAPRPFNLRSGRTRRALDIPLVKNWYREHCPAGQPVKVRVSYQKLLKYYVLNALKHRPPKAQKKRYLFRSFKATKFFQSTKLDWVEVGLQVCRQGYNMLNLLIHRKNLNYLHLDYNFNLKPVKTLTTKERKKSRFGNAFHLCREVLRLTKLVVDSHVQYRLGNVDAFQLADGLQYIFAHVGQLTGMYRYKYKLMRQIRMCKDLKHLIYYRFNTGPVGKGPGCGFWAAGWRVWLFFMRGITPLLERWLGNLLARQFEGEWFSLCPTSPVIASKVPAPVGVCSLLLYEHSSYWIAFRSSSEMSLTSILFLGLPSGALRGSHAFAGVEIPQKHSCECFKVARLFAYAGHRDALLIPNFINNHNELRSMKVETLIESKESSLESPWDTLLPGRHSKGVAKTVTKQRVESHFDLELRAAVMHDILDMMPEGIKQNKARTILQHLSEAWRCWKANIPWKVPGLPTPIENMILRYVKAKADWWTNTAHYNRERIRRGATVDKTVCKKNLGRLTRLYLKAEQERQHNYLKDGPYITAEEAVAVYTTTVHWLESRRFSPIPFPPLSYKHDTKLLILALERLKEAYSVKSRLNQSQREELGLIEQAYDNPHEALSRIKRHLLTQRAFKEVGIEFMDLYSHLVPVYDVEPLEKITDAYLDQYLWYEADKRRLFPPWIKPADTEPPPLLVYKWCQGINNLQDVWETSEGECNVMLESRFEKMYEKIDLTLLNRLLRLIVDHNIADYMTAKNNVVINYKDAPSCAV

SEQ ID NO: 795800 - protein, 1027 aa, Homo sapiens
MAGVFPYRGPGNPVPGPLAPLPDYMSEEKLQEKARKWQQLQAKRYAEKRKFGFVDAQKEDMPPEHVRKIIRDHGDMTNRKFRHDKRVYLGALKYMPHAVLKLLENMPMPWEQIRDVPVLYHITGAISFVNEIPWVIEPVYISQWGSMWIMMRREKRDRRHFKRMRFPPFDDEEPPLDYADNILDVEPLEAIQLELDPEEDAPVLDWFYDHQPLRDSRKYVNGSTYQRWQFTLPMMSTLYRLANQLLTDLVDDNYFYLFDLKAFFTSKALNMAIPGGPKFEPLVRDINLQDEDWNEFNDINKIIIRQPIRTEYKIAFPYLYNNLPHHVHLTWYHTPNVVFIKTEDPDLPAFYFDPLINPISHRHSVKSQEPLPDDDEEFELPEFVEPFLKDTPLYTDNTANGIALLWAPRPFNLRSGRTRRALDIPLVKNWYREHCPAGQPVKVRVSYQKLLKYYVLNALKHRPPKAQKKRYLFRSFKATKFFQSTKLDWVEVGLQVCRQGYNMLNLLIHRKNLNYLHLDYNFNLKPVKTLTTKERKKSRFGNAFHLCREVLRLTKLVVDSHVQYRLGNVDAFQLADGLQYIFAHVGQLTGMYRYKYKLMRQIRMCKDLKHLIYYRFNTGPVGKGPGCGFWAAGWRVWLFFMRGITPLLERWLGNLLARQFEGEWFSLCPTSPVIASKVPAPVGVCSLLLYEHSSYWIAFRSSSEMSLTSILFLGLPSGALRGSHAFAGVEIPQKHSCECFKVARLFAYAGHRDALLIPNFINNHNELRSMKVETLIESKESSLESPWDTLLPGRHSKGVAKTVTKQRVESHFDLELRAAVMHDILDMMPEGIKQNKARTILQHLSEAWRCWKANIPWKVPGLPTPIENMILRYVKAKADWWTNTAHYNRERIRRGATVDKTVCKKNLGRLTRLYLKAEQERQHNYLKDGPYITAEEAVAVYTTTVHWLESRRFSPIPFPPLSYKHDTKLLILALERLKEAYSVKSRLNQSQREELGLIEQAYDNPHEALSRIKRHLLTQRAFKVFTE

SEQ ID NO: 795801 - protein, 94 aa, Homo sapiens
EDPPLRCVELLPSHYERVQMLLSDRFLGFFMVPAQSSWNYNFMGVRHDPNMKYELQLANPKEFYHEVHRPSHFLNFALLQEGEVYSADREDLYA

SEQ ID NO: 795802 - protein, 378 aa, Homo sapiens
MAGVFPYRGPGNPVPGPLAPLPDYMSEEKLQEKARKWQQLQAKRYAEKRKFGFVDAQKEDMPPEHVRKIIRDHGDMTNRKFRHDKRVYLGALKYMPHAVLKLLENMPMPWEQIRDVPVLYHITGAISFVNEIPWVIEPVYISQWGSMWIMMRREKRDRRHFKRMRFPPFDDEEPPLDYADNILDVEPLEAIQLELDPEEDAPVLDWFYDHQPLRDSRKYVNGSTYQRWQFTLPMMSTLYRLANQLLTDLVDDNYFYLFDLKAFFTSKALNMAIPGGPKFEPLVRDINLQDEDWNEFNDINKIIIRQPIRTEYKIAFPYLYNNLPHHVHLTWYHTPNVVFIKTEDPDLPAFYFDPLINPISHRHSVKVRKGRDAFPQLF

SEQ ID NO: 795803 - protein, 67 aa, Homo sapiens
  misc_feature (17)..(17): Xaa can be any naturally occurring amino acid
HEAGALLTLAVSFSPKXVRHDPNMKYELQLANPKEFYHEVHRPSHFLNFALLQEGEVYSADREDLYA

SEQ ID NO: 795804 - protein, 124 aa, Homo sapiens
MEISAPSQQRQQIAEIEKQTKEQSQLTATQTRTVNKHGDEIITSTTSNYETQTFSSKTEWRVRYCRARGWGWKGRLHYLRCWAERCCHSLPVFRAISAANLHLRTNHIYVSSDDIKETGYTYIL

SEQ ID NO: 795805 - protein, 99 aa, Homo sapiens
MDLYSHLVPVYDVEPLEKITDAYLDQYLWYEADKRRLFPPWIKPADTEPPPLLVYKWCQGRTFMRSPCEERGRNLVLRQKSHLGSMIGLLSGCVVVKGS

SEQ ID NO: 795806 - protein, 116 aa, Homo sapiens
MHLTFLASFLSPVKMQVSDVGNILPVVERVTSPSLITHGKTHEPLNIIIENIWRGIERDKIMPPLIMSNFQCTKPYIVQFSSFPFTHGIEESKLSNSANTGNAAEVIEFSAGRQLP

SEQ ID NO: 795807 - protein, 166 aa, Homo sapiens
AAAGRARGAGDMSRRKQSNPRQIKRSLGDMEAREEVQLVGASHMEQKATAPEAPSPPSADVNSPPPLPPPTSPGGPKELEGQEPEPRPTEEEPGSPWSGPDELEPVVQDGQRRIRARLSLATGLSWGPFHGSVQTRASSPRQAEPSPALTLLVLTRLLAEALPSPD

SEQ ID NO: 795808 - protein, 165 aa, Homo sapiens
AAAGRARGAGDMSRRKQSNPRQIKRSLGDMEAREEVQLVGASHMEQKATAPEAPSPPSADVNSPPPLPPPTSPGGPKELEGQEPEPRPTEEEPGSPWSGPGNHAGGGGSSIASRAAWPGPWEQGDVGAGAGVQVAGDPPGPGLCLVQSSANPCSWWYHWSLAPSR

SEQ ID NO: 795809 - protein, 169 aa, Homo sapiens
AAAGRARGAGDMSRRKQSNPRQIKRSLGDMEAREEVQLVGASHMEQKATAPEAPSPPSADVNSPPPLPPPTSPGGPKELEGQEPEPRPTEEEPGSPWSGPDELEPVVQDGQRRIRARLSLATGLSWGPFHGSVQTRASSPRQAEPMRKLRLQDVKSIAQIPRIKQQREK

SEQ ID NO: 795810 - protein, 162 aa, Homo sapiens
AAAGRARGAGDMSRRKQSNPRQIKRSLGDMEAREEVQLVGASHMEQKATAPEAPSPPSADVNSPPPLPPPTSPGGPKELEGQEPEPRPTEEEPGSPWSGPDELEPVVQDGQRRIRARLSLATGLSWGPFHGSVQTRASSPRQAEPRGAISALAPSVQTHRTR

SEQ ID NO: 795811 - protein, 169 aa, Homo sapiens; identical to SEQ ID NO: 795809

SEQ ID NO: 795812 - protein, 128 aa, Homo sapiens
AAAGRARGAGDMSRRKQSNPRQIKRSLGDMEAREEVQLVGASHMEQKATAPEAPSPPSADELEPVVQDGQRRIRARLSLATGLSWGPFHGSVQTRASSPRQAEPMRKLRLQDVKSIAQIPRIKQQREK

SEQ ID NO: 795813 - protein, 109 aa, Homo sapiens
SPLIFGLFKNERWKGGEWGTMKIQKRAYSLPKSGFFSTGANVPLPQDTLELRRKCFEHCALNNLFKKARKCIIHFAVLQKWLMWLILSLSCISLEKAFMWHGLFTNDAK

SEQ ID NO: 795814 - protein, 107 aa, Homo sapiens
LFSYYVSQFYKRKIVVMKEEVLQSWVKGPGQEHGQATGSGHLWNKISLQLKIPNVYCDQQFQYGDQLTCPSNAKKTTAPETASVRRPRVLARFCRRPAVEQASGARG

SEQ ID NO: 795815 - protein, 104 aa, Homo sapiens
EDQAMRAFELMRSNAALFQLGSAPAVCWIVCTTLKLQMEKGEDPVPTCLTRTGLFLRFLCSRFPQGAQLRGALRTLSLLAAQGLWAQMSVFHREDLERLGVQES

SEQ ID NO: 795816 - protein, 494 aa, Homo sapiens
MLASGLLLVTLLACLTVMVLMSVWRQRKSRGKLPPGPTPLPFIGNYLQLNTEQMYNSLMKISERYGPVFTIHLGPRRVVVLCGHDAVKEALVDQAEEFSGRGEQATFDWLFKGYGVAFSNGERAKQLRRFSIATLRGFGVGKRGIEERIQEEAGFLIDALRGTHGANIDPTFFLSRTVSNVISSIVFGDRFDYEDKEFLSLLRMMLGSFQFTATSTGQLYEMFSSVMKHLPGPQQQAFKELQGLEDFIAKKVEHNQRTLDPNSPRDFIDSFLIRMQEEEKNPNTEFYLKNLVMTTLNLFFAGTETVSTTLRYGFLLLMKHPEVEAKVHEEIDRVIGKNRQPKFEDRAKMPYTEAVIHEIQRFGDMLPMGLAHRVNKDTKFRDFFLPKGTEVFPMLGSVLRDPRFFSNPRDFNPQHFLDKKGQFKKSDAFVPFSIGKRYCFGEGLARMELFLFFTTIMQNFRFKSPQSPKDIDVSPKHVGFATIPRNYTMSFLPR

SEQ ID NO: 795817 - protein, 151 aa, Homo sapiens
GCVANAIVEASPDVVDLNIGEMQCCLLLRWLASALLRLLGAATEKRERVKRAETGCCHHTTEGGPGAQPAEGLRDRWEQDPTTRPMEEEVGRSQKGEEKERCLFVHLVFALRKGGELNEKGGRVEKVLSSFRSTVEQCSSWSTNCLDFILA

SEQ ID NO: 795818 - protein, 247 aa, Homo sapiens
QESSGSSIRRGPPGPPPGFQAWHGSGPMGNCAKRPWRRGPKDPLQWLGSPPRGSCPSPSSSPKEQGDPAPGVQGYSVLNSLVGPACIFLRPSIAATQLDRELRPEEIEELQVAFQEFDRDQDGYIGCRELGACMRTLGYMPTEMELIEISQQISGGKVDFEDFVELMGPKLLAETADMIGVRELRDAFREFDTNGDGRISVGELRAALKALLGERLSQREVDEILQDVDLNGDGLVDFEEFVRMMSR

SEQ ID NO: 795819 - protein, 190 aa, Homo sapiens
QESSGSSIRRGPPGPPPGFQAWHGSGPMGNCAKRPWRRGPKDRELRPEEIEELQVAFQEFDRDQDGYIGCRELGACMRTLGYMPTEMELIEISQQISGGKVDFEDFVELMGPKLLAETADMIGVRELRDAFREFDTNGDGRISVGELRAALKALLGERLSQREVDEILQDVDLNGDGLVDFEEFVRMMSR

SEQ ID NO: 795820 - protein, 88 aa, Homo sapiens
HEVDLDTMRETPREPKYSSNKEEWISLAYRPFLDASRSSKLLRAFYVPFLSDQYTVYVNYTILKPRKAKQIRKKSGDRRRAEPTYRKN

SEQ ID NO: 795821 - protein, 77 aa, Homo sapiens
HEVDLDTMRETPREPKYSSNKEEWISLAYRPFLDASRSSKLLRAFYVPFLSDQYTVYVNYTILKPRKAKQIRKKSGG

SEQ ID NO: 795822 - protein, 217 aa, Homo sapiens
ATRLSLSAILVTSAAALATAPTSPVCSPALALPAMATAQPSQVRQKYDTNCDAAINSHITLELYTSYLYLSMAFYFNRDDVALENFFRYFLRLSDDKMEHAQKLMRLQNLRGGHICLHDIRKPECQGWESGLVAMESAFHLEKNVNQSLLDLYQLAVEKGDPQLCHFLESHYLHEQVKTIKELGGYVSNLRKICSPEAGLAEYLFDKLTLGGRVKET

SEQ ID NO: 795823 - protein, 69 aa, Homo sapiens
QLNRISLCPARPGIPHSFIQATIQCLPSQLCVPDTALTIRSEEVSVNKQGRSFGLALEFLGLGGGKKRS

SEQ ID NO: 795824 - protein, 154 aa, Homo sapiens
  misc_feature (2)..(4): Xaa can be any naturally occurring amino acid
  misc_feature (11)..(11): Xaa can be any naturally occurring amino acid
SXXXLGPGAGXRGGVVLKVSPSPCRAGRRVPVRAEGARGRGPRNKVPGAPSGAAVGAARLTAPLLAKAMASKLLRAVILGPPGSGKGTVCQRIAQNFGLQHLSSGHFLRENIKASTEVGEVAKQYIEKSLLVPDHVITRLMMSELENRRGQHWL

SEQ ID NO: 795825 - protein, 86 aa, Homo sapiens
MASKLLRAVILGPPGSGKGTVCQRIAQNFGLQHLSSGHFLRENIKASTEVGEVAKQYIEKSLLVPDHVITRLMMSELENRRGQHWL

SEQ ID NO: 795826 - protein, 70 aa, Homo sapiens
AFWKMRDHMEQRPMISAEDNFNQFPADPPTDHRCKSELNQDQLRLAQISRTTNPVLSSQTKINFHCYIPL

SEQ ID NO: 795827 - protein, 805 aa, Homo sapiens
PGNPMWTSGRMSNAKNWLGLGMSLYFWGLMDLTTTVLSDTPTPQGELEALLSDKPQSHQRTKRSWVWNQFFVLEEYTGTDPLYVGKLHSDMDRGDGSIKYILSGEGAGIVFTIDDTTGDIHAIQRLDREERAQYTLRAQALDRRTGRPMEPESEFIIKIQDINDNEPKFLDGPYVATVPEMSPVGTSVIQVTATDADDPTYGNSARVVYSILQGQPYFSVDSKTGVIRTALMNMDREAKEYYEVIIQAKDMGGQLGGLAGTTTVNITLSDVNDNPPRFPQKHYQMSVLESAPISSTVGRVFAKDLDEGINAEMKYTIVDGDGADAFDISTDPNFQVGIITVKKPLSFESKKSYTLKVEGANPHLEMRFLNLGPFQDTTTVHISVEDVDEPPVFEPGFYFVEVPEDVAIGTTIQIISAKDPDVTNNSIRYSIDRSSDPGRFFYVDITTGALMTARPLDREEFSWHNITVLAMEMNNPSQVGSVPVTIKVLDVNDNAPEFPRFYEAFVCENAKAGQLIQTVSAVDQDDPRNGQHFYYSLAPEAANNPNFTIRDNQDNTARILTRRSGFRQQEQSVFHLPILIADSGQPVLSSTGTLTIQVCSCDDDGHVMSCSPEAYMLPVSLSRGPLIAILACIFVLLVLVLLILSMRRHRKQPYIIDDEENIHENIVRYDDEGGGEEDTEAFDIAAMWNPREAQAGAGPKTRQDMLPEIESLFRYVPQTCAVNSTVHSYVLAKLYEADMDLWTPPFDSLQTYMFEGDGPVAGSLSSLQSATSDSEQSFDFLTDWGPRFRKLAELYGASEGPAPLW

SEQ ID NO: 795828 - protein, 102 aa, Homo sapiens
MLSTGPEAQRDCTHSPRLPQQPRLFSVGSPKPHLTSMCLMCAQSGMQTKVLRSKASHSTLSILPMLQTGGSPSTAAFTWVWYVPPRDGPCYVFLKFAFVANI

SEQ ID NO: 795829 - protein, 182 aa, Homo sapiens
MSILLPNMAEFDTISELEEEEEEEAATSSSSPSSSSSVSGPDDDEEDEEEEEEEEEEEEEEEEEEEEEAPPPPRVVSEEHLRRYAPDPVLVRGAGHITVFGLSNKFDTEFPSVLTGKVAPEEFKTSIGRVNACLKKALPVNVKWLLCGCLCCCCTLGCSLWPVICLNKRTRRSIQKLIRMGK

SEQ ID NO: 795830 - protein, 119 aa, Homo sapiens
MSILLPNMAEFDTISELEEEEEEEAATSSSSPSSSSSVSGPDDDEEDEEEEEEEEEEEEEEEEEEEEEAPPPPRVVSEEHLRRYAPDPVLVRGAGHITVFGLSNKFDTEFPSVLTGKKF

SEQ ID NO: 795831 - protein, 224 aa, Homo sapiens
MSILLPNMAEFDTISELEEEEEEEAATSSSSPSSSSSVSGPDDDEEDEEEEEEEEEEEEEEEEEEEEEAPPPPRVVSEEHLRRYAPDPVLVRGAGHITVFGLSNKFDTEFPSVLTGKVAPEEFKTSIGRVNACLKKALPVNVKWLLCGCLCCCCTLGCSLWPVICLNKRTRRSIQKLIEWENNRLYHKLALHWKLTKRKCETSNMMEYVILIEFLPKYPIFRPD

SEQ ID NO: 795832 - protein, 97 aa, Homo sapiens
FTCYHCTHRQKDVEVHKKSHFSVFYPRRESGTVSSYIKINICFSFPSCKCLSLPKISVISAAAMGIMAALACFYQTQAEQGLQLPFETRADGRRRLQ

SEQ ID NO: 795833 - protein, 157 aa, Homo sapiens
MPNQIRRIMAAAKPKHDWTRSYFRAYMILLPFSETFFYLSSVINPLLYTVSSQQFRRVFVQVLCCRLSLQHANHEKRLRVHAHSTTDSARFVQRPLLFASRRQSSARRTEKIFLSTFQSEAEPQSKSQSLSLESLEPNSGAKPANSAAENGFQEHEV

SEQ ID NO: 795834 - protein, 453 aa, Homo sapiens
MASPSLPGSDCSQIIDHSHVPEFEVATWIKITLILVYLIIFVMGLLGNSATIRVTQVLQKKGYLQKEVTDHMVSLACSDILVFLIGMPMEFYSIIWNPLTTSSYTLSCKLHTFLFEACSYATLLHVLTLSFERYIAICHPFRYKAVSGPCQVKLLIGFVWVTSALVALPLLFAMGTEYPLVNVPSHRGLTCNRSSTRHHEQPETSNMSICTNLSSRWTVFQSSIFGAFVVYLVVLLSVAFMCWNMMQVLMKSQKGSLAGGTRPPQLRKSESEESRTARRQTIIFLRLIVVTLAVCWMPNQIRRIMAAAKPKHDWTRSYFRAYMILLPFSETFFYLSSVINPLLYTVSSQQFRRVFVQVLCCRLSLQHANHEKRLRVHAHSTTDSARFVQRPLLFASRRQSSARRTEKIFLSTFQSEAEPQSKSQSLSLESLEPNSGAKPANSAAENGFQEHEV

SEQ ID NO: 795835 - protein, 100 aa, Homo sapiens
LEEQCRRGWHLLQLQQCAEKRANLRNRMVVRSPGLRAEAELPLFLGLGPLQRGVLQQLMQTEFSFPGEQKDWYPAEAMRQAADDAQDLRYMIPVTQTQRS

SEQ ID NO: 795836 - protein, 86 aa, Homo sapiens
DWTPQSRFCLKTSRDAVGAQGSCLAVRQRANDLPSPKFTDAAARMAPPRRATAFPKLVVSGPLYTHKNEGPKLLLMWVTAIDVTTF

SEQ ID NO: 795837 - protein, 280 aa, Homo sapiens
MLLGNLAIISFICLDSRLHSPMYFFLCNFSLMEMVVTSTVVHRMLADLLSTHKTMSLAKCLTQSFFYFSLGSANFLILMVMAFDRYVAICHPLRYPTITNGPVCVKLVVACWVVGFLSIVSPTLQKTRLWFCGPNIIGHYFCDSAPLLKLACSDTRHIERMDLFLSLLFVLTTMLLIILSYILIVAAVLHIPSSSGCQKAFSTCASHLTVVVLGYGSAIFIYVRPGKGHSTYLNKAVAMVTAMVTPFLNPFIFTFRNEKVKEVIEDVTKRIFLGDPAACR

SEQ ID NO: 795838 - protein, 71 aa, Homo sapiens
SRPKSHELQFKVVSLQLLLSVLQNAGPVFRTHEMSINAIKQYLCVALSKNGVSSVPDVFELSLATLSYSTW

SEQ ID NO: 795839 - protein, 102 aa, Homo sapiens
GSSLSMVACSMAMDAQMGCLPGAYIKALAVANSAWPSRVPTEWPLSDEVLLLAPHIRMLWPVAQEHFSPPAQQISNLKGPGNKAGAGYQLSRVRAPCPGVLS

SEQ ID NO: 795840 - protein, 130 aa, Homo sapiens
MGAPSTSAHPAQGMKHRVQRSVGKSPGRDLRQEGSLEKWRCAWCVALRVCEHALVDLRLDYRASLSEGSVMLSYAIHLNSAAHRLEDLGETLFLADSFPHLQNGGDDIYLLGCVKGKRAHFKNPKALSQG

SEQ ID NO: 795841 - protein, 130 aa, Homo sapiens; identical to SEQ ID NO: 795840

SEQ ID NO: 795842 - protein, 2167 aa, Homo sapiens
SPRGPTMTHSPATSEDEERHSASECPEGGSESDSSPDGPGRGPRGTRGQGSGAPGSLASVRGLQGRSMSVPDDAHFSMMVFRIGIPDLHQTKCLRFNPDATIWTAKQQVLCALSESLQDVLNYGLFQPATSGRDANFLEEERLLREYPQSFEKGVPYLEFRYKTRVYKQTNLDEKQLAKLHTKTGLKKFLEYVQLGTSDKVARLLDKGLDPNYHDSDSGETPLTLAAQTEGSVEVIRTLCLGGAHIDFRARDGMTALHKAACARHCLALTALLDLGGSPNYKDRRGLTPLFHTAMVGGDPRCCELLLFNRAQLGIADENGWQEIHQACQRGHSQHLEHLLFYGAEPGAQNASGNTALHICALYNKETCARILLYRGADKDVKNNNGQTPFQVAVIAGNFELGELIRNHREQDVVPFQESPKYAARRRGPPGTGLTVPPALLRANSDTSMALPDWMVFSAPGAASSGAPGPTSGSQGQSQPSAPTTKLSSGTLRSASSPRGARARSPSRGRHPEDAKRQPRGRPSSSGTPREGPAGGTGGSGGPGGSLGSRGRRRKLYSAVPGRSFMAVKSYQAQAEGEISLSKGEKIKVLSIGEGGFWEGQVKGRVGWFPSDCLEEVANRSQESKQESRSDKAKRLFRHYTVGSYDSFDAPSLMDGIGPGSDYIIKEKTVLLQKKDSEGFGFVLRGAKAQTPIEEFTPTPAFPALQYLESVDEGGVAWRAGLRMGDFLIEVNGQNVVKVGHRQVVNMIRQGGNTLMVKVVMVTRHPDMDEAVHKKAPQQAKRLPPPTISLRSKSMTSELEEMEYEQQPAPVPSMEKKRTVYQMALNKLDEILAAAQQTISASESPGPGGLASLGKHRPKGFFATESSFDPHHRAQPSYERPSFLPPGPGLMLRQKSIGAAEDDRPYLAPPAMKFSRSLSVPGSEDIPPPPTTYPPEPPYSTPTVPSSSGRLTPSPRGGPFNPGSGGPLPASSPATFDGPSPPDTRVGSREKSLYHSGPLPPAHHHPPHHHHHHAPPPQPHHHHAHPPHPPEMETGGSPDDPPPRLALGPQPSLRGWRGGGPSPTPGAPSPSHHGSAGGGGGSSQGPALRYIQLPPRAASAAMYVPARSGRGRKGPLVKQTKVEGEPQKGGGLPPAPSPSSPASPQPPPAVAAPSEKNSIPIPTIIIKAPSTSSSGRSSQGSSTEAEPPTQPEPTGGGGGGGSSPSPAPAMSPVPPSPSPVPTPASPSGPATLDFTSQFGAALVGAARREGGWQNEARRRSTLFLSTDAGDEDGGDGGLGTGAAPGPRLRHSKSIDEGMFSAEPYLRLESAGSGAGYGGYGAGSRAYGGGGGSSAFTSFLPPRPLVHPLTGKALDPASPLGLALAARERALKESSEGGGAPQPPPRPPSPRYEAPPPTPHHHSPHAHHEPVLRLWGASPPDPARRELGYRAGLGSQEKSLPASPPAARRSLLHRLPPTAPGVGPLLLQLGTEPPAPHPGVSKPWRSAAPEEPERLPLHVRFLENCQPRAPVTSGRGPPSEDGPGVPPPSPRRSVPPSPTSPRASEENGLPLLVLPPPAPSVDVEDGEFLFVEPLPPPLEFSNSFEKPESPLTPGPPHPLPDTPAPATPLPPVPPPAVAAAPPTLDSTASSLTSYDSEVATLTQGASAAPGDPHPPGPPAPAAPAPAAPQPGPDPPPGTDSGIEEVDSRSSSDHPLETISSASTLSSLSAEGGGSAGGGGGAGAGVASGPELLDTYVAYLDGQAFGGSSTPGPPYPPQLMTPSKLRGRALGASGGLRPGPSGGLRDPVTPTSPTVSVTGAGTDGLLALRACSGPPTAGVAGGPVAVEPEVPPVPLPTASCLPRKLLPWEEGPGPPPPPLPGPLAQPQASALATVKASIISELSSKLQQFGGSSAAGGALPWARGGSGGGGDSHHGGASYVPERTSSLQRQRLSDDSQSSLLSKPVSSLFQNWPKPPLPPLPTGTGVSPTAAAAPGATSPSASSSSTSTRHLQGVEFEMRPPLLRRAPSPSLLPASEHKVSPAPRPSSLPILPSGPLYPGLFDIRGSPTGGAGGSADPFAPVFVPPHPGISGGLGGALSGASRSLSPTRLLSLPPDKPFGAKPLGFWTKFDVADWLEWLGLAEHRAQFLDHEIDGSHLPALTKEDYVDLGVTRVGHRMNIDRALKFFLER

SEQ ID NO: 795843 - protein, 1548 aa, Homo sapiens
MQLMALEQRFGSGLPGGGQPLCLMMSSPLPPPPPHFSCLPASDYIIKEKTVLLQKKDSEGFGFVLRGAKAQTPIEEFTPTPAFPALQYLESVDEGGVAWRAGLRMGDFLIEVNGQNVVKVGHRQVVNMIRQGGNTLMVKVVMVTRHPDMDEAVHKKAPQQAKRLPPPTISLRSKSMTSELEEMEYEQQPAPVPSMEKKRTVYQMALNKLDEILAAAQQTISASESPGPGGLASLGKHRPKGFFATESSFDPHHRAQPSYERPSFLPPGPGLMLRQKSIGAAEDDRPYLAPPAMKFSRSLSVPGSEDIPPPPTTYPPEPPYSTPTVPSSSGRLTPSPRGGPFNPGSGGPLPASSPATFDGPSPPDTRVGSREKSLYHSGPLPPAHHHPPHHHHHHAPPPQPHHHHAHPPHPPEMETGGSPDDPPPRLALGPQPSLRGWRGGGPSPTPGAPSPSHHGSAGGGGGSSQGPALRYIQLPPRAASAAMYVPARSGRGRKGPLVKQTKVEGEPQKGGGLPPAPSPSSPASPQPPPAVAAPSEKNSIPIPTIIIKAPSTSSSGRSSQGSSTEAEPPTQPEPTGGGGGGGSSPSPAPAMSPVPPSPSPVPTPASPSGPATLDFTSQFGAALVGAARREGGWQNEARRRSTLFLSTDAGDEDGGDGGLGTGAAPGPRLRHSKSIDEGMFSAEPYLRLESAGSGAGYGGYGAGSRAYGGGGGSSAFTSFLPPRPLVHPLTGKALDPASPLGLALAARERALKESSEGGGAPQPPPRPPSPRYEAPPPTPHHHSPHAHHEPVLRLWGASPPDPARRELGYRAGLGSQEKSLPASPPAARRSLLHRLPPTAPGVGPLLLQLGTEPPAPHPGVSKPWRSAAPEEPERLPLHVRFLENCQPRAPVTSGRGPPSEDGPGVPPPSPRRSVPPSPTSPRASEENGLPLLVLPPPAPSVDVEDGEFLFVEPLPPPLEFSNSFEKPESPLTPGPPHPLPDTPAPATPLPPVPPPAVAAAPPTLDSTASSLTSYDSEVATLTQGASAAPGDPHPPGPPAPAAPAPAAPQPGPDPPPGTDSGIEEVDSRSSSDHPLETISSASTLSSLSAEGGGSAGGGGGAGAGVASGPELLDTYVAYLDGQAFGGSSTPGPPYPPQLMTPSKLRGRALGASGGLRPGPSGGLRDPVTPTSPTVSVTGAGTDGLLALRACSGPPTAGVAGGPVAVEPEVPPVPLPTASCLPRKLLPWEEGPGPPPPPLPGPLAQPQASALATVKASIISELSSKLQQFGGSSAAGGALPWARGGSGGGGDSHHGGASYVPERTSSLQRQRLSDDSQSSLLSKPVSSLFQNWPKPPLPPLPTGTGVSPTAAAAPGATSPSASSSSTSTRHLQGVEFEMRPPLLRRAPSPSLLPASEHKVSPAPRPSSLPILPSGPLYPGLFDIRGSPTGGAGGSADPFAPVFVPPHPGISGGLGGALSGASRSLSPTRLLSLPPDKPFGAKPLGFWTKFDVADWLEWLGLAEHRAQFLDHEIDGSHLPALTKEDYVDLGVTRVGHRMNIDRALKFFLER

SEQ ID NO: 795844 - protein, 2182 aa, Homo sapiens
SPRGPTMTHSPATSEDEERHSASECPEGGSESDSSPDGPGRGPRGTRGQGSGAPGSLASVRGLQGRSMSVPDDAHFSMMVFRIGIPDLHQTKCLRFNPDATIWTAKQQVLCALSESLQDVLNYGLFQPATSGRDANFLEEERLLREYPQSFEKGVPYLEFRYKTRVYKQTNLDEKQLAKLHTKTGLKKFLEYVQLGTSDKVARLLDKGLDPNYHDSDSGETPLTLAAQTEGSVEVIRTLCLGGAHIDFRARDGMTALHKAACARHCLALTALLDLGGSPNYKDRRGLTPLFHTAMVGGDPRCCELLLFNRAQLGIADENGWQEIHQACQRGHSQHLEHLLFYGAEPGAQNASGNTALHICALYNKETCARILLYRGADKDVKNNNGQTPFQVAVIAGNFELGELIRNHREQDVVPFQESPKYAARRRGPPGTGLTVPPALLRANSDTSMALPDWMVFSAPGAASSGAPGPTSGSQGQSQPSAPTTKLSSGTLRSASSPRGARARSPSRGRHPEDAKRQPRGRPSSSGTPREGPAGGTGGSGGPGGSLGSRGRRRKLYSAVPGRSFMAVKSYQAQAEGEISLSKGEKIKVLSIGEGGFWEGQVKGRVGWFPSDCLEEVANRSQESKQESRSDKAKRLFRHYTVGSYDSFDAPSDYIIKEKTVLLQKKDSEGFGFVLRGAKAQTPIEEFTPTPAFPALQYLESVDEGGVAWRAGLRMGDFLIEVNGQNVVKVGHRQVVNMIRQGGNTLMVKVVMVTRHPDMDEAVHKKAPQQAKRLPPPTISLRSKSMTSELEEMEYEQQPAPVPSMEKKRTVYQMALNKLDEILAAAQQTISASESPGPGGLASLGKHRPKGFFATESSFDPHHRAQPSYERPSFLPPGPGLMLRQKSIGAAEDDRPYLAPPAMKFSRSLSVPGSEDIPPPPTTYPPEPPYSTPTVPSSSGRLTPSPRGGPFNPGSGGPLPASSPATFDGPSPPDTRVGSREKSLYHSGPLPPAHHHPPHHHHHHAPPPQPHHHHAHPPHPPEMETGGSPDDPPPRLALGPQPSLRGWRGGGPSPTPGAPSPSHHGSAGGGGGSSQGPALRYIQLPPRAASAAMYVPARSGRGRKGPLVKQTKVEGEPQKGGGLPPAPSPSSPASPQPPPAVAAPSEKNSIPIPTIIIKAPSTSSSGRSSQGSSTEAEPPTQPEPTGGGGGGGSSPSPAPAMSPVPPSPSPVPTPASPSGPATLDFTSQFGAALVGAARREGGWQNEARRRSTLFLSTDAGDEDGGDGGLGTGAAPGPRLRHSKSIDEGMFSAEPYLRLESAGSGAGYGGYGAGSRAYGGGGGSSAFTSFLPPRPLVHPLTGKALDPASPLGLALAARERALKESSEGGGAPQPPPRPPSPRYEAPPPTPHHHSPHAHHEPVLRLWGASPPDPARRELGYRAGLGSQEKSLPASPPAARRSLLHRLPPTAPGVGPLLLQLGTEPPAPHPGVSKPWRSAAPEEPERLPLHVRFLENCQPRAPVTSGRGPPSEDGPGVPPPSPRRSVPPSPTSPRASEENGLPLLVLPPPAPSVDVEDGEFLFVEPLPPPLEFSNSFEKPESPLTPGPPHPLPDTPAPATPLPPVPPPAVAAAPPTLDSTASSLTSYDSEVATLTQGASAAPGDPHPPGPPAPAAPAPAAPQPGPDPPPGTDSGIEEVDSRSSSDHPLETISSASTLSSLSAEGGGSAGGGGGAGAGVASGPELLDTYVAYLDGQAFGGSSTPGPPYPPQLMTPSKLRGRALGASGGLRPGPSGGLRDPVTPTSPTVSVTGAGTDGLLALRACSGPPTAGVAGGPVAVEPEVPPVPLPTASCLPRKLLPWEEGPGPPPPPLPGPLAQPQASALATVKASIISELSSKLQQFGGSSAAGGALPWARGGSGGGGDSHHGGASYVPERTSSLQRQSIESGEELRLWCHITGLCHFLCVLRLSDDSQSSLLSKPVSSLFQNWPKPPLPPLPTGTGVSPTAAAAPGATSPSASSSSTSTRHLQGVEFEMRPPLLRRAPSPSLLPASEHKVSPAPRPSSLPILPSGPLYPGLFDIRGSPTGGAGGSADPFAPVFVPPHPGISGGLGGALSGASRSLSPTRLLSLPPDKPFGAKPLGFWTKFDVADWLEWLGLAEHRAQFLDHEIDGSHLPALTKEDYVDLGVTRVGHRMNIDRALKFFLER

SEQ ID NO: 795845 - protein, 379 aa, Homo sapiens
SPRGPTMTHSPATSEDEERHSASECPEGGSESDSSPDGPGRGPRGTRGQGSGAPGSLASVRGLQGRSMSVPDDAHFSMMVFRIGIPDLHQTKCLRFNPDATIWTAKQQVLCALSESLQDVLNYGLFQPATSGRDANFLEEERLLREYPQSFEKGVPYLEFRYKTRVYKQTNLDEKQLAKLHTKTGLKKFLEYVQLGTSDKVARLLDKGLDPNYHDSDSGETPLTLAAQTEGSVEVIRTLCLGGAHIDFRARDGMTALHKAACARHCLALTALLDLGGSPNYKDRRGLTPLFHTAMVGGDPRCCELLLFNRAQLGIADENGWQEIHQACQRGHSQHLEHLLFYGAEPGAQNASGNTALHICALYNKVCLAAATPGPSHPR

SEQ ID NO: 795846 - protein, 73 aa, Homo sapiens
SFADSYLDEMVLHMVLSLASHVILSPLEASDTTLGDDCQSVLTAQTSPEHQPICPRCRDSTTQCQGAWLLRVM

SEQ ID NO: 795847 - protein, 151 aa, Homo sapiens
SSCGTTPQPPDVILEPNVTPGNCWAFEGDRGQVTIQLAQKVYLSNLTLQHIPKTISLSGSLDTAPKDFVIYGMEGSPKEEVFLGAFQFQPENIIQMFPLQNQPARAFSAVKVKISSNWGNPGFTCLYRVRVHGSVAPPREQPHQNPYPKRD

SEQ ID NO: 795848 - protein, 99 aa, Homo sapiens
MGECPHLVDVRLGHRSLATGPEQSDICHTGSEARWTTTWYGSLSFSRHKYKMLADLTPGVEMSCRHWARWLTPVIPALWKAEAGGLPELRSSRPAWTTW

SEQ ID NO: 795849 - protein, 150 aa, Homo sapiens
AWHEVATMAVGTQTCGTVRRVRRIEARDVCRGVQTCGTVRRVRRIEARDVCRGVQTCGTVRRVRRIEARDVCRGVQTCGTVRRVRRIEARDVCRGVQTCGTVRRVRRIEARDVCRGVQTCGTVRRVRRIEARDVCRGVQTCGTVRRVRRI

SEQ ID NO: 795850 - protein, 88 aa, Homo sapiens
MLLWASLLAFAPVCGQSGSCSVADWQMPPPYVVLDLPQETLEEETPGANLWPTTITFLTLFLLSLFYSTALTVTSVRGPSGNREGPQY

SEQ ID NO: 795851 - protein, 72 aa, Homo sapiens
CLVGRAADRSRLAMTSPFSLEGECASTWPGATVSSSHATQGLRGYDTWDVPSLLSARAMTADCLKIIMVQYT

SEQ ID NO: 795852 - protein, 112 aa, Homo sapiens
MRKGEVADPAHTTLSSGVGFLARPMGLPLEPFPLWGWGWTHRLPEQAEGEGPKAQTPGPRLDHQPGFAHSAQASVSRPVSPSTPSLRGRATNSTLHLQKSSPGKTETLPTMH

SEQ ID NO: 795853 - protein, 2011 aa, Homo sapiens
SQKSWIKGVFDKRECSTIIPSSKNPHRCTPVCQVCQNLIRCYCGRLIGDHAGIDYSWTISAAKGKESEQWSVEKHTTKSPTDTFGTINFQDGEHTHHAKYIRTSYDTKLDHLLHLMLKEWKMELPKLVISVHGGIQNFTMPSKFKEIFSQGLVKAAETTGAWIITEGINTGVSKHVGDALKSHSSHSLRKIWTVGIPPWGVIENQRDLIGKDVVCLYQTLDNPLSKLTTLNSMHSHFILSDDGTVGKYGNEMKLRRNLEKYLSLQKIHCRSRQGVPVVGLVVEGGPNVILSVWETVKDKDPVVVCEGTGRAADLLAFTHKHLADEGMLRPQVKEEIICMIQNTFNFSLKQSKHLFQILMECMVHRDCITIFDADSEEQQDLDLAILTALLKGTNLSASEQLNLAMAWDRVDIAKKHILIYEQHWKPDALEQAMSDALVMDRVDFVKLLIEYGVNLHRFLTIPRLEELYNTKQGPTNTLLHHLVQDVKQHTLLSGYRITLIDIGLVVEYLIGRAYRSNYTRKHFRALYNNLYRKYKHQRHSSGNRNESAESTLHSQFIRTAQPYKFKEKSIVLHKSRKKSKEQNVSDDPESTGFLYPYNDLLVWAVLMKRQKMAMFFWQHGEEATVKAVIACILYRAMAHEAKESHMVDDASEELKNYSKQFGQLALDLLEKAFKQNERMAMTLLTYELRNWSNSTCLKLAVSGGLRPFVSHTCTQMLLTDMWMGRLKMRKNSWLKIIISIILPPTILTLEFKSKAEMSHVPQSQDFQFMWYYSDQNASSSKESASVKEYDLERGHDEKLDENQHFGLESGHQHLPWTRKVYEFYSAPIVKFWFYTMAYLAFLMLFTYTVLVEMQPQPSVQEWLVSIYIFTNAIEVVREICISEPGKFTQKVKVWISEYWNLTETVAIGLFSAGFVLRWGDPPFHTAGRLIYCIDIIFWFSRLLDFFAVNQHAGPYVTMIAKMTANMFYIVIIMAIVLLSFGVARKAILSPKEPPSWSLARDIVFEPYWMIYGEVYAGEIDVCSSQPSCPPGSFLTPFLQAVYLFVQYIIMVNLLIAFFNNVYLDMESISNNLWKYNRYRYIMTYHEKPWLPPPLILLSHVGLLLRRLCCHRAPHDQEEGDVGLKLYLSKEDLKKLHDFEEQCVEKYFHEKMEDVNCSCEERIRVTSERVTEMYFQLKEMNEKVSFIKDSLLSLDSQVGHLQDLSALTVDTLKVLSAVDTLQEDEALLAKRKHSTCKKLPHSWSNVICAEVLGSMEIAGEKKYQYYSMPSSLLRSLAGGRHPPRVQRGALLEITNSKREATNVRNDQERQETQSSIVVSGVSPNRQAHSKYGQFLLVPSNLKRVPFSAETVLPLSRPSVPDVLATEQDIQTEVLVHLTGQTPVVSDWASVDEPKEKHEPIAHLLDGQDKAEQVLPTLSCTPEPMTMSSPLSQAKIMQTGGGYVNWAFSEGDETGVFSIKKKWQTCLPSTCDSDSSRSEQHQKQAQDSSLSDNSTRSAQSSECSEVGPWLQPNTSFWINPLRRYRPFARSHSFRFHKEEKLMKICKIKNLSGSSEIGQGAWVKAKMLTKDRRLSKKKKNTQGLQVPIITVNACSQSDQLNPEPGENSISEEEYSKNWFTVSKFSHTGVEPYIHQKMKTKEIGQCAIQISDYLKQSQEDLSKNSLWNSRSTNLNRNSLLKSSIGVDKISASLKSPQEPHHHYSAIERNNLMRLSQTIPFTPVQLFAGEEITVYRLEESSPLNLDKSMSSWSQRGRAAMIQVLSREEMDGGLRKAMRVVSTWSEDDILKPGQVFIVKSFLPEVVRTWHKIFQESTVLHLCLREIQQQRAAQKLIYTFNQVKPQTIPYTPRFLEVFLIYCHSANQWLTIEKYMTGEFRKYNNNNGDEITPTNTLEELMLAFSHWTYEYTRGELLVLDLQGVGENLTDPSVIKPEVKQSRGMVFGPANLGEDAIRNFIAKHHCNSCCRKLKLPDLKRNDYSPERINSTFGLEIKIESAEEPPARETGRNSPEDDMQL

SEQ ID NO: 795854 - protein, 978 aa, Homo sapiens
MLENIDSVTFQDFILKHCPSLTSSYSNVYLDMESISNNLWKYNRYRYIMTYHEKPWLPPPLILLSHVGLLLRRLCCHRAPHDQEEGDVGLKLYLSKEDLKKLHDFEEQCVEKYFHEKMEDVNCSCEERIRVTSERVTEMYFQLKEMNEKVSFIKDSLLSLDSQVGHLQDLSALTVDTLKVLSAVDTLQEDEALLAKRKHSTCKKLPHSWSNVICAEVLGSMEIAGEKKYQYYSMPSSLLRSLAGGRHPPRVQRGALLEITNSKREATNVRNDQERQETQSSIVVSGVSPNRQAHSKYGQFLLVPSNLKRVPFSAETVLPLSRPSVPDVLATEQDIQTEVLVHLTGQTPVVSDWASVDEPKEKHEPIAHLLDGQDKAEQVLPTLSCTPEPMTMSSPLSQAKIMQTGGGYVNWAFSEGDETGVFSIKKKWQTCLPSTCDSDSSRSEQHQKQAQDSSLSDNSTRSAQSSECSEVGPWLQPNTSFWINPLRRYRPFARSHSFRFHKEEKLMKICKIKNLSGSSEIGQGAWVKAKMLTKDRRLSKKKKNTQGLQVPIITVNACSQSDQLNPEPGENSISEEEYSKNWFTVSKFSHTGVEPYIHQKMKTKEIGQCAIQISDYLKQSQEDLSKNSLWNSRSTNLNRNSLLKSSIGVDKISASLKSPQEPHHHYSAIERNNLMRLSQTIPFTPVQLFAGEEITVYRLEESSPLNLDKSMSSWSQRGRAAMIQVLSREEMDGGLRKAMRVVSTWSEDDILKPGQVFIVKSFLPEVVRTWHKIFQESTVLHLCLREIQQQRAAQKLIYTFNQVKPQTIPYTPRFLEVFLIYCHSANQWLTIEKYMTGEFRKYNNNNGDEITPTNTLEELMLAFSHWTYEYTRGELLVLDLQGVGENLTDPSVIKPEVKQSRGMVFGPANLGEDAIRNFIAKHHCNSCCRKLKLPDLKRNDYSPERINSTFGLEIKIESAEEPPARETGRNSPEDDMQL

SEQ ID NO: 795855 - protein, 1131 aa, Homo sapiens
MLRPQVKEEIICMIQNTFNFSLKQSKHLFQILMECMVHRDCITIFDADSEEQQDLDLAILTALLKGTNLSASEQLNLAMAWDRVDIAKKHILIYEQHWKPDALEQAMSDALVMDRVDFVKLLIEYGVNLHRFLTIPRLEELYNTKQGPTNTLLHHLVQDVKQHTLLSGYRITLIDIGLVVEYLIGRAYRSNYTRKHFRALYNNLYRKYKHQRHSSGNRNESAESTLHSQFIRTAQPYKFKEKSIVLHKSRKKSKEQNVSDDPESTGFLYPYNDLLVWAVLMKRQKMAMFFWQHGEEATVKAVIACILYRAMAHEAKESHMVDDASEELKNYSKQFGQLALDLLEKAFKQNERMAMTLLTYELRNWSNSTCLKLAVSGGLRPFVSHTCTQMLLTDMWMGRLKMRKNSWLKIIISIILPPTILTLEFKSKAEMSHVPQSQDFQFMWYYSDQNASSSKESASVKEYDLERGHDEKLDENQHFGLESGHQHLPWTRKVYEFYSAPIVKFWFYTMAYLAFLMLFTYTVLVEMQPQPSVQEWLVSIYIFTNAIEVVREICISEPGKFTQKVKVWISEYWNLTETVAIGLFSAGFVLRWGDPPFHTAGRLIYCIDIIFWFSRLLDFFAVNQHAGPYVTMIAKMTANMFYIVIIMAIVLLSFGVARKAILSPKEPPSWSLARDIVFEPYWMIYGEVYAGEIDVCSSQPSCPPGSFLTPFLQAVYLFVQYIIMVNLLIAFFNNVYLDMESISNNLWKYNRYRYIMTYHEKPWLPPPLILLSHVGLLLRRLCCHRAPHDQEEGDVGLKLYLSKEDLKKLHDFEEQCVEKYFHEKMEDVNCSCEERIRVTSERVTEMYFQLKEMNEKVSFIKDSLLSLDSQVGHLQDLSALTVDTLKVLSAVDTLQEDEALLAKRKHSTCKKLPHSWSNVICAEVLGSMEIAGEKKYQYYSMPSSLLRSLAGGRHPPRVQRGALLEITNSKREATNVRNDQERQETQSSIVVSGVSPNRQAHSKYGQFLLVPSNLKRVPFSAETVLPLSRPSVPDVLATEQDIQTEVLVHLTGQTPVVSDWASVDEPKEKHEPIAHLLDGQDKAEQVLPTLSCTPEPMTMSSPLRRYRPFARSHSFRFHKEEKLMKICKIKK

SEQ ID NO: 795856 - protein, 372 aa, Homo sapiens
SQKSWIKGVFDKRECSTIIPSSKNPHRCTPVCQVCQNLIRCYCGRLIGDHAGIDYSWTISAAKGKESEQWSVEKHTTKSPTDTFGTINFQDGEHTHHAKYIRTSYDTKLDHLLHLMLKEWKMELPKLVISVHGGIQNFTMPSKFKEIFSQGLVKAAETTGAWIITEGINTGVSKHVGDALKSHSSHSLRKIWTVGIPPWGVIENQRDLIGKDVVCLYQTLDNPLSKLTTLNSMHSHFILSDDGTVGKYGNEMKLRRNLEKYLSLQKIHCRSRQGVPVVGLVVEGGPNVILSVWETVKDKDPVVVCEGTGRAADLLAFTHKHLADEGMLRPQVKEEIICMIQNTFNFSLKQSKHLFQILMECMVHRDCVSMTS

SEQ ID NO: 795857 - protein, 68 aa, Homo sapiens
IYHPRSRTERRDILQTLQATRGAGRDANNAGGPGRGHESHPVTRSFSTPAMQLRAKPCCSLPHEGAGS

SEQ ID NO: 795858 - protein, 106 aa, Homo sapiens
TSAIVSDMIVVAKWNSPRVDDVVKSMYPPLDPKLLDTGTTTLLLSVSRLVLVTRNACHLTGGLEWIDQSLSAAEEHLEVLREVALAFEPDKGLPGPEGFLQEQSAI

SEQ ID NO: 795859 - protein, 108 aa, Homo sapiens
MFITHGQSSPAEVETPQGRNLHPFCYSPLSHVHARNRAWHIVGSQSLLTESLNPCSPTPSAFDIETKVTEIAHGNLGVAVKIDPSYLVHTSNFILPLFWGLYISLVLA

SEQ ID NO: 795860 - protein, 93 aa, Homo sapiens
EGHNLPQSPDVAVCWQQIESKEERHRMCQGCAAYSPDDHKAFLGQVLPSLVKMGSPSRTLIESSDHQECPTKSLPLLVTRACFPWRAPEGRKL

SEQ ID NO: 795861 - protein, 142 aa, Homo sapiens
MEQQAQKQYFEQWLRRHRLLQEVYPEANAPIGHNRESYMVPFIPLYRNGDFFISSKDLGYDYSYLQDSDPDSFQDYIKSYLEQASRIWSWLLGAAMVGAVLTALLAGLVSLLCRHKRKQLPEEKQPLLMEKEDYHSLYQSHL

SEQ ID NO: 795862 - protein, 215 aa, Homo sapiens
MEDWAGVNRTAFPATPAVNGLEKPALEADIKYTQSASTLSAVGGFLPACAYPASNQHGVYSAPGGGYLAPGPPWPPAQGPPLAPPGAGVAVHGGELAAAMTFKHPSREGSLPAPAARPRTPSVAYTDCPSRPRPPRGSSPRTRARRERQADPGAQVCAAAPAIGTGRIGGLAEEEASAGPRGARPASPQAQPCLWPDPPHFLYWSGFLGFSELGF

SEQ ID NO: 795863 - protein, 501 aa, Homo sapiens
SAPLPTPSQTQAVCPWTPSCLGTHRSPLEVRLGAVPRSAWGPLANPPGVFSPSGSLLSGASAEQTYGEVNQLGGVFVNGRPLPNAIRLRIVELAQLGIRPCDISRQLRVSHGCVSKILARYNETGSILPGAIGGSKPRVTTPNVVKHIRDYKQGDPGIFAWEIRDRLLADGVCDKYNVPSVSSISRILRNKIGSLAQPGPYEASKQPPSQPTLPYNHIYQYPYPSPVSPTGAKMGSHPGVPGTAGHVSIPRSWPSAHSVSNILGIRTFMEQTGALAGSEGTAYSPKMEDWAGVNRTAFPATPAVNGLEKPALEADIKYTQSASTLSAVGGFLPACAYPASNQHGVYSAPGGGYLAPGPPWPPAQGPPLAPPGAGVAVHGGELAAAMTFKHPSREGSLPAPAARPRTPSVAYTDCPSRPRPPRGSSPRTRARRERQADPGAQVCAAAPAIGTGRIGGLAEEEASAGPRGARPASPQAQPCLWPDPPHFLYWSGFLGFSELGF

SEQ ID NO: 795864 - protein, 109 aa, Homo sapiens
ALHQVPHLILDVQEPLVPGLIREGLMVGRCQIETLKNDQDCGQERHSSQKHGVRVGSTYCMAGTVPHTHLLMHTVPCQSYDVGAILILPAFQIRKQALKGQLTYLLSQW

SEQ ID NO: 795865 - protein, 64 aa, Homo sapiens
PEPPMEAEPSPIQQEATVQTPEPPMEVEPSSQQLVPAQHPESPKEVAAQPPVHEMTIPIAGQDQ

SEQ ID NO: 795866 - protein, 271 aa, Homo sapiens
RPPASPDEPSVAASSVGSSRLPLSASLAFSDLTEEMLDCGPSGLVRELEELRSENDYLKDEIEELRAEMLEMRDVYMEEDVYQLQELRQQLDQASKTCRILQYRLRKAERRSLRAAQTGQVDGELIRGLEQDVKVSKDISMRLHKELEVVEKKRARLEEENEELRQRLIETELAKQVLQTELERPREVRTSCIQQGQPRAGGHMQAPPSQCLCEPPLVGNGQLMPPWQGCLFIHSSNMHFLSTYCVNCVLDTKVTMVNKTHPVPVLRELTG

SEQ ID NO: 795867 - protein, 137 aa, Homo sapiens
RPPASPDEPSVAASSVGSSRLPLSASLAFSDLTEEMLDCGPSGLVRELEELRSENDYLKVGGARVEREVAGVAGCHSPAGLRHQPALLPTEQSGERGPSPLGTTLRWIWGSLIPPAPSQLYLGSALLKKTLELATGP

SEQ ID NO: 795868 - protein, 131 aa, Homo sapiens [sequence omitted]

SEQ ID NO: 795869 - protein, 138 aa, Homo sapiens
LFQVNMQIYFLCLRLLRCLFLPCPSLSFPLFYDTCMSPCPSGWGPFDDPVLPALELETGGYKMLSLSPPQGLLPMVPSPWTFFFQFFSWVAAQHSGHVSSNVTSPRRPALITSLPREPVLAQAQPPYLGISLIVQLTF

SEQ ID NO: 795870 - protein, 81 aa, Homo sapiens
LGCWLLWFCYSHYLENAPGRADPHQLRSFLSVGEALLDVGFGVYGDAALLPPASCVCAQTASEAVRVGSCHVLAPPQSRWT

SEQ ID NO: 795871 - protein, 706 aa, Homo sapiens
ATLRLESVDLQSSRNNKEHHTQEMGVKRLTVRRGQPFYLRLSFSRPFQSQNDHITFVAETGPKPSELLGTRATFFLTRVQPGNVWSASDFTIDSNSLQVSLFTPANAVIGHYTLKIEISQGQGHSVTYPLGTFILLFNPWSPEDDVYLPSEILLQEYIMRDYGFVYKGHERFITSWPWNYGQFEEDIIDICFEILNKSLYHLKNPAKDCSQRNDVVYVCRVVSAMINSNDDNGVLQGNWGEDYSKGVSPLEWKGSVAILQQWSARGGQPVKYGQCWVFASVMCTVMRCLGVPTRVVSNFRSAHNVDRNLTIDTYYDRNAEMLSTQKRDKIWNFHVWNECWMIRKDLPPGYNGWQVLDPTPQQTSSGLFCCGPASVKAIREGDVHLAYDTPFVYAEVNADEVIWLLGDGQAQEILAHNTSSIGKEISTKMVGSDQRQSITSSYKYPEGSPEERAVFMKASRKMLGPQRASLPFLDLLESGGLRDQPAQLQLHLARIPEWGQDLQLLLRIQRVPDSTHPRGPIGLVVRFCAQALLHGGGTQKPFWRHTVRMNLDFGKETQWPLLLPYSNYRNKLTDEKLIRVSGIAEVEETGRSMLVLKDICLEPPHLSIEVSERAEVGKALRVHVTLTNTLMVALSSCTMVLEGSGLINGQIAKDLGTLVAGHTLQIQLDLYPTKAGPRQLQVLISSNEVKEIKGYKDIFVTVAGAP

SEQ ID NO: 795872 - protein, 44 aa, Homo sapiens
GRKPRLQGGVIGCMFHLQPREAQKSSSALEVHKKYGDSTGTTLE

SEQ ID NO: 795873 - protein, 211 aa, Homo sapiens
MRGYRVHYYIFTDNPAAVPGVPLGPHRLLSSIPIQGHSHWEETSMRRMETISQHIAKRAHREVDYLFCLDVDMVFRNPWGPETLGDLVAAIHPSYYAVPRQQFPYERRRVSTAFVADSEGDFYYGGAVFGGQVARVYEFTRGCHMAILADKANGIMAAWREESHLNRHFISNKPSKVLSPEYLWDDRKPQPPSLKLIRFSTLDKDISCLRS

SEQ ID NO: 795874 - protein, 67 aa, Homo sapiens
CGRWGQTDHKAVRTRSGPSVSPRTCTEQVPDNIWGGSHEELHTHSVHQTGFPSQTSELTILTEQHAL

SEQ ID NO: 795875 - protein, 165 aa, Homo sapiens
VAQAVTLPGPVLHGLEAGQLLAAHDRVDHLHLVLQGGNAGDDRGRGGRAGPRVGQEWLGRVGGRVLQLSVVLHGVLVHVVIVAAQSLRVLVVVGQLGVHGILEALRQRRVGDLAAHVHADVLLQDHGVGELLLADGAGVLHAQGRLCTVHAEVRLEVALGGEGAA

SEQ ID NO: 795876 - protein, 451 aa, Homo sapiens
AKLRRLVRGPKQALELPSDREVLHPFVRRHALHRNSLEGGHTESNTSLPSGIQASLTSISSLPFEEDEREVALTKLTKSVSAPHISSPEEAAEDADTKQQDGGFAEPSDIAQQEPRFPRIFALNFVVTLEQMLEQTITLVEIVLDADNQQGPGYIDIPKGKGKQFDAQGHCLPDGRTENTPGVETKGLNLKIPRVIALENPRTRSLHRALEETPKGMPKDLNVGQQALSNSGISEVEGLSQHQVPELSCTSAADAINRNSTGQQSQSGSPCIMDDTAFNRGVNAFPEAKHKAGTVCPTVTHSVHSQVLKNQELKAGTSIMGSHLTSAETFTLDSLKAVEVVNLSVSCTATCLPFSSVPKETPARAGFSSKQTLFPITHQPLGSFGVVSTHSSTLDEEVSERMFRGRGRKFGRWNSPGCLCPWPGWEQCRPPAGKDFHRTGAPWRKTGLPNV

SEQ ID NO: 795877 - protein, 491 aa, Homo sapiens
AKLRRLVRGPKQALELPSDREVLHPFVRRHALHRNSLEGGHTESNTSLPSGIQASLTSISSLPFEEDEREVALTKLTKSVSAPHISSPEEAAEDADTKQQDGGFAEPSDIAQQEPRFPRIFALNFVVTLEQMLEQTITLVEIVLDADNQQGPGYIDIPKGKGKQFDAQGHCLPDGRTENTPGVETKGLNLKIPRVIALENPRTRSLHRALEETPKGMPKDLNVGQQALSNSGISEVEGLSQHQVPELSCTSAADAINRNSTGQQSQSGSPCIMDDTAFNRGVNAFPEAKHKAGTVCPTVTHSVHSQVLKNQELKAGTSIMGSHLTSAETFTLDSLKAVEVVNLSVSCTATCLPFSSVPKETPARAGFSSKQTLFPITHQPLGSFGVVSTHSSTLDEEVSERMFSFYQAKEKFKKELKIEGFLYSDLTVLASDIPYFPPEEEEENLEDGIHLVVCVHGLDGNSADLRLVKTFIELGLPGGKLDFLMSEKNQV

SEQ ID NO: 795878 - protein, 95 aa, Homo sapiens
AGPAKTDLLDLRPTSPNPPREKARAKAGRTDPAAAEGLRSLARSRDGELDPRRTPEKRQQDCTENKSSAPSPRAGAQCAGAPLAGRSLCSKREDS

SEQ ID NO: 795879 - protein, 207 aa, Homo sapiens
PREGGGGVKRLRRPAQSARLRVPCETAKMVVGAFPMAKLLYLGIRQVSKPLANRIKEAARRSEFFKTYICLPPAQLYHWVEMRTKMRIMGFRGTVIKPLNEEAAAELGAELLGEATIFIVGGGCLVLEYWRHQAQQRHKEEEQRAAWNALRDEVGHLALALEALQAQVQAAPPQGALEELRTELQEVRAQLCNPGRSASHAVPASKK

SEQ ID NO: 795880 - protein, 109 aa, Homo sapiens [sequence omitted]

SEQ ID NO: 795881 - protein, 208 aa, Homo sapiens
PREGGGGVKRLRRPAQSARLRVPCETAKMVVGAFPMAKLLYLGIRQVSKPLANRIKEAARRSEFFKTYICLPPAQLYHWLEMRTKMRIMGFNAAAIKPLNEGAAAELGAELLGEGIIFITACSCLMLEYWRHQLQQRRKEKERRVAREALRGEVGHLGLALEELQAQVQATSTQLALEELRAQLQEVRAHLCLRDPPPAPPVAPASEK

SEQ ID NO: 795882 - protein, 161 aa, Homo sapiens
MAPSFTARIQLFLLRALGFLIGLVGRAALVLGGPKFASKTPRPVTEPLLLLSGMQLAKLIRQRKVKCIDVVQAYINRIKDVNPMINGIVKYRFEEAMKEAHAVDQKLAEKQEDEATLENKWPFLGVPLTVKEAFQLQGMPNSSGLMNRRDAIAKTDATVVD

SEQ ID NO: 795883 - protein, 110 aa, Homo sapiens
SGNLQSWLKRKGKGKQAHLTWLEEEEESEGGGLHTSKQPDLVRTHYHKNGKVEITPMIQSITSHKAPPPTLGITIRHEIWAGTQMQTTSDGDFMLLWKIHCYLVWNPMKY

SEQ ID NO: 795884 - protein, 107 aa, Homo sapiens
PEAGDGSGRSRWAPGGTEAGRQWVPGPKVTVVAGSGEEGGVQSIRGPVCPAMGFELDRGFSLKIPQKGAVPRLRPVIQCCGRQRRENHMMLGAQDSLGNTGDAVSLK

SEQ ID NO: 795885 - protein, 543 aa, Homo sapiens
MGDWNLLGGILEEVHSHSTIVGKIWLTILFIFRMLVLRVAAEDVWDDEQSAFACNTRQPGCNNICYDDAFPISLIRFWVLQIIFVSSPSLVYMGHALYRLRAFEKDRQRKKSHLRAQMENPDLDLEEQQRIDRELRRLEEQKRIHKVPLKGCLLRTYVLHILTRSVLEVGFMIGQYILYGFQMHPLYKCTQPPCPNAVDCFVSRPTEKTIFMLFMHSIAAISLLLNILEIFHLGIRKIMRTLYKKSSSEGIEDETGPPFHLKKYSVAQQCMICSSLPERISPLQANNQQQVIRVNVPKSKTMWQIPQPRQLEVDPSNGKKDWSEKDQHSGQLHVHSPCPWAGSAGNQHLGQQSDHSSFGLQNTMSQSWLGTTTAPRNCPSFAVGTWEQSQDPEPSGEPLTDLHSHCRDSEGSMRESGVWIDRSRPGSRKASFLSRLLSEKRHLHSDSGSSGSRNSSCLDFPHWENSPSPLPSVTGHRTSMVRQAALPIMELSQELFHSGCFLFPFFLPGVCMYVCVDREADGGGDYLWRDKIIHSIHSVKFNS

SEQ ID NO: 795886 - protein, 157 aa, Homo sapiens
MPGDGSLRLGEVGALCDRASESGLRPVLARAVTRTVSGGRDARRLHQQEETPGGRNLRQIAGDAARDPSLQACADGVRLPKVRKGKKAKGKKVVPTLAVLKKQETVKVVNLPFEKFGTGQDILALDRTSSPKGTSLALSNGPIILGCNSREPSSISS

SEQ ID NO: 795887 - protein, 111 aa, Homo sapiens
GDGPASLGEVTHSERVSFVIRALQFSSAVTVVSKSSNVSADPAQPSPDRVRSPSRLPRRRGAEPGKNPPPEGPRPGLCLREQVLLTQRDARTGSPTPPVTSRPPELKTWPD

SEQ ID NO: 795888 - protein, 49 aa, Homo sapiens [sequence omitted]

SEQ ID NO: 795889 - protein, 98 aa, Homo sapiens
EMTAQGPTASNLNAGSQTKEEAGSSCAWMGEGGGLHRSGSSFWLLPGESAMQCVKGLLVPGSVGCDDIILEVTDWIGNGADAECLARYVLGTGLHNGH

SEQ ID NO: 795890 - protein, 123 aa, Homo sapiens
RLECNGTITAHCSLKLPSSSDPLTSASRVGGSQGVETGSCYVAQAGFELLASSNPPTSASQSNPLTLKPHFPSLKVFLDPPLCCSPLRPSYKWLGAVVHTCNPSTLGGQGARITRSGDRDHPG

SEQ ID NO: 795891 - protein, 112 aa, Homo sapiens [sequence omitted]

SEQ ID NO: 795892 - protein, 112 aa, Homo sapiens
WIPNYYHIQKLTQDKDLNCRPRTLKPLKENTGETLQDISLGKDFMAKASKAQTTNQKTDKWDCFKLTIFCTAKEIINRVKRQPAEWEKIFGKYSFNKEIISRIYKKLNKTQQ

SEQ ID NO: 795893 - protein, 89 aa, Homo sapiens
LLYGSTNSINETSAPWLHHHPKARLVKPSSGGWGFNTDILGGHKHSVHCSQGEPAENQSASERTLAVQLHRSCCLRMNLAHPICPKGVC

SEQ ID NO: 795894 - protein, 128 aa, Homo sapiens
VFLELMESEGPPESESSEFFSQQEEENEEEEAQEPEETGPKNPLLQPALTGDVEGLQKIFEDPENPHHEQAMQLLLEEDIVGRNLLYAACMAGQSDVIRALAKYGVNLNEKTGTHSYIVLQPGVVWKL

SEQ ID NO: 795895 - protein, 126 aa, Homo sapiens
VFLELMESEGPPESESSEFFSQQEEENEEEEAQEPEETGPKNPLLQPALTGDVEGLQKIFEDPENPHHEQAMQLLLEEDIVGRNLLYAACMAGQSDVIRALAKYGVNLNEKTTRGILSFFSHQYYL

SEQ ID NO: 795896 - protein, 126 aa, Homo sapiens
VFLELMESEGPPESESSEFFSQQEEENEEEEAQEPEETGPKNPLLQPALTGDVEGLQKIFEDPENPHHEQAMQLLLEEDIVGRNLLYAACMAGQSDVIRALAKYGVNLNEKTYLKMQCNIFKVRYI

SEQ ID NO: 795897 - protein, 801 aa, Homo sapiens
MEASGKLICRQRQVLFSFLLLGLSLAGAAEPRSYSVVEETEGSSFVTNLAKDLGLEQREFSRRGVRVVSRGNKLHLQLNQETADLLLNEKLDREDLCGHTEPCVLRFQVLLESPFEFFQAELQVIDINDHSPVFLDKQMLVKVSESSPPGTAFPLKNAEDLDIGQNNIENYIISPNSYFRVLTRKRSDGRKYPELVLDNALDREEEAELRLTLTALDGGSPPRSGTAQVYIEVVDVNDNAPEFEQPFYRVQISEDSPISFLVVKVSATDVDTGVNGEISYSLFQASDEISKTFKVDFLTGEIRLKKQLDFEKFQSYEVNIEARDAGGFSGKCTVLIQVIDVNDHAPEVTMSAFTSPIPENAPETVVALFSVSDLDSGENGKISCSIQEDLPFLLKSSVGNFYTLLTETPLDRESRAEYNVTITVTDLGTPRLTTHLNMTVLVSDVNDNAPAFTQTSYTLFVRENNSPALHIGSVSATDRDSGTNAQVTYSLLPPQDPHLPLASLVSINTDNGHLFALRSLDYEALQAFEFRVGASDRGSPALSSEALVRVLVLDANDNSPFVLYPLQNGSAPCTELVPRAAEPGYLVTKVVAVDGDSGQNAWLSYQLLKATEPGLFGVWAHNGEVRTARLLSERDAAKQRLVVLVKDNGEPPCSATATLHLLLVDGFSQPYLPLPEAAPAQGQADSLTVYLVVALASVSSLFLFSVLLFVAVLLCRRSRAASVGRCSVPEGPFPGHLVDVRGTGSLSQNYQYEVCLAGGSGTNEFQFLKPVLPNIQGHSFGPEMEQNSNFRNGFGFSLQLK

SEQ ID NO: 795898 - protein, 86 aa, Homo sapiens
HRGRTQGNEVTALSQTRQGGLAGGMGVGATERGEWALAASSQAQDVRPQATGLPVSAGPPSLGGASQSRRGLPARARPPALPARGQ

SEQ ID NO: 795899 - protein, 381 aa, Homo sapiens
MGPIGAEADENQTVEEMKVEQYGPQTTPRGELVPDPEPELIDSTKLIEVQVVLILAYCSIILLGVIGNSLVIHVVIKFKSMRTVTNFFIANLAVADLLVNTLCLPFTLTYTLMGEWKMGPVLCHLVPYAQGLAVQVSTITLTVIALDRHRCIVYHLESKISKRISFLIIGLAWGISALLASPLAIFREYSLIEIIPDFEIVACTEKWPGEEKSIYGTVYSLSSLLILYVLPLGIISFSYTRIWSKLKNHVSPGAANDHYHQRRQKTTKMLVCVVVVFAVSWLPLHAFQLAVDIDSQVLDLKEYKLIFTVFHIIAMCSTFANPLLYGWMNSNYRKAFLSAFRCEQRLDAIHSEVSVTFKAKKNLEVRKNSGPNDSFTEATNV

SEQ ID NO: 795900 - protein, 381 aa, Homo sapiens; identical to SEQ ID NO: 795899

SEQ ID NO: 795901 - protein, 381 aa, Homo sapiens; identical to SEQ ID NO: 795899

SEQ ID NO: 795902 - protein, 141 aa, Homo sapiens
YAGKQCLPRAQRLMREAGNEQGNSPSPARGQLRTAFSNSPLLLQTQSIHLRLLCKRLPRGMMPGPVHNTGCLSALHKGSLPASSVILRGPQHPQAFDNQALAPTVCQTLASAWLRGGHSRPQLLALEQLLPGSSCKQEPAA

SEQ ID NO: 795903 - protein, 141 aa, Homo sapiens
HSGSGVLILTCCSPPVLQWQDLHLKENVPPSLLLLSRTFYLIDVKPKPIEIPLSGEAPKTDILVELPTFTESKENMVDLAPQLKGTKDEDFIQPPPVTSSPITPSTPISLPKGPITSSEEPTLQAKSQMTAQNSKASSKGA

SEQ ID NO: 795904 - protein, 460 aa, Homo sapiens
MAFYSYNSVLAIARTRFPSHFVHPTCSSYSPSCAFLHLPDSHLNKTCMKNYESKKYSDPSQPGNTVLHPGTRLIQKLHTSTCWLQEVPGKPQLEQATKHPQVTSPQATKETGMEIKEGKQSYRQKIMDELKYYYNGFYLLWIDAKVAARMVWRLLHGQVLTRRERRRLLRTCVDFFRLVPFMVFLIVPFMEFLLPVFLKLFPEMLPSTFESESKKEEKQKKKMAVKLELAKFLQETMTEMARRNRAKMGDASTQLSSYVKQVQTGHKPSTKEIVRFSKLFEDQLALEHLDRPQLVALCKLLELQTFGTNNLLRFQLLMKLKSIKADDEIIAKEGVTALSVSELQAACRARGMRSLGLTEEQLRQQLTEWQDLHLKENVPPSLLLLSRTFYLIDVKPKPIEIPLSGEDEDFIQPPPVTSSPITPSTPISLPKGPITSSEEPTLQAKSQMTAQNSKASSKGA

SEQ ID NO: 795905 - protein, 432 aa, Homo sapiens
MAFYSYNSVLAIARTRFPSHFVHPTCSSYSPSCAFLHLPDSHLNKTCMKNYESKKYSDPSQPGNTVLHPGTRLIQKLHTSTCWLQEVPGKPQLEQATKHPQVTSPQATKETGMEIKEGKQSYRQKIMDELKYYYNGFYLLWIDAKVAARMVWRLLHGQVLTRRERQKVFLKLFPEMLPSTFESESKKEEKQKKKMAVKLELAKFLQETMTEMARRNRAKMGDASTQLSSYVKQVQTGHKPSTKEIVRFSKLFEDQLALEHLDRPQLVALCKLLELQTFGTNNLLRFQLLMKLKSIKADDEIIAKEGVTALSVSELQAACRARGMRSLGLTEEQLRQQLTEWQDLHLKENVPPSLLLLSRTFYLIDVKPKPIEIPLSGEDEDFIQPPPVTSSPITPSTPISLPKGPITSSEEPTLQAKSQMTAQNSKASSKGA

SEQ ID NO: 795906 - protein, 279 aa, Homo sapiens
MVFLIVPFMEFLLPVFLKLFPEMLPSTFESESKKEEKQKKKMAVKLELAKFLQETMTEMARRNRAKMGDASTQLSSYVKQVQTGHKPSTKEIVRFSKLFEDQLALEHLDRPQLVALCKLLELQTFGTNNLLRFQLLMKLKSIKADDEIIAKEGVTALSVSELQAACRARGMRSLGLTEEQLRQQLTEWQDLHLKENVPPSLLLLSRTFYLIDVKPKPIEIPLSGEDEDFIQPPPVTSSPITPSTPISLPKGPITSSEEPTLQAKSQMTAQNSKASSKGA

SEQ ID NO: 795907 - protein, 298 aa, Homo sapiens
MAFYSYNSVLAIARTRFPSHFVHPTCSSYSPSCAFLHLPDSHLNKTCMKNYESKKYSDPSQPGNTVLHPGTRLIQKLHTSTCWLQEVPGKPQLEQATKHPQVTSPQATKETGMEIKEGKQSYRQKIMDELKYYYNGFYLLWIDAKVAARMVWRLLHGQVLTRRERRRLLRTCVDFFRLVPFMVFLIVPFMEFLLPVFLKLFPEMLPSTFESESKKEEKQKKKMAVKLELAKFLQETMTEMARRNRAKMGDASTQLSSYVKQVSIFYVMPNNFGAGRSMKNACHHGFPKLFTIFGIANI

SEQ ID NO: 795908 - protein, 491 aa, Homo sapiens
MAFYSYNSVLAIARTRFPSHFVHPTCSSYSPSCAFLHLPDSHLNKTCMKNYESKKYSDPSQPGNTVLHPGTRLIQKLHTSTCWLQEVPGKPQLEQATKHPQVTSPQATKETGMEIKEGKQSYRQKIMDELKYYYNGFYLLWIDAKVAARMVWRLLHGQVLTRRERRRLLRTCVDFFRLVPFMVFLIVPFMEFLLPVFLKLFPEMLPSTFESESKKEEKQKKKMAVKLELAKFLQETMTEMARRNRAKMGDASTQLSSYVKQVQTGHKPSTKEIVRFSKLFEDQLALEHLDRPQLVALCKLLELQTFGTNNLLRFQLLMKLKSIKADDEIIAKEGVTALSVSELQAACRARGMRSLGLTEEQLRQQLTEWQDLHLKENVPPSLLLLSRTFYLIDVKPKPIEIPLSGEAPKTDILVELPTFTESKENMVDLAPQLKGTKDEDFIQPPPVTSSPITPSTPISLPKGPITSSEEPTLQAKSQMTAQNSKASSKGA

SEQ ID NO: 795909 - protein, 385 aa, Homo sapiens
MKNYESKKYSDPSQPGNTVLHPGTRLIQKLHTSTCWLQEVPGKPQLEQATKHPQVTSPQATKETGMEIKEGKQSYRQKIMDELKYYYNGFYLLWIDAKVAARMVWRLLHGQVLTRRERRKVFLKLFPEMLPSTFESESKKEEKQKKKMAVKLELAKFLQETMTEMARRNRAKMGDASTQLSSYVKQVQTGHKPSTKEIVRFSKLFEDQLALEHLDRPQLVALCKLLELQTFGTNNLLRFQLLMKLKSIKADDEIIAKEGVTALSVSELQAACRARGMRSLGLTEEQLRQQLTEWQDLHLKENVPPSLLLLSRTFYLIDVKPKPIEIPLSGEDEDFIQPPPVTSSPITPSTPISLPKGPITSSEEPTLQAKSQMTAQNSKASSKGA

SEQ ID NO: 795910 - protein, 246 aa, Homo sapiens
MEEKQKKKMAVKLELAKFLQETMTEMARRNRAKMGDASTQLSSYVKQVQTGHKPSTKEIVRFSKLFEDQLALEHLDRPQLVALCKLLELQTFGTNNLLRFQLLMKLKSIKADDEIIAKEGVTALSVSELQAACRARGMRSLGLTEEQLRQQLTEWQDLHLKENVPPSLLLLSRTFYLIDVKPKPIEIPLSGEDEDFIQPPPVTSSPITPSTPISLPKGPITSSEEPTLQAKSQMTAQNSKASSKGA

SEQ ID NO: 795911 - protein, 591 aa, Homo sapiens
MKKIRTSLKGDLITVTNMGKALFGVQAFLGIEKRTVRNLMNGISVERPLGRNLIPVIGVLKVSVGAQTLLNTKESTLVKNLINVMSVGKPSVRAQILLYIRESIIGEKPYQCRHCSKSFSQRSDLVKHQRIHTGEKPYTCNQCNKHFSQSSDVIKHQRIHTGEKPYKCDVCGKAFSQSSDLILHQRIHTGEKPYPCNQCSKSFSQNSDLIKHRRIHTGEKPYKCNECGKAFNQSSVLILHQRIHTGEKPYPCDQCSKTFSRLSDLINHQRIHTGEKPYPCNQCNKMFSRRSDLVKHHRIHTGEKPYECDECGKTFSQSSNLILHQRIHTGEKPYACSDCTKSFVAVQILLSIKEYTLERNHMHVISVIKVLVKAQTSLNIREYTLVKSLIIAIVVRKPSVRVLTLFFIREFTLEKNYYLCTQCSKSFSQISDLIKHQRIHTGEKPYKCSECRKAFSQCSALTLHQRIHTGKKPNPCDECGKSFSRRSDLINHQKIHTGEKPYKCDACGKAFSTCTDLIEHQKTHAEEKPYQCVQCSRSCSQLSELTIHEEVHCGEDSQNVMNVRKPLVCTPTLFSTRDTVPEKNLMNAVDY

SEQ ID NO: 795912 - protein, 574 aa, Homo sapiens
MGKALFGVQAFLGIEKRTVRNLMNGISVERPLGRNLIPVIGVLKVSVGAQTLLNTKESTLVKNLINVMSVGKPSVRAQILLYIRESIIGEKPYQCRHCSKSFSQRSDLVKHQRIHTGEKPYTCNQCNKHFSQSSDVIKHQRIHTGEKPYKCDVCGKAFSQSSDLILHQRIHTGEKPYPCNQCSKSFSQNSDLIKHRRIHTGEKPYKCNECGKAFNQSSVLILHQRIHTGEKPYPCDQCSKTFSRLSDLINHQRIHTGEKPYPCNQCNKMFSRRSDLVKHHRIHTGEKPYECDECGKTFSQSSNLILHQRIHTGEKPYACSDCTKSFVAVQILLSIKEYTLERNHMHVISVIKVLVKAQTSLNIREYTLVKSLIIAIVVRKPSVRVLTLFFIREFTLEKNYYLCTQCSKSFSQISDLIKHQRIHTGEKPYKCSECRKAFSQCSALTLHQRIHTGKKPNPCDECGKSFSRRSDLINHQKIHTGEKPYKCDACGKAFSTCTDLIEHQKTHAEEKPYQCVQCSRSCSQLSELTIHEEVHCGEDSQNVMNVRKPLVCTPTLFSTRDTVPEKNLMNAVDY

SEQ ID NO: 795913 - protein, 407 aa, Homo sapiens
MSLNSSLSCRKELSNLTEEEGGEGGVIITQFIAIIVITIFVCLGNLVIVVTLYKKSYLLTLSNKFVFSLTLSNFLLSVLVLPFVVTSSIRREWIFGVVWCNFSALLYLLISSASMLTLGVIAIDRYYAVLYPMVYPMKITGNRAVMALVYIWLHSLIGCLPPLFGWSSVEFDEFKWMCVAAWHREPGYTAFWQIWCALFPFLVMLVCYGFIFRVARVKARKVHCGTVVIVEEDAQRTGRKNSSTSTSSSGSRRNAFQGVVYSANQCKALITILVVLGAFMVTWGPYMVVIASEALWGKSSVSPSLETWATWLSFASAVCHPLIYGLWNKTVRKELLGMCFGDRYYREPFVQRQRTSRLFSISNRITDLGLSPHLTALMAGGQPLGHSSSTGDTGFSCSQDSGNLRAL

SEQ ID NO: 795914 - protein, 529 aa, Homo sapiens
MSLNSSLSCRKELSNLTEEEGGEGGVIITQFIAIIVITIFVCLGNLVIVVTLYKKSYLLTLSNKFVFSLTLSNFLLSVLVLPFVVTSSIRREWIFGVVWCNFSALLYLLISSASMLTLGVIAIDRYYAVLYPMVYPMKITGNRAVMALVYIWLHSLIGCLPPLFGWSSVEFDEFKWMCVAAWHREPGYTAFWQIWCALFPFLVMLVCYGFIFRVARVKARKVHCGTVVIVEEDAQRTGRKNSSTSTSSSGSRRNAFQGVVYSANQCKALITILVVLGAFMVTWGPYMVVIASEALWGKSSVSPSLETWATWLSFASAVCHPLIYGLWNKTVRKELLGMCFGDRYYREPFVQRQRTSRLFSISNRITDLGLSPHLTALMAGGQPLGHSSSTGDTGFSCSQDSGTDMMLLEDYTSDDNPPSHCTCPPKRRSSVTFEDEVEQIKEAAKNSILHVKAEVHKSLDSYAASLAKAIEAEAKINLFGEEALPGVLVTARTVPGGGFGGRRGSRTLVSQRLQLQSIEEGDVLAAEQR

SEQ ID NO: 795915 - protein, 529 aa, Homo sapiens; identical to SEQ ID NO: 795914

SEQ ID NO: 795916 - protein, 549 aa, Homo sapiens
MSARGVVQHALPTPRRGALTMSLNSSLSCRKELSNLTEEEGGEGGVIITQFIAIIVITIFVCLGNLVIVVTLYKKSYLLTLSNKFVFSLTLSNFLLSVLVLPFVVTSSIRREWIFGVVWCNFSALLYLLISSASMLTLGVIAIDRYYAVLYPMVYPMKITGNRAVMALVYIWLHSLIGCLPPLFGWSSVEFDEFKWMCVAAWHREPGYTAFWQIWCALFPFLVMLVCYGFIFRVARVKARKVHCGTVVIVEEDAQRTGRKNSSTSTSSSGSRRNAFQGVVYSANQCKALITILVVLGAFMVTWGPYMVVIASEALWGKSSVSPSLETWATWLSFASAVCHPLIYGLWNKTVRKELLGMCFGDRYYREPFVQRQRTSRLFSISNRITDLGLSPHLTALMAGGQPLGHSSSTGDTGFSCSQDSGTDMMLLEDYTSDDNPPSHCTCPPKRRSSVTFEDEVEQIKEAAKNSILHVKAEVHKSLDSYAASLAKAIEAEAKINLFGEEALPGVLVTARTVPGGGFGGRRGSRTLVSQRLQLQSIEEGDVLAAEQR

SEQ ID NO: 795917 - protein, 33 aa, Homo sapiens
MAFAAEAFCTHHCSFLPSWLFAPAAAAFCGFFP

SEQ ID NO: 795918 - protein, 520 aa, Homo sapiens
MNPDLDTGHNTSAPAHWGELKNANFTGPNQTSSNSTLPQLDITRAISVGLVLGAFILFAIVGNILVILSVACNRHLRTPTNYFIVNLAMADLLLSFTVLPFSAALEVLGYWVLGRIFCDIWAAVDVLCCTASILSLCAISIDRYIGVRYSLQYPTLVTRRKAILALLSVWVLSTVISIGPLLGWKEPAPNDDKECGVTEEPFYALFSSLGSFYIPLAVILVMYCRVYIVAKRTTKNLEAGVMKEMSNSKELTLRIHSKNFHEDTLSSTKAKGHNPRSSIAVKLFKFSREKKAAKTLGIVVGMFILCWLPFFIALPLGSLFSTLKPPDAVFKVVFWLGYFNSCLNPIIYPCSSKEFKRAFVRILGCQCRGRGRRRRRRRRRLGGCAYTYRPWTRGGSLERSQSRKDSLDDSGSCLSGSQRTLPSASPSPGYLGRGAPPPVELCAFPEWKAPGALLSLPAPEPPGRRGRHDSGPLFTFKLLTEPESPGTDGGASNGGCEAAADVANGQPGFKSNMPLAPGQF

SEQ ID NO: 795919 - protein, 197 aa, Homo sapiens
TCIVQEDMPTNPAILAVLDSSGRSSCYHPNGNVWVYINILGGQYSDQAGNRIRAWNWSNSITSSPFVSFKPVFLALNRYIGVRILEQDKISITFLAMGQQARISVGTKVKLPNPEEIPILRYVSGDDLLLLASLIKIRRLFHKLEGCVNFPSSQVWEKLKQPSYLSSLSLKLIALCHSSGIKQDIMKTIRNIINEEI

SEQ ID NO: 795920 - protein, 130 aa, Homo sapiens [sequence omitted]

SEQ ID NO: 795921 - protein, 123 aa, Homo sapiens
CLFDSVMSVRQGEGTIQFLSRVRLTQDLYIASHHTPTNVYMLKYLNRHRFLKLPLSKPFNDKPLHFIPLGLLLATKAGGNQNLNNCIFLQDISLFEIVPWRACPKVGSWRNSWSLSHWLGKPF

SEQ ID NO: 795922 - protein, 87 aa, Homo sapiens
AQTGWKPGPLAACNWFPWEGRSGDELSSSPGAWQSDHGNENCDPVAHLGCCGSVIVWVSVIFGGRNGQRVAAWINHPHLWARLAPCN

SEQ ID NO: 795923 - protein, 219 aa, Homo sapiens
MWIQVWMTVGTEEAPKVFKMAASMHGQPSPSLEDAKLRRPMVIEIIEKNFDYLRKEMTQNIYQMATFGTTAGFSGIFSNFLFRRCFKVKHDALKTYASLATLPFLSTVVTDKLFVIDALYSDNISKENCVFRSSLIGIVCGVFYPSSLAFTKNGRLATKYHTVPLPPKGRVLIHWMTLCQTQMKLMAIPLVFQIMFGILNGLYHYAVFEETLEKTIHEE

SEQ ID NO: 795924 - protein, 110 aa, Homo sapiens
RHFQECIMEGLCRTRTKPLNYTKLSMIDQRFDGNPTAFLEKIREALVKHTSLSPDSVEGQLILKDKFITQAAPDIKRKLQKQALEPDSSLENLLKLATSVFYNRDREAQE

SEQ ID NO: 795925 - protein, 311 aa, Homo sapiens
MATSNHSSGAEFILAGLTQRPELQLPLFLLFLGIYVVTVVGNLGMIFLIALSSQLYPPVYYFLSHLSFIDLCYSSVITPKMLVNFVPEENIISFLECITQLYFFLIFVIAEGYLLTAMEYDRYVAICRPLLYNIVMSHRVCSIMMAVVYSLGFLWATVHTTRMSVLSFCRSHTVSHYFCDILPLLTLSCSSTHINEILLFIIGGVNTLATTLAVLISYAFIFSSILGIHSTEGQSKAFGTCSSHLLAVGIFFGSITFMYFKPPSSTTMEKEKVSSVFYITIIPMLNPLIYSLRNKDVKNALKKMTRGRQSS

SEQ ID NO: 795926 - protein, 33 aa, Homo sapiens
MREGRRAAGPHAGRGSRTPDALAGRPRPLKSAA

SEQ ID NO: 795927 - protein, 44 aa, Homo sapiens
MGQTGILCSSREHDFFGSHTICSCRSGRAPEWMQAQMFSGLGVK

SEQ ID NO: 795928 - protein, 73 aa, Homo sapiens
MTYFPLGRYPVVGLLDQMVVLSTFSSLKNLHIVFHSGCTSLHSHQLCKRVPFSPHPRQHLLFFDFWIKAILAE

SEQ ID NO: 795929 - protein, 206 aa, Homo sapiens
DAVVIPFVLGSCVFPGVIRPARVVSGEAALSRRLFPNLIRWAPIEDSMDMDMSPLRAQNYLFGCELKADKDYHFKVDNDENEHQLSLRTVSLGAGAKDELHIVEAEAMNYEGSPIKVTLATLKMSVQPTVSLGGFEITPPVVLRLKCGSGPVHISGQHLVAVEEDAESEDEEEEDVKLLSISGKRSAPGGGSKVPQKKVKLAADED

SEQ ID NO: 795930 - protein, 83 aa, Homo sapiens
VHISGQHLVAVEEDAESEDEEDVQKTTSVHISGQHLVAVEEDAESEDEEEEDVKLLSISGKRSAPGGGSKVPQKKVKLAADED

SEQ ID NO: 795931 - protein, 126 aa, Homo sapiens
NGNLLFHSSGGYQPKIKESPGLVASGSSEGESIPCLSPCFWWLLAILGLRIHHSNLCLRENPVILSVSCVVIWPYKDNQSLDLRPTLIQYDLILIRLYLQRPCFQIRSNSQVLGVRISRYLFEDTI

SEQ ID NO: 795932 - protein, 263 aa, Homo sapiens
AVGKNKRLTKGGKKGAKKKVVDPFSKKDWYDVKAPAMFNIRNIGKTLVTRTQGTKIASDGLKGRVFEVSLADLQNDEVAFRKFKLITEDVQGKNCLTNFHGMDLTRDKMCSMVKKWQTMIEAHVDVKTTDGYLLRLFCVGFTKKRNNQIRKTSYAQHQQVRQIRKKMMEIMTREVQTNDLKEVVNKLIPDSIGKDIEKACQSIYPLHDVFVRKVKNAEEAQFELGRLMELHGEGSSSGKATGDETGAKVERADGYEPPVQESV

SEQ ID NO: 795933 - protein, 257 aa, Homo sapiens
MLMPKKNRIAIYELLFKEGVMVAKKDVHMPKHPELADKNAPNLRVMKAMQSLKSRGYVKDSLPGDISTGTLPMRVSSISVITFICPRRLCLPPYTAAVQRLAGLGLKVWRVSDLQDSQEGKPTEIPTNGVLCPLVPTRKPRLGPGQQPNSSSEMDLVVDVVSHLSKIGEDYYAMNKLTVKKKKRKKKKNNRLADNTITTRRKSKRGGSTKGVIKRAQEQKRDPHKENRDQREKKRGTPTEEGEKKKKEEKHGDKHQD

SEQ ID NO: 795934 - protein, 101 aa, Homo sapiens
EHRRLAGAVARMRPEVASSHCASAARAQRGPGRGFAARPVVPAGLAVPAVPGARGPGRPGALSPHPSPLAALSGLGSCHIEDTLRPQLYLPPSASSLQSPP

SEQ ID NO: 795935 - protein, 41 aa, Homo sapiens
ICVSGLLLAKRSVCGHLRNPHSTPGAVLHSILISRNETTFL

SEQ ID NO: 795936 - protein, 123 aa, Homo sapiens
ALPAPAEPLQRAINLCKTEWTTSTWLSEKSDGTASNGTAPAKVDLGASRRDMGRDLPGLPAAPALEPESPRHLTSCTPPPEAGYHRPSGFVLEGAGLVWTIQSGSDHHPVRGTAERTCCTDAV

SEQ ID NO: 795937 - protein, 82 aa, Homo sapiens
AASSCSSRPASSPSAPSTQLPALPTVTHRPNDRLSAVMARDDTRRLPCCAPPEDAERSPFLTLLGHKNTRQLKVAKPHLFML

SEQ ID NO: 795938 - protein, 82 aa, Homo sapiens; identical to SEQ ID NO: 795937

SEQ ID NO: 795939 - protein, 71 aa, Homo sapiens
EHEVRSLGGLSSVSMTISLQPHNCVMGCVIFLTRNQLKDADWEAVHATGRQDVPEKIKNIKYSIRTQSVSI

SEQ ID NO: 795940 - protein, 145 aa, Homo sapiens
DGHRPPPPPQRLIRRAWGDLGTSPPPRGDNTFAAPRLPRRPSWCILGSPLADTYGTCSSFLYLGRRISPAALSREGAALLPGLCIASLYPEPGHPPHLSRHFGFSSRDQASLALSPRHNSSNYPSLPARVLGTSEGLSPTALPKS

SEQ ID NO: 795941 - protein, 115 aa, Homo sapiens
MEFLYRIVVGFILIFTFFNIKGQNTKCPMSCYYIVRVLGTLGILTVFWVCPLTIFNPDYFIPISITIVLTLLLGILFLIVYYGSFHPNRSAETKCDEIDGKPVLRECRMRYFLME

SEQ ID NO: 795942 - protein, 90 aa, Homo sapiens
LSEELVRMVKDMKTYFPSWRHSKPYSFYAFNHVLHCVDSMQANSEIFQLKLTTSSTYNYVQLELLDTVDSEHASKNTDTLVAIFYCRLEG

SEQ ID NO: 795943 - protein, 101 aa, Homo sapiens
GCGSFCRRGSGCGYGGYGYGSGFGSYGYGSGFGGYGYGSGFGGYGYGLPPIVQWRIRILWLLLNELLKLEAEEKPPNVFGPVPCFHSKNPFYCLQHQWRDI

SEQ ID NO: 795944 - protein, 314 aa, Homo sapiens
MSWVLTLKDARVRVESLHAGWNRSHPSPELAGAGVHARAPAVGCRQRSGHLHVRLMQRLLERPCQQRLGKKYQLELPPLHERARKPKGSKNCLQRVRDCELSVLTRRSVRGPEDRGALDHMVRMITSLYSPAVALACQTVCPQSSLCVGKRRLAEQEILAAEEILATRRGVGRQAQEADEAEGAEQHKRPCPEAAGSRQGSPRAGLPPAPLPGSWGSVDPAPRKASLLPLQRLLRSSLRPDVVVPRIRLSKAPAPTFQTQRPARKGSTKDSGHLRIPNQPYKVATEEKPEAEEAEKKRQAKVQEKRPPPWKKRT

SEQ ID NO: 795945 - protein, 117 aa, Homo sapiens
ATADMPPRKFLTGNTYGLQEMRREEKAQRGSVRWFPFAITVLQRDSLKQFKSLRGTFIKRFYTYLGATLGTPHRSSRRTLTFKSGIKACSLWQRHSHQPPVVAALQDDSSPIDLSVL

SEQ ID NO: 795946 - protein, 97 aa, Homo sapiens
MIHINLFYVSKLVLAASLLIQEKLDEQLSSSSRPVTGESTIPVPTDEALSVILAVETSTPLQSKRSNLWPKTKMPVQPRCQIAKEWLTLYALGLKTA

SEQ ID NO: 795947 - protein, 332 aa, Homo sapiens
MATIKSELIKNFAEEEAIHHNKISIVGTGSVGVACAISILLKGLSDELVLVDVDEGKLKGETMDLQHGSPFMKMPNIVSSKDYLVTANSNLVIITAGARQKKGETRLDLVQRNVSIFKLMIPNITQYSPHCKLLIVTNPVDILTYVAWKLSGFPKNRVIGSGCNLDSARFRYFIGQRLGIHSESCHGLILGEHGDSSVPVWSGVNIAGVPLKDLNPDIGTDKDPEQWENVHKKVISSGYEMVKMKGYTSWGISLSVADLTESILKNLRRVHPVSTLSKGLYGINEDIFLSVPCILGENGITDLIKVKLTLEEEACLQKSAETLWEIQKELKL

SEQ ID NO: 795948 - protein, 161 aa, Homo sapiens
MATIKSELIKNFAEEEAIHHNKISIVGTGSVGVACAISILLKGLSDELVLVDVDEGKLKGETMDLQHGSPFMKMPNIVSSKDYLVTANSNLVIITAGARQKKGETRLDLVQRNVSIFKLMIPNITQYSPHCKLLIVTNPGQLCCFKFSTFRFGGTLCRFIT

SEQ ID NO: 795949 - protein, 60 aa, Homo sapiens
MERNSESRNTYSQLTFKKDAKIIQWGGQARWLMPVIPALWEAEAGRSPEVRKSRPAWPTW

SEQ ID NO: 795950 - protein, 33 aa, Homo sapiens
MGRRCQGGRHGDARVGVMEMPGWASWRRQGSLE

SEQ ID NO: 795951 - protein, 168 aa, Homo sapiens
MKKFFTVAILAGSVLSTAHGSLLNLKAMVEAVTGRSAILSFVGYGCYCGLGGRGQPKDEVDWCCHAHDCCYQELFDQGCHPYVDHYDHTIENNTEIVCSDLNKTECDKQTCMCDKNMVLCLMNQTYREEYRGFLNVYCQGPTPNCSIYEPPPEEVTCSHQSPAPPAPP

SEQ ID NO: 795952 - protein, 71 aa, Homo sapiens
VFLTLWPELDLLAPSLATHHLSHSPSVFTPITRIKGEALAAILFQPNSFAGTQPDTLLASVKPPANAVSTM

SEQ ID NO: 795953 - protein, 82 aa, Homo sapiens
MSHLRTHVPSMHPIHSPVSYHLHPITPMSHLHTRVPSTYSCPIIDTYIPFTHACPIIHTPVPSTHPRPILASPSRPHTPVPS

SEQ ID NO: 795954 - protein, 313 aa, Homo sapiens
MHLGERPFCCTLCDKTYCDASGLSRHRRVHLGYRPHSCSVCGKSFRDQSELKRHQKIHQNQEPVDGNQECTLRIPGTQAEFQTPIARSQRSIQGLLDVNHAPVARSQEPIFRTEGPMAQNQASVLKNQAPVTRTQAPITGTLCQDARSNSHPVKPSRLNVFCCPHCSLTFSKKSYLSRHQKAHLTEPPNYCFHCSKSFSSFSRLVRHQQTHWKQKSYLCPICDLSFGEKEGLMDHWRGYKGKDLCQSSHHKCRVILGQWLGFSHDVPTMAGEEWKHGGDQSPPRIHTPRRRGLREKACKGDKTKEAVSILKHK

SEQ ID NO: 795955 - protein, 229 aa, Homo sapiens
MHLGERPFCCTLCDKTYCDASGLSRHRRVHLGYRPHSCSVCGKSFRDQSELKRHQKIHQNQEPVDGNQECTLRIPGTQAEFQTPIARSQRSIQGLLDVNHAPVARSQEPIFRTEGPMAQNQASVLKNQAPVTRTQAPITGTLCQDARSNSHPVKPSRLNVFCCPHCSLTFTSLSAHFPGWSDTSRPTGSRRATFALSVTSPLGRKRALWITGGAIKARTCARAATINAG

SEQ ID NO: 795956 - protein, 329 aa, Homo sapiens
MFFKKLSCRFCITLSSLMLLTQRVTSLSLDICEGKVKAASGGFRSRSSLSEHVCKALPYFSYLLFFPALLGGSLCSFQRFQARVQGSSALHPRHSFWALSWRGLQILGLECLNVAVSRVVDAGAGLTDCQQFECIYVVWTTAGLFKLTYYSHWILDDSLLHAAGFGPELGQSPGEEGYVPDADIWTLERTHRISVFSRKWNQSTARWLRRLVFQHSRAWPLLQTFAFSAWWHGLHPGQVFGFVCWAVMVEADYLIHSFANEFIRSWPMRLFYRTLTWAHTQLIIAYIMLAVEVRSLSSLWLLCNSYNSVFPMVYCILLLLLAKRKHKCN

SEQ ID NO: 795957 - protein, 267 aa, Homo sapiens
ALDVLHRHCKGDDVGKAANNPNHCNCIIDQIFTGGLQSDVTCQACHGVSTTIDPCWDISLDLPGSCTSFWPMSPGRESSVNGESHIPGITTLTDCLRRFTRPEHLGSSAKIKCGSCQSYQESTKQLTMNKLPVVACFHFKRFEHSAKQRRKITTYISFPLELDMTPFMASSKESRMNGQLQLPTNSGNNENKYSLFAVVNHQGTLESGHYTSFIRHHKDQWFKCDDAVITKASIKDVLDSEGYLLFYHKQVLEHESEKVKEMNTQAY

SEQ ID NO: 795958 - protein, 78 aa, Homo sapiens
CSFTCHLNTDEYHGCNFSLNLSPELHAHIPAANSLSLLESLQSTSRLNIFNTDIIIFFQACNLNDPSAPSNHTSRNLV

SEQ ID NO: 795959 - protein, 118 aa, Homo sapiens
MTLADDVNLDDLIMTKDDLFGADIKAICTEACLMALREPQNEDVEASDLTKVYTACTWESTAIHSLHCTLSLHKVSHIKPRCEGSVPQRVATGHLTGDNEEPDLNQVQCVFSKLKNVK

SEQ ID NO: 795960 - protein, 118 aa, Homo sapiens; identical to SEQ ID NO: 795959

SEQ ID NO: 795961 - protein, 132 aa, Homo sapiens
MALKFQGKYDQAVHQEAQMPHGQGNSFSRRPTDFSCLGSEEATKICPSTRLSGEMSRLHFHQSLSSSPTPQTTGRLGGSSKFPVADSLVVIMFQKLKWEWKLSSFLYSQKLSPAHSLRKCCILALNTFQQND

SEQ ID NO: 795962 - protein, 105 aa, Homo sapiens
FFEMESHSVAQAGVQWRDLGSLQPSPPRFKRFSCLSLLSSWDYRHAPPHQANFVFLVEMGFLHVGQAGRHRAQPQSSVFKLCSEVVQCRKLPHTKPLKPRERGWV

SEQ ID NO: 795963 - protein, 198 aa, Homo sapiens
IGTARAAADVDRPTRVSDNPLTGLVGGEWSLNFPNRPRFTSCERKCSSDDQSAARSSFNVRPSFTPPSPRFGSCVRAPVSGLRGSVLPGHRRLPGRVGVRRRPASETWQARMLVSVSLGSQYVWTETVHLQGGLGLARTGSGLSAGLVTFRRRVALAGSLDRVSQLHHLFASRPWNSSMLWERERHWGEAGRTLGSWL

SEQ ID NO: 795964 - protein, 130 aa, Homo sapiens
GPWCRGWRSGRPWAADCCLKPTLRREGGRGGDRTDPLGEANPHSQTQERPRQGDPREGQPCVYTPPARTLLRRSHQLLVEWSVGADLTWRIHASHTWSWATAGTRPLGLSLPGGSPATRGAVPGALSGVS

SEQ ID NO: 795965 - protein, 46 aa, Homo sapiens
LQETGVSVPKGYVAKSPDEAYAIAKKLGSKDVVMKAQVLAGGRGKG

SEQ ID NO: 795966 - protein, 116 aa, Homo sapiens
MRAVFSTSCEAVLTSITPPASNAFLGRGGGLQVKLNLEGTQASASAQLGSGREREGINNSLGNSKSQTFLTTFATSEMIQDVRLAKANSNSTERHKVKRKTAPPPQKPCPSSVYTF

SEQ ID NO: 795967 - protein, 152 aa, Homo sapiens
MVMGTHTYSHWPSCCPSKGQDTSEELLRWSTVPVPPLEPARPNRHPESCRASEDGPLNSRAISPWRYELDRDLNRLPQDLYHARCLCPHCVSLQTGSHMDPRGNSELLYHNQTVFYRRPCHGEKGTHKGYCLERRLYRVSLACVCVRPRVMG

SEQ ID NO: 795968 - protein, 674 aa, Homo sapiens
MVVAHPTATATTTPTATVTATVVMTTATMDLRDWLFLCYGLIAFLTEVIDSTTCPSVCRCDNGFIYCNDRGLTSIPADIPDDATTLYLQNNQINNAGIPQDLKTKVNVQVIYLYENDLDEFPINLPRSLRELHLQDNNVRTIARDSLARIPLLEKLHLDDNSVSTVSIEEDAFADSKQLKLLFLSRNHLSSIPSGLPHTLEELRLDDNRISTIPLHAFKGLNSLRRLVLDGNLLANQRIADDTFSRLQNLTELSLVRNSLAAPPLNLPSAHLQKLYLQDNAISHIPYNTLAKMRELERLDLSNNNLTTLPRGLFDDLGNLAQLLLRNNPWFCGCNLMWLRDWVKARAAVVNVRGLMCQGPEKVRGMAIKDITSEMDECFETGPQGGVANAAAKTTASNHASATTPQGSLFTLKAKRPGLRLPDSNIDYPMATGDGAKTLAIHVKALTADSIRITWKATLPASSFRLSWLRLGHSPAVGSITETLVQGDKTEYLLTALEPKSTYIICMVTMETSNAYVADETPVCAKAETADSYGPTTTLNQEQNAGPMASLPLAGIIGGAVALVFLFLVLGAICWYVHQAGELLTRERAYNRGSREKDDYMESGTKKDNSILEIRGPGLQMLPINPYRAKEEYVVHTIFPSNGSSLCKATHTIGYGTTRGYRDGGIPDIDYSYT

SEQ ID NO: 795969 - protein, 104 aa, Homo sapiens
FLKGSKVHLEEGQEGNLRYQVCQSNLLFIPWGIFRIPSFPVSSESQLPKFCQVPETDSQPWLRHITTTTTTTTTTTTTKTQKGCWMKESCSHTPQQHRALIPAM

SEQ ID NO: 795970 - protein, 136 aa, Homo sapiens
GQVGVPKCLTPPWNSPTCPPGKTENPPFTWEPCDGHLPGLGLCRPTQRTERCAEVPALWALLVGLSSAAAGPQPRQWQHGAPDLLPAASCSTPPPFLSVTPWRGSRSHAARSLQTCHLPHWRGSREARPQQSFPIP

SEQ ID NO: 795971 - protein, 112 aa, Homo sapiens
YLRQVEVEETERGELETGGEAVEQPVGEEVQVSGRPEQGQGAAEREGGGEEGGPERCPQETEEEAEALVTQPPLAVQEQPPQLQVGKGEQRGVEQGVQDAQRQLHGARHRGA

SEQ ID NO: 795972 - protein, 105 aa, Homo sapiens
NYLTFSPPIGTKKNSSGSSVVSSGSSLPAPSPSKEPLSCSGGSSPSSGPPGRSQPSYLNTLLCLELVLCIIFVLGCRVGTESINVFLNTVFPGLIRLVGAVITCC

SEQ ID NO: 795973 - protein, 105 aa, Homo sapiens; identical to SEQ ID NO: 795972

SEQ ID NO: 795974 - protein, 117 aa, Homo sapiens
IQRLPGIETQDSLISLLPGPPSRQPDWKRGQERGAGPSPLSAQSGTWPPHLSLLGWNVVTWSHLAARNTGRCSLYFWQQCAQLQVFTRETRWQISGDNQLSPPQQHTDSLSPALWDT

SEQ ID NO: 795975 - protein, 117 aa, Homo sapiens; identical to SEQ ID NO: 795974

SEQ ID NO: 795976 - protein, 70 aa, Homo sapiens
MTIFPVGFSQPLHGPGPVVPGSPEPATSILDTGHLNWGSFPLYGLPVLADINGFERRKDPLGACKTLVRK

SEQ ID NO: 795977 - protein, 590 aa, Homo sapiens
MELENIVANTVLLKAREGGGGKRKGKSKKWKEILKFPHISQCEDLRRTIDRDYCSLCDKQPIGRLLFRQFCETRPGLECYIQFLDSVAEYEVTPDEKLGEKGKEIMTKYLTPKSPVFIAQVGQDLVSQTEEKLLQKPCKELFSACAQSVHEYLRGEPFHEYLDSMFFDRFLQWKWLERQPVTKNTFRQYRVLGKGGFGEVCACQVRATGKMYACKRLEKKRIKKRKGESMALNEKQILEKVNSQFVVNLAYAYETKDALCLVLTIMNGGDLKFHIYNMGNPGFEEERALFYAAEILCGLEDLHRENTVYRDLKPENILLDDYGHIRISDLGLAVKIPEGDLIRGRVGTVGYMAPEVLNNQRYGLSPDYWGLGCLIYEMIEGQSPFRGRKEKVKREEVDRRVLETEEVYSHKFSEEAKSICKMLLTKDAKQRLGCQEEGAAEVKRHPFFRNMNFKRLEAGMLDPPFVPDPRAVYCKDVLDIEQFSTVKGVNLDHTDDDFYSKFSTGSVSIPWQNEMIETECFKELNVFGPNGTLPPDLNRNHPPEPPKKGLLQRLFKRQHQNNSKSSPSSKTSFNHHINSNHVSSNSTGSS

SEQ ID NO: 795978 - protein, 485 aa, Homo sapiens [sequence omitted]

SEQ ID NO: 795979 - protein, 312 aa, Homo sapiens
MELENIVANTVLLKAREGGGGKRKGKSKKWKEILKFPHISQCEDLRRTIDRDYCSLCDKQPIGRLLFRQFCETRPGLECYIQFLDSVAEYEVTPDEKLGEKGKEIMTKYLTPKSPVFIAQVGQDLVSQTEEKLLQKPCKELFSACAQSVHEYLRGEPFHEYLDSMFFDRFLQWKWLERQPVTKNTFRQYRVLGKGGFGEVCACQVRATGKMYACKRLEKKRIKKRKGESMALNEKQILEKVNSQFVVNLAYAYETKDALCLVLTIMNGGDLKFHIYNMGNPGFEEERALFYAAEILCGLEDLHRENTVYRPH

SEQ ID NO: 795980 - protein, 132 aa, Homo sapiens
MCDLALCPWQPRAVYCKDVLDIEQFSTVKGVNLDHTDDDFYSKFSTGSVSIPWQNEMIETECFKELNVFGPNGTLPPDLNRNHPPEPPKKGLLQRLFKRQHQNNSKSSPSSKTSFNHHINSNHVSSNSTGSS

SEQ ID NO: 795981 - protein, 78 aa, Homo sapiens
MADWGPCCPWTDENAESSYALPKGTQQGRVPMRLSQGPTDPAVPLRPHCHIRISDLGLAVKIPEGDLIRGRVGTVGYM

SEQ ID NO: 795982 - protein, 77 aa, Homo sapiens
KREEVDRRVLETEEVYSHKFSEEAKSICKMVSSWWPDATLKLVAPLPGPGPSLSPEQQTELKGQGSEHGGGGCSPPS

SEQ ID NO: 795983 - protein, 224 aa, Homo sapiens; identical to SEQ ID NO: 740637

SEQ ID NO: 795984 - protein, 59 aa, Homo sapiens
MFKGHRFLSATNLIYITFIFFDLVNCSGQVPTVNMLCRGMKPDSVEKIKVFFKSSGWVQ

SEQ ID NO: 795985 - protein, 349 aa, Homo sapiens
MVSPRRRIWAPRRTPAWICPVGPAGPSGANSLVRWTEGTSRATRAPGTAAPPRPLGSRGAEAAEPQEGLSATVSACFQEQQEMNTLQGPVSFKDVAVDFTQEEWWQLDPDEKIAYGDVMLENYSHLVSVGYDYHQAKHHHGVEVKEVEQGEEPWIMEGEFPCQHSPEPAKAIKPIDRKSVHQICSGPVVLSLSTAVKELVENSLDAGATNIDLKLKDYGVDLIEVSDNGCGVEEENFEGLTLSALKHHTCKIQEFADLTEVETFGFQGEALSSLCALSDVTISTCHASVKVGTRLVFDHDGKIIQETPYPPPQRTTVSVKQLFSTLPVRHKEFQRNIKKTCLLPLRLLP

SEQ ID NO: 795986 - protein, 267 aa, Homo sapiens
MNTLQGPVSFKDVAVDFTQEEWWQLDPDEKIAYGDVMLENYSHLVSVGYDYHQAKHHHGVEVKEVEQGEEPWIMEGEFPCQHSPEPAKAIKPIDRKSVHQICSGPVVLSLSTAVKELVENSLDAGATNIDLKLKDYGVDLIEVSDNGCGVEEENFEGLTLSALKHHTCKIQEFADLTEVETFGFQGEALSSLCALSDVTISTCHASVKVGTRLVFDHDGKIIQETPYPPPQRTTVSVKQLFSTLPVRHKEFQRNIKKTCLLPLRLLP

SEQ ID NO: 795987 - protein, 302 aa, Homo sapiens
KPYQCSECGKTFSQKSYLTIHHRTHTGEKPYACDHCEEAFSHKSRLTVHQRTHTGEKPYECNECGKPFINKSNLRLHQRTHTGEKPYECNECGKTFHRKSFLTIHQWTHTGEKPYECNECGKTFRCKSFLTVHQRTHAGEKPYACNECGKTYSHKSYLTVHHRTHTGEKPYECNECGKSFHCKSFLTIHQRTHAGKKPYECNECEKTFINKLNLGIHKITHTGERPYECNECGKTFRQKSNLSTHQGTHTGEKPYVCGKTFHRKSFLTIHQRTHTGKNHMDVMNVEKLFVRNHTLLYIRELT

SEQ ID NO: 795988 - protein, 83 aa, Homo sapiens
ARPPGGDLRRRGAAAVIGGREQLGWLGLVELPWYPSIPNCKIFMKLKKKITSLGNLGRPRLYKKIKKLAECGGVHLWSSYYGG

SEQ ID NO: 795989 - protein, 56 aa, Homo sapiens
MFHCMYIPYFAYSFTFHGHLGCFYLVGTVNHAAINIGVQIYVPASAFNSFAYIPRS

SEQ ID NO: 795990 - protein, 51 aa, Homo sapiens
MKMELGRDVCSSALRIMKATNIKKRSGGRDTVAPQGMNQLGKEKKESLLSS

SEQ ID NO: 795991 - protein, 67 aa, Homo sapiens
MRIHYLLFALLFLFLVPVPGHGGIINTLQKYYCRVRGGRCAVLSCLPKEEQIGKCSTRGRKCCRRKK

SEQ ID NO: 795992 - protein, 569 aa, Homo sapiens
MAPTLATAHRRRWWMACTAVLENLLFSAVLLGWGSLLIMLKSEGFYSYLCTEPENVTNGTVGGTAEPGHEEVSWMNGWLSCQAQDEMLNLAFTVGSFLLSAITLPLGIVMDKYGPRKLRLLGSACFAVSCLLIAYGASKPNALSVLIFIALALNGFGGMCMTFTSLTLPNMFGDLRSTFIALMIGSYASSAVTFPGIKLIYDAGVSFIVVLVVWAGCSGLVFLNCFFNWPLEPFPGPEDMDYSVKIKFSWLGFDHKITGKQFYKQVTTVGRRLSVGSSMRSAKEQVALQEGHKLCLSTVDLEVKCQPDAAVAPSFMHSVFSPILLLSLVTMCVTQLRLIFYMGAMNNILKFLVSGDQKTVGLYTSIFGVLQLLCLLTAPVIGYIMDWRLKECEDASEEPEEKDANQGEKKKKKRDRQIQKITNAMRAFAFTNLLLVGFGVTCLIPNLPLQILSFILHTIVRGFIHSAVGGLYAAVYPSTQFGSLTGLQSLISALFALLQQPLFLAMMGPLQGDPLWVNVGLLLLSLLGFCLPLYLICYRRQLERQLQQRQEDDKLFLKINGSSNQEAFV

SEQ ID NO: 795993 - protein, 569 aa, Homo sapiens; identical to SEQ ID NO: 795992

SEQ ID NO: 795994 - protein, 569 aa, Homo sapiens; identical to SEQ ID NO: 795992

SEQ ID NO: 795995 - protein, 569 aa, Homo sapiens; identical to SEQ ID NO: 795992

SEQ ID NO: 795996 - protein, 450 aa, Homo sapiens
MAPTLATAHRRRWWMACTAVLENLLFSAVLLGWGSLLIMLKSEGFYSYLCTEPENVTNGTVGGTAEPGHEEVSWMNGWLSCQAQDEMLNLAFTVGSFLLSAITLPLGIVMDKYGPRKLRLLGSACFAVSCLLIAYGASKPNALSVLIFIALALNGFGGMCMTFTSLTLPNMFGDLRSTFIALMIGSYASSAVTFPGIKLIYDAGVSFIVVLVVWAGCSGLVFLNCFFNWPLEPFPGPEDMDYSVKIKFSWLGFDHKITGKQFYKQVTTVGRRLSVGSSMRSAKEQVALQEGHKLCLSTVDLEVKCQPDAAVAPSFMHSVFSPILLLSLVTMCVTQLRLIFYMGAMNNILKFLVSGDQKTVGLYTSIFGVLQLLCLLTAPVIGYIMDWRLKECEDASEEPEEKDANQCVGQGGAPAPSPQPLQKDPRAACQAQGGWDRGREQCTPRSSRSP

SEQ ID NO: 795997 - protein, 123 aa, Homo sapiens
MAPTLATAHRRRWWMACTAVLENLLFSAVLLGWGSLLIMLKSEGFYSYLCTEPENVTNGTVGGTAEPGHEEVSWMNGWLSCQAQDEMLNLAFTVGSFLLSAITLLGSYIELPSIHSSCLPEPC

SEQ ID NO: 795998 - protein, 569 aa, Homo sapiens; identical to SEQ ID NO: 795992

SEQ ID NO: 795999 - protein, 569 aa, Homo sapiens; identical to SEQ ID NO: 795992

SEQ ID NO: 796000 - protein, 177 aa, Homo sapiens
IPRQVSARGEDANQGEKKKKKRDRQIQKITNAMRAFAFTNLLLVGFGVTCLIPNLPLQILSFILHTIVRGFIHSAVGGLYAAVYPSTQFGSLTGLQSLISALFALLQQPLFLAMMGPLQGDPLWVNVGLLLLSLLGFCLPLYLICYRRQLERQLQQRQEDDKLFLKINGSSNQEAFV

SEQ ID NO: 796001 - protein, 69 aa, Homo sapiens
PLQLAPVADQVEREAEAQQAEKEQPHVHPQRVSLERTHHGQKQRQLQQRQEDDKLFLKINGSSNQEAFV

SEQ ID NO: 796002 - protein, 128 aa, Homo sapiens
MAPTLATAHRRRWWMACTAVLENLLFSAVLLGWGSLLIMLKSEGFYSYLCTEPENVTNGTVGGTAEPGHEEVSWMNGWLSCQAQDEMLNLAFTVGSFLLSAITLPLGIVMDKYGPRKLRLLGRSVWVP

SEQ ID NO: 796003 - protein, 97 aa, Homo sapiens
TLELFTVPLSTDAALTLCHLLSSWVSLESLTLSYNGLGSNIFRLLDSLRALSGQAGCRLRALHLSILGTLGQEVTVVIIIAEEIPSPAPGFLPSLLK

SEQ ID NO: 796004 - protein, 67 aa, Homo sapiens
EIKKFLDLNDNNDKTYQNLWDTAKAVLRGMFIAINTYIKESERAQTDNLRSHLKELQKQEQTTSKPS

SEQ ID NO: 796005 - protein, 69 aa, Homo sapiens [sequence omitted]

SEQ ID NO: 796006 - protein, 130 aa, Homo sapiens
HQLLSSGRTLILEKRQLLPGSTAVRPSNKRNTSSSLGLQLQEPQTRTPLPLDLQLHDPHRGTATSAPSLPSAPQSKTSVAAPAPPWTSSSTTLRLKRQHRPLPKAPAPPPSGLNSGITSCRPSLPPHNPP

SEQ ID NO: 796007 - protein, 96 aa, Homo sapiens
LQPLMPFDYGADESGGSSSSLSIGYSTLQGLRLGCAFQVRRCCYPGNHINVFLIFRAYWYMPADSVKVLLDDKNKQTKNSKGLIWSEWPQLDLGSF

SEQ ID NO: 796008 - protein, 97 aa, Homo sapiens
GVLSGSEAGDGVCCGVLSGSEAGDGVCCGVLSGSEAGDGVCCGVLSGSEAGDGVCCGVLSGSEAGDGVCCGVLSGSEAGDGVCCGVLSGSEAGDGVC

SEQ ID NO: 796009 - protein, 110 aa, Homo sapiens
ETESCTVAQAGDSGVILAHCSLHLSDSSDSPASASQVAGIIGARHPAWLIFVFLVKMGFCNIGQAGLKLLTSTELPPSGFQSVGIRGLSYWARANLETFFSFLVPQFSQM

SEQ ID NO: 796010 - protein, 127 aa, Homo sapiens
PTGVPSPAGLFISPGPSPGHPPANGPQLHPVHPPPGTTHSDPSRLQEGQEAKDPAEASGSSLRDHPCVTSAPSTGLTARPLPCTRPLPCWPGPREANGEQPGGGTPVSAKPPCCLPSGTYKAHFATN

SEQ ID NO: 796011 - protein, 777 aa, Homo sapiens
YRGAVSCRSFHLTRALARAPPGQWTTAAPGSSTAGDHPLGPEPASRGARGQGSSRGLGLESQGPSLRHVCTQHRPHSPAPALHQATALLVRRVGGATSLPPAPSSPPPPGTCRQEAWPWRVSRPLPRCPAHERPMGSSQEEGLRCQPSQPDHDADGHCGPDLEGAERASATPGPPGLLNSHRPADSDDTNAAGPSAALLEGLLLGGGKPSPHSTRPGPFFYIGGSNGATIISSYCKSKGWQRIHDSRRDDYTLKWCEVKSRDSYGSFREGSGSQHQRRAACRGLLGRSTGQVGGVGTEVLRSLHTSPGLCPPGEQLLYQLPNNKLLTTKIGLLSTLRGRARAMSKASKVPGGVQARLEKDAAAPALEDLPWTSPGYLRPQRVLRMEEFFPETYRLDLKHEREAFFTLFDETQIWICKPTASNQGKGIFLLRNQEEVAALQAKTRSMEDDPIHHKTPFRGPQARVVQRYIQNPLLVDGRKFDVRSYLLIACTTPYMIFFGHGYARLTLSLYDPHSSDLGGHLTNQFMQKKSPLYMLLKEHTVWSMEHLNRYISDTFWKARGLAKDWVFTTLKKRMQQIMAHCFLAAKPKLDCKLGYFDLIGCDFLIDDNFKVWLLEMNSNPALHTNCEVLKEVIPGVVIETLDLVLETFRKSLRGQKMLPLLSQRRFVLLHNGEADPRPHLGGSCSLRRWPPLPTRQAKSSGPPMPHAPDQPGARRPAPPPLVPQRPRPPGPDLDSAHDGEPQAPGTEQSGTGNRHPAQEPSPGTAKEEREEPENARP

SEQ ID NO: 796012 - protein, 696 aa, Homo sapiens
LPGCRLLPVFSSHQGPRPGTPRPMDHSCTRFIHRRGPPTRTRAGFKRGKRPRIQQRPRARVSGTIPASRLHPAPASQPGPCPAPGHCPVGPAHERPMGSSQEEGLRCQPSQPDHDADGHCGPDLEGAERASATPGPPGLLNSHRPADSDDTNAAGPSAALLEGLLLGGGKPSPHSTRPGPFFYIGGSNGATIISSYCKSKGWQRIHDSRRDDYTLKWCEVKSRDSYGSFREGEQLLYQLPNNKLLTTKIGLLSTLRGRARAMSKASKVPGGVQARLEKDAAAPALEDLPWTSPGYLRPQRVLRMEEFFPETYRLDLKHEREAFFTLFDETQIWICKPTASNQGKGIFLLRNQEEVAALQAKTRSMEDDPIHHKTPFRGPQARVVQRYIQNPLLVDGRKFDVRSYLLIACTTPYMIFFGHGYARLTLSLYDPHSSDLGGHLTNQFMQKKSPLYMLLKEHTVWSMEHLNRYISDTFWKARGLAKDWVFTTLKKRMQQIMAHCFLAAKPKLDCKLGYFDLIGCDFLIDDNFKVWLLEMNSNPALHTNCEVLKEVIPGVVIETLDLVLETFRKSLRGQKMLPLLSQRRFVLLHNGEADPRPHLGGSCSLRRWPPLPTRQAKSSGPPMPHAPDQPGARRPAPPPLVPQRPRPPGPDLDSAHDGEPQAPGTEQSGTGNRHPAQEPSPGTAKEEREEPENARP

SEQ ID NO: 796013 - protein, 313 aa, Homo sapiens
YRGAVSCRSFHLTRALARAPPGQWTTAAPGSSTAGDHPLGPEPASRGARGQGSSRGLGLESQGPSLRHVCTQHRPHSPAPALHQATALLVRRVGGATSLPPAPSSPPPPGTCRQEAWPWRVSRPLPRCPAHERPMGSSQEEGLRCQPSQPDHDADGHCGPDLEGAERASATPGPPGLLNSHRPADSDDTNAAGPSAALLEGLLLGGGKPSPHSTRPGPFFYIGGSNGATIISSYCKSKGWQRIHDSRRDDYTLKWCEVKSRDSYGSFREGEQLLYQLPNNKLLTTKIGLLSTLRGRARAMSKASKVPGGVQAR

SEQ ID NO: 796014 - protein, 811 aa, Homo sapiens
YRGAVSCRSFHLTRALARAPPGQWTTAAPGSSTAGDHPLGPEPASRGARGQGSSRGLGLESQGPSLRHVCTQHRPHSPAPALHQATALLVRRVGGATSLPPAPSSPPPPGTCRQEAWPWRVSRPLPRCPAHERPMGSSQEEGLRCQPSQPDHDADGHCGPDLEGAERASATPGPPGLLNSHRPADSDDTNAAGPSAALLEGLLLGGGKPSPHSTRPGPFFYIGGSNGATIISSYCKSKGWQRIHDSRRDDYTLKWCEVKSRDSYGSFREGSGSQHQRRAACRGLLGRSTGQVGGVGTEVLRSLHTSPGLCPPGEQLLYQLPNNKLLTTKIGLLSTLRGRARAMSKASKVPGGVQARLEKDAAAPALEDLPWTSPGYLRPQRVLRMEEFFPETYRLDLKHEREAFFTLFDETQIWICKPTASNQGKGIFLLRNQEEVAALQAKTRSMEDDPIHHKTPFRGPQARVVQRYIQNPLLVDGRKFDVRSYLLIACTTPYMIFFGHGYARLTLSLYDPHSSDLGGHLTNQFMQKKSPLYMLLKEHTVWSMEHLNRYISDTFWKARGLAKDWVFTTLKCLTQDRSCTSLLSEFLAVNLEAECTNVWAGVAVQKRMQQIMAHCFLAAKPKLDCKLGYFDLIGCDFLIDDNFKVWLLEMNSNPALHTNCEVLKEVIPGVVIETLDLVLETFRKSLRGQKMLPLLSQRRFVLLHNGEADPRPHLGGSCSLRRWPPLPTRQAKSSGPPMPHAPDQPGARRPAPPPLVPQRPRPPGPDLDSAHDGEPQAPGTEQSGTGNRHPAQEPSPGTAKEEREEPENARP

SEQ ID NO: 796015 - protein, 109 aa, Homo sapiens
VQEFIPTRGSGEPGAHSWRVSHDRRDGRHFLSPRALTPLHTPASPEASGKCLGPSPWTRVLGPVENICLRVQGGLGTKQPEQPVKGSQLWRWAPHGRWGWGCTSSSATF

SEQ ID NO: 796016 - protein, 139 aa, Homo sapiens
MQKLKKSGSLLQLTFRDNADLRKCFLYQLSQKTGLQYFKNVVLVASPQDRYVPFHSARIEMCKTALKDRHTGPVYAEMINNLLGPLVEAKDCTLIRHNVFHALPNTANTLIGRAAHIAVLDSELFLEKFFLVAGLNYFK

SEQ ID NO: 796017 - protein, 309 aa, Homo sapiens
MPSAGLCSCWGGRVLPLLLAYVCYLLLGATIFQLLERQAEAQSRDQFQLEKLRFLENYTCLDQWAMEQFVQVIMEAWVKGVNPKGNSTNPSNWDFGSSFFFAGTVVTTIGYGNLAPSTEAGQVFCVFYALLGIPLNVIFLNHLGTGLRAHLAAIERWEDRPRRSQVLQVLGLALFLTLGTLVILIFPPMVFSHVEGWSFSEGFYFAFITLSTIGFGDYVVGTDPSKHYISVYRSLAAIWILLGLAWLALILPLGPLLLHRCCQLWLLSLRQGCGAKAAPGRRPRRGSTAARGVQVTPQDFPISKKGLGS

SEQ ID NO: 796018 - protein, 113 aa, Homo sapiens
MNVTIRKVLVRCENQGKTTVSEANVASAYPNRIHVIIKHWKHISNLPCSGSMFNKHSSEHGFSSHVFIYIENMLGRHSECPVPLCSYCELALYFHDSNLICAVSGMSVFPSVM

SEQ ID NO: 796019 - protein, 83 aa, Homo sapiens
LALPHRRVLIAVPDRTALSKRGLDLRPGGSGGVSGRINSSGRAAKEGGRAARTNRLKMAEDVLPFYPAAQRAWIGPEDKGTTY

SEQ ID NO: 796020 - protein, 104 aa, Homo sapiens
RGLGDSTDPQETLCLMILCPPEVPGGCTHCNPHPEWGGREEENRRSWGPPWFLPSTPSGIFSSVWCQQGADTIFFQIIKAESLPLGIQGWVVLWGGVVLATARF

SEQ ID NO: 796021 - protein, 91 aa, Homo sapiens
DELSFKAGDELTKMEDEDEQGWCKGRLDNGQVAYTRQIMWRRSSDESGTGQRGGRRRRAQEPQPATWASTPFPARDDGSIALGFMVFLEGR

SEQ ID NO: 796022 - protein, 87 aa, Homo sapiens
VLQAPEPRCSNRKQTAAAGYRVPACLPPGSTLSPANRPSCPRAAFAAHSQSVGLSGPGKGWKGTRLDLGKQKTTPSSPKRPVQSTGL

SEQ ID NO: 796023 - protein, 395 aa, Homo sapiens
VNVLGLLLMVLAPSPLTSKLEEGLRDCLKATEAGRKLCTQDYTVSGRASTQPELSEPVPSAVSTRPLSLLLLGIPNQAHFKECSYESMKPCAHAAHELGKWSASFSRCVTETVLEDVTGQETTRGNWVIQAVSTLTSSKSNNQRSSLVIGIFSHHTIFGSGMLSSYFDLYVIYLGLVRREEKECDALLASRHGMEGFMDSGTQTDAVVVLSLAQAAVLGLVSENELFGATISAEAFYPDLGPELSGAAMGEPEPPGPDVYQLACNGRALEEPAEEEVLEVEAACEKHTRRKTRPPVRLVPKVKFEKVEEEEQEVYEVSVPGDDKDAGPAEAPAEAASGGCDALVQSSAVKMIDLSAFSRKPRTLRHLPRTPRPELNVAPYDPHFPAPARDGFPEP

SEQ ID NO: 796024 - protein, 252 aa, Homo sapiens
RVEAGGGRTAAARAVGSQEPPARPGPARRGPQRRSRARTQGDALLASRHGMEGFMDSGTQTDAVVVLSLAQAAVLGLVSENELFGATISAEAFYPDLGPELSGAAMGEPEPPGPDVYQLACNGRALEEPAEEEVLEVEAACEKHTRRKTRPPVRLVPKVKFEKVEEEEQEVYEVSVPGDDKDAGPAEAPAEAASGGCDALVQSSAVKMIDLSAFSRKPRTLRHLPRTPRPELNVAPYDPHFPAPARDGFPEP

SEQ ID NO: 796025 - protein, 232 aa, Homo sapiens
PNWMELGGVSTSVRSGPSGYRDALLASRHGMEGFMDSGTQTDAVVVLSLAQAAVLGLVSENELFGATISAEAFYPDLGPELSGAAMGEPEPPGPDVYQLACNGRALEEPAEEEVLEVEAACEKHTRRKTRPPVRLVPKVKFEKVEEEEQEVYEVSVPGDDKDAGPAEAPAEAASGGCDALVQSSAVKMIDLSAFSRKPRTLRHLPRTPRPELNVAPYDPHFPAPARDGFPEP

SEQ ID NO: 796026 - protein, 567 aa, Homo sapiens
MGCWILNEGLSTILVLSWLGINFYLFIDTFYWYEEEESFHYTRVILGSTLAWARASALCLNFNCMLILIPVSRNLISFIRGTSICCRGPWRRQLDKNLRFHKLVAYGIAVNATIHIVAHFFNLERYHWSQSEEAQGLLAALSKLGNTPNESYLNPVRTFPTNTTTELLRTIAGVTGLVISLALVLIMTSSTEFIRQASYELFWYTHHVFIVFFLSLAIHGTGRIVRGQTQDSLSLHNITFCRDRYAEWQTVAQCPVPQFSGKEPSAWKWILGPVVLYACERIIRFWRFQQEVVITKVVSHPSGVLELHMKKRGFKMAPGQYILVQCPAISSLEWHPFTLTSAPQEDFFSVHIRAAGDWTAALLEAFGAEGQALQEPWSLPRLAVDGPFGTALTDVFHYPVCVCVAAGIGVTPFAALLKSIWYKCSEAQTPLKLSKVYFYWICRDARAFEWFADLLLSLETRMSEQGKTHFLSYHIFLTGWDENQALHIALHWDENTDVITGLKQKTFYGRPNWNNEFKQIAYNHPSSSIGVFFCGPKALSRTLQKMCHLYSSADPRGVHFYYNKESF

SEQ ID NO: 796027 - protein, 151 aa, Homo sapiens
EEILSENDQLSNQVVVCLLPFMVINNDDTESAEMKIAIYLSKSGICSLHPLLRGWEEALENVIKSTKPGKLIGVANQKMIELLADNINLGDPSSMLKMVEDLISVGEEESFNLKQKVTFHVILSVLVSCCSSLKETHFPFAIRVFSLLQKK

SEQ ID NO: 796028 - protein, 157 aa, Homo sapiens
MSSEQDKSASKEKSKKPVRFLPQLSMVIYQYTIILHSFMIMFVYYFSSLKEKLASKEKFKAPARALPQLSMVSTKPHWQQAAPSFHLSVKQDDESPEPFSVKNEQSHAEYMERFGKKGKLPHQVDDSYVGPSTSKSKGKSPHKERENFRSTLVNVIM

SEQ ID NO: 796029 - protein, 66 aa, Homo sapiens
GDEGRHRGSRPHRAPEAARPPAQGAACRTTPPCPCAKRVTRVPEALAWLPFATPSSWVLPLPGMFY

SEQ ID NO: 796030 - protein, 101 aa, Homo sapiens
ESGGKLTRWLVNSQWEFERRKPDGTRRLGLPHPVDPIVGEPEYCPMRLGMTTGRLQSGVNILQGFKEDKRNKVTPGLYLNYGPWSSYVPHYDSTFMNIKQG

SEQ ID NO: 796031 - protein, 258 aa, Homo sapiens
ARTKQTARKSTGGKAPRKQLATKAARKSAPATGGVKKPHRYRPGTVALREIRRYQKSTELLIRKLPFQRLVREIAQEFKTDLRFQSSAVMALQEAREAYLVGLFEDTNLCAIHAKRVTIMPKDIQLVSRIRGERAKAKSAPAPKKGSKKAVTKVQKKDGEKRKRSRKESYSVYVEEVLKQVHPDTGISSKTMGIMNSFVNDIFERIAGEASRLAHYNKRSTITSREIQTAVRLLLPGELAKHAVSEGTKAVTKYTSSK

SEQ ID NO: 796032 - protein, 327 aa, Homo sapiens
SRLPPRKARPPPSFGSGRIESSGSNAWGCLPPFIRDRDSIVLTASFYSPPPNLQRGGRRDFLASPSIAPVMPSQNYDLPQKKQEKMTKFQEAVTFKDVAVVFSREELRLLDLTQRKLYRDVMVENFKNLVAVGHLPFQPDMVSQLEAEEKLWMMETETQRSSKHQNKMETLQKFALKYLSNQELSCWQIWKQVASELTRCLQGKSSQLLQGDSIQVSENENNIMNPKGDSSIYIENQEFPFWRTQHSCGNTYLSESQIQSRGKQIDVKNNLQIHEDFMKKSPFHEHIKTDTEPKPCKGNEYGKIISDGSNQKLPLGEKPHPCGECGR

SEQ ID NO: 796033 - protein, 73 aa, Homo sapiens
SRLPPRKARPPPSFGSGRIESSGSNAWGCLPPFIRDRDSIVLTASFYSPPPNLQRGGRRDFLASPSIAPGTCS

SEQ ID NO: 796034 - protein, 356 aa, Homo sapiens
MPWPFCRILQETELFPNFYRSFFFLRRIESSGSNAWGCLPPFIRDRDSIVLTASFYSPPPNLQRGGRRDFLASPSIAPVMPSQNYDLPQKKQEKMTKFQEAVTFKDVAVVFSREELRLLDLTQRKLYRDVMVENFKNLVAVGEDRHSLTLNFSSLENLFASGHLPFQPDMVSQLEAEEKLWMMETETQRSSKHQNKMETLQKFALKYLSNQELSCWQIWKQVASELTRCLQGKSSQLLQGDSIQVSENENNIMNPKGDSSIYIENQEFPFWRTQHSCGNTYLSESQIQSRGKQIDVKNNLQIHEDFMKKSPFHEHIKTDTEPKPCKGNEYGKIISDGSNQKLPLGEKPHPCGECGR

SEQ ID NO: 796035 - protein, 72 aa, Homo sapiens
LLSLFPVLPSQDPALPQKEQEKMTKFQEMVTFKDVAVVFTREELGLLDLAQRKLYQDVMLENFRNLLSVGEH

SEQ ID NO: 796036 - protein, 112 aa, Homo sapiens
NGVNLGGGACSEPRSRHCTPAWAKERDSVSKQNKTKQNKTKILATTGPKAGGIGLRVRSSPLHGLPPVWLWIFELSEFVVCVLCTVSLPGCTRACPSGSPTPSEFHTMQHVL

SEQ ID NO: 796037 - protein, 137 aa, Homo sapiens
LTRSVQQCWVAGREFGIICAQQVRNQNSERFSDFSSGHNIQPGYQTLVSDWEHSVVSLKPTFLWGKKTTSANDVGQFCLLTRVPSTRPGAQHIQDACCKNLQDKWKQVAASQSLCCVDGPGNSSVVLLQEQWGNFFV

SEQ ID NO: 796038 - protein, 118 aa, Homo sapiens
LWKSRAFYPLDPSFRELGYFPSTSLCFNSLVAISCLRARCWLTPEGAPAQTHLGFRLLTRDISPPSSHPSHAKTHTHRAPVWLQNLSDPPSLVESSQVKVMSRSVSCQHHSVASQKKK

SEQ ID NO: 796039 - protein, 97 aa, Homo sapiens
RPWWWWWWWQVCSRLHPSGKKQVPGAWTFALRTLCVRWGDSHEDRHLKYPITGTMQERQAGGDCGSSEETLVLAWIREKGGVSGGFLEEVASGLIIE

SEQ ID NO: 796040 - protein, 101 aa, Homo sapiens
CGSTLHYDPSIASCTHSTLALLKNCKKTFTQLPVLSPYCSLHMLVLLPVVFPDLSRVLDMYTSLNTYMFLNECIHRNFRRLPEIPHVYFYLARILLMMVFP

SEQ ID NO: 796041 - protein, 150 aa, Homo sapiens
YSVLLLSWLRSRPVKRVAEKQEEPQRPSPRKHWGFHLTSGRFALGAAGPSPRPGQGQARILVADPSSRPGQEPVRNLGLLCRGRRLQLSAVVRGLCCVHTTGLHRIPPWPRGWTCGSLGGQHLQSNGCPCHSPEFPCRAPPNTSAFTFLS

SEQ ID NO: 796042 - protein, 74 aa, Homo sapiens
MESCGIHETTFNSIMKCDVDIRKDLYANTVLSGGTTMYPGIADRMQKEITALAPSTMKIHTEYRRSGGAMILIV

SEQ ID NO: 796043 - protein, 58 aa, Homo sapiens
MYDSTDVKSPEWTNPYRGEQISGCPELGGGGIGSHSFLGTRFRFGVMKCCRRGREFSS

SEQ ID NO: 796044 - protein, 102 aa, Homo sapiens [sequence omitted]

SEQ ID NO: 796045 - protein, 83 aa, Homo sapiens
PGPGNKGGRAANGSRAAPGRRQSPSAARTFAARARRWQGERRGGVRGGALLGKLSDPDLVSEGILWASTGRLLKSWDPQPPSS

SEQ ID NO: 796046 - protein, 604 aa, Homo sapiens
VLAPKKAEDSAPGKIQYEVHGRSQPEEQGPPQSPASETIRKATGQQLTTNGAQTFGPDHADQLPAGQKESSQVLGVEPGGTVAEPVGPAAMNQLLLQLREELAAVWREKDAARGALSRPVMEGALGTPRAEAAAAAWEKMEARLERVLARLEWAKAGLQVKPEVPSQESREGALKAAPGSIKQDEEKEKRVPGARGEPLGALGGEKALGGLAKGQLEKEMSVLRLSNSNLLEELGELGRERQRLQRELQSLSQRLQREFVPKPEAQVQLQQLRQSVGLLTNELAMEKEATEKLRKLLASQSSGLRGLWDCLPADLVGERSAQSKAAESLEELRACISTLVDRHREAQQVLARLQEENQQLRGSLSPCREPGTSLKAPASPQVAALEQDLGKLEEELRAVQATMSGKSQEIGKLKQLLYQATEEVAELRAREAASLRQHEKTRGSLVAQAQAWGQELKALLEKYNTACREVGRLREAVAEERRRSGDLAAQAAEQERQASEMRGRSEQFEKTAELLKEKMEHLIGACRDKEAKIKELLKKLEQLSEEVLAIRGENARLALQLQDSQKNHEEIISTYRNHLLNAARGYMEHEVYNILLQILSMEEE

SEQ ID NO: 796047 - protein, 85 aa, Homo sapiens
LVTVGFLRDKEAKIKELLKKLEQLSEEVLAIRGENARLALQLQDSQKNHEEIISTYRNHLLNAARGYMEHEVYNILLQILSMEEE

SEQ ID NO: 796048 - protein, 205 aa, Homo sapiens
MSNFLHLKYNEKSVSVTKALTVRFLTKRFIGEYASNFESIYKKHLCLERKQLNLEIYDPCSQTQKAKFSLTSELHWADGFVIVYDISDRSSFAFAKALIYRIREPQTSHCKRAVESAVFLVGNKRDLCHVREVGWEEGQKLALENRCQFCELSAAEQSLEVEMMFIRIIKDILINFKLKEKRRPSGSKSMAKLINNVFGKRRKSV

SEQ ID NO: 796049 - protein, 75 aa, Homo sapiens
FQKIGLTKKQKSKMNDVKLAVLGGEGTGKSALTVRFLTKRFIGEYASNFESIYKKHLCLERKQLNLEIYDPCSQR

SEQ ID NO: 796050 - protein, 216 aa, Homo sapiens
GWYGPEVRDGLGGESDEQGEGSQVWSEIQALTVRFLTKRFIGEYASNFESIYKKHLCLERKQLNLEIYDPCSQTQKAKFSLTSELHWADGFVIVYDISDRSSFAFAKALIYRIREPQTSHCKRAVESAVFLVGNKRDLCHVREVGWEEGQKLALENRCQFCELSAAEQSLEVEMMFIRIIKDILINFKLKEKRRPSGSKSMAKLINNVFGKRRKSV

SEQ ID NO: 796051 - protein, 154 aa, Homo sapiens
GPGAQFEFLVAYWRREPGARGTCQNGEEWGYSSAPRNHGARAAYCVKAQTFVKAIGRYSAFSQTECVEVQGEAIPLVLALFAFVGFMLILVVVPVFVWKMGRLLQYSCCPVVGLPDTLKITNSPQKLISCRREEVDACATAVMSPEELLRAWIS

SEQ ID NO: 796052 - protein, 31 aa, Homo sapiens
MCMFVVLLFSVGKVQNSANKKGHPGQKRSLK

SEQ ID NO: 796053 - protein, 85 aa, Homo sapiens
GGCWQPPRSPGPGQRQAGVSDVPGRTPECGDTAMFWSLPQHSPYQGGPNPPAGAAGALADEWALKEHLSEGARSWGASARPPRLP

SEQ ID NO: 796054 - protein, 573 aa, Homo sapiens
MLGSLGLWALLPTAVEAPPNRRTCVFFEAPGVRGSTKTLGELLDTGTELPRAIRCLYSRCCFGIWNLTQDRAQVEMQGCRDSDEPGCESLHCDPSPRAHPSPGSTLFTCSCGTDFCNANYSHLPPPGSPGTPGSQGPQAAPGESIWMALVLLGLFLLLLLLLGSIILALLQRKNYRVRGEPVPEPRPDSGRDWSVELQELPELCFSQVIREGGHAVVWAGQLQGKLVAIKAFPPRSVAQFQAERALYELPGLQHDHIVRFITASRGGPGRLLSGPLLVLELHPKGSLCHYLTQYTSDWGSSLRMALSLAQGLAFLHEERWQNGQYKPGIAHRDLSSQNVLIREDGSCAIGDLGLALVLPGLTQPPAWTPTQPQGPAAIMEAGTQRYMAPELLDKTLDLQDWGMALRRADIYSLALLLWEILSRCPDLRPDSSPPPFQLAYEAELGNTPTSDELWALAVQERRRPYIPSTWRCFATDPDGLRELLEDCWDADPEARLTAECVQQRLAALAHPQESHPFPESCPRGCPPLCPEDCTSIPAPTILPCRPQRSACHFSVQQGPCSRNPQPACTLSPV

SEQ ID NO: 796055 - protein, 269 aa, Homo sapiens
FGSVLSSLHSCLDVTALLQRKNYRVRGEPVPEPRPDSGRDWSVELQELPELCFSQVIREGGHAVVWAGQLQGKLVAIKAFPPRSVAQFQAERALYELPGLQHDHIVRFITASRGGPGRLLSGPLLVLELHPKGSLCHYLTQYTSDWGSSLRMALSLAQGLAFLHEERWQNGQYKPGIAHRDLSSQNVLIREDGSCAIGDLGLALVLPGLTQPPAWTPTQPQGPAAIMEAGPEVLAESWRFWLGGGAPQGFPGAGESGHRGGPLGGGPPG

SEQ ID NO: 796056 - protein, 584 aa, Homo sapiens
MLGSLGLWALLPTAVEAPPNRRTCVFFEAPGVRGSTKTLGELLDTGTELPRAIRCLYSRCCFGIWNLTQDRAQVEMQGCRDSDEPGCESLHCDPSPRAHPSPGSTLFTCSCGTDFCNANYSHLPPPGSPGTPGSQGPQAAPGESIWMALVLLGLFLLLLLLLGSIILALLQRKNYRVRGEPVPEPRPDSGRDWSVELQELPELCFSQVPQGGREGLLWALLEVVLGRNPGPVIAQRPTLSTVSSSRSVAQFQAERALYELPGLQHDHIVRFITASRGGPGRLLSGPLLVLELHPKGSLCHYLTQYTSDWGSSLRMALSLAQGLAFLHEERWQNGQYKPGIAHRDLSSQNVLIREDGSCAIGDLGLALVLPGLTQPPAWTPTQPQGPAAIMEAGTQRYMAPELLDKTLDLQDWGMALRRADIYSLALLLWEILSRCPDLRPDSSPPPFQLAYEAELGNTPTSDELWALAVQERRRPYIPSTWRCFATDPDGLRELLEDCWDADPEARLTAECVQQRLAALAHPQESHPFPESCPRGCPPLCPEDCTSIPAPTILPCRPQRSACHFSVQQGPCSRNPQPACTLSPV

SEQ ID NO: 796057 - protein, 138 aa, Homo sapiens
STFLHLDTQGCYSGPCPEDSCTPPFEFHACGSPCAGLCATHLSHQLCQDLPPCQPGCYCPKGLLEQAGGCIPPEECNCWHTSAAGAGMTLAPGDRLQLGCKECECRRGELHCTSQGCQGLLPLSEWSEWSPCGPCLPP

SEQ ID NO: 796058 - protein, 111 aa, Homo sapiens
GQQESLDNWFVTIMASINRTIEIMKKHGVSKQHLLEEINKKRESNCLVERSNQVSLLRVQKRHFPDAYQSFTDTTTKEPVPNSGRSSWIKLSLLAHMERKHFPPKNNAIFG

SEQ ID NO: 796059 - protein, 390 aa, Homo sapiens; identical to SEQ ID NO: 794076

SEQ ID NO: 796060 - protein, 268 aa, Homo sapiens
MFRMLNSSFEDDPFFSESILAHRENMRQMIRSFSEPFGRDLLSISDGRGRAHNRRGHNDGEDSLTHTDVSSFQTMDQMVSNMRNYMQKLERNFGQLSVDPNGHSFCSSSVMTYSKIGDEPPKVFQASTQTRRAPGGIKETRKAMRDSDSGLEKMAIGHHIHDRAHVIKKSKNKKTGDEEVNQEFINMNESDAHAFDEEWQSEVLKYKPGRHNLGNTRMRSVGHENPGSRELKRREKPQQSPAIEHGRRSNVLGDKLHIKGSSVKSNKK

SEQ ID NO: 796061 - protein, 268 aa, Homo sapiens; identical to SEQ ID NO: 796060

SEQ ID NO: 796062 - protein, 194 aa, Homo sapiens
MDQMVSNMRNYMQKLERNFGQLSVDPNGHSFCSSSVMTYSKIGDEPPKVFQASTQTRRAPGGIKETRKAMRDSDSGLEKMAIGHHIHDRAHVIKKSKNKKTGDEEVNQEFINMNESDAHAFDEEWQSEVLKYKPGRHNLGNTRMRSVGHENPGSRELKRREKPQQSPAIEHGRRSNVLGDKLHIKGSSVKSNKK

SEQ ID NO: 796063 - protein, 260 aa, Homo sapiens
MFRMLNSSFEDDPFFSESILAHRENMRQMIRSFSEPFGRDLLSISDGRGRAHNRRGHNDGEDSLTATSCSLVPFGDFGGMHTDVSSFQTMDQMVSNMRNYMQKLERNFGQLSVDPNGHSFCSSSVMTYSKIGDEPPKVFQASTQTRRAPGGIKETRKAMRDSDSGLEKMAIGHHIHDRAHVIKKSKNKKTGDEEVNQEFINMNERCPCFGARSGTGRFEVNQGNHFDTSHGKFGLEIWSQIKKGNSAPSWGHFGHPQARS

SEQ ID NO: 796064 - protein, 180 aa, Homo sapiens
MRQMIRSFSEPFGRDLLSISDGRGRAHNRRGHNDGEDSLTATSCSLVPFGDFGGMHTDVSSFQTMDQMVSNMRNYMQKLERNFGQLSVDPNGHSFCSSSVMTYSKIGDEPPKVFQASTQTRRAPGGIKETRKAMRDSDSGLEKMAIGHHIHDRAHVIKKSKNKKTGDEEVTGSHLWREPA

SEQ ID NO: 796065 - protein, 67 aa, Homo sapiens
MSNGKAARCHAPPIPAGTACAAASEASSVLEASSCRGRGELTSFFQSVRGCRHPRQSQNVQDAEQQF

SEQ ID NO: 796066 - protein, 243 aa, Homo sapiens
MRQMIRSFSEPFGRDLLSISDGRGRAHNRRGHNDGEDSLTHTDVSSFQTMDQMVSNMRNYMQKLERNFGQLSVDPNGHSFCSSSVMTYSKIGDEPPKVFQASTQTRRAPGGIKETRKAMRDSDSGLEKMAIGHHIHDRAHVIKKSKNKKTGDEEVNQEFINMNESDAHAFDEEWQSEVLKYKPGRHNLGNTRMRSVGHENPGSRELKRREKPQQSPAIEHGRRSNVLGDKLHIKGSSVKSNKK

SEQ ID NO: 796067 - protein, 268 aa, Homo sapiens; identical to SEQ ID NO: 796060

SEQ ID NO: 796068 - protein, 243 aa, Homo sapiens; identical to SEQ ID NO: 796066

SEQ ID NO: 796069 - protein, 243 aa, Homo sapiens; identical to SEQ ID NO: 796066

SEQ ID NO: 796070 - protein, 283 aa, Homo sapiens
MFRMLNSSFEDDPFFSESILAHRENMRQMIRSFSEPFGRDLLSISDGRGRAHNRRGHNDGEDSLTATSCSLVPFGDFGGMHTDVSSFQTMDQMVSNMRNYMQKLERNFGQLSVDPNGHSFCSSSVMTYSKIGDEPPKVFQASTQTRRAPGGIKETRKAMRDSDSGLEKMAIGHHIHDRAHVIKKSKNKKTGDEEVNQEFINMNESDAHAFDEEWQSEVLKYKPGRHNLGNTRMRSVGHENPGSRELKRREKPQQSPAIEHGRRSNVLGDKLHIKGSSVKSNKK

SEQ ID NO: 796071 - protein, 223 aa, Homo sapiens
MTPSSRELREPGVRGRAGIKHTDVSSFQTMDQMVSNMRNYMQKLERNFGQLSVDPNGHSFCSSSVMTYSKIGDEPPKVFQASTQTRRAPGGIKETRKAMRDSDSGLEKMAIGHHIHDRAHVIKKSKNKKTGDEEVNQEFINMNESDAHAFDEEWQSEVLKYKPGRHNLGNTRMRSVGHENPGSRELKRREKPQQSPAIEHGRRSNVLGDKLHIKGSSVKSNKK

SEQ ID NO: 796072 - protein, 194 aa, Homo sapiens; identical to SEQ ID NO: 796062

SEQ ID NO: 796073 - protein, 258 aa, Homo sapiens
MRQMIRSFSEPFGRDLLSISDGRGRAHNRRGHNDGEDSLTATSCSLVPFGDFGGMHTDVSSFQTMDQMVSNMRNYMQKLERNFGQLSVDPNGHSFCSSSVMTYSKIGDEPPKVFQASTQTRRAPGGIKETRKAMRDSDSGLEKMAIGHHIHDRAHVIKKSKNKKTGDEEVNQEFINMNESDAHAFDEEWQSEVLKYKPGRHNLGNTRMRSVGHENPGSRELKRREKPQQSPAIEHGRRSNVLGDKLHIKGSSVKSNKK

SEQ ID NO: 796074 - protein, 258 aa, Homo sapiens; identical to SEQ ID NO: 796073

SEQ ID NO: 796075 - protein, 173 aa, Homo sapiens
GVDFLQVVYILFQMEELVIANNISIDIVDMKEKRKEEMEVFAVFIQLMPIIVLILVSLLSQLMVCNPPYSFYPRSGTGQTIKTQTENLGGVYYVSKDFKNEYKGMLLQKAEKSVEEDYVTNIRNNCWKERQQKTDMQYAAKVYRGDRLRRKSDALSMDNCKELERLTGLYKGG

SEQ ID NO: 796076 - protein, 127 aa, Homo sapiens
QSEKKLPVSYIVHSACKMKTSNSSRVQVLLQLRLKARLPKHCIRTDPVPWKEHCPWNRAGAGHTVPSPSLQHMPHTHSKPRSRQSRHGARVARAMANGPGHQPELGSVSRLQSKYSHECLLSKMVLL

SEQ ID NO: 796077 - protein, 76 aa, Homo sapiens
SPTLTQAGAQEDCISLQVAREGFPGKQTLESGQGPVTGGRRGWHRRHADHGSILEGAGGRTHGIWKSNEWGERRVD

SEQ ID NO: 796078 - protein, 76 aa, Homo sapiens
RRWGLISYPMQTGTEMKALEDRPEEMLPWTQRHGSQALGSPGLVTCARLALTSNTEHMPHARFLDKTLEGGIRAPC

SEQ ID NO: 796079 - protein, 86 aa, Homo sapiens
QAYTQKNSLREEPEPQPDAQSGSIHTTPNTARDTVRHTVRHTARDTVIKTARETARHTARKTDRDAVPDTPRESARDSAPDSADIA

SEQ ID NO: 796080 - protein, 148 aa, Homo sapiens
MLDSARDVMEGSAMLIQEAKQALIAPGDAERQQRLAQVAKAVSHSLNNCVNCLPGQKDVDVALKSIGESSKKLLVDSLPPSTKPFQEAQSELNQAAADLNQSAGEVVHATRGQSGELAAASGKFSDDFDEFLDAGIEMAGQAQVGVEV

SEQ ID NO: 796081 - protein, 66 aa, Homo sapiens
CGHTKAAKPHFSSRPFGQIEGTQLNFQMALNARSVGAAKTEREEQASRAHLPKPLAISKYSSRSGS

SEQ ID NO: 796082 - protein, 299 aa, Homo sapiens
MPLSGTPAPNKKRKSSKLIMELTGGGQESSGLNLGKKISVPRDVMLEELSLLTNRGSKMFKLRQMRVEKFIYENHPDVFSDSSMDHFQKFLPTVGGQLGTAGQGFSYSKSNGRGGSQAGGSGSAGQYGSDQQHHLGSGSGAGGTGGPAGQAGRGGAAGTAGVGETGSGDQAGGEGKHITVFKTYISPWERAMGVDPQQKMELGIDLLAYGAKAELPKYKSFNRTAMPYGGYEKASKRMTFQMPKFDLGPLLSEPLVLYNQNLSNRPSFNRTPIPWLSSGEPVDYNVDIGIPLDGETEEL

SEQ ID NO: 796083 - protein, 299 aa, Homo sapiens; identical to SEQ ID NO: 796082

SEQ ID NO: 796084 - protein, 257 aa, Homo sapiens
MPLSGTPAPNKKRKSKMFKLRQMRVEKFIYENHPDVFSDSSMDHFQKFLPTVGGQLGTAGQGFSYSKSNGRGGSQAGGSGSAGQYGSDQQHHLGSGSGAGGTGGPAGQAGRGGAAGTAGVGETGSGDQAGGEGKHITVFKTYISPWERAMGVDPQQKMELGIDLLAYGAKAELPKYKSFNRTAMPYGGYEKASKRMTFQMPKFDLGPLLSEPLVLYNQNLSNRPSFNRTPIPWLSSGEPVDYNVDIGIPLDGETEEL

SEQ ID NO: 796085 - protein, 150 aa, Homo sapiens
TGQCKEELWKEEIDETGSGDQAGGEGKHITVFKTYISPWERAMGVDPQQKMELGIDLLAYGAKAELPKYKSFNRTAMPYGGYEKASKRMTFQMPKFDLGPLLSEPLVLYNQNLSNRPSFNRTPIPWLSSGEPVDYNVDIGIPLDGETEEL

SEQ ID NO: 796086 - protein, 366 aa, Homo sapiens
MPLSGTPAPNKKRKSSKLIMELTGGGQESSGLNLGKKISVPRDVMLEELSLLTNRGSKMFKLRQMRVEKFIYENHPDVFSDSSMDHFQKFLPTVGGQLGTAGQGFSYSKSNGRGGSQAGGSGSAGQYGSDQQHHLGSGSGAGGTGGPAGQAGRGGAAGTAGVGETGSGDQAGGEGKHITVFKTYISPWERAMGVDPQQKMELGIDLLAYGAKAELPKYKSFNRTAMPYGGYEKASKRMTFQMPKFDLGPLLSEPLVLYNQNLSNRPSFNRTPIPWLSSGEPVDYNVDIGIPSSRAFGFSPKGPGSRASWKAMPSFSSSSMIQLSSSEELEADKEGRKGHTPLIPPSRALSGCAAGPELAGHSLRPH

SEQ ID NO: 796087 - protein, 283 aa, Homo sapiens
MPLSGTPAPNKKRKSSKLIMELTGGGQESSGLNLGKKISVPRDVMLEELSLLTNRGSKMFKLRQMRVEKFIYENHPDVFSDSSMDHFQKFLPTVGGQLGTAGQGFSYSKSNGRGGSQAGGSGSAGQYGSDQQHHLGSGSGAGGTGGPAGQAGRGGAAGTAGVGETGSGDQAGGEGKHITVFKTYISPWERAMGVDRENSKCTQWDRPQDRLGVNKEFTLLPCFPQWLKALGHLLLSLLLELALLLGCGILVLLVLDTRSFMLLSASVNLTSVLPAHPYEPGPT

SEQ ID NO: 796088 - protein, 75 aa, Homo sapiens
QIRTGTYTISCLAPDIQTTLRDFPGSPVCKQIMGLFTLHNHLNMQTVQCHPPDLLIQNLRSEVQESALLNKSFKN

SEQ ID NO: 796089 - protein, 555 aa, Homo sapiens
TRNIGWRREGNEIKYYKNNTDDGQQPFYCLTWTIQFPYDQDTCFFAHFYPYTYTDLQCYLLSVANNPIQSQFCKLQTLCRSLAGNTVYLLTITNPSQTPQEAAAKKAVVLSARVHPGESNGSWVMKGFLDFILSNSPDAQLLRDIFVFKVLPMLNPDGVIVGNYRCSLAGRDLNRHYKTILKESFPCIWYTRNMIKRLLEEREVLLYCDFHGHSRKNNIFLYGCNNNNRKYWLHERVFPLMLCKNAPDKFSFHSCNFKVQKCKEGTGRVVMWRMGILNSYTMESTFGGSTLGNKRDTHFTIEDLKSLGYHVCDTLLDFCDPDQIKFTQCLAELKELLRQEIHKKFHELGQDVDLEGSWSDISLSDIESSTSGSDSSLSDGLPVHLANIADELTQKKKMFKKKKKKSLQTRKQRNEQYQKKNLMQKLKLTEDTSEKAGFASTLQKQPTFFKNSENSSFLPMKNENPRLNETNLNRRDKDTPLDPSMATLILPKNKGRMQNKKPGFTVSCSPKRTINSSQEPAPGMKPNWPRSRYPATKRGCAAMAAYPSLHIYTYP

SEQ ID NO: 796090 - protein, 503 aa, Homo sapiens
TRNIGWRREGNEIKYYKNNTDDGQQPFYCLTWTIQFPYDQDTCFFAHFYPYTYTDLQCYLLSVANNPIQSQFCKLQTLCRSLAGNTVYLLTITNPSQTPQEAAAKKAVVLSARVHPGESNGSWVMKGFLDFILSNSPDAQLLRDIFVFKVLPMLNPDGVIVGNYRCSLAGRDLNRHYKTILKESFPCIWYTRNMIKSSLFTVVILRSKNAKKEQDELLCGGMGILNSYTMESTFGGSTLGNKRDTHFTIEDLKSLGYHVCDTLLDFCDPDQIKFTQCLAELKELLRQEIHKKFHELGQDVDLEGSWSDISLSDIESSTSGSDSSLSDGLPVHLANIADELTQKKKMFKKKKKKSLQTRKQRNEQYQKKNLMQKLKLTEDTSEKAGFASTLQKQPTFFKNSENSSFLPMKNENPRLNETNLNRRDKDTPLDPSMATLILPKNKGRMQNKKPGFTVSCSPKRTINSSQEPAPGMKPNWPRSRYPATKRGCAAMAAYPSLHIYTYP

SEQ ID NO: 796091 - protein, 515 aa, Homo sapiens
TRNIGWRREGNEIKYYKNNTDDGQQPFYCLTWTIQFPYDQDTCFFAHFYPYTYTDLQCYLLSVANNPIQSQFCKLQTLCRSLAGNTVYLLTITNPSQTPQEAAAKKAVVLSARVHPGESNGSWVMKGFLDFILSNSPDAQLLRDIFVFKVLPMLNPDGVIVGNYRCSLAGRDLNRHYKTILKESFPCIWYTRNMIKRLLEEREVLLYCDFHGHSRKNNIFLYGCNNNNRKYWLHERVFPLMLCKNAPDKFSFHSCNFKVQKCKEGTGRVVMWRMGILNSYTMESTFGGSTLGNKRDTHFTIEDLKSLGYHVCDTLLDFCDPDQIKFTQCLAELKELLRQEIHKKFHELGQDVDLEGSWSDISLSDIESSTSGSDSSLSDGLPVHLANIADELTQKKKMFKKKKKKSLQTRKQRNEQYQKKNLMQKLKLTEDTSEKAGFASTLQKQPTFFKNSENSSFLPMKNENPRLNEVVFLFLTLCHTDSLTSRISTSLPQCDKCNSHLRYPNLTVPLGARKH

SEQ ID NO: 796092 - protein, 110 aa, Homo sapiens [sequence omitted]

SEQ ID NO: 796093 - protein, 83 aa, Homo sapiens
MDLKKGTDTGAYLREKGGLQASSFCPIMIQGPNWREMFHGTALVIILDLLTTVPTYKSQVQPYTSFCPPVCDPELLVCTKIRD

SEQ ID NO: 796094 - protein, 192 aa, Homo sapiens
MGERHWSVVGVKLLPQDAFPTGSGRPSDLGEVFVEVFSGVFPCPLDVRSVLARVGYWMVRCAGFLGSCFSSLGLELRLLSFPDLGVVSSFTACPRPSSAAVAPASSLALAHGGSLALGLALLVLLALALALAFALAFRLHTSLAFLAALRRGWRRLRELRGAAGVLQGARVPSSCLARPGFLLGLGTFQTLK

SEQ ID NO: 796095 - protein, 162 aa, Homo sapiens
MESLRGNTAQGPTNEEDYKNEGQLSRQTKCPAQKKSSFENTVVRKVSVTLKEIFTGEEGPESSEFSLSPNLDAQQKIPKGHGSPISRKNSKDNSDLIKHQRLFSQRKPCKCNECEKAFSYQSDLLVHSRIHGGEKPFECNKCGKSFSRSTHLIEHQRTHTGE

SEQ ID NO: 796096 - protein, 162 aa, Homo sapiens; identical to SEQ ID NO: 796095

SEQ ID NO: 796097 - protein, 132 aa, Homo sapiens
IQENVDVASLKPISDSGINFTDAIWSPTCERRTCECHESIEKNKDKTDLPQSVVYQNEEGRWVTDLAYYTSFNSKQNLNVSLSDEMNEDFRSGSEAFDLIAQDEEEFNKEHQFIQEENIDAHNTSVALGDTS

SEQ ID NO: 796098 - protein, 102 aa, Homo sapiens
IQENVDVASLKPISDSGINFTDAIWSPTCERRTCECHESIEKNKDKTDLPQSVVYQNEEGRWVTDLAYYTSFNSKQNLNVSLSDEMNEDFRSGCKYMDKHLL

SEQ ID NO: 796099 - protein, 102 aa, Homo sapiens
CSCSLSYIGRLCVVNVDYCLGNHSISVHGLCLALSHNCNCSSLQRYERNICEIDTEDCKSASCKNGTTSTHLRGYFFRKCVPGFKEFVSVAISSCVFFLGRF

SEQ ID NO: 796100 - protein, 41 aa, Homo sapiens
VFNEKLPSPLEALMAQPGWWLLTRVKIYIQSIWHMCRRPFS

SEQ ID NO: 796101 - protein, 1142 aa, Homo sapiens
MGDKDMPTAGMPSLLQSSSESPQSCPEGEDSQSPLQIPQSSPESDDTLYPLQSPQSRSEGEDSSDPLQRPPEGKDSQSPLQIPQSSPEGDDTQSPLQNSQSSPEGKDSLSPLEISQSPPEGEDVQSPLQNPASSFFSSALLSIFQSSPESIQSPFEGFPQSVLQIPVSAASSSTLVSIFQSSPESTQSPFEGFPQSPLQIPVSRSFSSTLLSIFQSSPERSQRTSEGFAQSPLQIPVSSSSSSTLLSLFQSSPERTQSTFEGFPQSPLQIPVSRSFSSTLLSIFQSSPERTQSTFEGFAQSPLQIPVSSSSSSTLLSLFQSSPERTQSTFEGFPQSLLQIPMTSSFSSTLLSIFQSSPESAQSTFEGFPQSPLQIPGSPSFSSTLLSLFQSSPERTHSTFEGFPQSPLQIPMTSSFSSTLLSILQSSPESAQSAFEGFPQSPLQIPVSSSFSYTLLSLFQSSPERTHSTFEGFPQSPLQIPVSSSSSSSTLLSLFQSSPECTQSTFEGFPQSPLQIPQSPPEGENTHSPLQIVPSLPEWEDSLSPHYFPQSPPQGEDSLSPHYFPQSPPQGEDSLSPHYFPQSPQGEDSLSPHYFPQSPPQGEDSMSPLYFPQSPLQGEEFQSSLQSPVSICSSSTPSSLPQSFPESSQSPPEGPVQSPLHSPQSPPEGMHSQSPLQSPESAPEGEDSLSPLQIPQSPLEGEDSLSSLHFPQSPPEWEDSLSPLHFPQFPPQGEDFQSSLQSPVSICSSSTSLSLPQSFPESPQSPPEGPAQSPLQRPVSSFFSYTLASLLQSSHESPQSPPEGPAQSPLQSPVSSFPSSTSSSLSQSSPVSSFPSSTSSSLSKSSPESPLQSPVISFSSSTSLSPFSEESSSPVDEYTSSSDTLLESDSLTDSESLIESEPLFTYTLDEKVDELARFLLLKYQVKQPITKAEMLTNVISRYTGYFPVIFRKAREFIEILFGISLREVDPDDSYVFVNTLDLTSEGCLSDEQGMSQNRLLILILSIIFIKGTYASEEVIWDVLSGIGVRAGREHFAFGEPRELLTKVWVQEHYLEYREVPNSSPPRYEFLWGPRAHSEVIKRKVVEFLAMLKNTVPITFPSSYKDALKDVEERAQAIIDTTDDSTATESASSSVMSPSFSSE

SEQ ID NO: 796102 - protein, 1082 aa, Homo sapiens
MGDKDMPTAGMPSLLQSSSESPQSCPEGEDSQSPLQIPQSSPESDDTLYPLQSPQSRSEGEDSSDPLQRPPEGKDSQSPLQIPQSSPEGDDTQSPLQNSQSSPEGKDSLSPLEISQSPPEGEDVQSPLQNPASSFFSSALLSIFQSSPESIQSPFEGFPQSVLQIPVSAASSSTLVSIFQSSPESTQSPFEGFPQSPLQIPVSRSFSSTLLSIFQSSPERSQRTSEGFAQSPLQIPVSSSSSSTLLSLFQSSPERTQSTFEGFPQSPLQIPVSRSFSSTLLSIFQSSPERTQSTFEGFAQSPLQIPVSSSSSSTLLSLFQSSPERTQSTFEGFPQSLLQIPMTSSFSSTLLSIFQSSPESAQSTFEGFPQSPLQIPGSPSFSSTLLSLFQSSPERTHSTFEGFPQSPLQIPMTSSFSSTLLSILQSSPESAQSAFEGFPQSPLQIPVSSSFSYTLLSLFQSSPERTHSTFEGFPQSPLQIPVSSSSSSSTLLSLFQSSPECTQSTFEGFPQSPLQIPQSPPEGENTHSPLQIVPSLPEWEDSLSPHYFPQSPPQGEDSLSPHYFPQSPPQGEDSLSPHYFPQSFPESSQSPPEGPVQSPLHSPQSPPEGMHSQSPLQSPESAPEGEDSLSPLQIPQSPLEGEDSLSSLHFPQSPPEWEDSLSPLHFPQFPPQGEDFQSSLQSPVSICSSSTSLSLPQSFPESPQSPPEGPAQSPLQRPVSSFFSYTLASLLQSSHESPQSPPEGPAQSPLQSPVSSFPSSTSSSLSQSSPVSSFPSSTSSSLSKSSPESPLQSPVISFSSSTSLSPFSEESSSPVDEYTSSSDTLLESDSLTDSESLIESEPLFTYTLDEKVDELARFLLLKYQVKQPITKAEMLTNVISRYTGYFPVIFRKAREFIEILFGISLREVDPDDSYVFVNTLDLTSEGCLSDEQGMSQNRLLILILSIIFIKGTYASEEVIWDVLSGIGVRAGREHFAFGEPRELLTKVWVQEHYLEYREVPNSSPPRYEFLWGPRAHSEVIKRKVVEFLAMLKNTVPITFPSSYKDALKDVEERAQAIIDTTDDSTATESASSSVMSPSFSSE

SEQ ID NO: 796103 - protein, 1008 aa, Homo sapiens
MGDKDMPTAGMPSLLQSSSESPQSCPEGEDSQSPLQIPQSSPESDDTLYPLQSPQSRSEGEDSSDPLQRPPEGKDSQSPLQIPQSSPEGDDTQSPLQNSQSSPEGKDSLSPLEISQSPPEGEDVQSPLQNPASSFFSSALLSIFQSSPESIQSPFEGFPQSVLQIPVSAASSSTLVSIFQSSPESTQSPFEGFPQSPLQIPVSRSFSSTLLSIFQSSPERSQRTSEGFAQSPLQIPVSSSSSSTLLSLFQSSPERTQSTFEGFPQSPLQIPVSRSFSSTLLSIFQSSPERTQSTFEGFAQSPLQIPVSSSSSSTLLSLFQSSPERTQSTFEGFPQSLLQIPMTSSFSSTLLSIFQSSPESAQSTFEGFPQSPLQIPGSPSFSSTLLSLFQSSPERTHSTFEGFPQSPLQIPMTSSFSSTLLSILQSSPESAQSAFEGFPQSPLQIPVSSSFSYTLLSLFQSSPERTHSTFEGFPQSPLQIPVSSSSSSSTLLSLFQSSPECTQSTFEGFPQSPLQIPQSPPEGENTHSPLQIVPSLPEWEDSLSPHYFPQSPPQGEDSLSPHYFPQSPPQGEDSLSPHYFPQSFPESSQSPPEGPVQSPLHSPQSPPEGMHSQSPLQSPESAPEGEDSLSPLQIPQSPLEGEDSLSSLHFPQSPPEWEDSLSPLHFPQFPPQGEDFQSSLQSPVSICSSSTSLSLPQSFPESPQSPPEGPAQSPLQRPVSSFFSYTLASLLQSSHESPQSPPEGPAQSPLQSPVSSFPSSTSSSLSQSSPVRTQSDFEGFPQSLLQIPMTSSFSSTLLSIFQSSPESAQKYFEGFPQSPLQIPGSPSVSPPALLSLFQSSPEENSQYFEGFPQSPLQIPMTSSFSSTLLSISQSSPESAQSAFEGFPPVSSPDSCELLFLLHFIEVFSRAALKELTSNLEGLPKSLFQILEFSSVYDNYRAFKKSLSVSKEFGGSQVPSKSKPEAHASSSQPEFRGAGHNLSLGGHHHISHGDVSIRRGRSHQSGITR

SEQ ID NO: 796104 - protein, 105 aa, Homo sapiens
MTCPPEWNLGRVRVRALVPGALSWSLLIARTLLTLVLNPTGTNHFYCQSILGLCSSGNKSFFQSSLFNLVRACVCGGGAYINAVFLTCLARFRLALNEYLENKGL

SEQ ID NO: 796105 - protein, 623 aa, Homo sapiens
AQPGGSTSEGSPALGFPYTLAFGSFDHSKPHSVFQRTSPADPEVVGETLPLFLLEPVGSCCLATTMSAANPETPNSTISREASTQSSSAAASQGWVLPEGKIVPNTVFVGGIDARMDETEIGSCFGRYGSVKEVKIITNRTGVSKGYGFVSFVNDVDVQKIVGSQIHFHGKKLKLGPAIRKQKLCARHVQPRPLVVNPPPPPQFQNVWRNPNTETYLQPQITPNPVTQHVQAYSAYPHSPGQVITGCQLLVYNYQEYPTYPDSAFQVTTGYQLPVYNYQPFPAYPRSPFQVTAGYQLPVYNYQAFPAYPNSPFQVATGYQFPVYNYQPFPAYPSSPFQVTAGYQLPVYNYQAFPAYPNSPFQVATGYQFPVYNYQAFPAYPNSPVQVTTGYQLPVYNYQAFPAYPSSPFQVTTGYQLPVYNYQAFPAYPSSPFQVTTGYQLPVYNYQAFPAYPSSPFQVTTGYQLPVYNYQAFPAYPSSPFQVTTGYQLPVYNYQAFPAYPSSPFQVTTGYQLPVYNYQAFPAYPSSPFQVTTGYQLPVYNYQAFPAYPSSPFQVTTGYQLPVYNYQAFPAYPNSAVQVTTGYQFHVYNYQMPPQCPVGEQRRNLWTEAYKWWYLVCLIQRRD

SEQ ID NO: 796106 - protein, 108 aa, Homo sapiens
MRHEDPAQGIPWGFKGNTPVLRVCPVPSGWGGLPALGSMARLARRGQVVSCGTSILLPSRLCHLIFLRSGWFLAKMYLQGPPSIGFGRQERHRRPGKQLHSDNAFSIT

SEQ ID NO: 796107 - protein, 132 aa, Homo sapiens
KLGLRNKGPEPGEAGVPGLLCSHRLSRSPWLSEDPRPEPSLRKTDFFQTTLLSLILNRRLIIIQKRQDEAWTKEVEGIKRYLEDKGSLDLVLWVYPPSWHTPGYFEANPRRHQTVQIAQVSPTHFFFLLQFV

SEQ ID NO: 796108 - protein, 86 aa, Homo sapiens
MRVGPALAVERLVAPGPLLVLRASLRRAAQRAQPLPQLSPEPAVARLEEEVDEGIESAVGHRHHAQRRRQALSLPVSRGPGRPRGR

SEQ ID NO: 796109 - protein, 231 aa, Homo sapiens
PRPSPPDVFAGFAPHPAALGPPTLLADQMSVIGSRKKSVNMTECVPVPSSEHVAEIVGRQGCKIKALRAKTNTYIKTPVRGEEPVFIVTGRKEDVEMAKREILSAAEHFSIIRATRSKAGGLPGAAQGPPNLPGQTTIQVRVPYRVVGLVVGPKGATIKRIQQRTHTYIVTPGRDKEPVFAVTGMPENVDRAREEIEAHITLRTGAFTDAGPDSDFHANGTDVCLDLLGAA

SEQ ID NO: 796110 - protein, 113 aa, Homo sapiens
PEKPQVEILSSEGAGEPHSSPELAATPGGPVKAETEEAAHSVSQEMSVNSPTAQESQRNAETPAETPTTAEACSPSPAVQTFSEAKKTSTEPGCERKHYQLNFLLENEGVFSD

SEQ ID NO: 796111 - protein, 124 aa, Homo sapiens
IWSPENRNGKKMSFSTVNISYHWHDDHLSENKPQISMGTALLQRYYVYPHPAKRPSGEKPECPQSFSVCWARSELFSWIFLCCKSELYIDYSFIQKKNAILKKEMHVLLFPLLSQGGLDLKTSA

SEQ ID NO: 796112 - protein, 140 aa, Homo sapiens
MPSLLLLSFNKYSSVTEDAIKTNRTRPSPQKILLCPFPFYVHCYHATCADFSTMLPPVLRVHTNGSLGTCPCVRRLSLSVMFLEILLCCFMSQEFVLLIAKQSSVNTPVCLSAVFMDTWSCVWLLAITNKVAVDFLFEIF

SEQ ID NO: 796113 - protein, 78 aa, Homo sapiens
SIMLSQWTQVFARKLKVNGNMAGQTKKDKRAGHLGRCGSMSPSLGNILGAADHWPFVESGRLREATKGLRFRQPWLAT

SEQ ID NO: 796114 - protein, 507 aa, Homo sapiens
GSSLSPRGASAAPAPGWWLLSERRGVVADSLGVQLRSPAGSVRFVSGGLTYAGFSALAWENSSGDRWPPRAQIQGPLTFGDVAVAFTRIEWRHLDAAQRALYRDVMLENYGNLVSVGLLSSKPKLITQLEQGAEPWTEVREAPSGTHAVEDYWFETKMSALKQSTSEASVLGERTKSVMMEKGLDWEGRSSTEKNYKCKECGKVFKYNSSFISHQRNHTSEKPHKCKECGIAFMNSSSLLNHHKVHAGKQPYRCIECGKFLKKHSTFINHQRIHSREKPHKCIECGKTFRKNSILLSHQRIHTGQKPYKCNDCGKAFAQNAALTRHERIHSGEKPFKCNKCGRAFRDNSTVLEHQKIHTGEKPYQCNECGKAFRKSSTLISHQRMHTGEKPYHCSKCGKSFRYSSSFAGHQKTHSGNKPYQCRDCGKAFTKSSTLTGHQRIHTGEKPYHCKKCGKAFRHSSGLVEHQRLHTGEKPYKCNECGKAFPRSSALKQHKKIHNKERAMKCS

SEQ ID NO: 796115 - protein, 73 aa, Homo sapiens
RKTGSEPIYEHTVCCVVIRAWNNRELGKGVVVRGFAILDEVWRESLTYKDTFEKGLETMKEVSRQRKQQVQRP

SEQ ID NO: 796116 - protein, 106 aa, Homo sapiens
KEEKNCSGLLWSKIFTTFRDLHLGTGCPSLSPFLLWQVAALSLKRAAGMSFTVTSYITTVTGWLVLSESCPVASKSHEDRLLFPTTASAQCLSPRLKKLIIFTIWS

SEQ ID NO: 796117 - protein, 33 aa, Homo sapiens
RRGTWTSTFRGEHLGVEGVERSHPEWSPGQPAT

SEQ ID NO: 796118 - protein, 143 aa, Homo sapiens
MIRLKAGARPGQCLRLSRLLVGTEEPGHICGTQGRPLSARLPHIVPLVQGRVEELLPRTGGAAGPLLHVRWDTPVSPPEGECRPLLSLVLQGSALSRKPGHPGRRLLRPGRRGGCPAWRETPALPAFSDAHPSQALFSLGSPV

SEQ ID NO: 796119 - protein, 99 aa, Homo sapiens
MLENSLCSPTWEGSQFWVTVQRTEAVEHCGLHASYVLRVEAERLTLLTMGAQSQVPELLLSWPYTLLHCYGRDKVMFSFEASAAASWALEPSFPDGTGK

SEQ ID NO: 796120 - protein, 101 aa, Homo sapiens
MSDAAVDTSSEITTEDLKEKKEVVEEAENGRDAPADEENGEQEADNEVDEEQEEGGEEEGDGEEEDGDEDEGAESATDKRAAEDDEDNDVDTKKQKTDEDD

SEQ ID NO: 796121 - protein, 77 aa, Homo sapiens
RFTFLFYLPQRLHDIPILMEGLSAHHPRKPDSKPILPFLRAPKRREKGLQLEAINKNAEWVIVFPKSQEQRRPRQGF

SEQ ID NO: 796122 - protein, 124 aa, Homo sapiens [sequence omitted]

SEQ ID NO: 796123 - protein, 165 aa, Homo sapiens
MTSGANSSGSYLPSEIRSSKIDDNYLKELNEDLKLRKQELLEMLKPLEDKNNLLFQKLMSNLEEKQRSLQIMRQIMAGKGCEESSVMELLKEAEEMKQNLERKNKMLRKEMEMLWNKTFEAEELSDQQKAPQTKNKADLQDGKRLFLPPGKATEENGMGQVSGTK

SEQ ID NO: 796124 - protein, 162 aa, Homo sapiens
MTSGANSSGSYLPSEISLQIMRQIMAGKGCEESSVMELLKEAEEMKQNLERKNKMLRKEMEMLWNKTFEAEELSDQQKAPQTKNKADLQDGKEKQQRKMEWVKYQEQNNILQNDFHGKVIELRIEALKNYQKANDLKLSLYLQQNFEPMQAFLNLPGSQAFP

SEQ ID NO: 796125 - protein, 165 aa, Homo sapiens; identical to SEQ ID NO: 796123

SEQ ID NO: 796126 - protein, 106 aa, Homo sapiens
MTSGANSSGSYLPSEIRSSKIDDNYLKELNEDLKLRKQELLEMLKPLEDKNNLLFQKLMSNLEEKQRSLQIMRQIMAGKGCEESSVMELLKEAEEMKQNLHFLELF

SEQ ID NO: 796127 - protein, 127 aa, Homo sapiens
MAVDRYVAFCNPLHYPGVMSQRLCIKLLVSSYVMGFLNASINISFTFSLNFCKSKTINHFFCDEPPIIALPCSNIDLNIMLLTVFVGLNLMCTVMVVIISCIYVLVAILRISSAAGKKKVSLHVPPT

SEQ ID NO: 796128 - protein, 152 aa, Homo sapiens
ANSFPFPAAPHPALPPSLHGSFLHLPHSLPSVSLFLPSVCPLSVLPSLLPLSYFLSPFSWLSFPPVSPLPCTPRPTRCCPGSATISWVPACLVLLPSSILSCPCPLPCSPSSLSFPSVFYSVHTRFLPDSLPPCFLTSMSLHSSLGNKTKLH

SEQ ID NO: 796129 - protein, 150 aa, Homo sapiens
ANSFPFPAAPHPALPPSLHGSFLHLPHSLPSVSLFLPSVCPLSVLPSLLPLSYFLSPFSWLSFPPVSPLPCTPRPTRCCPGSATISWVPACLVLLPSSILSCPCPLPCSPSSLSFPSVFYSVHTRFLPDSLPPCFLTSMSLPSANFPFPR

SEQ ID NO: 796130 - protein, 164 aa, Homo sapiens
YVSARTDLAQMQKPQPVNPELTSWCITGVLDMLNNFRVDSALSTEMIPCYISLSEDVRYVIFGDDHLSAPTDPQGVDSFAVWGAQAFTSGKHYWEVDVTLSSNWILGVCQDSRTADANFVIDSDERFFLISSKRSNHYSLSTNSPPLIQYVQRPLGQSWGVSGL

SEQ ID NO: 796131 - protein, 72 aa, Homo sapiens
RVQAACGLESQSQPEALKPTWVTGQGEPSEIKQSQTERAWGRRMYLQAVGTCLWRMSLGSQGQDENDHNHEI

SEQ ID NO: 796132 - protein, 157 aa, Homo sapiens
SGGEEENDVQAGAGEARAKALRGSAAMNLRGWILLTHLGYQGQTKDMESRPRRRYQASSFTDAPVMTMTASLLPLVPDSVSAVTRHQAGSKEPSLSPAPTNSYGAPFPRLGLLSTQFLITYHEKLSPWQLSPSGEIYNCTATTACGMVKLHQDLCCP

SEQ ID NO: 796133 - protein, 157 aa, Homo sapiens; identical to SEQ ID NO: 796132

SEQ ID NO: 796134 - protein, 157 aa, Homo sapiens; identical to SEQ ID NO: 796132

SEQ ID NO: 796135 - protein, 103 aa, Homo sapiens
REAVWEARGSARKVEGAQLGREDSVCARKRERKREVCGIPAPCVSGCDRAGPRPSRPLERDFGRWLPGRLRLSVGPEQVPGAGRGVRDRSPARAAAGVGKAHL

SEQ ID NO: 796136 - protein, 384 aa, Homo sapiens
MNTFQASVSFQDVTVEFSQEEWQHMGPVERTLYRDVMLENYSHLVSVGYCFTKPELIFTLEQGEDPWLLEKEKGFLSRNSPEDSQPDEISEKSPENQGKHLLQVLFTNKLLTTEQEISGKPHNRDINIFRARMMPCKCDIAGSACQGLSLMAPHCQYSKEKAHERNVCDKWLISIKDGRTNTQEKSFAYSKIVKTLHHKEEVIQHQTIQTLGQDFEYNESRKAFLEKAALVTSNSTHPKGKSYNFNKFGENKYDKSTFIIPQNMNPEKSHYEFNDTGNCFCRITHKTLTGGKSFSQKSHIREHHRVHIGVKPFEYGKSFNRNSTLPVHQRTHATDKYSDYHPCTETFSYQSTFSVHQKVHIRAKPYEYNECGKSCSMNSHLIWP

SEQ ID NO: 796137 - protein, 113 aa, Homo sapiens
ASVSFQDVTVEFSQEEWQHMGPVERTLYRDVMLENYSHLVSVGEHSLPWGSLQSAVLFLLSFSLSIPYHVTPSTVQFWFSFFILVTFIEVYLTENKIQHLSVYKSMSFEKCIH

SEQ ID NO: 796138 - protein, 503 aa, Homo sapiens
SSWAAISGTDAQKTSCSTTTSSLRAPRKTSTSSPADESSCAPERSSTELRRTSGIRMRVCPSRDTRRIDVGGSSSTRSTSSRGTRRAQPAARTTMEHFEYIIPLSPGGQDSALRGFPCMWVLQELGVTGIPPNHFRRKWLLIIMAPLGTTVLLWSLLRSSPGVERVCFRARIQPWHGGLLQPLPCSFEMGLPRRRFSSEAAESGSPETKKPTFMDEEVQSILTKMTGLNLQKTFKPAIQELKPPTYKLMTQAQLEEATRQAVEAAKVRLKMPPVLEERVPINDVLAEDKILEGTETTKYVFTDISYSIPHRERFIVVREPSGTLRKASWEERDRMIQVYFPKEGRKILTPIIFKEENLRTMYSQDRHVDVLNLCFAQFEPDSTEYIKVHHKTYEDIDKRGKYDLLRSTRYFGGMVWYFVNNKKIDGLLIDQIQRDLIDDATNLVQLYHVLHPDGQSAQGAKDQAAEGINLIKVFAKTEAQKGAYIELTLQTYQEALSRHSAAS

SEQ ID NO: 796139 - protein, 69 aa, Homo sapiens
IRPHGVTVPSTLRGSCVMCTNALYFSYDNSQGPITGRSHSNTMTVKQPQFPDAPQTCPAWLPGSYFCIL

SEQ ID NO: 796140 - protein, 125 aa, Homo sapiens [sequence omitted]

SEQ ID NO: 796141 - protein, 138 aa, Homo sapiens
MVLQENGYGVEEDIPTLLMAASSMDDILAITGFNTCLSIVFSSDKTYVEERIPCLDYVCFCCLRQPTYRFTWIWQDYAHSVEFHCTGQNGPNEHDESPKDYYQMCGTIFQPLLYGIGWTQEVSVHRLNSHIVAYLLAL

SEQ ID NO: 796142 - protein, 110 aa, Homo sapiens
MVDFVLGAVSPVVVVLYTMVLQENGYGVEEDIPTLLMAASSMDDILAITGFNTCLSIVFSSGCARSSGSRNSKSLRTPLGTICEGCDDSSIFSHLDHSSKWSSTYGHSGA

SEQ ID NO: 796143 - protein, 213 aa, Homo sapiens
PGVQAAPSPACPAAATMTLLPGLLFLTWLHTCLAHHDPSLRGHPHSHGTPHCYSAEELPLGQAPPHLLARGAKWGQALPVALVSSLEAASHRGRHERPSATTQCPVLRPEEVLEADTHQRSISPWRYRVDTDEDRYPQKLAFAECLCRGCIDARTGRETAALNSVRLLQSLLVLRRRPCSRDGSGLPTPGAFAFHTEFIHVPVGCTCVLPRSV

SEQ ID NO: 796144 - protein, 158 aa, Homo sapiens
GPQRLRRHPGKAARPGPETPGCFHQSPRTLPARAEHASSLPGGYKGAPPSAPVSSASISWDPRRQPGQASEWPQSPGWTRPRRQRSARGLGGHPFRVGPVLATVTCWLDSGNPLSEDHRGVSLTTPNRIRPDLKLPSPLWLPSALFISSLNLLGISVS

SEQ ID NO: 796145 - protein, 228 aa, Homo sapiens
MFRAGTPMPPNLNSQGGGHYFIDRDGKAFRHILNFLRLGRLDLPRGYGETALLRAEADFYQIRPLLDALRELEASQGTPAPTAALLHADVDVSPRLVHFSARRGPHHYELSSVQVDTFRANLFCTDSECLGALRARFGVASGDRAEGSPHFHLEWAPRPVELPEVEYGRLGLQPLWTGGPGERREVVGTPSFLEEVLRVALEHGFRLDSVFPDPEDLLNSRSLRFVRH

SEQ ID NO: 796146 - protein, 131 aa, Homo sapiens
PKSALIPVIPITKSTGSRFRNSVEGLNQEIEIIIKETGEKEEQLIPQDIPDGHRAPPPLVQRSSSTRSIDTQTPGGADRGSNNSSRSQSVSPTSFLTISNEGSEESPCSADDLLVDPRDKENGNNSPLPKY

SEQ ID NO: 796147 - protein, 130 aa, Homo sapiens
PKSALIPVIPITKSTGSRFRNSVEGLNQEIEIIIKETGEKEEQLIPQDIPDGHRAPPPLVQRSSSTRSIDTQTPGGADRGSNNSSRSQSVSPTSFLTISNEGSEESPCSADDLLVDPRDKGTVLEECATR

SEQ ID NO: 796148 - protein, 838 aa, Homo sapiens
MTQGKCGTDHAAQLGQFLASSSLSLPVSRSLLSSPLSPSFSNLMGSFGHKGRFLSDFFYAFGPRDTATPTPYPKSLQTAAPEKRTKLGTYLFPVLQKCLFEKQHSKVEWFDLISKSKCISSKTETILQLAVIELCDDSGRQCWVTDAASWSRVRRRGHVTLVKGLGFLGRAEDPGLVFKAEVTANCPLEETQVSAPTCVVWKVTLRSWGRQWLDLYGFGSFAAALNLPLMAVASFVPLIPFPIFITHSSSRPPSLGFTYGLALSLRCGLCCIPGPPRSAVWTPCVVMPGNPAGCWTYTQETLGTVCPHRYMLPTSAWVSSDCKPVLRCQIETPETLNLSSRSPDLPLGARHADILQKETSAPFGVVKMSWNLAGVVVAQLRKWSKCSGLVGFEMVTSSFLFFFFFFFFLRRSLALLPRLECSGVILAHCSLCLPGSSDSPASASRVAGTTGTRHDAWLNFEFLVETGFHHVGQTGLELLTSNDPPASASQSARITEVKWLLLYYVNGFTSMNKNKQDNKNFESPNTINWAQLKVSEHTQPEMEIVMDTKSPSEQGRSWRSQEGRGTAATALGTSQARVGEGWGGHWADMRQPFLSATGCPPGAAGRGQGLPSYGWEGAGSPAAPPVLKICLLSALARPRVPVRDHDSLWSVGCSFPGVTRELGLGHCVHQAANTKGPGLLREAAPRWHLLPVPHCPQASRRILHTLDLCQALWVQERMNQMWSTLRGLQLELPEPRGSEVKGCWKGTKLEEMFSEPKVQFHCRGWLLLGVRLCTGKMPCPAFSPRGQWACLTWDLQMQQLHAESTQQWPPGSPVDTSFVPQNETILSTAFAYGSQEIG

SEQ ID NO: 796149 - protein, 93 aa, Homo sapiens
DDDGGGNEGGDGDGGGDDGGSGGDDGGCDGDDGGDGGDDDGDHDDGDGGYGGDDGDDDGDGGGDGDDDDSDDGGDDANDDGGGCHALLTSGKD

SEQ ID NO: 796150 - protein, 148 aa, Homo sapiens
MGPEEKTIMTERSAAVFIQAWWRGMLVRRTLLHAALRAWIIQCWWRQVLEKLLAKRRRMVLEFYVQQEWAAVRLQSWVRMWCVRQRYCRLLNAVRIIQVYWRWHSCHSRVFIEGHYELKENQLNIQLEISLGLQACKVQQCIPLPLKE

SEQ ID NO: 796151 - protein, 131 aa, Homo sapiens
MGPEEKTIMTERSAAVFIQAWWRGMLVRRTLLHAALRAWIIQCWWRQVLEKLLAKRRRMVLEFYVQQEWAAVRLQSWVRMWCVRQRYCRLLNAVRIIQVYWRWHSCHSRVFIEGHYELKENQRRSDTDPFR

SEQ ID NO: 796152 - protein, 109 aa, Homo sapiens
MGPEEKTIMTERSAAVFIQAWWRGMLVRRTLLHAALRAWIIQCWWRQVLEKLLAKRRRMVLESIGAGTAAIPVSLLRATMNSKKTNLIFNLKSLWAYRLVRCNNAYPFH

SEQ ID NO: 796153 - protein, 100 aa, Homo sapiens
GEPAETAPCTVLRVRLKHTQTSGVARSCCVPEPLGPVAATRGIPTREDLSIVLKGRFRWRRPENRLECCLRAVLPAGPEPAQTFTLTPACRRHCCLVMLR

SEQ ID NO: 796154 - protein, 270 aa, Homo sapiens
GFRGGFGSGIRGRGRGRGRGRGRGRGARGGKAEDKEWMPVTKLGRLVKDMKIKSLEEIYLFSLPIKESEIIDFFLGASLKDEVLKIMPVQKQTRAGQRTRFKAFVAIGDYNGHVGLGVKCSKEVATAIRGAIILAKLSIVPVRRGYWGNKIGKPHTVPCKVTGRCGSVLVRLIPAPRGTGIVSAPVPKKLLMMAGIDDCYTSARGCTATLGNFAKATFDAISKTYSYLTPDLWKETVFTKSPYQEFTDHLVKTHTRVSVQRTQAPAVATT

SEQ ID NO: 796155 - protein, 192 aa, Homo sapiens
AHHPGLQSEIHFFRGKKKSGGGPVHASAPFNASGHVGLGVKCSKEVATAIRGAIILAKLSIVPVRRGYWGNKIGKPHTVPCKVTGRCGSVLVRLIPAPRGTGIVSAPVPKKLLMMAGIDDCYTSARGCTATLGNFAKATFDAISKTYSYLTPDLWKETVFTKSPYQEFTDHLVKTHTRVSVQRTQAPAVATT

SEQ ID NO: 796156 - protein, 281 aa, Homo sapiens
PRKLLGHGLPDRWAVRQRLSEAAPGAMSSHRRKAKGRNRRSHRAMRVAHLELATYELAATESNPESSHPGYEAAMADRPQPGWRESLKMRVSKPFGMLMLSIWILLFVCYYLSYYLCSGSSYFVLANGHILPNSENAHGQSLEEDSALEALLNFFFPTTCNLRENQVAKPCNELQDLSESECLRHKCCFSSSGTTSFKCFAPFRDVPKQMMQMFGLGAISLILVCLPIYCRSLFWRSEPADDLQRQDNRVVTGLKKQRRKRKRKSEMLQKAARGREEHGDE

SEQ ID NO: 796157 - protein, 102 aa, Homo sapiens
MRNDISLLGPTFVLYSFIYLPSTRHMPHTVLGLEEGAKSKNTWVLSHDAQFADDTRNKRKLCRRDILADMGKMKELNGASISGKRRSNFQRLEEDSGACWDT

SEQ ID NO: 796158 - protein, 104 aa, Homo sapiens
MNHTVQTLFTPANTGRSTNHEMLKEKHEVAVLGAPHNPVPPAFTMIQRMAQQLTYSEYGCRGGGGVCVCVCVCVYVCVCVYTRCVHQYQCLPRVGKLHPVVCME

SEQ ID NO: 796159 - protein, 122 aa, Homo sapiens
PDDSNSGEDSEPSQQPNHSWFSLETMNHTVQTLFTPANTGRSTNHEMLKEKHEVAVLGAPHNPVPPAFTMIHICSETSVPDHVVWSLFNTLFKNSCCPDFIAFIYSVKSRTGSLWTGRWLVT

SEQ ID NO: 796160 - protein, 122 aa, Homo sapiens; identical to SEQ ID NO: 796159

SEQ ID NO: 796161 - protein, 120 aa, Homo sapiens
MFSLPSRDEPSQQPNHSWFSLETMNHTVQTLFTPANTGRSTNHEMLKEKHEVAVLGAPHNPVPPAFTMIHICSETSVPDHVVWSLFNTLFKNSCCPDFIAFIYSVKSRTGSLWTGRWLVT

SEQ ID NO: 796162 - protein, 299 aa, Homo sapiens
MAPWSHPSAQLQPVGGDAVSPALMVLLCLGLSLGPRTHVQAGNLSKATLWAEPGSVISRGNSVTIRCQGTLEAQEYRLVKEGSPEPWDTQNPLEPKNKARFSIPSMTEHHAGRYRCYYYSPAGWSEPSDPLELVVTGFYNKPTLSALPSPVVTSGENVTLQCGSRLRFDRFILTEEGDHKLSWTLDSQLTPSGQFQALFPVGPVTPSHRWMLRCYGSRRHILQVWSEPSDLLEIPVSGAADNLSPSQNKSDSGTASHLQDYAVENLIRMGMAGLILVVLGILIFQDWHSQRSPQAAAGR

SEQ ID NO: 796163 - protein, 69 aa, Homo sapiens
PLICDTGQALLGLDFPSIVQLKVETTKPYGLGQLLGPNSPESWHEWTKRMPLVTASWASSLFDWLADTG

SEQ ID NO: 796164 - protein, 88 aa, Homo sapiens
CSAQCGLGQQMRTVQCLSYTGQASSDCLETVRPPSMQQCESKCDSTPISNTEECKDVNKVAYCPLVLKFKFCSRAYFRQMCCKTCQGH

SEQ ID NO: 796165 - protein, 69 aa, Homo sapiens
LWKKPGLSYILNLPLATCFSSLLTGNQISHGRNSRQTEQTAQEGDFEDAAFWTEGRGKEHRSRRKQYRK

SEQ ID NO: 796166 - protein, 160 aa, Homo sapiens
MLPFLFFSTLFSSIFTEAQKQYWVCNSSDASISYTYCDKMQYPISINVNPCIELKGSKGLLHIFYIPRRDLKQLYFNLYITVNTMNLPKRKEVICRGSDDDYSFCRALKGETVNTTISFSFKGIKFSKGKYKCVVEAISGSPEEMLFCLEFVILHQPNSN

SEQ ID NO: 796167 - protein, 1184 aa, Homo sapiens [sequence omitted]

SEQ ID NO: 796168 - protein, 683 aa, Homo sapiens
MVGTKAWVFSFLVLEVTSVLGRQTMLTQSVRRVQPGKKNPSIFAKPADTLESPGEWTTWFNIDYPGGKGDYERLDAIRFYYGDRVCARPLRLEARTTDWTPAGSTGQVVLVVPVRVSGASTGVTFLDPRNISTATAAQTDLNFINDEGDTFPLRTYGMFSVDFRDEVTSEPLNAGKVKVHLDSTQVKMPEHISTVKLWSLNPDTGLWEEEGDFKFENQRRNKREDRTFLVGNLEIRERRLFNLDVPESRRCFVKVRAYRSERFLPSEQIQGVVISVINLEPRTGFLSNPRAWGRFDSVITGPNGACVPAFCDDQSPDAYSAYVLASLAGEELQAVESSPKFNPNAIGVPQPYLNKLNYRRTDHEDPRVKKTAFQISMAKPRPNSAEESNGPIYAFENLRACEEAPPSAAHFRFYQIEGDRYDYNTVPFNEDDPMSWTEDYLAWWPKPMEFRACYIKVKIVGPLEVNVRSRNMGGTHRRTVGKLYGIRDVRSTRDRDQPNVSAACLEFKCSGMLYDQDRVDRTLVKVIPQGSCRRASVNPMLHEYLVNHLPLAVNNDTSEYTMLAPLDPLGHNYGIYTVTDQDPRTAKEIALGRCFDGTSDGSSRIMKSNVGVALTFNCVERQVGRQSAFQYLQSTPAQSPAAGTVQGRVPSRRQQRASRGGQRQSGVVASLRFPRVAQQPLIN

SEQ ID NO: 796169 - protein, 81 aa, Homo sapiens
CGQGLHCLSHCENSGKSWPILGQFLHILATQSVLHGLVASASPRNVLETQNRVTAPDLLMQNLHFSKRPTAPAPPDDLGAH

SEQ ID NO: 796170 - protein, 104 aa, Homo sapiens
MHCWDCHAQHGPLPWGSARRADSLLVPACLPACTGQETWGGDPQAKAPHSDALLHPMTGPGRGLAAAEMVSGLPTSPTHFPVGAFLKSKETHSFKYVLSACQWL

SEQ ID NO: 796171 - protein, 77 aa, Homo sapiens
ENTGGKQASNRNSNRFQETDEYGCSRQGQPWLSVSNPCQLSGPASRTASELATISPPCLHLPPYPTPAHSALPPTGN

SEQ ID NO: 796172 - protein, 165 aa, Homo sapiens
MSAWELTHLSGKEGMASQPTEAHWGHRTSPQSRDSPSRKSDQALRGHGLRTRSREDTVTNPWLIWQVWEAARPVASPAPPDLCLQLSCSLGQAPRQLYGRRRCTTHILFPGRACCPGCSECGSRWPPAISNFRELPCLRSRPFWGSSHLPGGYKSTVDTMMGNSG

SEQ ID NO: 796173 - protein, 161 aa, Homo sapiens
MVVQNSADAGDMRAGVQLEPFLHQVGGHMSVMKYDEHTVCKPLVSREQRFYESLPLAMKRFTPQYKGTVTVHLWKDSTGHLSLVANPVKESQEPFKVSTESAAVAIWQTLQQTTGSNGSDCTLAQWPHAQLARSPKESPAKALLRSEPHLNTPAFSLVEDT

SEQ ID NO: 796174 - protein, 138 aa, Homo sapiens
MVVQNSADAGDMRAGVQLEPFLHQVGGHMSVMKYDEHTVCKPLVSREQRFYESLPLAMKRFTPQYKGTVTVHLWKDSTGHLSLVANPVKESQEPFKVSTESAAVAIWQTLQQTTGSNGSDCTLAQWPHAQLARSPKER

SEQ ID NO: 796175 - protein, 68 aa, Homo sapiens
SCWAGVGGGVGEMSQRVALDAKPPCSPPSCALRAVERGVEGGGAIFASASREAKEQPWAPLLTVAMGR

SEQ ID NO: 796176 - protein, 124 aa, Homo sapiens
KTVARWAKGPSHPRPSLSLKTFGSNPTISRALLSSSLCVSPQGCWLVSRSPPDPTSGVPPGVWGGSAAWLAVEPYGTWCLTGSLLGVLDPGCIPLERMCVGLRYVYNRNIYSEALVKTSFLSSE

SEQ ID NO: 796177 - protein, 94 aa, Homo sapiens
TGPRCPRSPGAAALGDKGEEEAKEVGNDSPILPTRVMDPGPQEEEAVRGSGVTLGLTALIIHRMCTLTSQTLFCSLKISPINYDPSYLLPQQHI

SEQ ID NO: 796178 - protein, 87 aa, Homo sapiens
KKDPFAKSVAASSVPETKLAGSNSDPTSDPAATIEITPLQESTIIPQDASRLWRRQMRELSGVMVKNRAFRPLRVALVSTVPPGTQY

SEQ ID NO: 796179 - protein, 102 aa, Homo sapiens
FIVSPGPPVTVPVFLPTPSAGVFQNTSLVPRGVFFLGGIPPPFVLAPRSSSGPPRGAPVSLCLCAARPPTTLSVFSKNFFSRPDCGPHSGFFCLCMSLCFLN

SEQ ID NO: 796180 - protein, 134 aa, Homo sapiens
KFRNLILWKFLNQKMSHKNWNFWLLWEIRILSLSEVPPHAGSQRTEPQLLLEAPPGPKPHSPHYSLSPGTEAACQLPFITEKTLSYFLYWRVCCCCCFWLNLLLNHVFIQPLTTSLISITCAPLQAAGPRVDCD

SEQ ID NO: 796181 - protein, 67 aa, Homo sapiens
QSECEGLRTRRAKFQSEDRRRPRSQLKQAGGVALAQPFILSRSSGDWMRPTYISEGNLFYVFDRLKY

SEQ ID NO: 796182 - protein, 330 aa, Homo sapiens
MVDCSLLTLCARKGTAPWYKCCWAPFCFLSFLNPIQVCSTLLGRLMRPRGMLERTERKSNKAASGVRGQHALWVFCHSSRTSTIRKGDPGPTFSKMFIWTSGRTSSSYRHDEKRNIYQKIRDHDLLDKRKTVTALKAGEDRAILLGLAMMVCSIMMYFLLGITLLRSYMQSVWTEESQCTLLNASITETFNCSFSCGPDCWKLSQYPCLQVYVNLTSSGEKLLLYHTEETIKINQKCSYIPKCGKNFEESMSLVNVVMENFRKYQHFSCYSDPEGNQKSVILTKLYSSNVLFHSLFWPTCMMAGGVAIVAMVKLTQYLSLLCERIQRINR

SEQ ID NO: 796183 - protein, 235 aa, Homo sapiens
MFIWTSGRTSSSYRHDEKRNIYQKIRDHDLLDKRKTVTALKAGEDRAILLGLAMMVCSIMMYFLLGITLLRSYMQSVWTEESQCTLLNASITETFNCSFSCGPDCWKLSQYPCLQVYVNLTSSGEKLLLYHTEETIKINQKCSYIPKCGKNFEESMSLVNVVMENFRKYQHFSCYSDPEGNQKSVILTKLYSSNVLFHSLFWPTCMMAGGVAIVAMVKLTQYLSLLCERIQRINR

SEQ ID NO: 796184 - protein, 103 aa, Homo sapiens
MMPAVPREKAKASRPPRPYIVWPIPQTSSLLFLPLPPPTAMLASLLLLKQKHPAPPASGPLHVLCPLPSPQHPWGASPPSSRLCSKAPFSEKPSLTPTYTTAP

SEQ ID NO: 796185 - protein, 93 aa, Homo sapiens
SCSGGEWGADLVFAHAVAGHLRPELEIRLGIGGPGGSEAGSPRAARPGAAAPRWSPGLERGAGLGAPEGLIYGTPPPSSFLPFPALWRMRRDQ

SEQ ID NO: 796186 - protein, 71 aa, Homo sapiens
RDRRSHSPPALSAPRRSGRWPSLGGLRERGRRRLDWRASGLRERSPRVTLGEAPPRAAAWSPSSLYFLNFL

SEQ ID NO: 796187 - protein, 224 aa, Homo sapiens
MRVSGVLRLLALIFAIVTTWMFIRSYMSFSMKTIRLPRWLAASPTKEIQVKKYKCGLIKPCPANYFAFKICSGAANVVGPTMCFEDRMIMSPVKNNVGRGLNIALVNGTTGAVLGQKAFDMYSGDVMHLVKFLKEIPGGALVLVASYDDPGTKMNDESRKLFSDLGSSYAKQLGFRDSWVFIGAKDLRGKSPFEQFLKNSPDTNKYEGWPELLEMEGCMPPKPF

SEQ ID NO: 796188 - protein, 224 aa, Homo sapiens; identical to SEQ ID NO: 796187

SEQ ID NO: 796189 - protein, 143 aa, Homo sapiens [sequence omitted]

SEQ ID NO: 796190 - protein, 321 aa, Homo sapiens
NEKRAKELEATFGCRMSPDIKQELLQCKAHLHANKPLSVTDLKEVLGCLYESQEEELAKVVVAPFKEISIHLTNTSEVMHCSFSLKHCQDLQKLSLQVAKGVFLENYMDFELDIEFERCTYLTIPNWARQDLRSLRLWTDFCSLFSSNSNLKFLEVKQSFLSDSSVRILCDHVTRSTCHLQKVEIKNVTPDTAYRDFCLAFIGKKTLTHLTLAGHIEWERTMMLMLCDLLRNHKCNLQYLRLGGHCATPEQWAEFFYVLKANQSLKHLRLSANVLLDEGAMLLYKTMTRPKHFLQMLSLENCRLTEASCKDLAAVLVSARS

SEQ ID NO: 796191 - protein, 189 aa, Homo sapiens
NEKRAKELEATFGCRMSPDIKQELLQCKAHLHANKPLSVTDLKEVLGCLYESQEEELAKVVVAPFKEISIHLTNTSEVMHCSFSLKHCQDLQKLSLQVAKGVFLENYMDFELDIEFERCTYLTIPNWARQDLRSLRLWTDFCSLFSSNSNLKFLEVKQSFLSDSSVRILCDHVTRSTCHLQKVERPSRT

SEQ ID NO: 796192 - protein, 315 aa, Homo sapiens
NEKRAKELEATFGCRMSPDIKQELLQCKAHLHANKPLSVTDLKEVLGCLYESQEEELAKVVVAPFKEISIHLTNTSEVMHCSFSLKHCQDLQKLSLQVAKGVFLENYMDFELDIEFERCTYLTIPNWARQDLRSLRLWTDFCSLFSSNSNLKFLEVKQSFLSDSSVRILCDHVTRSTCHLQKVEIKNVTPDTAYRDFCLAFIGKKTLTHLTLAGHIEWERTMMLMLCDLLRNHKCNLQYLRLGGHCATPEQWAEFFYVLKANQSLKHLRLSANVLLDEGAMLLYKTMTRPKHFLQMLSLETVSYRSQLQTFWYRP

SEQ ID NO: 796193 - protein, 111 aa, Homo sapiens
MPTGTSERSAVLSLGGEKEPASAGAHRMSRVSLLLPRLECNGMILAHCNLRLLDSSNSPASASQIDSRHCMEKHRENPWPVLLCSDYRCVQPAVTYPLVAQSITTLSHGPP

SEQ ID NO: 796194 - protein, 35 aa, Homo sapiens
MTLHKATLYELSALSCTTPVHAVTPPSRLVSLMML

SEQ ID NO: 796195 - protein, 79 aa, Homo sapiens
KVETLDIVLRAVGKHGRSVSTVRTVSTMEDRQEGVRLTGRVQWLTPVIPKCRRDYRREPPCLAFIISFLKMKKFIIYIQ

SEQ ID NO: 796196 - protein, 1395 aa, Homo sapiens
MLLPLPPQSSKPVPKKSQSSKIVPSHHDPSEKTGENCQTKISPSSLQESPSSLQGALKKRSAFEDLTNASQCQPVQPKKEANKEFVKVVSKKINRNTHALGLAKKNKRNLKWHKLEVTPVVASTTVVPNIMEKPLILDISTTSKTPNTEEASLFRKPLVLKEEPTIEDETLINKSLSLKKCSNHEEVSLLEKLQPLQEESDSDDAFVIEPMTFKKTHKTEEAAITKKTLSLKKKMCASQRKQSCQEESLAVQDVNMEEDSFFMESMSFKKKPKTEESIPTHKLSSLKKKCTIYGRICHFRKPPVLQTTICGAMSSIKKPTTEKETLFQELSVLQEKHTTEHEMSILKKSLALQKTNFKEDSLVKESLAFKKKPSTEEAIMMPVILKEQCMTEGKRPRLKPLVLQEITSGEKSLIMKPLSIKEKPSTEKESFSQEPSALQKKHTTQEEVSILKEPSSLLKSPTEESPFDEALAFTKKCTIEEAPPTKKPLILKKKHATQGTMSHLKKPLILQTTSGEKSLIKEPLPFKEEKVSLKKKCTTQEMMSICPELLDFQDMIGEDKNSFFMEPMSFRKSPTTEETVLTKTSLSLQEKKITQGEMSHLKKPLVLQKITSEEESFYKKLLPFKMKSTTEEKFLSQEPSALKEKHTTLQEVSLSKESLAIQEKATTEEEFSQELFSLHVKHTNKSGSLFQEALVLQEKTDAEEDSLKNLLALQEKSTMEEESLINKLLALKEELSAEAATNIQTQLSLKKKSTSHGKVFFLKKQLALNETINEEEFLNKQPLALEGYPSIAEGETLFKKLLAMQEEPSIEKEAVLKEPTIDTEAHFKEPLALQEEPSTEKEAVLKEPSVDTEAHFKETLALQEKPSIEQEALFKRHSALWEKPSTEKETIFKESLDLQEKPSIKKETLLKKPLALKMSTINEAVLFEDMIALNEKPTTGKELSFKEPLALQESPTYKEDTFLKTLLVPQVGTSPNVSSTAPESITSKSSIATMTSVGKSGTINEAFLFEDMITLNEKPTTGKELSFKEPLALQESPTCKEDTFLETFLIPQIGTSPYVFSTTPESITEKSSIATMTSVGKSRTTTESSACESASDKPVSPQAKGTPKEITPREDIDEDSSDPSFNPMYAKEIFSYMKEREEQFILTDYMNRQIEITSDMRAILVDWLVEVQVSFEMTHETLYLAVKLVDLYLMKAVCKKDKLQLLGATAFMIAAKFEEHNSPRVDDFVYICDDNYQRSEVLSMEINILNVLKCDINIPIAYHFLRRYARCIHTNMKTLTLSRYICEMTLQEYHYVQEKASKLAAASLLLALYMKKLGYWVPFLEHYSGYSISELHPLVRQLNKLLTFSSYDSLKAVYYKYSHPVFFEVAKIPALDMLKLEEILNCDCEAQGLVL

SEQ ID NO: 796197 - protein, 287 aa, Homo sapiens
MITPREDIDEDSSDPSFNPMYAKEIFSYMKEREEQFILTDYMNRQIEITSDMRAILVDWLVEVQVSFEMTHETLYLAVKLVDLYLMKAVCKKDKLQLLGATAFMIAAKFEEHNSPRVDDFVYICDDNYQRSEVLSMEINILNVLKCDINIPIAYHFLRRYARCIHTNMKTLTLSRYICEMTLQEYHYVQEKASKLAAASLLLALYMKKLGYWVPFLEHYSGYSISELHPLVRQLNKLLTFSSYDSLKAVYYKYSHPVFFEVAKIPALDMLKLEEILNCDCEAQGLVL

SEQ ID NO: 796198 - protein, 291 aa, Homo sapiens
MLLPLPPQSSKPVPKKSQSSKIVPSHHDPSEKTGENCQTKISPSSLQESPSSLQGALKKRSAFEDLTNVSFEMTHETLYLAVKLVDLYLMKAVCKKDKLQLLGATAFMIAAKFEEHNSPRVDDFVYICDDNYQRSEVLSMEINILNVLKCDINIPIAYHFLRRYARCIHTNMKTLTLSRYICEMTLQEYHYVQEKASKLAAASLLLALYMKKLGYWVPFLEHYSGYSISELHPLVRQLNKLLTFSSYDSLKAVYYKYSHPVFFEVAKIPALDMLKLEEILNCDCEAQGLVL

SEQ ID NO: 796199 - protein, 1434 aa, Homo sapiens
SGVGLRGVAAVSGSSSFKIVSLLGLVYCVMNAIAGELELVPCSEVLMVQVENRANGLIPVSCFTLYSSLTRTGENCQTKISPSSLQESPSSLQGALKKRSAFEDLTNASQCQPVQPKKEANKEFVKVVSKKINRNTHALGLAKKNKRNLKWHKLEVTPVVASTTVVPNIMEKPLILDISTTSKTPNTEEASLFRKPLVLKEEPTIEDETLINKSLSLKKCSNHEEVSLLEKLQPLQEESDSDDAFVIEPMTFKKTHKTEEAAITKKTLSLKKKMCASQRKQSCQEESLAVQDVNMEEDSFFMESMSFKKKPKTEESIPTHKLSSLKKKCTIYGRICHFRKPPVLQTTICGAMSSIKKPTTEKETLFQELSVLQEKHTTEHEMSILKKSLALQKTNFKEDSLVKESLAFKKKPSTEEAIMMPVILKEQCMTEGKRPRLKPLVLQEITSGEKSLIMKPLSIKEKPSTEKESFSQEPSALQKKHTTQEEVSILKEPSSLLKSPTEESPFDEALAFTKKCTIEEAPPTKKPLILKKKHATQGTMSHLKKPLILQTTSGEKSLIKEPLPFKEEKVSLKKKCTTQEMMSICPELLDFQDMIGEDKNSFFMEPMSFRKSPTTEETVLTKTSLSLQEKKITQGEMSHLKKPLVLQKITSEEESFYKKLLPFKMKSTTEEKFLSQEPSALKEKHTTLQEVSLSKESLAIQEKATTEEEFSQELFSLHVKHTNKSGSLFQEALVLQEKTDAEEDSLKNLLALQEKSTMEEESLINKLLALKEELSAEAATNIQTQLSLKKKSTSHGKVFFLKKQLALNETINEEEFLNKQPLALEGYPSIAEGETLFKKLLAMQEEPSIEKEAVLKEPTIDTEAHFKEPLALQEEPSTEKEAVLKEPSVDTEAHFKETLALQEKPSIEQEALFKRHSALWEKPSTEKETIFKESLDLQEKPSIKKETLLKKPLALKMSTINEAVLFEDMIALNEKPTTGKELSFKEPLALQESPTYKEDTFLKTLLVPQVGTSPNVSSTAPESITSKSSIATMTSVGKSGTINEAFLFEDMITLNEKPTTGKELSFKEPLALQESPTCKEDTFLETFLIPQIGTSPYVFSTTPESITEKSSIATMTSVGKSRTTTESSACESASDKPVSPQAKGTPKEITPREDIDEDSSDPSFNPMYAKEIFSYMKEREEQFILTDYMNRQIEITSDMRAILVDWLVEVQVSFEMTHETLYLAVKLVDLYLMKAVCKKDKLQLLGATAFMIAAKFEEHNSPRVDDFVYICDDNYQRSEVLSMEINILNVLKCDINIPIAYHFLRRYARCIHTNMKTLTLSRYICEMTLQEYHYVQEKASKLAAASLLLALYMKKLGYWVPFLEHYSGYSISELHPLVRQLNKLLTFSSYDSLKAVYYKYSHPVFFEVAKIPALDMLKLEEILNCDCEAQGLVL

SEQ ID NO: 796200 - protein, 232 aa, Homo sapiens
RFYNLIIIYVHLPGPEKAIKGVVVMDSALEALPSSYLLERFQKYGPKSYPSLKPWGSYITDFLARLNFLQDWYNSGKPCVFWLSGFFFTQAFLTGAMQNYARKYTTPIDLLGYEFEVIPSDTSDTSPEDGVYIHGLYLDGARWDRESGLLAEQYPKLLFDLMPIIWIKPTQKSRIIKSDAYVCPLYKTSERKGTLSTTGHSTNFVIAMLLKTDQPTRHWIKRGVALLCQLDD

SEQ ID NO: 796201 - protein, 232 aa, Homo sapiens; identical to SEQ ID NO: 796200

SEQ ID NO: 796202 - protein, 224 aa, Homo sapiens
KQNPGGAKWTKGDPQAGALGALGIRGIPSLCQSEGTRGSRRGRRWAERCPPGVLGAGRSLQAQRSAAGSIPGRRRSAHCANQPRSAAAAGTQEACLEASGTTRGWKYHALPLRLDPRSGHAGSALKAGGCLRLGGGGGEGERLAPPPPFGSRARCSSCCQMNPRMGTCNPPPHPQPQTSRSENWEGGAGSEVLEKQELTCKQAVLLSSGLLDHDVDILLNSLLP

SEQ ID NO: 796203 - protein, 412 aa, Homo sapiens
SKIPGEQNGRKATPRQGRWVPWESEESLLFASRRGLEGAEGPEMGRALPPGGPRRRAQLTSAAQRSRLHSRPPPLSPLRKPTPLCRRCWNPGSVLGGFGHYAGLEIPRTAPSPRPPLRPRGLCPQSWWLPQTWRWGRGRGEAGAPSPFWLPRSLQQLLPNEPQNGDVQPSTPPPATDVAVRKLGRGRWVRGSGKARTHLQTGSPSQLWTSGSRRRYPSEFALALNTSPLNKSLEKKQPLFPPQPNPLARFQLFVNIQLKMKPLAEAGAEGEVVSEVILGEKEEEEEGEEEEEGEVGFAFPDVTAQLLLAAAGFQFPPLLTMDGDDTKSHFLPHPPGPTAVGAEVPGTAREQSPAGRRAPARGEPRSGSRAHTPHGSHAGLPHPRTLAPAGGGSRAQAAAAPPARRRPSAPAA

SEQ ID NO: 796204 - protein, 74 aa, Homo sapiens
IALGGCDEVEGLPNLSLIRILLEELHQVQVIGLLPAIQLQQAVDTCFQKDSIIDGIQTHAQLLIPGDLSLAGKG

SEQ ID NO: 796205 - protein, 284 aa, Homo sapiens
RESISAQWLLAGTPPPINPSHRREKEAPGPTSWRNEATLQAVISGELDPHRPTAQLNRWWWAYPFLHYPDNNLPAPFKSVVEKSALSFGMGKLPRSDCKEGASSSPPIHPWDRQMDRQTHAHAHTHARAPHHTAPSRVRDRYGSPAPAPGWAVMGAQPGAAAQHRWETVPQGPPQDGRGGLSRSSRLLPRWSGRDPRPWSNVPRRLGARGGRYRARLPGTPAPSSQPEPLGANDRGRRRRSSRPGPREGGAGRGRGRGRGLPTPALPAAGGVWDRSDAVSQPGR

SEQ ID NO: 796206 - protein, 74 aa, Homo sapiens
CPDIAAHSGSCLCYIWSSHSLTQSQHLRQCLELPMPPQLAYKGVHSGWIPHSLTHTPLGTLCLAHPLQTWDPSS

SEQ ID NO: 796207 - protein, 95 aa, Homo sapiens
AHRGNSTLRLNYSSRWGCLCVVTCALQSPPALRGLLGGCWGASGRPVARGEAGSRRVTRLPGENGRRALTDPRAAMSWCAAAQEGTPLCQEEAAG

SEQ ID NO: 796208 - protein, 54 aa, Homo sapiens
MGWGGVIAIVVITLCHPNGILYLLLHLISRHQEYEKQLFCPQKGDLTLSNGITI

SEQ ID NO: 796209 - protein, 191 aa, Homo sapiens
MKLNISFPATGCQKLIEVDDERKLRTFYEKRMATEVAADALGEEWKGYVVRISGGNDKQGFPMKQGVLTHGRVRLLLSKGHSCYRPRRTGERKRKSVRGCIVDANLSVLNLVIVKKGEKDIPGLTDTTVPRRLGPKRASRIRKLFNLSKEDDVRQYVVRKPLNKEGKKPRTKAPKIQRLVTPRVLQHKRRR

SEQ ID NO: 796210 - protein, 634 aa, Homo sapiens
ESRDPAQPMSPGEATQSGARPADRYGLLKHSREFLDFFWDIAKPEQETRLAATEKLLEYLRGRPKGSEMKYALKRLITGLGVGRETARPCYSLALAQLLQSFEDLPLCSILQQIQEKYDLHQVKKAMLRPALFANLFGVLALFQSGRLVKDQEALMKSVKLLQALAQYQNHLQEQPRKALVDILSEVSKATLQEILPEVLKADLNIILSSPEQLELFLLAQQKVPSKLKKLVGSVNLFSDENVPRLVNVLKMAASSVKKDRKLPAIALDLLRLALKEDKFPRFWKEVVEQGLLKMQFWPASYLCFRLLGAALPLLTKEQLHLVMQGDVIRHYGEHVCTAKLPKQFKFAPEMDDYVGTFLEGCQDDPERQLAVLVAFSSVTNQGLPVTPTFWRVVRFLSPPALQGYVAWLRAMFLQPDLDSLVDFSTNNQKKAQDSSLHMPERAVFRLRKWIIFRLVSIVDSLHLEMEEALTEQVARFCLFHSFFVTKKPTSQIPETKHPFSFPLENQAREAVSSAFFSLLQTLSTQFKQAPGQTQGGQPWTYHLVQFADLLLNHSHNVTTVTPFTAQQRQAWDRMLQTLKELEAHSAEARAAAFQHLLLLVGIHLLKVPLQRAVDLLWVTSKTCIRKKSGKKKP

SEQ ID NO: 796211 - protein, 328 aa, Homo sapiens
THASPTRRWNKEQLHLVMQGDVIRHYGEHVCTAKLPKQFKFAPEMDDYVGTFLEGCQDDPERQLAVLVAFSSVTNQGLPVTPTFWRVVRFLSPPALQGYVAWLRAMFLQPDLDSLVDFSTNNQKKAQDSSLHMPERAVFRLRKWIIFRLVSIVDSLHLEMEEALTEQVARFCLFHSFFVTKKPTSQIPETKHPFSFPLENQAREAVSSAFFSLLQTLSTQFKQAPGQTQGGQPWTYHLVQFADLLLNHSHNVTTVTPFTAQQRQAWDRMLQTLKELEAHSAEARAAAFQHLLLLVGIHLLKVPLQRAVDLLWVTSKTCIRKKSGKKKP

SEQ ID NO: 796212 - protein, 410 aa, Homo sapiens
EKLWDWDMWMRMPEQRRGRECIIPDVSRSYHFGIVGLNMNGYFHEAYFLALKEDKFPRFWKEVVEQGLLKMQFWPASYLCFRLLGAALPLLTKEQLHLVMQGDVIRHYGEHVCTAKLPKQFKFAPEMDDYVGTFLEGCQDDPERQLAVLVAFSSVTNQGLPVTPTFWRVVRFLSPPALQGYVAWLRAMFLQPDLDSLVDFSTNNQKKAQDSSLHMPERAVFRLRKWIIFRLVSIVDSLHLEMEEALTEQVARFCLFHSFFVTKKPTSQIPETKHPFSFPLENQAREAVSSAFFSLLQTLSTQFKQAPGQTQGGQPWTYHLVQFADLLLNHSHNVTTVTPFTAQQRQAWDRMLQTLKELEAHSAEARAAAFQHLLLLVGIHLLKVPLQRAVDLLWVTSKTCIRKKSGKKKP

SEQ ID NO: 796213 - protein, 380 aa, Homo sapiens
PKLDCAGTDLAKILPKWNLALKEDKFPRFWKEVVEQGLLKMQFWPASYLCFRLLGAALPLLTKEQLHLVMQGDVIRHYGEHVCTAKLPKQFKFAPEMDDYVGTFLEGCQDDPERQLAVLVAFSSVTNQGLPVTPTFWRVVRFLSPPALQGYVAWLRAMFLQPDLDSLVDFSTNNQKKAQDSSLHMPERAVFRLRKWIIFRLVSIVDSLHLEMEEALTEQVARFCLFHSFFVTKKPTSQIPETKHPFSFPLENQAREAVSSAFFSLLQTLSTQFKQAPGQTQGGQPWTYHLVQFADLLLNHSHNVTTVTPFTAQQRQAWDRMLQTLKELEAHSAEARAAAFQHLLLLVGIHLLKVPLQRAVDLLWVTSKTCIRKKSGKKKP

SEQ ID NO: 796214 - protein, 103 aa, Homo sapiens
MESRPASPVIGEGRLKPRGADTVVPLAWLKFRSPECGMRMWNSWISSIAVKLCSHSTNVWQTAEPGEGKTCSKIHMWPGSVAHACNPRTLGAKAGGSLKPSAS

SEQ ID NO: 796215 - protein, 69 aa, Homo sapiens
LEGRAPWPQGTKSDQEVAESLRHRSPRLHATSPSCSAHAHLTCQPHGVKKLRSPAAVSACGPATHKGSG

SEQ ID NO: 796216 - protein, 318 aa, Homo sapiens
MAETNNECSIKVLCRFRPLNQAEILRGDKFIPIFQGDDSVVIGGKPYVFDRVFPPNTTQEQVYHACAMQIVKDVLAGYNGTIFAYGQTSSGKTHTMEGKLHDPQLMGIIPRIARDIFNHIYSMDENLEFHIKVSYFEIYLDKIRDLLDVTKTNLSVHEDKNRVPFVKGCTERFVSSPEEILDVIDEGKSNRHVAVTNMNEHSSRSHSIFLINIKQENMETEQKLSGKLYLVDLAGSEKVSKTGAEGAVLDEAKNINKSLSALGNVISALAEGTKSYVPYRDSKMTRILQDSLGGNCRTTMFICCSPSSYNDAETKSTL

SEQ ID NO: 796217 - protein, 318 aa, Homo sapiens; identical to SEQ ID NO: 796216

SEQ ID NO: 796218 - protein, 35 aa, Homo sapiens
AASIPPLWGNCLLVFWVLYQGLGKDRTEGGARAGW

SEQ ID NO: 796219 - protein, 53 aa, Homo sapiens
MSSVWLCIPERLGKFAVRLLSNSRTDAKACRPKIVPLAVQTGKNLDSRNYILI

SEQ ID NO: 796220 - protein, 101 aa, Homo sapiens
NKLSSEKRNYEVNAYHQETWKRNKTFNLMRFIFRTDPQYTIEFGRQQRPKVGCFSQMIFKKHKSLPLHKRNNTREKSYECKEYKKGFRKYLHLTEHLRDHT

SEQ ID NO: 796221 - protein, 80 aa, Homo sapiens
QDGSPSCSLCTVLPLPPPEVPVTIVRGPHDLEVTEGDTATFECELSQALADVTWEKVRSQPQPSPLQCNTNDNNAPDRNS

SEQ ID NO: 796222 - protein, 136 aa, Homo sapiens
PGFSTCLTTGIKAACPPQPPHNLPLPARQRKETRATPREGPPLARHGNLGCSSLLPRLCLCGLVAESAQRAGRQVRSREAVLERGRTAHLALEASMTGCLQETERNFCPVSATGTPGPLLPCRKLGGFSETLSHSH

SEQ ID NO: 796223 - protein, 101 aa, Homo sapiens
VETGSQRYRTTQNPRDLSRKVTCSKRNYQGGKQPIEWEKIFTKYTSNKSLISKIYKEPNKQKANNPLKKWAKDMNRYFSKDVHVAHKHEKTPISNHQTNAN

SEQ ID NO: 796224 - protein, 149 aa, Homo sapiens
EQDAAGKRRAEPGLRAHSDSASPGTRRKLLAPAAEASPAWDSRGRGGDRGCTTSSAGRESAWCAGRVGEGLREAPAEAVAGAVAAALRPAHSAPRARGAPTPRPPPSPLLKGAIAPGAANSSAAQSPNLWRSPGPERSRRKRICSPRAS

SEQ ID NO: 796225 - protein, 1153 aa, Homo sapiens
MWSQGMTTPSLKTDGGRRTATSPPPTTSQTIISTIPSTAMHTRSTAAPIPILPERGVSLFPYGADAGDLEFVRRTVDFTSPLFKPATGFPLGSSLRDSLYFTDNGQIIFPESDYQIFSYPNPLPTGFTGRDPVALVAPFWDDADFSTGRGTTFYQEYETFYGEHSLLVQQAESWIRKITNNGGYKARWALKVTWVNAHAYPAQWTLGSNTYQAILSTDGSRSYALFLYQSGGMQWDVAQRSGKPVLMGFSSGDGFFENSPLMSQPVWERYRPDRFLNSNSGLQGLQFYGLHREERPNYRLECLQWLKSQPRWPSWGWNQVSCPCSWQQGRRDLRFQPVSIGRWGLGSRQLCSFTSWRGGVCCSYGPWGEFREGWHVQRPWQLAQELEPQSWCCRWNDKPYLCALYQQRRPHVGCATYRPPQPAWMFGDPHITTLDGVSYTFNGLGDFLLVGAQDGNSSFLLQGRTAQTGSAQATNFIAFAAQYRSSSLGPVTVQWLLEPHDAIRVLLDNQTVTFQPDHEDGGGQETFNATGVLLSRNGSEVSASFDGWATVSVIALSNILHSSASLPPEYQNRTEGLLGVWNNNPEDDFRMPNGSTIPPGSPEEMLFHFGMTWQINGTGLLGKRNDQLPSNFTPVFYSQLQKNSSWAEHLISNCDGDSSCIYDTLALRNASIGLHTREVSKNYEQANATLNQYPPSINGGRVIEAYKGQTTLIQYTSNAEDANFTLRDSCTDLELFENGTLLWTPKSLEPFTLEILARSAKIGLASALQPRTVVCHCNAESQCLYNQTSRVGNSSLEVAGCKCDGGTFGRYCEGSEDACEEPCFPSVHCVPGKGCEACPPNLTGDGRHCAALGSSFLCQNQSCPVNYCYNQGHCYISQTLGCQPMCTCPPAFTDSRCFLAGNNFSPTVNLELPLRVIQLLLSEEENASMAEVNASVAYRLGTLDMRAFLRNSQVERIDSAAPASGSPIQHWMVISEFQYRPRGPVIDFLNNQLLAAVVEAFLYHVPRRSEEPRNDVVFQPISGEDVRDVTALNVSTLKAYFRCDGYKGYDLVYSPQSGFTCVSPCSRGYCDHGGQCQHLPSGPRCSCVSFSIYTAWGEHCEHLSMKLDAFFGIFFGALGGLLLLGVGTFVVLRFWGCSGARFSYFLNSAEALP

SEQ ID NO: 796226 - protein, 1102 aa, Homo sapiens
MWSQGVSLFPYGADAGDLEFVRRTVDFTSPLFKPATGFPLGSSLRDSLYFTDNGQIIFPESDYQIFSYPNPLPTGFTGRDPVALVAPFWDDADFSTGRGTTFYQEYETFYGEHSLLVQQAESWIRKITNNGGYKARWALKVTWVNAHAYPAQWTLGSNTYQAILSTDGSRSYALFLYQSGGMQWDVAQRSGKPVLMGFSSGDGFFENSPLMSQPVWERYRPDRFLNSNSGLQGLQFYGLHREERPNYRLECLQWLKSQPRWPSWGWNQVSCPCSWQQGRRDLRFQPVSIGRWGLGSRQLCSFTSWRGGVCCSYGPWGEFREGWHVQRPWQLAQELEPQSWCCRWNDKPYLCALYQQRRPHVGCATYRPPQPAWMFGDPHITTLDGVSYTFNGLGDFLLVGAQDGNSSFLLQGRTAQTGSAQATNFIAFAAQYRSSSLGPVTVQWLLEPHDAIRVLLDNQTVTFQPDHEDGGGQETFNATGVLLSRNGSEVSASFDGWATVSVIALSNILHSSASLPPEYQNRTEGLLGVWNNNPEDDFRMPNGSTIPPGSPEEMLFHFGMTWQINGTGLLGKRNDQLPSNFTPVFYSQLQKNSSWAEHLISNCDGDSSCIYDTLALRNASIGLHTREVSKNYEQANATLNQYPPSINGGRVIEAYKGQTTLIQYTSNAEDANFTLRDSCTDLELFENGTLLWTPKSLEPFTLEILARSAKIGLASALQPRTVVCHCNAESQCLYNQTSRVGNSSLEVAGCKCDGGTFGRYCEGSEDACEEPCFPSVHCVPGKGCEACPPNLTGDGRHCAALGSSFLCQNQSCPVNYCYNQGHCYISQTLGCQPMCTCPPAFTDSRCFLAGNNFSPTVNLELPLRVIQLLLSEEENASMAEVNASVAYRLGTLDMRAFLRNSQVERIDSAAPASGSPIQHWMVISEFQYRPRGPVIDFLNNQLLAAVVEAFLYHVPRRSEEPRNDVVFQPISGEDVRDVTALNVSTLKAYFRCDGYKGYDLVYSPQSGFTCVSPCSRGYCDHGGQCQHLPSGPRCSCVSFSIYTAWGEHCEHLSMKLDAFFGIFFGALGGLLLLGVGTFVVLRFWGCSGARFSYFLNSAEALP

SEQ ID NO: 796227 - protein, 2169 aa, Homo sapiens
MKGARWRRVPWVSLSCLCLCLLPHVVPGTTEDTLITGSKTPAPVTSTGSTTATLEGQSTAASSRTSNQDISASSQNHQTKSTETTSKAQTDTLTQMMTSTLFSSPSVHNVMETVTQETAPPDEMTTSFPSSVTNTLMMTSKTITMTTSTDSTLGNTEETSTAGTESSTPVTSAVSITAGQEGQSRTTSWRTSIQDTSASSQNHWTRSTQTTRESQTSTLTHRTTSTPSFSPSVHNVTGTVSQKTSPSGETATSSLCSVTNTSMMTSEKITVTTSTGSTLGNPGETSSVPVTGSLMPVTSAALVTVDPEGQSPATFSRTSTQDTTAFSKNHQTQSVETTRVSQINTLNTLTPVTTSTVLSSPSGFNPSGTVSQETFPSGETTISSPSSVSNTFLVTSKVFRMPISRDSTLGNTEETSLSVSGTISAITSKVSTIWWSDTLSTALSPSSLPPKISTAFHTQQSEGAETTGRPHERSSFSPGVSQEIFTLHETTTWPSSFSSKGHTTWSQTELPSTSTGAATRLVTGNPSTRAAGTIPRVPSKVSAIGEPGEPTTYSSHSTTLPKTTGAGAQTQWTQETGTTGEALLSSPSYSVIQMIKTATSPSSSPMLDRHTSQQITTAPSTNHSTIHSTSTSPQESPAVSQRGHTRAPQTTQESQTTRSVSPMTDTKTVTTPGSSFTASGHSPSEIVPQDAPTISAATTFAPAPTGNGHTTQAPTTALQAAPSSHDATLGPSGGTSLSKTGALTLANSVVSTPGGPEGQWTSASASTSPDTAAAMTHTHQAESTEASGQTQTSEPASSGSRTTSAGTATPSSSGASGTTPSGSEGISTSGETTRFSSNPSRDSHTTQSTTELLSASASHGAIPVSTGMASSIVPGTFHPTLSEASTAGRPTGQSSPTSPSASPQETAAISRMAQTQRTGTSRGSDTISLASQATDTFSTVPPTPPSITSSGLTSPQTQTHTLSPSGSGKTFTTALISNATPLPVTSTSSASTGHATPLAVSSATSASTVSSDSPLKMETSGMTTPSLKTDGGRRTATSPPPTTSQTIISTIPSTAMHTRSTAAPIPILPERGVSLFPYGADAGDLEFVRRTVDFTSPLFKPATGFPLGSSLRDSLYFTDNGQIIFPESDYQIFSYPNPLPTGFTGRDPVALVAPFWDDADFSTGRGTTFYQEYETFYGEHSLLVQQAESWIRKITNNGGYKARWALKVTWVNAHAYPAQWTLGSNTYQAILSTDGSRSYALFLYQSGGMQWDVAQRSGKPVLMGFSSGDGFFENSPLMSQPVWERYRPDRFLNSNSGLQGLQFYGLHREERPNYRLECLQWLKSQPRWPSWGWNQVSCPCSWQQGRRDLRFQPVSIGRWGLGSRQLCSFTSWRGGVCCSYGPWGEFREGWHVQRPWQLAQELEPQSWCCRWNDKPYLCALYQQRRPHVGCATYRPPQPAWMFGDPHITTLDGVSYTFNGLGDFLLVGAQDGNSSFLLQGRTAQTGSAQATNFIAFAAQYRSSSLGPVTVQWLLEPHDAIRVLLDNQTVTFQPDHEDGGGQETFNATGVLLSRNGSEVSASFDGWATVSVIALSNILHSSASLPPEYQNRTEGLLGVWNNNPEDDFRMPNGSTIPPGSPEEMLFHFGMTWQINGTGLLGKRNDQLPSNFTPVFYSQLQKNSSWAEHLISNCDGDSSCIYDTLALRNASIGLHTREVSKNYEQANATLNQYPPSINGGRVIEAYKGQTTLIQYTSNAEDANFTLRDSCTDLELFENGTLLWTPKSLEPFTLEILARSAKIGLASALQPRTVVCHCNAESQCLYNQTSRVGNSSLEVAGCKCDGGTFGRYCEGSEDACEEPCFPSVHCVPGKGCEACPPNLTGDGRHCAALGSSFLCQNQSCPVNYCYNQGHCYISQTLGCQPMCTCPPAFTDSRCFLAGNNFSPTVNLELPLRVIQLLLSEEENASMAEVNASVAYRLGTLDMRAFLRNSQVERIDSAAPASGSPIQHWMVISEFQYRPRGPVIDFLNNQLLAAVVEAFLYHVPRRSEEPRNDVVFQPISGEDVRDVTALNVSTLKAYFRCDGYKGYDLVYSPQSGFTCVSPCSRGYCDHGGQCQHLPSGPRCSCVSFSIYTAWGEHCEHLSMKLDAFFGIFFGALGGLLLLGVGTFVVLRFWGCSGARFSYFLNSAEALP

SEQ ID NO: 796228 - protein, 2117 aa, Homo sapiens
MKGARWRRVPWVSLSCLCLCLLPHVVPGTTEDTLITGSKTPAPVTSTGSTTATLEGQSTAASSRTSNQDISASSQNHQTKSTETTSKAQTDTLTQMMTSTLFSSPSVHNVMETVTQETAPPDEMTTSFPSSVTNTLMMTSKTITMTTSTDSTLGNTEETSTAGTESSTPVTSAVSITAGQEGQSRTTSWRTSIQDTSASSQNHWTRSTQTTRESQTSTLTHRTTSTPSFSPSVHNVTGTVSQKTSPSGETATSSLCSVTNTSMMTSEKITVTTSTGSTLGNPGETSSVPVTGSLMPVTSAALVTVDPEGQSPATFSRTSTQDTTAFSKNHQTQSVETTRVSQINTLNTLTPVTTSTVLSSPSGFNPSGTVSQETFPSGETTISSPSSVSNTFLVTSKVFRMPISRDSTLGNTEETSLSVSGTISAITSKVSTIWWSDTLSTALSPSSLPPKISTAFHTQQSEGAETTGRPHERSSFSPGVSQEIFTLHETTTWPSSFSSKGHTTWSQTELPSTSTGAATRLVTGNPSTRAAGTIPRVPSKVSAIGEPGEPTTYSSHSTTLPKTTGAGAQTQWTQETGTTGEALLSSPSYSVIQMIKTATSPSSSPMLDRHTSQQITTAPSTNHSTIHSTSTSPQESPAVSQRGHTRAPQTTQESQTTRSVSPMTDTKTVTTPGSSFTASGHSPSEIVPQDAPTISAATTFAPAPTGNGHTTQAPTTALQAAPSSHDATLGPSGGTSLSKTGALTLANSVVSTPGGPEGQWTSASASTSPDTAAAMTHTHQAESTEASGQTQTSEPASSGSRTTSAGTATPSSSGASGTTPSGSEGISTSGETTRFSSNPSRDSHTTQSTTELLSASASHGAIPVSTGMASSIVPGTFHPTLSEASTAGRPTGQSSPTSPSASPQETAAISRMAQTQRTGTSRGSDTISLASQATDTFSTVPPTPPSITSSGLTSPQTQTHTLSPSGSGKTFTTALISNATPLPVTSTSSASTGHATPLAVSSATSASTVSSDSPLKMETSGMTTPSLKTDGGRRTATSPPPTTSQTIISTIPSTAMHTRSTAAPIPILPERGVSLFPYGADAGDLEFVRRTVDFTSPLFKPATGFPLGSSLRDSLYFTDNGQIIFPESDYQIFSYPNPLPTGFTGRDPVALVAPFWDDADFSTGRGTTFYQSNTYQAILSTDGSRSYALFLYQSGGMQWDVAQRSGKPVLMGFSSGDGFFENSPLMSQPVWERYRPDRFLNSNSGLQGLQFYGLHREERPNYRLECLQWLKSQPRWPSWGWNQVSCPCSWQQGRRDLRFQPVSIGRWGLGSRQLCSFTSWRGGVCCSYGPWGEFREGWHVQRPWQLAQELEPQSWCCRWNDKPYLCALYQQRRPHVGCATYRPPQPAWMFGDPHITTLDGVSYTFNGLGDFLLVGAQDGNSSFLLQGRTAQTGSAQATNFIAFAAQYRSSSLGPVTVQWLLEPHDAIRVLLDNQTVTFQPDHEDGGGQETFNATGVLLSRNGSEVSASFDGWATVSVIALSNILHSSASLPPEYQNRTEGLLGVWNNNPEDDFRMPNGSTIPPGSPEEMLFHFGMTWQINGTGLLGKRNDQLPSNFTPVFYSQLQKNSSWAEHLISNCDGDSSCIYDTLALRNASIGLHTREVSKNYEQANATLNQYPPSINGGRVIEAYKGQTTLIQYTSNAEDANFTLRDSCTDLELFENGTLLWTPKSLEPFTLEILARSAKIGLASALQPRTVVCHCNAESQCLYNQTSRVGNSSLEVAGCKCDGGTFGRYCEGSEDACEEPCFPSVHCVPGKGCEACPPNLTGDGRHCAALGSSFLCQNQSCPVNYCYNQGHCYISQTLGCQPMCTCPPAFTDSRCFLAGNNFSPTVNLELPLRVIQLLLSEEENASMAEVNASVAYRLGTLDMRAFLRNSQVERIDSAAPASGSPIQHWMVISEFQYRPRGPVIDFLNNQLLAAVVEAFLYHVPRRSEEPRNDVVFQPISGEDVRDVTALNVSTLKAYFRCDGYKGYDLVYSPQSGFTCVSPCSRGYCDHGGQCQHLPSGPRCSCVSFSIYTAWGEHCEHLSMKLDAFFGIFFGALGGLLLLGVGTFVVLRFWGCSGARFSYFLNSAEALP

SEQ ID NO: 796229 - protein, 1827 aa, Homo sapiens
MKGARWRRVPWVSLSCLCLCLLPHVVPGTTEDTLITGSKTPAPVTSTGSTTATLEGQSTAASSRTSNQDISASSQNHQTKSTETTSKAQTDTLTQMMTSTLFSSPSVHNVMETVTQETAPPDEMTTSFPSSVTNTLMMTSKTITMTTSTDSTLGNTEETSTAGTESSTPVTSAVSITAGQEGQSRTTSWRTSIQDTSASSQNHWTRSTQTTRESQTSTLTHRTTSTPSFSPSVHNVTGTVSQKTSPSGETATSSLCSVTNTSMMTSEKITVTTSTGSTLGNPGETSSVPVTGSLMPVTSAALVTVDPEGQSPATFSRTSTQDTTAFSKNHQTQSVETTRVSQINTLNTLTPVTTSTVLSSPSGFNPSGTVSQETFPSGETTISSPSSVSNTFLVTSKVFRMPISRDSTLGNTEETSLSVSGTISAITSKVSTIWWSDTLSTALSPSSLPPKISTAFHTQQSEGAETTGRPHERSSFSPGVSQEIFTLHETTTWPSSFSSKGHTTWSQTELPSTSTGAATRLVTGNPSTRAAGTIPRVPSKVSAIGEPGEPTTYSSHSTTLPKTTGAGAQTQWTQETGTTGEALLSSPSYSVIQMIKTATSPSSSPMLDRHTSQQITTAPSTNHSTIHSTSTSPQESPAVSQRGHTRAPQTTQESQTTRSVSPMTDTKTVTTPGSSFTASGHSPSEIVPQDAPTISAATTFAPAPTGNGHTTQAPTTALQAAPSSHDATLGPSGGTSLSKTGALTLANSVVSTPGGPEGQWTSASASTSPDTAAAMTHTHQAESTEASGQTQTSEPASSGSRTTSAGTATPSSSGASGTTPSGSEGISTSGETTRFSSNPSRDSHTTQSTTELLSASASHGAIPVSTGMASSIVPGTFHPTLSEASTAGRPTGQSSPTSPSASPQETAAISRMAQTQRTGTSRGSDTISLASQATDTFSTVPPTPPSITSSGLTSPQTQTHTLSPSGSGKTFTTALISNATPLPVTSTSSASTGHATPLAVSSATSASTVSSDSPLKMETSGMTTPSLKTDGGRRTATSPPPTTSQTIISTIPSTAMHTRSTAAPIPILPERGVSLFPYGADAGDLEFVRRTVDFTSPLFKPATGFPLGSSLRDSLYFTDNGQIIFPESDYQIFSYPNPLPTGFTGRDPVALVAPFWDDADFSTGRGTTFYQEYETFYGEHSLLVQQAESWIRKITNNGGYKARWALKVTWVNAHAYPAQWTLGSNTYQAILSTDGSRSYALFLYQSGGMQWDVAQRSGKPVLMGFSSGDGFFENSPLMSQPVWERYRPDRFLNSNSGLQGLQFYGLHREERPNYRLECLQWLKSQPRWPSWGWNQVSCPCSWQQGRRDLRFQPVSIGRWGLGSRQLCSFTSWRGGVCCSYGPWGEFREGWHVQRPWQLAQELEPQSWCCRWNDKPYLCALYQQRRPHVGCATYRPPQPAWMFGDPHITTLDGVSYTFNGLGDFLLVGAQDGNSSFLLQGRTAQTGSAQATNFIAFAAQYRSSSLGPVTVQWLLEPHDAIRVLLDNQTVTFQPDHEDGGGQETFNATGVLLSRNGSEVSASFDGWATVSVIALSNILHSSASLPPEYQNRTEGLLGVWNNNPEDDFRMPNGSTIPPGSPEEMLFHFGMTWQINGTGLLGKRNDQLPSNFTPVFYSQLQKNSSWAEHLISNCDGDSSCIYDTLALRNASIGLHTREVSKNYEQANATLNQYPPSINGGRVIEAYKGQTTLIQYTSNAEDANFTLRDSCTDLELFENGTLLWTPKSLEPFTLEILARSAKIGLASALQPRTVVCHCNAESQCLYNQTSRVGNSSLELWGALSCVRTSPAL

SEQ ID NO: 796230 - protein, 2233 aa, Homo sapiens
MKGARWRRVPWVSLSCLCLCLLPHVVPGTTEDTLITGSKTPAPVTSTGSTTATLEGQSTAASSRTSNQDISASSQNHQTKSTETTSKAQTDTLTQMMTSTLFSSPSVHNVMETVTQETAPPDEMTTSFPSSVTNTLMMTSKTITMTTSTDSTLGNTEETSTAGTESSTPVTSAVSITAGQEGQSRTTSWRTSIQDTSASSQNHWTRSTQTTRESQTSTLTHRTTSTPSFSPSVHNVTGTVSQKTSPSGETATSSLCSVTNTSMMTSEKITVTTSTGSTLGNPGETSSVPVTGSLMPVTSAALVTVDPEGQSPATFSRTSTQDTTAFSKNHQTQSVETTRVSQINTLNTLTPVTTSTVLSSPSGFNPSGTVSQETFPSGETTISSPSSVSNTFLVTSKVFRMPISRDSTLGNTEETSLSVSGTISAITSKVSTIWWSDTLSTALSPSSLPPKISTAFHTQQSEGAETTGRPHERSSFSPGVSQEIFTLHETTTWPSSFSSKGHTTWSQTELPSTSTGAATRLVTGNPSTRAAGTIPRVPSKVSAIGEPGEPTTYSSHSTTLPKTTGAGAQTQWTQETGTTGEALLSSPSYSVIQMIKTATSPSSSPMLDRHTSQQITTAPSTNHSTIHSTSTSPQESPAVSQRGHTRAPQTTQESQTTRSVSPMTDTKTVTTPGSSFTASGHSPSEIVPQDAPTISAATTFAPAPTGNGHTTQAPTTALQAAPSSHDATLGPSGGTSLSKTGALTLANSVVSTPGGPEGQWTSASASTSPDTAAAMTHTHQAESTEASGQTQTSEPASSGSRTTSAGTATPSSSGASGTTPSGSEGISTSGETTRFSSNPSRDSHTTQSTTELLSASASHGAIPVSTGMASSIVPGTFHPTLSEASTAGRPTGQSSPTSPSASPQETAAISRMAQTQRTGTSRGSDTISLASQATDTFSTVPPTPPSITSSGLTSPQTQTHTLSPSGSGKTFTTALISNATPLPVTSTSSASTGHATPLPVTDASSVSTGHATPLPVTDTSSASTGDTTPLPVTDTSSASTGQATPLPVTSTSSASTGHATPLAVSSATSASTVSSDSPLKMETSGMTTPSLKTDGGRRTATSPPPTTSQTIISTIPSTAMHTRSTAAPIPILPERGVSLFPYGADAGDLEFVRRTVDFTSPLFKPATGFPLGSSLRDSLYFTDNGQIIFPESDYQIFSYPNPLPTGFTGRDPVALVAPFWDDADFSTGRGTTFYQEYETFYGEHSLLVQQAESWIRKITNNGGYKARWALKVTWVNAHAYPAQWTLGSNTYQAILSTDGSRSYALFLYQSGGMQWDVAQRSGKPVLMGFSSGDGFFENSPLMSQPVWERYRPDRFLNSNSGLQGLQFYGLHREERPNYRLECLQWLKSQPRWPSWGWNQVSCPCSWQQGRRDLRFQPVSIGRWGLGSRQLCSFTSWRGGVCCSYGPWGEFREGWHVQRPWQLAQELEPQSWCCRWNDKPYLCALYQQRRPHVGCATYRPPQPAWMFGDPHITTLDGVSYTFNGLGDFLLVGAQDGNSSFLLQGRTAQTGSAQATNFIAFAAQYRSSSLGPVTVQWLLEPHDAIRVLLDNQTVTFQPDHEDGGGQETFNATGVLLSRNGSEVSASFDGWATVSVIALSNILHSSASLPPEYQNRTEGLLGVWNNNPEDDFRMPNGSTIPPGSPEEMLFHFGMTWQINGTGLLGKRNDQLPSNFTPVFYSQLQKNSSWAEHLISNCDGDSSCIYDTLALRNASIGLHTREVSKNYEQANATLNQYPPSINGGRVIEAYKGQTTLIQYTSNAEDANFTLRDSCTDLELFENGTLLWTPKSLEPFTLEILARSAKIGLASALQPRTVVCHCNAESQCLYNQTSRVGNSSLEVAGCKCDGGTFGRYCEGSEDACEEPCFPSVHCVPGKGCEACPPNLTGDGRHCAALGSSFLCQNQSCPVNYCYNQGHCYISQTLGCQPMCTCPPAFTDSRCFLAGNNFSPTVNLELPLRVIQLLLSEEENASMAEVNASVAYRLGTLDMRAFLRNSQVERIDSAAPASGSPIQHWMVISEFQYRPRGPVIDFLNNQLLAAVVEAFLYHVPRRSEEPRNDVVFQPISGEDVRDVTALNVSTLKAYFRCDGYKGYDLVYSPQSGFTCVSPCSRGYCDHGGQCQHLPSGPRCSCVSFSIYTAWGEHCEHLSMKLDAFFGIFFGALGGLLLLGVGTFVVLRFWGCSGARFSYFLNSAEALP

SEQ ID NO: 796231 - protein, 1962 aa, Homo sapiens
MKGARWRRVPWVSLSCLCLCLLPHVVPGTTEDTLITGSKTPAPVTSTGSTTATLEGQSTAASSRTSNQDISASSQNHQTKSTETTSKAQTDTLTQMMTSTLFSSPSVHNVMETVTQETAPPDEMTTSFPSSVTNTLMMTSKTITMTTSTDSTLGNTEETSTAGTESSTPVTSAVSITAGQEGQSRTTSWRTSIQDTSASSQNHWTRSTQTTRESQTSTLTHRTTSTPSFSPSVHNVTGTVSQKTSPSGETATSSLCSVTNTSMMTSEKITVTTSTGSTLGNPGETSSVPVTGSLMPVTSAALVTVDPEGQSPATFSRTSTQDTTAFSKNHQTQSVETTRVSQINTLNTLTPVTTSTVLSSPSGFNPSGTVSQETFPSGETTISSPSSVSNTFLVTSKVFRMPISRDSTLGNTEETSLSVSGTISAITSKVSTIWWSDTLSTALSPSSLPPKISTAFHTQQSEGAETTGRPHERSSFSPGVSQEIFTLHETTTWPSSFSSKGHTTWSQTELPSTSTGAATRLVTGNPSTRAAGTIPRVPSKVSAIGEPGEPTTYSSHSTTLPKTTGAGAQTQWTQETGTTGEALLSSPSYSVIQMIKTATSPSSSPMLDRHTSQQITTAPSTNHSTIHSTSTSPQESPAVSQRGHTRAPQTTQESQTTRSVSPMTDTKTVTTPGSSFTASGHSPSEIVPQDAPTISAATTFAPAPTGNGHTTQAPTTALQAAPSSHDATLGPSGGTSLSKTGALTLANSVVSTPGGPEGQWTSASASTSPDTAAAMTHTHQAESTEASGQTQTSEPASSGSRTTSAGTATPSSSGASGTTPSGSEGISTSGETTRFSSNPSRDSHTTQSTTELLSASASHGAIPVSTGMASSIVPGTFHPTLSEASTAGRPTGQSSPTSPSASPQETAAISRMAQTQRTGTSRGSDTISLASQATDTFSTVPPTPPSITSSGLTSPQTQTHTLSPSGSGKTFTTALISNATPLPVTSTSSASTGHATPLPVTDASSVSTGHATPLPVTDTSSASTGDTTPLPVTDTSSASTGQATPLPVTSTSSASTGHATPLAVSSATSASTVSSDSPLKMETSGMTTPSLKTDGGRRTATSPPPTTSQTIISTIPSTAMHTRSTAAPIPILPERGVSLFPYGADAGDLEFVRRTVDFTSPLFKPATGFPLGSSLRDSLYFTDNGQIIFPESDYQIFSYPNPLPTGFTGRDPVALVAPFWDDADFSTGRGTTFYQAVGGLSYTRVSQEGPSCAPGLGEYTPIRGNVMKATAGSVDRAPATDRAVWRLQEEETHACFSRSCRFRHGEEYETFYGEHSLLVQQAESWIRKITNNGGYKARWALKVTWVNAHAYPAQWTLGSNTYQAILSTDGSRSYALFLYQSGGMQWDVAQRSGKPVLMGFSSGDGFFENSPLMSQPVWERYRPDRFLNSNSGLQGLQFYGLHREERPNYRLECLQWLKSQPRWPSWGWNQVSCPCSWQQGRRDLRFQPVSIGRWGLGSRQLCSFTSWRGGVCCSYGPWGEFREGWHVQRPWQLAQELEPQSWCCRWNDKPYLCALYQQRRPHVGCATYRPPQPAWMFGDPHITTLDGVSYTFNGLGDFLLVGAQDGNSSFLLQGRTAQTGSAQATNFIAFAAQYRSSSLGPVTVQWLLEPHDAIRVLLDNQTVTFQPDHEDGGGQETFNATGVLLSRNGSEVSASFDGWATVSVIALSNILHSSASLPPEYQNRTEGLLGVWNNNPEDDFRMPNGSTIPPGSPEEMLFHFGMTWQINGTGLLGKRNDQLPSNFTPVFYSQLQKNSSWAEHLISNCDGDSSCIYDTLALRNASIGLHTREVSKNYEQANATLNQYPPSINGGRVIEAYKGQTTLIQYTSNAEDANFTLRDSCTDLELFENGTLLWTPKSLEPFTLEILARSAKIGLASALQPRTVVCHCNAESQCLYNQTSRVGNSSLELWGALSCVRTSPAL

SEQ ID NO: 796232 - protein, 1397 aa, Homo sapiens
MKGARWRRVPWVSLSCLCLCLLPHVVPGTTEDTLITGSKTPAPVTSTGSTTATLEGQSTAASSRTSNQDISASSQNHQTKSTETTSKAQTDTLTQMMTSTLFSSPSVHNVMETVTQETAPPDEMTTSFPSSVTNTLMMTSKTITMTTSTDSTLGNTEETSTAGTESSTPVTSAVSITAGQEGQSRTTSWRTSIQDTSASSQNHWTRSTQTTRESQTSTLTHRTTSTPSFSPSVHNVTGTVSQKTSPSGETATSSLCSVTNTSMMTSEKITVTTSTGSTLGNPGETSSVPVTGSLMPVTSAALVTVDPEGQSPATFSRTSTQDTTAFSKNHQTQSVETTRVSQINTLNTLTPVTTSTVLSSPSGFNPSGTVSQETFPSGETTISSPSSVSNTFLVTSKVFRMPISRDSTLGNTEETSLSVSGTISAITSKVSTIWWSDTLSTALSPSSLPPKISTAFHTQQSEGAETTGRPHERSSFSPGVSQEIFTLHETTTWPSSFSSKGHTTWSQTELPSTSTGAATRLVTGNPSTRAAGTIPRVPSKVSAIGEPGEPTTYSSHSTTLPKTTGAGAQTQWTQETGTTGEALLSSPSYSVIQMIKTATSPSSSPMLDRHTSQQITTAPSTNHSTIHSTSTSPQESPAVSQRGHTRAPQTTQESQTTRSVSPMTDTKTVTTPGSSFTASGHSPSEIVPQDAPTISAATTFAPAPTGNGHTTQAPTTALQAAPSSHDATLGPSGGTSLSKTGALTLANSVVSTPGGPEGQWTSASASTSPDTAAAMTHTHQAESTEASGQTQTSEPASSGSRTTSAGTATPSSSGASGTTPSGSEGISTSGETTRFSSNPSRDSHTTQSTTELLSASASHGAIPVSTGMASSIVPGTFHPTLSEASTAGRPTGQSSPTSPSASPQETAAISRMAQTQRTGTSRGSDTISLASQATDTFSTVPPTPPSITSSGLTSPQTQTHTLSPSGSGKTFTTALISNATPLPVTSTSSASTGHATPLPVTDASSVSTGHATPLPVTDTSSASTGDTTPLPVTDTSSASTGQATPLPVTSTSSASTGHATPLAVSSATSASTVSSDSPLKMETSGMTTPSLKTDGGRRTATSPPPTTSQTIISTIPSTAMHTRSTAAPIPILPERGVSLFPYGADAGDLEFVRRTVDFTSPLFKPATGFPLGSSLRDSLYFTDNGQIIFPESDYQIFSYPNPLPTGFTGRDPVALVAPFWDDADFSTGRGTTFYQEYETFYGEHSLLVQQAESWIRKITNNGGYKARWALKVTWVNAHAYPAQWTLGSNTYQAILSTDGSRSYALFLYQSGGMQWDVAQRSGKPVLMGFSRPPRAAVLRATPGRKAQLPSRVPAVAEEPASVAQLGLEPGLLPLFLAAGTTGLTIPTRQHRSLGPRQ

SEQ ID NO: 796233 - protein, 1221 aa, Homo sapiens
MKGARWRRVPWVSLSCLCLCLLPHVVPGTTEDTLITGSKTPAPVTSTGSTTATLEGQSTAASSRTSNQDISASSQNHQTKSTETTSKAQTDTLTQMMTSTLFSSPSVHNVMETVTQETAPPDEMTTSFPSSVTNTLMMTSKTITMTTSTDSTLGNTEETSTAGTESSTPVTSAVSITAGQEGQSRTTSWRTSIQDTSASSQNHWTRSTQTTRESQTSTLTHRTTSTPSFSPSVHNVTGTVSQKTSPSGETATSSLCSVTNTSMMTSEKITVTTSTGSTLGNPGETSSVPVTGSLMPVTSAALVTVDPEGQSPATFSRTSTQDTTAFSKNHQTQSVETTRVSQINTLNTLTPVTTSTVLSSPSGFNPSGTVSQETFPSGETTISSPSSVSNTFLVTSKVFRMPISRDSTLGNTEETSLSVSGTISAITSKVSTIWWSDTLSTALSPSSLPPKISTAFHTQQSEGAETTGRPHERSSFSPGVSQEIFTLHETTTWPSSFSSKGHTTWSQTELPSTSTGAATRLVTGNPSTRAAGTIPRVPSKVSAIGEPGEPTTYSSHSTTLPKTTGAGAQTQWTQETGTTGEALLSSPSYSVIQMIKTATSPSSSPMLDRHTSQQITTAPSTNHSTIHSTSTSPQESPAVSQRGHTRAPQTTQESQTTRSVSPMTDTKTVTTPGSSFTASGHSPSEIVPQDAPTISAATTFAPAPTGNGHTTQAPTTALQAAPSSHDATLGPSGGTSLSKTGALTLANSVVSTPGGPEGQWTSASASTSPDTAAAMTHTHQAESTEASGQTQTSEPASSGSRTTSAGTATPSSSGASGTTPSGSEGISTSGETTRFSSNPSRDSHTTQSTTELLSASASHGAIPVSTGMASSIVPGTFHPTLSEASTAGRPTGQSSPTSPSASPQETAAISRMAQTQRTGTSRGSDTISLASQATDTFSTVPPTPPSITSSGLTSPQTQTHTLSPSGSGKTFTTALISNATPLPVTSTSSASTGHATPLPVTDASSVSTGHATPLPVTDTSSASTGDTTPLPVTDTSSASTGQATPLPVTSTSSASTGHATPLAVSSATSASTVSSDSPLKMETSGMTTPSLKTDGGRRTATSPPPTTSQTIISTIPSTAMHTRSTAAPIPILPERGVSLFPYGADAGDLEFVRRTVDFTSPLFKPATGFPLGSSLRDSLYASQAGTLWPWWLRSGTMLTSPLVGGPHFIRNTRRSMVNTAC

SEQ ID NO: 796234 - protein, 1221 aa, Homo sapiens; identical to SEQ ID NO: 796233

SEQ ID NO: 796235 - protein, 1221 aa, Homo sapiens; identical to SEQ ID NO: 796233

SEQ ID NO: 796236 - protein, 1157 aa, Homo sapiens
MKGARWRRVPWVSLSCLCLCLLPHVVPGTTEDTLITGSKTPAPVTSTGSTTATLEGQSTAASSRTSNQDISASSQNHQTKSTETTSKAQTDTLTQMMTSTLFSSPSVHNVMETVTQETAPPDEMTTSFPSSVTNTLMMTSKTITMTTSTDSTLGNTEETSTAGTESSTPVTSAVSITAGQEGQSRTTSWRTSIQDTSASSQNHWTRSTQTTRESQTSTLTHRTTSTPSFSPSVHNVTGTVSQKTSPSGETATSSLCSVTNTSMMTSEKITVTTSTGSTLGNPGETSSVPVTGSLMPVTSAALVTVDPEGQSPATFSRTSTQDTTAFSKNHQTQSVETTRVSQINTLNTLTPVTTSTVLSSPSGFNPSGTVSQETFPSGETTISSPSSVSNTFLVTSKVFRMPISRDSTLGNTEETSLSVSGTISAITSKVSTIWWSDTLSTALSPSSLPPKISTAFHTQQSEGAETTGRPHERSSFSPGVSQEIFTLHETTTWPSSFSSKGHTTWSQTELPSTSTGAATRLVTGNPSTRAAGTIPRVPSKVSAIGEPGEPTTYSSHSTTLPKTTGAGAQTQWTQETGTTGEALLSSPSYSVIQMIKTATSPSSSPMLDRHTSQQITTAPSTNHSTIHSTSTSPQESPAVSQRGHTRAPQTTQESQTTRSVSPMTDTKTVTTPGSSFTASGHSPSEIVPQDAPTISAATTFAPAPTGNGHTTQAPTTALQAAPSSHDATLGPSGGTSLSKTGALTLANSVVSTPGGPEGQWTSASASTSPDTAAAMTHTHQAESTEASGQTQTSEPASSGSRTTSAGTATPSSSGASGTTPSGSEGISTSGETTRFSSNPSRDSHTTQSTTELLSASASHGAIPVSTGMASSIVPGTFHPTLSEASTAGRPTGQSSPTSPSASPQETAAISRMAQTQRTGTSRGSDTISLASQATDTFSTVPPTPPSITSSGLTSPQTQTHTLSPSGSGKTFTTALISNATPLPVTSTSSASTGHATPLAVSSATSASTVSSDSPLKMETSGMTTPSLKTDGGRRTATSPPPTTSQTIISTIPSTAMHTRSTAAPIPILPERGVSLFPYGADAGDLEFVRRTVDFTSPLFKPATGFPLGSSLRDSLYASQAGTLWPWWLRSGTMLTSPLVGGPHFIRNTRRSMVNTAC

SEQ ID NO: 796237 - protein, 1267 aa, Homo sapiens
MKGARWRRVPWVSLSCLCLCLLPHVVPGTTEDTLITGSKTPAPVTSTGSTTATLEGQSTAASSRTSNQDISASSQNHQTKSTETTSKAQTDTLTQMMTSTLFSSPSVHNVMETVTQETAPPDEMTTSFPSSVTNTLMMTSKTITMTTSTDSTLGNTEETSTAGTESSTPVTSAVSITAGQEGQSRTTSWRTSIQDTSASSQNHWTRSTQTTRESQTSTLTHRTTSTPSFSPSVHNVTGTVSQKTSPSGETATSSLCSVTNTSMMTSEKITVTTSTGSTLGNPGETSSVPVTGSLMPVTSAALVTVDPEGQSPATFSRTSTQDTTAFSKNHQTQSVETTRVSQINTLNTLTPVTTSTVLSSPSGFNPSGTVSQETFPSGETTISSPSSVSNTFLVTSKVFRMPISRDSTLGNTEETSLSVSGTISAITSKVSTIWWSDTLSTALSPSSLPPKISTAFHTQQSEGAETTGRPHERSSFSPGVSQEIFTLHETTTWPSSFSSKGHTTWSQTELPSTSTGAATRLVTGNPSTRAAGTIPRVPSKVSAIGEPGEPTTYSSHSTTLPKTTGAGAQTQWTQETGTTGEALLSSPSYSVIQMIKTATSPSSSPMLDRHTSQQITTAPSTNHSTIHSTSTSPQESPAVSQRGHTRAPQTTQESQTTRSVSPMTDTKTVTTPGSSFTASGHSPSEIVPQDAPTISAATTFAPAPTGNGHTTQAPTTALQAAPSSHDATLGPSGGTSLSKTGALTLANSVVSTPGGPEGQWTSASASTSPDTAAAMTHTHQAESTEASGQTQTSEPASSGSRTTSAGTATPSSSGASGTTPSGSEGISTSGETTRFSSNPSRDSHTTQSTTELLSASASHGAIPVSTGMASSIVPGTFHPTLSEASTAGRPTGQSSPTSPSASPQETAAISRMAQTQRTGTSRGSDTISLASQATDTFSTVPPTPPSITSSGLTSPQTQTHTLSPSGSGKTFTTALISNATPLPVTSTSSASTGHATPLAVSSATSASTVSSDSPLKMETSGMTTPSLKTDGGRRTATSPPPTTSQTIISTIPSTAMHTRSTAAPIPILPERGVSLFPYGADAGDLEFVRRTVDFTSPLFKPATGFPLGSSLRDSLYFTDNGQIIFPESDYQIFSYPNPLPTGFTGRDPVALVAPFWDDADFSTGRGTTFYQEYETFYGEHSLLVQQAESWIRKITNNGGYKARWALKVTWVNAHAYPAQWTLGSNTYQAILSTDGSRSYALFLYQSGGMQWDVAQRSVEMAFSKTAH

SEQ ID NO: 796238 - protein, 1748 aa, Homo sapiens
MKGARWRRVPWVSLSCLCLCLLPHVVPGTTEDTLITGSKTPAPVTSTGSTTATLEGQSTAASSRTSNQDISASSQNHQTKSTETTSKAQTDTLTQMMTSTLFSSPSVHNVMETVTQETAPPDEMTTSFPSSVTNTLMMTSKTITMTTSTDSTLGNTEETSTAGTESSTPVTSAVSITAGQEGQSRTTSWRTSIQDTSASSQNHWTRSTQTTRESQTSTLTHRTTSTPSFSPSVHNVTGTVSQKTSPSGETATSSLCSVTNTSMMTSEKITVTTSTGSTLGNPGETSSVPVTGSLMPVTSAALVTVDPEGQSPATFSRTSTQDTTAFSKNHQTQSVETTRVSQINTLNTLTPVTTSTVLSSPSGFNPSGTVSQETFPSGETTISSPSSVSNTFLVTSKVFRMPISRDSTLGNTEETSLSVSGTISAITSKVSTIWWSDTLSTALSPSSLPPKISTAFHTQQSEGAETTGRPHERSSFSPGVSQEIFTLHETTTWPSSFSSKGHTTWSQTELPSTSTGAATRLVTGNPSTRAAGTIPRVPSKVSAIGEPGEPTTYSSHSTTLPKTTGAGAQTQWTQETGTTGEALLSSPSYSVIQMIKTATSPSSSPMLDRHTSQQITTAPSTNHSTIHSTSTSPQESPAVSQRGHTRAPQTTQESQTTRSVSPMTDTKTVTTPGSSFTASGHSPSEIVPQDAPTISAATTFAPAPTGNGHTTQAPTTALQAAPSSHDATLGPSGGTSLSKTGALTLANSVVSTPGGPEGQWTSASASTSPDTAAAMTHTHQAESTEASGQTQTSEPASSGSRTTSAGTATPSSSGASGTTPSGSEGISTSGETTRFSSNPSRDSHTTQSTTELLSASASHGAIPVSTGMASSIVPGTFHPTLSEASTAGRPTGQSSPTSPSASPQETAAISRMAQTQRTGTSRGSDTISLASQATDTFSTVPPTPPSITSSGLTSPQTQTHTLSPSGSGKTFTTALISNATPLPVTSTSSASTGHATPLPVTDASSVSTGHATPLPVTDTSSASTGDTTPLPVTDTSSASTGQATPLPVTSTSSASTGHATPLAVSSATSASTVSSDSPLKMETSGMTTPSLKTDGGRRTATSPPPTTSQTIISTIPSTAMHTRSTAAPIPILPERGVSLFPYGADAGDLEFVRRTVDFTSPLFKPATGFPLGSSLRDSLYFTDNGQIIFPESDYQIFSYPNPLPTGFTGRDPVALVAPFWDDADFSTGRGTTFYQEYETFYGEHSLLVQQAESWIRKITNNGGYKARWALKVTWVNAHAYPAQWTLGSNTYQAILSTDGSRSYALFLYQSGGMQWDVAQRSGKPVLMGFSSGDGFFENSPLMSQPVWERYRPDRFLNSNSGLQGLQFYGLHREERPNYRLECLQWLKSQPRWPSWGWNQGRTAQTGSAQATNFIAFAAQYRSSSLGPVTVQWLLEPHDAIRVLLDNQTVTFQPDHEDGGGQETFNATGVLLSRNGSEVSASFDGWATVSVIALSNILHSSASLPPEYQNRTEGLLGVWNNNPEDDFRMPNGSTIPPGSPEEMLFHFGMTWQINGTGLLGKRNDQLPSNFTPVFYSQLQKNSSWAEHLISNCDGDSSCIYDTLALRNASIGLHTREVSKNYEQANATLNQYPPSINGGRVIEAYKGQTTLIQYTSNAEDANFTLRDSCTDLELFENGTLLWTPKSLEPFTLEILARSAKIGLASALQPRTVVCHCNAESQCLYNQTSRVGNSSLELWGALSCVRTSPAL

SEQ ID NO: 796239 - protein, 1215 aa, Homo sapiens [sequence omitted]

SEQ ID NO: 796240 - protein, 1199 aa, Homo sapiens [sequence omitted]

SEQ ID NO: 796241 - protein, 1281 aa, Homo sapiens
MKGARWRRVPWVSLSCLCLCLLPHVVPGTTEDTLITGSKTPAPVTSTGSTTATLEGQSTAASSRTSNQDISASSQNHQTKSTETTSKAQTDTLTQMMTSTLFSSPSVHNVMETVTQETAPPDEMTTSFPSSVTNTLMMTSKTITMTTSTDSTLGNTEETSTAGTESSTPVTSAVSITAGQEGQSRTTSWRTSIQDTSASSQNHWTRSTQTTRESQTSTLTHRTTSTPSFSPSVHNVTGTVSQKTSPSGETATSSLCSVTNTSMMTSEKITVTTSTGSTLGNPGETSSVPVTGSLMPVTSAALVTVDPEGQSPATFSRTSTQDTTAFSKNHQTQSVETTRVSQINTLNTLTPVTTSTVLSSPSGFNPSGTVSQETFPSGETTISSPSSVSNTFLVTSKVFRMPISRDSTLGNTEETSLSVSGTISAITSKVSTIWWSDTLSTALSPSSLPPKISTAFHTQQSEGAETTGRPHERSSFSPGVSQEIFTLHETTTWPSSFSSKGHTTWSQTELPSTSTGAATRLVTGNPSTRAAGTIPRVPSKVSAIGEPGEPTTYSSHSTTLPKTTGAGAQTQWTQETGTTGEALLSSPSYSVIQMIKTATSPSSSPMLDRHTSQQITTAPSTNHSTIHSTSTSPQESPAVSQRGHTRAPQTTQESQTTRSVSPMTDTKTVTTPGSSFTASGHSPSEIVPQDAPTISAATTFAPAPTGNGHTTQAPTTALQAAPSSHDATLGPSGGTSLSKTGALTLANSVVSTPGGPEGQWTSASASTSPDTAAAMTHTHQAESTEASGQTQTSEPASSGSRTTSAGTATPSSSGASGTTPSGSEGISTSGETTRFSSNPSRDSHTTQSTTELLSASASHGAIPVSTGMASSIVPGTFHPTLSEASTAGRPTGQSSPTSPSASPQETAAISRMAQTQRTGTSRGSDTISLASQATDTFSTVPPTPPSITSSGLTSPQTQTHTLSPSGSGKTFTTALISNATPLPVTSTSSASTGHATPLAVSSATSASTVSSDSPLKMETSGMTTPSLKTDGGRRTATSPPPTTSQTIISTIPSTAMHTRSTAAPIPILPERGVSLFPYGADAGDLEFVRRTVDFTSPLFKPATGFPLGSSLRDSLYFTDNGQIIFPESDYQIFSYPNPLPTGFTGRDPVALVAPFWDDADFSTGRGTTFYQSNTYQAILSTDGSRSYALFLYQSGGMQWDVAQRSGKPVLMGFSRPPRAAVLRATPGRKAQLPSRVPAVAEEPASVAQLGLEPGLLPLFLAAGTTGLTIPTRQHRSLGPRQ

SEQ ID NO: 796242 - protein, 1201 aa, Homo sapiens
MKGARWRRVPWVSLSCLCLCLLPHVVPGTTEDTLITGSKTPAPVTSTGSTTATLEGQSTAASSRTSNQDISASSQNHQTKSTETTSKAQTDTLTQMMTSTLFSSPSVHNVMETVTQETAPPDEMTTSFPSSVTNTLMMTSKTITMTTSTDSTLGNTEETSTAGTESSTPVTSAVSITAGQEGQSRTTSWRTSIQDTSASSQNHWTRSTQTTRESQTSTLTHRTTSTPSFSPSVHNVTGTVSQKTSPSGETATSSLCSVTNTSMMTSEKITVTTSTGSTLGNPGETSSVPVTGSLMPVTSAALVTVDPEGQSPATFSRTSTQDTTAFSKNHQTQSVETTRVSQINTLNTLTPVTTSTVLSSPSGFNPSGTVSQETFPSGETTISSPSSVSNTFLVTSKVFRMPISRDSTLGNTEETSLSVSGTISAITSKVSTIWWSDTLSTALSPSSLPPKISTAFHTQQSEGAETTGRPHERSSFSPGVSQEIFTLHETTTWPSSFSSKGHTTWSQTELPSTSTGAATRLVTGNPSTRAAGTIPRVPSKVSAIGEPGEPTTYSSHSTTLPKTTGAGAQTQWTQETGTTGEALLSSPSYSVIQMIKTATSPSSSPMLDRHTSQQITTAPSTNHSTIHSTSTSPQESPAVSQRGHTRAPQTTQESQTTRSVSPMTDTKTVTTPGSSFTASGHSPSEIVPQDAPTISAATTFAPAPTGNGHTTQAPTTALQAAPSSHDATLGPSGGTSLSKTGALTLANSVVSTPGGPEGQWTSASASTSPDTAAAMTHTHQAESTEASGQTQTSEPASSGSRTTSAGTATPSSSGASGTTPSGSEGISTSGETTRFSSNPSRDSHTTQSTTELLSASASHGAIPVSTGMASSIVPGTFHPTLSEASTAGRPTGQSSPTSPSASPQETAAISRMAQTQRTGTSRGSDTISLASQATDTFSTVPPTPPSITSSGLTSPQTQTHTLSPSGSGKTFTTALISNATPLPVTSTSSASTGHATPLAVSSATSASTVSSDSPLKMETSGMTTPSLKTDGGRRTATSPPPTTSQTIISTIPSTAMHTRSTAAPIPILPERGVSLFPYGADAGDLEFVRRTVDFTSPLFKPATGFPLGSSLRDSLYASQAGTLWPWWLRSGTMLTSPLVGGPHFIRATPTKPSSPRTGAGPMPCFSTRAVGCSGTWPSAQWRWLFRKQPTDVPASVGEVSP

SEQ ID NO: 796243 - protein, 1786 aa, Homo sapiens
MKGARWRRVPWVSLSCLCLCLLPHVVPGTTEDTLITGSKTPAPVTSTGSTTATLEGQSTAASSRTSNQDISASSQNHQTKSTETTSKAQTDTLTQMMTSTLFSSPSVHNVMETVTQETAPPDEMTTSFPSSVTNTLMMTSKTITMTTSTDSTLGNTEETSTAGTESSTPVTSAVSITAGQEGQSRTTSWRTSIQDTSASSQNHWTRSTQTTRESQTSTLTHRTTSTPSFSPSVHNVTGTVSQKTSPSGETATSSLCSVTNTSMMTSEKITVTTSTGSTLGNPGETSSVPVTGSLMPVTSAALVTVDPEGQSPATFSRTSTQDTTAFSKNHQTQSVETTRVSQINTLNTLTPVTTSTVLSSPSGFNPSGTVSQETFPSGETTISSPSSVSNTFLVTSKVFRMPISRDSTLGNTEETSLSVSGTISAITSKVSTIWWSDTLSTALSPSSLPPKISTAFHTQQSEGAETTGRPHERSSFSPGVSQEIFTLHETTTWPSSFSSKGHTTWSQTELPSTSTGAATRLVTGNPSTRAAGTIPRVPSKVSAIGEPGEPTTYSSHSTTLPKTTGAGAQTQWTQETGTTGEALLSSPSYSVIQMIKTATSPSSSPMLDRHTSQQITTAPSTNHSTIHSTSTSPQESPAVSQRGHTRAPQTTQESQTTRSVSPMTDTKTVTTPGSSFTASGHSPSEIVPQDAPTISAATTFAPAPTGNGHTTQAPTTALQAAPSSHDATLGPSGGTSLSKTGALTLANSVVSTPGGPEGQWTSASASTSPDTAAAMTHTHQAESTEASGQTQTSEPASSGSRTTSAGTATPSSSGASGTTPSGSEGISTSGETTRFSSNPSRDSHTTQSTTELLSASASHGAIPVSTGMASSIVPGTFHPTLSEASTAGRPTGQSSPTSPSASPQETAAISRMAQTQRTGTSRGSDTISLASQATDTFSTVPPTPPSITSSGLTSPQTQTHTLSPSGSGKTFTTALISNATPLPVTSTSSASTGHATPLAVSSATSASTVSSDSPLKMETSGMTTPSLKTDGGRRTATSPPPTTSQTIISTIPSTAMHTRSTAAPIPILPERGVSLFPYGADAGDLEFVRRTVDFTSPLFKPATGFPLGSSLRDSLYFTDNGQIIFPESDYQIFSYPNPLPTGFTGRDPVALVAPFWDDADFSTGRGTTFYQEYETFYGEHSLLVQQAESWIRKITNNGGYKARWALKVTWVNAHAYPAQWTLGSNTYQAILSTDGSRSYALFLYQSGGMQWDVAQRSGKPVLMGFSSGDGFFENSPLMSQPVWERYRPDRFLNSNSGLQGLQFYGLHREERPNYRLECLQWLKSQPRWPSWGWNQVSCPCSWQQGRRDLRFQPVSIGRWGLGSRQLCSFTSWRGGVCCSYGPWGEFREGWHVQRPWQLAQELEPQSWCCRWNDKPYLCALYQQRRPHVGCATYRPPQPAWMFGDPHITTLDGVSYTFNGLGDFLLVGAQDGNSSFLLQGRTAQTGSAQATNFIAFAAQYRSSSLGPVTVQWLLEPHDAIRVLLDNQTVTFQPDHEDGGGQETFNATGVLLSRNGSEVSASFDGWATVSVIALSNILHSSASLPPEYQNRTEGLLGVWNNNPEDDFRMPNGSTIPPGSPEEMLFHFGMTWQINGTGLLGKRNDQLPSNFTPVFYSQLQKNSSWAEHLISNCDGDSSCIYDTLALRNASIGLHTREVSKNYEQANATLNQYPPSINGGRVIEAYKGQTTLIQYTSNAEDANFTLRDSCTDLELFEPVLPCELLLQSRPLLHLPDSGLSAHVHLPPSLH

SEQ ID NO: 796244 - protein, 1157 aa, Homo sapiens; identical to SEQ ID NO: 796236

SEQ ID NO: 796245 - protein, 1439 aa, Homo sapiens
MKGARWRRVPWVSLSCLCLCLLPHVVPGTTEDTLITGSKTPAPVTSTGSTTATLEGQSTAASSRTSNQDISASSQNHQTKSTETTSKAQTDTLTQMMTSTLFSSPSVHNVMETVTQETAPPDEMTTSFPSSVTNTLMMTSKTITMTTSTDSTLGNTEETSTAGTESSTPVTSAVSITAGQEGQSRTTSWRTSIQDTSASSQNHWTRSTQTTRESQTSTLTHRTTSTPSFSPSVHNVTGTVSQKTSPSGETATSSLCSVTNTSMMTSEKITVTTSTGSTLGNPGETSSVPVTGSLMPVTSAALVTVDPEGQSPATFSRTSTQDTTAFSKNHQTQSVETTRVSQINTLNTLTPVTTSTVLSSPSGFNPSGTVSQETFPSGETTISSPSSVSNTFLVTSKVFRMPISRDSTLGNTEETSLSVSGTISAITSKVSTIWWSDTLSTALSPSSLPPKISTAFHTQQSEGAETTGRPHERSSFSPGVSQEIFTLHETTTWPSSFSSKGHTTWSQTELPSTSTGAATRLVTGNPSTRAAGTIPRVPSKVSAIGEPGEPTTYSSHSTTLPKTTGAGAQTQWTQETGTTGEALLSSPSYSVIQMIKTATSPSSSPMLDRHTSQQITTAPSTNHSTIHSTSTSPQESPAVSQRGHTRAPQTTQESQTTRSVSPMTDTKTVTTPGSSFTASGHSPSEIVPQDAPTISAATTFAPAPTGNGHTTQAPTTALQAAPSSHDATLGPSGGTSLSKTGALTLANSVVSTPGGPEGQWTSASASTSPDTAAAMTHTHQAESTEASGQTQTSEPASSGSRTTSAGTATPSSSGASGTTPSGSEGISTSGETTRFSSNPSRDSHTTQSTTELLSASASHGAIPVSTGMASSIVPGTFHPTLSEASTAGRPTGQSSPTSPSASPQETAAISRMAQTQRTGTSRGSDTISLASQATDTFSTVPPTPPSITSSGLTSPQTQTHTLSPSGSGKTFTTALISNATPLPVTSTSSASTGHATPLPVTDASSVSTGHATPLPVTDTSSASTGDTTPLPVTDTSSASTGQATPLPVTSTSSASTGHATPLAVSSATSASTVSSDSPLKMETSGMTTPSLKTDGGRRTATSPPPTTSQTIISTIPSTAMHTRSTAAPIPILPERGVSLFPYGADAGDLEFVRRTVDFTSPLFKPATGFPLGSSLRDSLYFTDNGQIIFPESDYQIFSYPNPLPTGFTGRDPVALVAPFWDDADFSTGRGTTFYQEYETFYGEHSLLVQQAESWIRKITNNGGYKARWALKVTWVNAHAYPAQWTLGSNTYQAILSTDGSRSYALFLYQSGGMQWDVAQRSGKPVLMGFSSGDGFFENSPLMSQPVWERYRPDRFLNSNSGLQGLQFYGLHREERPNYRLECLQWLKSQPRWPSWGWNQVSCPCSWQQGRRDLRFQPVSIGQPPARVPEPHGGAPGGLE

SEQ ID NO: 796246 - protein, 2304 aa, Homo sapiens
MKGARWRRVPWVSLSCLCLCLLPHVVPGTTEDTLITGSKTPAPVTSTGSTTATLEGQSTAASSRTSNQDISASSQNHQTKSTETTSKAQTDTLTQMMTSTLFSSPSVHNVMETVTQETAPPDEMTTSFPSSVTNTLMMTSKTITMTTSTDSTLGNTEETSTAGTESSTPVTSAVSITAGQEGQSRTTSWRTSIQDTSASSQNHWTRSTQTTRESQTSTLTHRTTSTPSFSPSVHNVTGTVSQKTSPSGETATSSLCSVTNTSMMTSEKITVTTSTGSTLGNPGETSSVPVTGSLMPVTSAALVTVDPEGQSPATFSRTSTQDTTAFSKNHQTQSVETTRVSQINTLNTLTPVTTSTVLSSPSGFNPSGTVSQETFPSGETTISSPSSVSNTFLVTSKVFRMPISRDSTLGNTEETSLSVSGTISAITSKVSTIWWSDTLSTALSPSSLPPKISTAFHTQQSEGAETTGRPHERSSFSPGVSQEIFTLHETTTWPSSFSSKGHTTWSQTELPSTSTGAATRLVTGNPSTRAAGTIPRVPSKVSAIGEPGEPTTYSSHSTTLPKTTGAGAQTQWTQETGTTGEALLSSPSYSVIQMIKTATSPSSSPMLDRHTSQQITTAPSTNHSTIHSTSTSPQESPAVSQRGHTRAPQTTQESQTTRSVSPMTDTKTVTTPGSSFTASGHSPSEIVPQDAPTISAATTFAPAPTGNGHTTQAPTTALQAAPSSHDATLGPSGGTSLSKTGALTLANSVVSTPGGPEGQWTSASASTSPDTAAAMTHTHQAESTEASGQTQTSEPASSGSRTTSAGTATPSSSGASGTTPSGSEGISTSGETTRFSSNPSRDSHTTQSTTELLSASASHGAIPVSTGMASSIVPGTFHPTLSEASTAGRPTGQSSPTSPSASPQETAAISRMAQTQRTGTSRGSDTISLASQATDTFSTVPPTPPSITSSGLTSPQTQTHTLSPSGSGKTFTTALISNATPLPVTSTSSASTGHATPLPVTDASSVSTGHATPLPVTDTSSASTGDTTPLPVTDTSSASTGQATPLPVTSTSSASTGHATPLAVSSATSASTVSSDSPLKMETSGMTTPSLKTDGGRRTATSPPPTTSQTIISTIPSTAMHTRSTAAPIPILPERGVSLFPYGADAGDLEFVRRTVDFTSPLFKPATGFPLGSSLRDSLYFTDNGQIIFPESDYQIFSYPNPLPTGFTGRDPVALVAPFWDDADFSTGRGTTFYQAVGGLSYTRVSQEGPSCAPGLGEYTPIRGNVMKATAGSVDRAPATDRAVWRLQEEETHACFSRSCRFRHGEEYETFYGEHSLLVQQAESWIRKITNNGGYKARWALKVTWVNAHAYPAQWTLGSNTYQAILSTDGSRSYALFLYQSGGMQWDVAQRSGKPVLMGFSSGDGFFENSPLMSQPVWERYRPDRFLNSNSGLQGLQFYGLHREERPNYRLECLQWLKSQPRWPSWGWNQVSCPCSWQQGRRDLRFQPVSIGRWGLGSRQLCSFTSWRGGVCCSYGPWGEFREGWHVQRPWQLAQELEPQSWCCRWNDKPYLCALYQQRRPHVGCATYRPPQPAWMFGDPHITTLDGVSYTFNGLGDFLLVGAQDGNSSFLLQGRTAQTGSAQATNFIAFAAQYRSSSLGPVTVQWLLEPHDAIRVLLDNQTVTFQPDHEDGGGQETFNATGVLLSRNGSEVSASFDGWATVSVIALSNILHSSASLPPEYQNRTEGLLGVWNNNPEDDFRMPNGSTIPPGSPEEMLFHFGMTWQINGTGLLGKRNDQLPSNFTPVFYSQLQKNSSWAEHLISNCDGDSSCIYDTLALRNASIGLHTREVSKNYEQANATLNQYPPSINGGRVIEAYKGQTTLIQYTSNAEDANFTLRDSCTDLELFENGTLLWTPKSLEPFTLEILARSAKIGLASALQPRTVVCHCNAESQCLYNQTSRVGNSSLEVAGCKCDGGTFGRYCEGSEDACEEPCFPSVHCVPGKGCEACPPNLTGDGRHCAALGSSFLCQNQSCPVNYCYNQGHCYISQTLGCQPMCTCPPAFTDSRCFLAGNNFSPTVNLELPLRVIQLLLSEEENASMAEVNASVAYRLGTLDMRAFLRNSQVERIDSAAPASGSPIQHWMVISEFQYRPRGPVIDFLNNQLLAAVVEAFLYHVPRRSEEPRNDVVFQPISGEDVRDVTALNVSTLKAYFRCDGYKGYDLVYSPQSGFTCVSPCSRGYCDHGGQCQHLPSGPRCSCVSFSIYTAWGEHCEHLSMKLDAFFGIFFGALGGLLLLGVGTFVVLRFWGCSGARFSYFLNSAEALP

SEQ ID NO: 796247 - protein, 1962 aa, Homo sapiens; identical to SEQ ID NO: 796231

SEQ ID NO: 796248 - protein, 1700 aa, Homo sapiens
MKGARWRRVPWVSLSCLCLCLLPHVVPGTTEDTLITGSKTPAPVTSTGSTTATLEGQSTAASSRTSNQDISASSQNHQTKSTETTSKAQTDTLTQMMTSTLFSSPSVHNVMETVTQETAPPDEMTTSFPSSVTNTLMMTSKTITMTTSTDSTLGNTEETSTAGTESSTPVTSAVSITAGQEGQSRTTSWRTSIQDTSASSQNHWTRSTQTTRESQTSTLTHRTTSTPSFSPSVHNVTGTVSQKTSPSGETATSSLCSVTNTSMMTSEKITVTTSTGSTLGNPGETSSVPVTGSLMPVTSAALVTVDPEGQSPATFSRTSTQDTTAFSKNHQTQSVETTRVSQINTLNTLTPVTTSTVLSSPSGFNPSGTVSQETFPSGETTISSPSSVSNTFLVTSKVFRMPISRDSTLGNTEETSLSVSGTISAITSKVSTIWWSDTLSTALSPSSLPPKISTAFHTQQSEGAETTGRPHERSSFSPGVSQEIFTLHETTTWPSSFSSKGHTTWSQTELPSTSTGAATRLVTGNPSTRAAGTIPRVPSKVSAIGEPGEPTTYSSHSTTLPKTTGAGAQTQWTQETGTTGEALLSSPSYSVIQMIKTATSPSSSPMLDRHTSQQITTAPSTNHSTIHSTSTSPQESPAVSQRGHTRAPQTTQESQTTRSVSPMTDTKTVTTPGSSFTASGHSPSEIVPQDAPTISAATTFAPAPTGNGHTTQAPTTALQAAPSSHDATLGPSGGTSLSKTGALTLANSVVSTPGGPEGQWTSASASTSPDTAAAMTHTHQAESTEASGQTQTSEPASSGSRTTSAGTATPSSSGASGTTPSGSEGISTSGETTRFSSNPSRDSHTTQSTTELLSASASHGAIPVSTGMASSIVPGTFHPTLSEASTAGRPTGQSSPTSPSASPQETAAISRMAQTQRTGTSRGSDTISLASQATDTFSTVPPTPPSITSSGLTSPQTQTHTLSPSGSGKTFTTALISNATPLPVTSTSSASTGHATPLPVTDASSVSTGHATPLPVTDTSSASTGDTTPLPVTDTSSASTGQATPLPVTSTSSASTGHATPLAVSSATSASTVSSDSPLKMETSGMTTPSLKTDGGRRTATSPPPTTSQTIISTIPSTAMHTRSTAAPIPILPERGVSLFPYGADAGDLEFVRRTVDFTSPLFKPATGFPLGSSLRDSLYFTDNGQIIFPESDYQIFSYPNPLPTGFTGRDPVALVAPFWDDADFSTGRGTTFYQAVGGLSYTRVSQEGPSCAPGLGEYTPIRGNVMKATAGSVDRAPATDRAVWRLQEEETHACFSRSCRFRHGEEYETFYGEHSLLVQQAESWIRKITNNGGYKARWALKVTWVNAHAYPAQWTLGSNTYQAILSTDGSRSYALFLYQSGGMQWDVAQRSGKPVLMGFSSGDGFFENSPLMSQPVWERYRPDRFLNSNSGLQGLQFYGLHREERPNYRLECLQWLKSQPRWPSWGWNQVSCPCSWQQGRRDLRFQPVSIGRWGLGSRQLCSFTSWRGGVCCSYGPWGEFREGWHVQRPWQLAQELEPQSWCCRWNDKPYLCALYQQRRPHVGCATYRPPQPAWMFGDPHITTLDGVSYTFNGLGDFLLVGAQDGNSSFLLQGRTAQTGSAQATNFIAFAAQYRSSSLGPVTVQWLLEPHDAIRVLLDNQTVTFQPDHEDGGGQETFNATGVLLSRPALSVVNRIRSER

SEQ ID NO: 796249 - protein, 574 aa, Homo sapiens
SSARGYDDDFRMPNGSTIPPGSPEEMLFHFGMTWQINGTGLLGKRNDQLPSNFTPVFYSQLQKNSSWAEHLISNCDGDSSCIYDTLALRNASIGLHTREVSKNYEQANATLNQYPPSINGGRVIEAYKGQTTLIQYTSNAEDANFTLRDSCTDLELFENGTLLWTPKSLEPFTLEILARSAKIGLASALQPRTVVCHCNAESQCLYNQTSRVGNSSLEVAGCKCDGGTFGRYCEGSEDACEEPCFPSVHCVPGKGCEACPPNLTGDGRHCAALGSSFLCQNQSCPVNYCYNQGHCYISQTLGCQPMCTCPPAFTDSRCFLAGNNFSPTVNLELPLRVIQLLLSEEENASMAEVNASVAYRLGTLDMRAFLRNSQVERIDSAAPASGSPIQHWMVISEFQYRPRGPVIDFLNNQLLAAVVEAFLYHVPRRSEEPRNDVVFQPISGEDVRDVTALNVSTLKAYFRCDGYKGYDLVYSPQSGFTCVSPCSRGYCDHGGQCQHLPSGPRCSCVSFSIYTAWGEHCEHLSMKLDAFFGIFFGALGGLLLLGVGTFVVLRFWGCSGARFSYFLNSAEALP

SEQ ID NO: 796250 - protein, 66 aa, Homo sapiens
SPHNGALERRIRENVLFPEPISLAKPFQGQKDLWRSEGKLRPGEGLPLTQEVGSDLRQGLHLPSPG

SEQ ID NO: 796251 - protein, 638 aa, Homo sapiens
GKTFSQTSYLVYHRRFHTGEKPYKCEECDKAFSFKSNLERHRKIHTGEKPYKCNECSRTFSRKSSLTRHRRLHTGEKPYKCNDCGKTFSQMSSLVYHRRLHTGEKPYKCEECDEAFSFKSNLERHRRIHTGEKPYKCNDCGKTFSQTSSLVYHRRLHTGEKPYKCEECDEAFSFKSNLERHRIIHTGEKLYKCNECGKTFSRKSSLTRHCRLHTGEKPYQCNECGKAFRGQSALIYHQAIHGIGKLYKCNDCHQVFSNATTIANHWRIHNEERSYKCNRCGKFFRHRSYLAVHWRTHSGEKPYKCEECDEAFSFKSNLQRHRRIHTGEKPYRCNECGKTFSRKSYLTCHRRLHTGEKPYKCNECGKTFGRNSALIIHKAIHTGEKPYKCNECGKAFSQKSSLTCHLRLHTGEKPYKCEECDKVFSRKSSLEKHRRIHTGEKPYKCKVCDKAFGRDSHLAQHTRIHTGEKPYKCNDCGKNFRHNSALVIHKAIHSGEKPYKCNECGKTFRHNSALEIHKAIHTGEKPYKCSECGKVFNRKANLSRHHRLHTGEKPYKCNKCGKVFNQQAHLACHHRIHTGEKPYKCNECGKTFRHNSVLVIHKTIHTGEKPYKCNECGKVFNRKAKLARHHRIHTGKKH

SEQ ID NO: 796252 - protein, 638 aa, Homo sapiens; identical to SEQ ID NO: 796251

SEQ ID NO: 796253 - protein, 47 aa, Homo sapiens
AAFGFCNLTKTLALLAYKMAKRGFSLMASVNKSMAFWSSPSFRASIA

SEQ ID NO: 796254 - protein, 115 aa, Homo sapiens
LETVSLSPRLECSGAISAHSICLPSSNNSAASASRVAGTTGAHRHARLIFCILVETGFHRVAQAGLELLSSGNPPSSASLSARITGASHRARPEFTLNINTTGERRGQVSGTKLI

SEQ ID NO: 796255 - protein, 75 aa, Homo sapiens
LAVPGGEPPTTNTAEVSLSSAIANPRSARRRGWEGAERKPGSEPRRRRILPVAGGSAQETPHRKWAGSLACCTRT

SEQ ID NO: 796256 - protein, 126 aa, Homo sapiens
PKLLASSDPPTSASQSAGIAGVSPRSWSTCHLLLTHLGAVGGRGHSTQSPRPGLVSGGRCALRLQTLSGSLPPAHCWGSPCRHIGLKKEIHYFMTSLLLFLEQVTHLHHRGSVSCSRTGLQRPSRE

SEQ ID NO: 796257 - protein, 423 aa, Homo sapiens
  misc_feature (250)..(250): Xaa can be any naturally occurring amino acid
MLSLEETEAGEEGSRITLPGGGGCRRGDFPWDDEDFRSLALLGAGVAMGFFYLYFRDPGREITWKHFVQYYLARGLVDRLEVVNKQSVRVFLPLGPLLKRSWVRRIKLEIMEFVNFLKNPKQYQDLGAKIPKGAMLTGPPGTGKTLLAKATAGEATVPFITVNGSEFLEMFIGVVASKGFNSATNVVVLAGTNRPDVLDPALMRPGRFHRQIYTGPPYIKGRSSIFKVHLRPLKLDKSLNKDTLARKLAXLTPGFPGVHHTPGQGAPLRTVPAPGAAALHPGAALRPHVHDARGPGSRAAVLREITMGAQDDLRKVTQSAYAQVVQFGVSEKLGQVSFDFSRHGKTLVEKLYGEASAQLLDDEVRHLVSATYRCTLDLLTRCREHVEKVGQRLLEKEVLEKADMVELLGPRPFSEKSTYEEFV

SEQ ID NO: 796258 - protein, 347 aa, Homo sapiens
  misc_feature (175)..(175): Xaa can be any naturally occurring amino acid
GGLFGVGETAAKILKSNIDVLFDRRSWVRRIKLEIMEFVNFLKNPKQYQDLGAKIPKGAMLTGPPGTGKTLLAKATAGEATVPFITVNGSEFLEMFIGVVASKGFNSATNVVVLAGTNRPDVLDPALMRPGRFHRQIYTGPPYIKGRSSIFKVHLRPLKLDKSLNKDTLARKLAXLTPGFPGVHHTPGQGAPLRTVPAPGAAALHPGAALRPHVHDARGPGSRAAVLREITMGAQDDLRKVTQSAYAQVVQFGVSEKLGQVSFDFSRHGKTLVEKLYGEASAQLLDDEVRHLVSATYRCTLDLLTRCREHVEKVGQRLLEKEVLEKADMVELLGPRPFSEKSTYEEF

SEQ ID NO: 796259 - protein, 932 aa, Homo sapiens
MPRHHAGGEEGGAAGLWVKSGAAAAAAGGGRLGSGMKDVESGRGRVLLNSAAARGDGLLLLGTRAATLGGGGGGLRESRRGKQGARMSLLGKPLSYTSSQSCRRNVKYRRVQNYLYNVLERPRGWAFIYHAFVFLLVFGCLILSVFSTIPEHTKLASSCLLILEFVMIVVFGLEFIIRIWSAGCCCRYRGWQGRLRFARKPFCVIDTIVLIASIAVVSAKTQGNIFATSALRSLRFLQILRMVRMDRRGGTWKLLGSVVYAHSKELITAWYIGFLVLIFSSFLVYLVEKDANKEFSTYADALWWGTITLTTIGYGDKTPLTWLGRLLSAGFALLGISFFALPAGILGSGFALKVQEQHRQKHFEKRRNPAANLIQCVWRSYAADEKSVSIATWKPHLKALHTCSPTKKEQGEASSSQKLSFKERVRMASPRGQSIKSRQASVGDRRSPSTDITAEGSPTKVQKSWSFNDRTRFRPSLRLKSSQPKPVIDADTALGTDDVYDEKGCQCDVSVEDLTPPLKTVIRAIRIMKFHVAKRKFKETLRPYDVKDVIEQYSAGHLDMLCRIKSLQTRVDQILGKGQITSDKKSREKITAEHETTDDLSMLGRVVKVEKQVQSIESKLDCLLDIYQQVLRKGSASALALASFQIPPFECEQTSDYQSPVDSKDLSGSAQNSGCLSRSTSANISRGLQFILTPNEFSAQTFYALSPTMHSQATQVPISQSDGSAVAATNTIANQINTAPKPAAPTTLQIPPPLPAIKHLPRPETLHPNPAGLQESISDVTTCLVASKENVQVAQSNLTKDRSMRKSFDMGGETLLSVCPMVPKDLGKSLSVQNLIRSTEELNIQLSGSESSGSRGSQDFYPKWRESKLFITDEEVGPEETETDTFDAAPQPAREAAFASDSLRTGRSRSSQSICKAGESTDALSLPHVKLK

SEQ ID NO: 796260 - protein, 923 aa, Homo sapiens
MPRHHAGGEEGGAAGLWVKSGAAAAAAGGGRLGSGMKDVESGRGRVLLNSAAARGDGLLLLGTRAATLGGGGGGLRESRRGKQGARMSLLGKPLSYTSSQSCRRNVKYRRVQNYLYNVLERPRGWAFIYHAFVFLLVFGCLILSVFSTIPEHTKLASSCLLILEFVMIVVFGLEFIIRIWSAGCCCRYRGWQGRLRFARKPFCVIDTIVLIASIAVVSAKTQGNIFATSALRSLRFLQILRMVRMDRRGGTWKLLGSVVYAHSKELITAWYIGFLVLIFSSFLVYLVEKDANKEFSTYADALWWGTITLTTIGYGDKTPLTWLGRLLSAGFALLGISFFALPAGILGSGFALKVQEQHRQKHFEKRRNPAANLIQCVWRSYAADEKSVSIATWKPHLKALHTCSPTNQKLSFKERVRMASPRGQSIKSRQASVGDRRSPSTDITAEGSPTKVQKSWSFNDRTRFRPSLRLKSSQPKPVIDADTALGTDDVYDEKGCQCDVSVEDLTPPLKTVIRAIRIMKFHVAKRKFKETLRPYDVKDVIEQYSAGHLDMLCRIKSLQTRVDQILGKGQITSDKKSREKITAEHETTDDLSMLGRVVKVEKQVQSIESKLDCLLDIYQQVLRKGSASALALASFQIPPFECEQTSDYQSPVDSKDLSGSAQNSGCLSRSTSANISRGLQFILTPNEFSAQTFYALSPTMHSQATQVPISQSDGSAVAATNTIANQINTAPKPAAPTTLQIPPPLPAIKHLPRPETLHPNPAGLQESISDVTTCLVASKENVQVAQSNLTKDRSMRKSFDMGGETLLSVCPMVPKDLGKSLSVQNLIRSTEELNIQLSGSESSGSRGSQDFYPKWRESKLFITDEEVGPEETETDTFDAAPQPAREAAFASDSLRTGRSRSSQSICKAGESTDALSLPHVKLK

SEQ ID NO: 796261 - protein, 230 aa, Homo sapiens
MPRHHAGGEEGGAAGLWVKSGAAAAAAGGGRLGSGMKDVESGRGRVLLNSAAARGDGLLLLGTRAATLGGGGGGLRESRRGKQGARMSLLGKPLSYTSSQSCRRNVKYRRVQNYLYNVLERPRGWAFIYHAFVFLLVFGCLILSVFSTIPEHTKLASSCLLILEFVMIVVFGLEFIIRIWSAGCCCRYRGWQGRLRFARKPFCVIGEYQSLRYLDYDTNILVFYLLFCNI

SEQ ID NO: 796262 - protein, 253 aa, Homo sapiens
MPRHHAGGEEGGAAGLWVKSGAAAAAAGGGRLGSGMKDVESGRGRVLLNSAAARGDGLLLLGTRAATLGGGGGGLRESRRGKQGARMSLLGKPLSYTSSQSCRRNVKYRRVQNYLYNVLERPRGWAFIYHAFVFLLVFGCLILSVFSTIPEHTKLASSCLLILEFVMIVVFGLEFIIRIWSAGCCCRYRGWQGRLRFARKPFCVIGVRNCCVIFSVSSLTPVPYGGGRVDLRKKVYHHPWALLRRILYSILLS

SEQ ID NO: 796263 - protein, 104 aa, Homo sapiens
SSLPHAASAQPWGCLLGRQRAGVGTSSHLLQDRPLPDTLRVRRRVGRTLSVSHRASLSPVPGQHSGPHPMSRHRERMVASRSPYSRPPSALQPPFPPGVLSFGG

SEQ ID NO: 796264 - protein, 495 aa, Homo sapiens
TLGEAAPIPAAPVLPGTREAPMALAVAPWGRQWEEARALGRAVRMLQRLEEQCVDPRLSVSPPSLRDLLPRTAQLLREVAHSRRAAGGGGPGGPGGSGDFLLIYLANLEAKSRQVAALLPPRGRRSANDELFRAGSRLRRQLAKLAIIFSHMHAELHALFPGGKYCGHMYQLTKAPAHTFWRESCGARCVLPWAEFESLLGTCHPVEPGCTALALRTTIDLTCSGHVSIFEFDVFTRLFQPWPTLLKNWQLLAVNHPGYMAFLTYDEVQERLQACRDKPGSYIFRPSCTRLGQWAIGYVSSDGSILQTIPANKPLSQVLLEGQKDGFYLYPDGKTHNPDLTELGQAEPQQRIHVSEEQLQLYWAMDSTFELCKICAESNKDVKIEPCGHLLCSCCLAAWQHSDSQTCPFCRCEIKGWEAVSIYQFHGQATAEDSGNSSDQEGRELELGQVPLSAPPLPPRPDLPPRKPRNAQPKVRLLKGNSPPAALGPQDPAPA

SEQ ID NO: 796265 - protein, 470 aa, Homo sapiens
ASRARCESAEARALGRAVRMLQRLEEQCVDPRLSVSPPSLRDLLPRTAQLLREVAHSRRAAGGGGPGGPGGSGDFLLIYLANLEAKSRQVAALLPPRGRRSANDELFRAGSRLRRQLAKLAIIFSHMHAELHALFPGGKYCGHMYQLTKAPAHTFWRESCGARCVLPWAEFESLLGTCHPVEPGCTALALRTTIDLTCSGHVSIFEFDVFTRLFQPWPTLLKNWQLLAVNHPGYMAFLTYDEVQERLQACRDKPGSYIFRPSCTRLGQWAIGYVSSDGSILQTIPANKPLSQVLLEGQKDGFYLYPDGKTHNPDLTELGQAEPQQRIHVSEEQLQLYWAMDSTFELCKICAESNKDVKIEPCGHLLCSCCLAAWQHSDSQTCPFCRCEIKGWEAVSIYQFHGQATAEDSGNSSDQEGRELELGQVPLSAPPLPPRPDLPPRKPRNAQPKVRLLKGNSPPAALGPQDPAPA

SEQ ID NO: 796266 - protein, 174 aa, Homo sapiens
MTLKWAYLYPDGKTHNPDLTELGQAEPQQRIHVSEEQLQLYWAMDSTFELCKICAESNKDVKIEPCGHLLCSCCLAAWQHSDSQTCPFCRCEIKGWEAVSIYQFHGQATAEDSGNSSDQEGRELELGQVPLSAPPLPPRPDLPPRKPRNAQPKVRLLKGNSPPAALGPQDPAPA

SEQ ID NO: 796267 - protein, 449 aa, Homo sapiens
TLGEAAPIPAAPVLPGTREAPMALAVAPWGRQWEEARALGRAVRMLQRLEEQCVDPRLSVSPPSLRDLLPRTAQLLREVAHSRRAAGGGGPGGPGGSGDFLLIYLANLEAKSRQVAALLPPRGRRSANDELFRAGSRLRRQLAKLAIIFSHMHAELHALFPGGKYCGHMYQLTKAPAHTFWRESCGARCVLPWAEFESLLGTCHPVEPGCTALALRTTIDLTCSGHVSIFEFDVFTRLFQPWPTLLKNWQLLAVNHPGYMAFLTYDEVQERLQACRDKPGSYLYPDGKTHNPDLTELGQAEPQQRIHVSEEQLQLYWAMDSTFELCKICAESNKDVKIEPCGHLLCSCCLAAWQHSDSQTCPFCRCEIKGWEAVSIYQFHGQATAEDSGNSSDQEGRELELGQVPLSAPPLPPRPDLPPRKPRNAQPKVRLLKGNSPPAALGPQDPAPA

SEQ ID NO: 796268 - protein, 495 aa, Homo sapiens; identical to SEQ ID NO: 796264

SEQ ID NO: 796269 - protein, 256 aa, Homo sapiens
ASRARCESAEARALGRAVRMLQRLEEQCVDPRLSVSPPSLRDLLPRTAQLLREVAHSRRAAGGGGPGGPGGSGDFLLIYLANLEAKSRQVAALLPPRGRRSANDELFRAGSRLRRQLAKLAIIFSHMHAELHALFPGGKYCGHMYQLTKAPAHTFWRESCGARCVLPWAEFESLLGTCHPVEPGCTALALRTTIDLTCSGHVSIFEFDVFTRLFQPWPTLLKNWQLLAVNHPGYMAFLTYDEVQERLQACRDKPGR

SEQ ID NO: 796270 - protein, 50 aa, Homo sapiens
MSSSQQPCTINSVINPIVQMRMRRHREDKGLVLCHTARSHPAPKLVHLTS

SEQ ID NO: 796271 - protein, 94 aa, Homo sapiens
FLSRSMSNILSAHDTFMKQYPKVFLHQKPRLPKLFKQEEQRELNEGKEESQHQQPDDSNNIAVHVQRAHGGHILYRPKRATEKFEEFLAILKKL

SEQ ID NO: 796272 - protein, 185 aa, Homo sapiens
PEEMELDRAVGVLGAATLLLSFLGMAWALQAADTCPEVKMVGLEGSDKLTILRGCPGLPGAPGDKGEAGTNGKRGERGPPGPPGKAGPPGPNGAPGEPQPCLTGPRTCKDLLDRGHFLSGWHTIYLPDCRPLTVLCDMDTDGGGWTVSVGLGRGGQPGSPGGQAAHLVGEHTLEFSILLVGDSQR

SEQ ID NO: 796273 - protein, 278 aa, Homo sapiens
PEEMELDRAVGVLGAATLLLSFLGMAWALQAADTCPGERGPPGPPGKAGPPGPNGAPGEPQPCLTGPRTCKDLLDRGHFLSGWHTIYLPDCRPLTVLCDMDTDGGGWTVFQRRVDGSVDFYRDWATYKQGFGSRLGEFWLGNDNIHALTAQGTSELRVDLVDFEDNYQFAKYRSFKVADEAEKYNLVLGAFVEGSAGDSLTFHNNQSFSTKDQDNDLNTGNCAVMFQGAWWYKNCHVSNLNGRYLRGTHGSFANGINWKSGKGYNYSYKVSEMKVRPA

SEQ ID NO: 796274 - protein, 105 aa, Homo sapiens
PEEMELDRAVGVLGAATLLLSFLGMAWALQAADTCPEVKMVGLEGSDKLTILRGCPGLPGAPGDKGEAGTNGKRGERGPPGPPGKAGPPGPNGAPGEPQPCLTGD

SEQ ID NO: 796275 - protein, 316 aa, Homo sapiens
PEEMELDRAVGVLGAATLLLSFLGMAWALQAADTCPEVKMVGLEGSDKLTILRGCPGLPGAPGDKGEAGTNGKRGERGPPGPPGKAGPPGPNGAPGEPQPCLTGPRTCKDLLDRGHFLSGWHTIYLPDCRPLTVLCDMDTDGGGWTVFQRRVDGSVDFYRDWATYKQGFGSRLGEFWLGNDNIHALTAQGTSELRVDLVDFEDNYQFAKYRSFKVADEAEKYNLVLGAFVEGSAGDSLTFHNNQSFSTKDQDNDLNTGNCAVMFQGAWWYKNCHVSNLNGRYLRGTHGSFANGINWKSGKGYNYSYKVSEMKVRPA

SEQ ID NO: 796276 - protein, 340 aa, Homo sapiens
PEEMELDRAVGVLGAATLLLSFLGMAWALQAADTCPEVKMVGLEGSDKLTILRGCPGLPGAPGDKGEAGTNGKRGERGPPGPPGKAGPPGPNGAPGEPQPCLTGDRPPPHSSHGLWLPLAGSPGSYDAIARMKCKYEQKKMVACPFPCPLIIQGSDKYCPDNLHTLHGNFFLFIIYARRPGAQELKVGVTLGGGRARPTGCGHHSCVALGAVSLSRPQSPALFIQTPMALLLPPRPPSYCLCPAQGSCPAAIPRVPFPGPRTCKDLLDRGHFLSGWHTIYLPDCRPLTVLCDMDTDGGGWTVSVGLGRGGQPGSPGGQAAHLVGEHTLEFSILLVGDSQR

SEQ ID NO: 796277 - protein, 88 aa, Homo sapiens
  misc_feature (77)..(78): Xaa can be any naturally occurring amino acid
  misc_feature (88)..(88): Xaa can be any naturally occurring amino acid
GAPDRCGQHVLPRPHHPTHPHLWPSGTELWPGVPWSRWGAEELSCGLGFRGAESWPDVVRAPVVPGTREAEAGEWRXXGGGACSEPGX

SEQ ID NO: 796278 - protein, 243 aa, Homo sapiens
MRPQGPAASPQRLRGLLLLLLLQLPAPSSASEIPKGKQKAQLRQREVVDLYNGMCLQGPAGVPGRDGSPGANGIPGTPGIPGRDGFKGEKGECLRESFEESWTPNYKQCSWSSLNYGIDLGKIAECTFTKMRSNSALRVLFSGSLRLKCRNACCQRWYFTFNGAECSGPLPIEAIIYLDQGSPEMNSTINIHRTSSVEGLCEGIGAGLVDVAIWVGTCSDYPKGDASTGWNSVSRIIIEELPK

SEQ ID NO: 796279 - protein, 66 aa, Homo sapiens
GGGPRSGVLQGRQELPDGQAQSGHPEEGGGRSERGASAWALKLAGGGLGAGDETGSGRGAPSGVWL

SEQ ID NO: 796280 - protein, 101 aa, Homo sapiens
SAPPSPRILPWKKPAPTAGLTEDGFKALRKTAFPFARLSFSLLLPCEEVSSAIIEEEEELLPGGGRDGTARDMPPECHQCPRTGPPMGPGYRDNLGGWGGI

SEQ ID NO: 796281 - protein, 159 aa, Homo sapiens
MVITKKVTLMVICANSWAVYHSLCMCQICIYTLGLRAQCLWVRLMCQAYVYVLGLHAQSLYIRPVCQTCVSNLCVQGLCLPRPRGWNVRYTDVLWSKNRPRRISRPAGISKFGAQVQTSTCYITCLYKFILCSEPLLPVKGIIALLMLYSGSWAWLGST

SEQ ID NO: 796282 - protein, 127 aa, Homo sapiens [sequence omitted]

SEQ ID NO: 796283 - protein, 109 aa, Homo sapiens
PEVELNHKLIKGIHQSTIDLKNELKQCIGRLQEPTPSSGDPGEHDPASTHKSTRPVKKVSKEEKKSKKPPPVPALPSKLPTFGAPEQLVDLKQAGLEAAAKATSSHPNS

SEQ ID NO: 796284 - protein, 79 aa, Homo sapiens
SRLLLLHPPFCLRDPGFCFSLIEMVESVKKLAGMDVELTAEERNLLSVTYKNVIGARRASWRIISSLEQKEGTREEKTS

SEQ ID NO: 796285 - protein, 78 aa, Homo sapiens
TVGRPWPNSQPCLLPSPGCLGLQSPLPLPAHRFGGCFGQQYCGELLQTTLAMHPGVPEGPGVSEPGPRELCAFVSGAA

SEQ ID NO: 796286 - protein, 254 aa, Homo sapiens
MPIKPVGWICGQVLKNFSGRIEGIQKAIMDLVDEFKDEFPTILRLSQSNQKREPAQKTSKIRMAIALAKINRATLIRGLNSISRSSKSVAKLLHPQLACRLLELRDISGRLLREVNAPRQPLYNIQVRKGSLFEIISFPAKTALTSIIYASYAALIYLAVCVNAVLKKVKNIFQEEESIRQNREESENCRKAFSEPVLSEPMFAEGEIKAKPYRSLPEKPDISDYPKLLANKQSNNIQVLHSVFDQSAEMNEQI

SEQ ID NO: 796287 - protein, 686 aa, Homo sapiens
MKPPFLLALVVCSVVSTNLKMVSKRNSVDGCIDWSVDLKTYMALAGEPVRVKCALFYSYIRTNYSTAQSTGLRLMWYKNKGDLEEPIIFSEVRMSKEEDSIWFHSAEAQDSGFYTCVLRNSTYCMKVSMSLTVAENESGLCYNSRIRYLEKSEVTKRKEISCPDMDDFKKSDQEPDVVWYKECKPKMWRSIIIQKGNALLIQEVQEEDGGNYTCELKYEGKLVRRTTELKVTALLTDKPPKPLFPMENQPSVIDVQLGKPLNIPCKAFFGFSGESGPMIYWMKGEKFIEELAGHIREGEIRLLKEHLGEKEVELALIFDSVVEADLANYTCHVENRNGRKHASVLLRKKDLIYKIELAGGLGAIFLLLVLLVVIYKCYNIELMLFYRQHFGADETNDDNKEYDAYLSYTKVDQDTLDCDNPEEEQFALEVLPDVLEKHYGYKLFIPERDLIPSGTYMEDLTRYVEQSRRLIIVLTPDYILRRGWSIFELESRLHNMLVSGEIKVILIECTELKGKVNCQEVESLKRSIKLLSLIKWKGSKSSKLNSKFWKHLVYEMPIKKKEMLPRCHVLDSAEQGLFGELQPIPSIAMTSTSATLVSSQADLPEFHPSDSMQIRHCCRGYKHEIPATTLPVPSLGNHHTYCNLPLTLLNGQLPLNNTLKDTQEFHRNSSLLPLSSKELSFTSDIW

SEQ ID NO: 796288 - protein, 170 aa, Homo sapiens
SDTRLHLTESLRHVQGPRKHMKCIRNPLLPPLPRQHCPLLGTAPCWPLCPHTLGLQGFSETLQFRLLGAFLSSAPVLCVGSVSPEDPQLRVTRRRPSPGWSWLCCCTRAAFPTFSRGTCSTARRTSTEHPEGSRPRPQGTPRPLQRGPVSGSLGAVVLRGHIPAEWPCSV

SEQ ID NO: 796289 - protein, 124 aa, Homo sapiens
SDTRLHLTESLRHVQGPRKHMKCIRNPLLPPLPRQHCPLLGTAPCWPLCPHTLGLQGFSETLQFRDGPGCAAAPGPPSPPFPEEPVLRPEEQVPSTPREAGPGLRGHPDPCKGVQCPGAWAQWC

SEQ ID NO: 796290 - protein, 153 aa, Homo sapiens
MSAVFGRPHACQPHAVLLRLFPSHPSGCLTPLTASLSCHLRAASGNRKTGLCPSINPFIHKFSISMSPGELQGCSQEPRSQGWSWLCCCTRAAFPTFSRGTCSTARRTSTEHPEGSRPRPQGTPRPLQRGPVSGSLGAVVLRGHIPAEWPCSV

SEQ ID NO: 796291 - protein, 188 aa, Homo sapiens
MSSLEISSSCFSLETKLPLSPPLVEDSAFEPSRKDMDEVEEKSKDVINFTAEKLSVDEVSQLVISPLCGAISLFVGTTRNNFEGKKVISLEYEAYLPMAENEVRKICSDIRQKWPVKHIAVFHRLGLVPVSEASIIIAVSSAHRAASLEAVSYAIDTLKAKVPIWKKEIYEESSTWKGNKECFWASNS

SEQ ID NO: 796292 - protein, 210 aa, Homo sapiens
MSSLEISSSCFSLETKLPLSPPLVEDSAFEPSRKDMDEVEEKSKDVINFTAEKLSVDEVSQLVISPLCGAISLFVGTTRNNFEGKKVISLEYEAYLPMAENEVRKICSDIRQKWPVKHIAVFHRLGLVPVSEASIIIAVSSAHRAASLEAVSYAIDTLKAKVPIWKKGIIRRVSLGRNTQWFGSNVITLLNTHLTGTFFGPWFPPRVWDP

SEQ ID NO: 796293 - protein, 101 aa, Homo sapiens
INAECPLRPGLGGMVPLCQVEVLYFAKSAEITGVRSETISVPQEIKALQLWKEIETRHPGLADVRNQIIFAVRQEYVELGDQLLVLQPGDEIAVIPPISGG

SEQ ID NO: 796294 - protein, 188 aa, Homo sapiens; identical to SEQ ID NO: 796291

SEQ ID NO: 796295 - protein, 188 aa, Homo sapiens; identical to SEQ ID NO: 796291

SEQ ID NO: 796296 - protein, 193 aa, Homo sapiens
MSSLEISSSCFSLETKLPLSPPLVEDSAFEPSRKDMDEVEEKSKDVINFTAEKLSVDEVSQLVISPLCGAISLFVGTTRNNFEGKKVISLEYEAYLPMAENEVRKICSDIRQKWPVKHIAVFHRLGLVPVSEASIIIAVSSAHRAASLEAVSYAIDTLKAKVPIWKKKYTKSHQLGKETKSAFGHPTVNHLCL

SEQ ID NO: 796297 - protein, 188 aa, Homo sapiens; identical to SEQ ID NO: 796291

SEQ ID NO: 796298 - protein, 128 aa, Homo sapiens
SPRLRLCGGIRSRCPRRDGAAVPGKGGGCACGPGCGALLDVSLPPFPSTYPALVSRTSPLAPNLAGVLGSGAPPPPPPGPSCLRALLRLPQQKSGPLRELLSAHGSKDGLVLKAPPPFMTTSFPDYSF

SEQ ID NO: 796299 - protein, 172 aa, Homo sapiens
MSSLEISSSCFSLETKLPLSPPLVEDSAFEPSRKDMDEVEEKSKDVINFTAEKLSVDEVSQLVISPLCGAISLFVGTTRNNFEGKKVISLEYEAYLPMAENEVRKICSDIRQKWPVKHIAVFHRLGLVPVSEASIIIAVSSAHRAASLEAVSYAIDTLKAKVPIWKKGKLRK

SEQ ID NO: 796300 - protein, 323 aa, Homo sapiens
PGRSADDELLTAGCQELVTFEDVAVYFSLEEWERLEADQRGLYQEVMQENYGILVSLGYPIPKPDLIFRLEQGEEPWVPDSPRPEEGDIVTGVYTGAWFWTDDIEDHEEEDDEDFLAEVAEEENEPPGLWSAAYGVGDVPGTWGPDDSDSAQTPEGWGPDPGGLGVLADGSEAKPFLPGREPGANLLSPWAFPAAVAPPAGRPETTCDVCGKVFPHRSRLAKHQRYHAAVKPFGCEECGKGFVYRSHLAIHQRTHTGEKPFPCPDCGKRFVYKSHLVTHRRIHTGERPYRCAFCGAGFGRRSYLVTHQRTHTGERPYPCPHCG

SEQ ID NO: 796301 - protein, 414 aa, Homo sapiens
IVVEEEEEGVAEVVQDAQVEAVAEVEVEADVEEEDVKEVLAEEECPALGTQERLSRGGDAKSPVLQEKGLQASRAPATPRDEDLEEEEEEEEDEDEDDLLTAGCQELVTFEDVAVYFSLEEWERLEADQRGLYQEVMQENYGILVSLGYPIPKPDLIFRLEQGEEPWVPDSPRPEEGDIVTGVYTGAWFWTDDIEDHEEEDDEDFLAEVAEEENEPPGLWSAAYGVGDVPGTWGPDDSDSAQTPEGWGPDPGGLGVLADGSEAKPFLPGREPGANLLSPWAFPAAVAPPAGRPETTCDVCGKVFPHRSRLAKHQRYHAAVKPFGCEECGKGFVYRSHLAIHQRTHTGEKPFPCPDCGKRFVYKSHLVTHRRIHTGERPYRCAFCGAGFGRRSYLVTHQRTHTGERPYPCPHCGR

SEQ ID NO: 796302 - protein, 114 aa, Homo sapiens
CSVVSMYRGKLTAGRGFAEEVAFGRTRMRWGFAVLPRLVTNSCAQAICLPRPPKCWDCRHEPPRPARKPLLYRPPLKCTWQLHVRKNFPAAPLNLRIFWQNEEYKRVSSSYALF

SEQ ID NO: 796303 - protein, 72 aa, Homo sapiens
TLKNWWLQQYSHDSADPGILVLLACGTISSTCGQIASYPLALVRTRMQAQGEAWAGGWGRGSLIAWAPASPK

SEQ ID NO: 796304 - protein, 53 aa, Homo sapiens
MIFTLRVSDSTGLGWGRRICTTSAQVSPVVLVGHSVCAETTGLDHHSHWKSES

SEQ ID NO: 796305 - protein, 62 aa, Homo sapiens
KAGMELLTLLYTLLFWGPLLSTLQVVLGNGQHWEVTGCRRAGLGYSLLATLSLYNHSAHSVP

SEQ ID NO: 796306 - protein, 485 aa, Homo sapiens
VPERRTLRNRRSLAALAPLTPDMLLLLLPLLWGRERAEGQTSKLLTMQSSVTVQEGLCVHVPCSFSYPSHGWIYPGPVVHGYWFREGANTDQDAPVATNNPARAVWEETRDRFHLLGDPHTKNCTLSIRDARRSDAGRYFFRMEKGSIKWNYKHHRLSVNVTALTHRPNILIPGTLESGCPQNLTCSVPWACEQGTPPMISWIGTSVSPLDPSTTRSSVLTLIPQPQDHGTSLTCQVTFPGASVTTNKTVHLNVSYPPQNLTMTVFQGDGTVSTVLGNGSSLSLPEGQSLRLVCAVDAVDSNPPARLSLSWRGLTLCPSQPSNPGVLELPWVHLRDAAEFTCRAQNPLGSQQVYLNVSLQSKATSGVTQGVVGGAGATALVFLSFCVIFVVVRSCRKKSARPAAGVGDTGIEDANAVRGSASQGPLTEPWAEDSPPDQPPPASARSSVGEGELQYASLSFQMVKPWDSRGQEATDTEYSEIKIHR

SEQ ID NO: 796307 - protein, 487 aa, Homo sapiens
VPERRTLRNRRSLAALAPLTPDMLLLLLPLLWGRERAEGQTSKLLTMQSSVTVQEGLCVHVPCSFSYPSHGWIYPGPVVHGYWFREGANTDQDAPVATNNPARAVWEETRDRFHLLGDPHTKNCTLSIRDARRSDAGRYFFRMEKGSIKWNYKHHRLSVNVTALTHRPNILIPGTLESGCPQNLTCSVPWACEQGTPPMISWIGTSVSPLDPSTTRSSVLTLIPQPQDHGTSLTCQVTFPGASVTTNKTVHLNVSYPPQNLTMTVFQGDGTVSTVLGNGSSLSLPEGQSLRLVCAVDAVDSNPPARLSLSWRGLTLCPSQPSNPGVLELPWVHLRDAAEFTCRAQNPLGSQQVYLNVSLQSKATSGVTQGVVGGAGATALVFLSFCVIFVVVRSCRKKSARPAAGVGDTGIEDANAVRGSASQILNHFIGFPTFLGLGFEFLLNLRDLCCHPDSEFYVYHFSHFRLIKNIAGEIVWSLEGKILWLLD

SEQ ID NO: 796308 - protein, 485 aa, Homo sapiens; identical to SEQ ID NO: 796306

SEQ ID NO: 796309 - protein, 476 aa, Homo sapiens
VPERRTLRNRRSLAALAPLTPDMLLLLLPLLWGRERAEGQTSKLLTMQSSVTVQEGLCVHVPCSFSYPSHGWIYPGPVVHGYWFREGANTDQDAPVATNNPARAVWEETRDRFHLLGDPHTKNCTLSIRDARRSDAGRYFFRMEKGSIKWNYKHHRLSVNVTALTHRPNILIPGTLESGCPQNLTCSVPWACEQGTPPMISWIGTSVSPLDPSTTRSSVLTLIPQPQDHGTSLTCQVTFPGASVTTNKTVHLNVSYPPQNLTMTVFQGDGTVSTVLGNGSSLSLPEGQSLRLVCAVDAVDSNPPARLSLSWRGLTLCPSQPSNPGVLELPWVHLRDAAEFTCRAQNPLGSQQVYLNVSLQSKATSGVTQGVVGGAGATALVFLSFCVIFVVVRSCRKKSARPAAGVGDTGIEDANAVRGSASQKTSSSSSSAFEQLFPHPSIPFRAEASKYYLSGTDRNYFRLHGPHSLIAAPQIC

SEQ ID NO: 796310 - protein, 76 aa, Homo sapiens
STSGLPGGKGRLLIVYKAKLKQNTSEQFETVAVKIFPYEEYASWKTEKDIFSDINLKHENILQFLTAEERKTVLGM

SEQ ID NO: 796311 - protein, 486 aa, Homo sapiens
MSAANPETPNSTISREASTQSSSAAASQGWVLPEGKIVPNTVFVGGIDARMDETEIGSCFGRYGSVKEVKIITNRTGVSKGYGFVSFVNDVDVQKIVGSQIHFHGKKLKLGPAIRKQKLCARHVQPRPLVVNPPPPPQFQNVWRNPNTETYLQPQITPNPVTQHVQAYSAYPHSPGQVITGCQLLVYNYQEYPTYPDSAFQVTTGYQLPVYNYQPFPAYPRSPFQVTAGYQLPVYNYQAFPAYPNSPFQVATGYQFPVYNYQPFPAYPSSPFQVTAGYQLPVYNYQAFPAYPNSPFQVATGYQFPVYNYQAFPAYPNSPVQVTTGYQLPVYNYQAFPAYPNSPFQVATGYQFPVYNYQAFPAYPNSPVQVTTGYQLPVYNYQAFPAYPNSPFQVATGYQFPVYNYQAFPAYPNSPVQVTTGYQLPVYNYQAFPAYPNSAVQVTTGYQFHVYNYQMPPQCPVGEQRRNLWTEAYKWWYLVCLIQRRD

SEQ ID NO: 796312 - protein, 329 aa, Homo sapiens
MVTKAFVLLAIFAEASAKSCAPNKADVILVFCYPKTIITKIPECPYGWEVHQLALGGLCYNGVHEGGYYQFVIPDLSPKNKSYCGTQSEYKPPIYHFYSHIVSNDTTVIVKNQPVNYSFSCTYHSTYLVNQAAFDQRVATVHVKNGSMGTFESQLSLNFYTNAKFSIKKEAPFVLEASEIGSDLFAGVEAKGLSIRFKVVLNSCWATPSADFMYPLQWQLINKGCPTDETVLVHENGRDHRATFQFNAFRFQNIPKLSKVWLHCETFICDSEKLSCPVTCDKRKRLLRDQTGGVLVVELSLRSRGFSSLYSFSDVLHHLIMMLGICAVL

SEQ ID NO: 796313 - protein, 272 aa, Homo sapiens
MVRCLGPALLLLLLLGSASSVGGNRCVDAAEACTADARCQRLRSEYVAQCLGRAAQGGCPRARCRRALRRFFARGPPALTHALLFCPCAGPACAERRRQTFVPSCAFSGPGPAPPSCLEPLNFCERSRVCRPRLLAFQVSCTPAPSAPDGCLLDQGARCLRAYAGLVGSPGTAVTPNYVDNVSARVAPWCDCGASGNRREDCEAFRGLFTRNRCLDGAIQAFASGWPPVLLDQLNPQGDPEHSLLQVSSTGRALERRSLLSILPVLALPALL

SEQ ID NO: 796314 - protein, 299 aa, Homo sapiens
MVRCLGPALLLLLLLGSASSVGGNRCVDAAEACTADARCQRLRSEYVAQCLGRAAQGGCPRARCRRALRRFFARGPPALTHALLFCPCAGPACAERRRQTFVPSCAFSGPGPAPPSCLEPLNFCERSRVCRCARAAAGPWRGWGRGLSPAHRPPAAQASPPGLSGLVHPSAQRPRRLPAGPGRPLPARLRGPRGVPAGTAVTPNYVDNVSARVAPWCDCGASGNRREDCEAFRGLFTRNRCLDGAIQAFASGWPPVLLDQLNPQGDPEHSLLQVSSTGRALERRSLLSILPVLALPALL

SEQ ID NO: 796315 - protein, 104 aa, Homo sapiens [sequence omitted]

SEQ ID NO: 796316 - protein, 57 aa, Homo sapiens
KEKAPCQQCQSAPGDVAQSKGGNVVFTDTHVQVLVNDSKTATQFTFLLQRVSHMRPW

SEQ ID NO: 796317 - protein, 73 aa, Homo sapiens
YGVHPFSYVLLIPACFSVPFNHQKGDLEQQGHEQGGEEGLHLHLPTGFQQELMDGPGGLGGRRRVKHYRIFDS

SEQ ID NO: 796318 - protein, 111 aa, Homo sapiens
GKDTGYVCGGRTLGMCVGGGHWVCVWGEDTGYGCVGRTLGMRVWGGHWVCVCGEDTGYVCVGRTLGMCVCGGHWVWVCGEALGMCVWGGAVYVCVGRTLGVCGEALGMCVW

SEQ ID NO: 796319 - protein, 179 aa, Homo sapiens
HEADCHVGSFAIKSLRKLTDDELFQYLLQLVQVLKYESYLDCELTKFLLDRALANRKIGHFLFWHLRSEMHVPSVALRFGLILEAYCRGSTHHMKVLMKQGEALSKLKALNDFVKLSSQKTPKPQTKELMHLCMRQEAYLEALSHLQSPLDPSTLLAEVCVEQCTFMDSKMKPLWIMYS

SEQ ID NO: 796320 - protein, 178 aa, Homo sapiens
MKCNHFLPELDPDVLNGGRVQLVVRLVSREDTDLDLFSMTNGSAWSVNQRQHKHQAHRHSAGSSSGSVNGNTNIAIITIQDLLKKNVISFRDNPVQLSGGCGEVRKTEGEHFPLILRVQLQTCGNWSWTLVLRQVPWSRLNPNNWDITDSKLVPRGNLLLLKEGIPGLGGPKYIEAPL

SEQ ID NO: 796321 - protein, 69 aa, Homo sapiens
GGSVSSWAGLLGKHSSLGCGGGSRPAVWQLQAPGDLKEKLNRSPFPCLALRALVPFQTFRLSCLRGTEA

SEQ ID NO: 796322 - protein, 97 aa, Homo sapiens
KLSFLPFSHPGGLSDNKKNPGKGSKGKAASKRLRETVTLSSKCHQDTEPERRDVMCMSLAPGPGLARSGGSRNSCSPRVVAHTWNPSTLGGQDGRIT

SEQ ID NO: 796323 - protein, 335 aa, Homo sapiens
MALKWTSVLLLIHLGCYFSSGSCGKVLVWTGEYSHWMNMKTILKELVQRGHEVTVLASSASILFDPNDAFTLKLEVYPTSLTKTEFENIIMQQVKRWSDIQKDSFWLYFSQEQEILWEFHDIFRNFCKDVVSNKKVMKKLQESRFDIIFADAFFPCGELLAALLNIPFVYSLCFTPGYTIERHSGGLIFPPSYIPVVMSKLSDQMTFMERVKNMIYVLYFDFWFQMCDMKKWDQFYSEVLGRPTTLFETMGKADIWLMRNSWNFQFPHPFLPNVDFVGGLHCKPAKPLPKEMEEFVQSSGENGVVVFSLGSIISNMTAERANVIATALAKIPQKI

SEQ ID NO: 796324 - protein, 335 aa, Homo sapiens; identical to SEQ ID NO: 796323

SEQ ID NO: 796325 - protein, 103 aa, Homo sapiens [sequence omitted]

SEQ ID NO: 796326 - protein, 117 aa, Homo sapiens
PTGGRAHTVQWAEVAPRAGTWHLFPPVSGSGGTRTCRGKEAATAGQKLEAAATQQMTQLSRKTQSQGCEELGPASRGLPSFPCPALGRPHGGSPVSPARPCPALPCPALPCPALPSP

SEQ ID NO: 796327 - protein, 158 aa, Homo sapiens
VHRSTASQARRIFLSTEPNGVFYVYFFLHRHSNNLISVSFSHISPFSIQQNRHCHHGPFSMSCWVHLPDGVAAGQRRSSHPRRACPVSFKFFVEIGSHYVAQAGLKLLASSNPPSLASQSTGIIGMHHCIWPQTFCFLTVHFSRQVFTPAWVTEQDPV

SEQ ID NO: 796328 - protein, 207 aa, Homo sapiens
ATAPTSRSWCSGLGWQPVCLIALVGRSGQGAEWPLQKGCACEWFVPSTNLLFADILWAVGAGQELHVGFLLTVHAGLHGPYCQPQLWKWGLMNGVSHPRSVALVDGPGWRPTSPSRTPHSGPPVALEAQVSDLPSPICKALDTGVPGRCTEWPGHAHHSPRITQTGHRDLSTLCGDQWRKQLSFRLWASESKRGLGTRCSADTQQTA

SEQ ID NO: 796329 - protein, 31 aa, Homo sapiens
MKPAPVSCAIAPGHCSCGARLPALAFSSVTA

SEQ ID NO: 796330 - protein, 649 aa, Homo sapiens
SWESVCSFLVSGRQLQPGEPGAETEDDHSVTEGPADEGIRPRPQGSSPVYEYTTEAADFGLQEDAPGRQGSAGRRRSWWKRDSGDSRTFFRMSRPEAVQEATEVTLKTEVEAGASGYSVTGGGDQGIFVKQVLKDSSAAKLFNLREGDQLLSTTVFFENIKYEDALKILQYSEPYKVQFKIRRQLPAPQDEEWASSDAQHGPQGKEKEDTDVADGCRETPTKTLEGDGDQERLISKPRVGRGRQSQRERLSWPKFQSIKSKRGPGPQRSHSSSEAYEPRDAHDVSPTSTDTEAQLTVERQEQKAGPGSQRRRKFLNLRFRTGSGQGPSSTGQPGRGFQSGVGRAGVLEELGPWGDSLEETGAATGSRREERAEQDREVMPAQSMPLPTELGDPRLCEGTPQEGGLRAARLHGKTLEGQAQETAVAQRKPRAQPTPGMSREGEGEGLQSLEIGIARLSLRDTTEGGTQIGPPEIRVRVHDLKTPKFAFSTEKEPERERRLSTPQRGKRQDASSKAGTGLKGEEVEGAGWMPGREPTTHAEAQGDEGDGEEGLQRTRITEEQDKGREDTEGQIRMPKFKIPSLGWSPSKHTKTGREKATEDTEQGREGEATATADRREQRRTEEGLKDKEDSDSMTNTTKIQLIHDEKRLK

SEQ ID NO: 796331 - protein, 144 aa, Homo sapiens
SFKMPKVDLKGPQIDVKGPKLDLKGPKAEVTAPDGEVSLPSMEVDVQAQKAKLDGAWLEEDTEGQIRMPKFKIPSLGWSPSKHTKTGREKATEDTEQGREGEATATADRREQRRTEEGLKDKEDSDSMTNTTKIQLIHDEKRLK

SEQ ID NO: 796332 - protein, 104 aa, Homo sapiens
PARPPRAPEPGPATGRDGPPGPHRLAAAMCDCFHMVLPTWPGTPGSVSGRQLQPGEPGAETEDDHSVTEGPADEGIRPRPQGSSPVYEYTTEAADFGLQVSLLG

SEQ ID NO: 796333 - protein, 320 aa, Homo sapiens
LRGHIAWPFVWHVENTSYWLQPSLQPSSVISIMKPVRKRKTATITTRTSSQVTFPNEPARCWLLGTLWDRFEVQGLQPNGEEMTLKQFLDYFKTEHKEPALCVALRVARRVAHGVAHSVAHRGALGVSLRDTTEGGTQIGPPEIRVRVHDLKTPKFAFSTEKEPERERRLSTPQRGKRQDASSKAGTGLKGEEVEGAGWMPGREPTTHAEAQGDEGDGEEGLQRTRITEEQDKGREDTEGQIRMPKFKIPSLGWSPSKHTKTGREKATEDTEQGREGEATATADRREQRRTEEGLKDKEDSDSMTNTTKIQLIHDEKRLK

SEQ ID NO: 796334 - protein, 81 aa, Homo sapiens
IKKKRFNGLAIMAGDKGKAKGRLTRRQARERVQGAPLYKTVRSQEMYSLSGEQNRKACPMIQLPPAGSLPRHGNYRSYNSR

SEQ ID NO: 796335 - protein, 137 aa, Homo sapiens
GRSSVATIGETRKKWGPTRLHNGNLSWPLNRGLSCLHPTPLFPGAQPGAALEGERAGVTWLVLLQESPLPPLPQLPAWPPPGRPYSSAPAPAFPMRFVPGMKKASRVPMSGPRPEAPQSPRVLFWWPFRGSRKPCLG

SEQ ID NO: 796336 - protein, 70 aa, Homo sapiens
RAWGWPGHMLRVLSCRTATVWKTLCPFWGEEYQVHLPPTFHAVAFYVMDEDALSRDDVIGKVCLTRDTIA

SEQ ID NO: 796337 - protein, 206 aa, Homo sapiens
VWCFVELPPSPLPLPPQPPLQPEHPGAATAAAAAAATATSAASTASTSPPRTPRHPGRERQCCLLAPPLPQPFPSVTYPLLAALARTFSNTPASLHHLLGQPRRALGLAVRAERKASSKPLPGRRAVAAAPPAGGGGEETISRYPILRVLCRCRFCCRRSESAGSNTAAVGTVGPAGAGRRTPAEPCTLVPRSPASTCPLVPSPAL

SEQ ID NO: 796338 - protein, 206 aa, Homo sapiens; identical to SEQ ID NO: 796337

SEQ ID NO: 796339 - protein, 117 aa, Homo sapiens
MATPDVSVHMEEVVVVTTPSTVLGKGSLQAPPASSPASPLLGGYTVLASSGSTYPSTVEIHPDASSLTVLSTAAVEDGSTVFKVVSPLQLLTLPGLGTTLQNVAQARLLQHNCDSAR

SEQ ID NO: 796340 - protein, 609 aa, Homo sapiens
HVLSERRLLRLRPVCTMLRTSVLRLLGRTGASRLSLLEDFGPRYYSSGSLSAGDDACDVRAYFTTPIFYVNAAPHIGHLYSALLADALCRHRRLRGPSTAATRFSTGTDEHGLKIQQAAATAGLAPTELCDRVSEQFQQLFQEAGISCTDFIRTTEARHRVAVQHFWGVLKSRGLLYKGVYEGWYCASDECFLPEAKVTQQPGPSGDSFPVSLESGHPVSWTKEENYIFRLSQFRKPLQRWLRGNPQAITPEPFHHVVLQWLDEELPDLSVSRRSSHLHWGIPVPGDDSQTIYVWLDALVNYLTVIGYPNAEFKSWWPATSHIIGKDILKFHAIYWPAFLLGAGMSPPQRICVHSHWTVCGQKMSKSLGNVVDPRTCLNRYTVDGFRYFLLRQGVPNWDCDYYDEKVVKLLNSELADALGGLLNRCTAKRINPSETYPAFCTTCFPSEPGLVGPSVRAQAEDYALVSAVATLPKQVADHYDNFRIYKALEAVSSCVRQTNGFVQRHAPWKLNWESPVDAPWLGTVLHVALECLRVFGTLLQPVTPSLADKLLSRLGVSASERSLGELYFLPRFYGHPCPFEGRRLGPETGLLFPRLDQSRTWLVKAHRT

SEQ ID NO: 796341 - protein, 600 aa, Homo sapiens
YRRPTPRHASATRRRLLGRTGASRLSLLEDFGPRYYSSGSLSAGDDACDVRAYFTTPIFYVNAAPHIGHLYSALLADALCRHRRLRGPSTAATRFSTGTDEHGLKIQQAAATAGLAPTELCDRVSEQFQQLFQEAGISCTDFIRTTEARHRVAVQHFWGVLKSRGLLYKGVYEGWYCASDECFLPEAKVTQQPGPSGDSFPVSLESGHPVSWTKEENYIFRLSQFRKPLQRWLRGNPQAITPEPFHHVVLQWLDEELPDLSVSRRSSHLHWGIPVPGDDSQTIYVWLDALVNYLTVIGYPNAEFKSWWPATSHIIGKDILKFHAIYWPAFLLGAGMSPPQRICVHSHWTVCGQKMSKSLGNVVDPRTCLNRYTVDGFRYFLLRQGVPNWDCDYYDEKVVKLLNSELADALGGLLNRCTAKRINPSETYPAFCTTCFPSEPGLVGPSVRAQAEDYALVSAVATLPKQVADHYDNFRIYKALEAVSSCVRQTNGFVQRHAPWKLNWESPVDAPWLGTVLHVALECLRVFGTLLQPVTPSLADKLLSRLGVSASERSLGELYFLPRFYGHPCPFEGRRLGPETGLLFPRLDQSRTWLVKAHRT

SEQ ID NO: 796342 - protein, 591 aa, Homo sapiens
HVLSERRLLRLRPVCTMLRTSVLRLLGRTGASRLSLLEDFGPRYYSSGSLSAGDDACDVRAYFTTPIFYVNAAPHIGHLYSALLADALCRHRRLRGPSTAATRFSTGTDEHGLKIQQAAATAGLAPTELCDRVSEQFQQLFQEAGISCTDFIRTTEARHRVAVQHFWGVLKSRGLLYKGVYEGWYCASDECFLPEAKVTQQPGPSGDSFPVSLESGHPVSWTKEENYIFRLSQFRKPLQRWLRGNPQAITPEPFHHVVLQWLDEELPDLSVSRRSSHLHWGIPVPGDDSQTIYVWLDALVNYLTVIGYPNAEFKSWWPATSHIIGKDILKFHAIYWPAFLLGAGMSPPQRICVHSHWTVCGQKMSKSLGNVVDPRTCLNRYTVDGFRYFLLRQGVPNWDCDYYDEKVVKLLNSELADALGGLLNRCTANEPGLVGPSVRAQAEDYALVSAVATLPKQVADHYDNFRIYKALEAVSSCVRQTNGFVQRHAPWKLNWESPVDAPWLGTVLHVALECLRVFGTLLQPVTPSLADKLLSRLGVSASERSLGELYFLPRFYGHPCPFEGRRLGPETGLLFPRLDQSRTWLVKAHRT

SEQ ID NO: 796343 - protein, 73 aa, Homo sapiens
VERQDSQVDKSPCRGSNSCGDPGREVSPHVDSEKGNGINMGDLGGRGQRERGGPDPGTLQHPTYLGFTSREMT

SEQ ID NO: 796344 - protein, 290 aa, Homo sapiens
GTRIRCKSSFFKGGCVDLHRISKDSLESDSESLTQEIMCHSEFDDRIRGNGMEPDSLDEEESPRWGSLHEMEEEASGKAAQMAREQNHHTWDQGANNRQQPIEDKYSDLRYDPNWKSKKEEGQLLSVEALPESTDSSLENLPLAPLYPSQETSMELSGGKGEQKESPQSAASLLGSEFLSPNYEHGARRSKPFSELSDSDLEEKSSSLSPYVKSSSSHNEVFLPGSRGPRRRKSKQHFVEKNKLTLGLPTPKTDSYLQLHNKKRGESHPEQVILRVNSLPRDGFKTFWSQ

SEQ ID NO: 796345 - protein, 316 aa, Homo sapiens
MSKRKLIPKLSIQSPVLHTNLNVQSTHPPLKKEDLHRISKDSLESDSESLTQEIMCHSEFDDRIRGNGMEPDSLDEEESPRWGSLHEMEEEASGKAAQMAREQNHHTWDQGANNRQQPIEDKYSDLRYDPNWKSKKEEGQLLSVEALPESTDSSLENLPLAPLYPSQETSMELSGGKGEQKESPQSAASLLGSEFLSPNYEHGARRSKPFSELSDSDLEEKSSSLSPYVKSSSSHNEVFLPGSRGPRRRKSKQHFVEKNKLTLGLPTPKTDSYLQLHNKKRGESHPEQVRSGYFKMSSETLNQNLRLFAVSRYRFL

SEQ ID NO: 796346 - protein, 110 aa, Homo sapiens
AGGIPGVGTVKRPSFDFKCHPEGQLLTFRAGAGGQRRVGPYDPDLKRGFLDLPQKGIQDQLKLIRAKIANQMTSGRPQASLSSHFHAKKTQLPRTMGNIGHFIRRVQVHF

SEQ ID NO: 796347 - protein, 85 aa, Homo sapiens
QGEYQGWALSRDPALTSNATQRDNCSLSEQEQEARGECESNICTVRSPGEAKMRSRLERLCQRVPMIQTSREGSWTSHRKGFKTS

SEQ ID NO: 796348 - protein, 80 aa, Homo sapiens
QGEYQGWALSRDPALTSNATQRDNCSLSEQEQEARGECESNICTVRSPGEAKMRSRLERLCQSNCSSGCGGGSPKKTYLD

SEQ ID NO: 796349 - protein, 56 aa, Homo sapiens
MRLHATLCTRILVSVPLVEPQVMRNVGLIKRRGRTLPPAALELERLVREMPFARHI

SEQ ID NO: 796350 - protein, 107 aa, Homo sapiens
NGSGGEALYSVGSLPVSNREQQWKRETERKETDIIECIEASACSLLVLSHLILTTACSTENCPLPQKNVLVLLPRICYIMLQKVFCRFGYVEDVEMGRVSWILCLKK

SEQ ID NO: 796351 - protein, 176 aa, Homo sapiens
DSYLPSHRENEHGIVLTRDVAIKLVSLYFTKDEALPWAMRRNQHMPLESRHLFKFVNWSILLPEKYRKDYVYTEPILGGLSYSLPGLTDSRALPLLANDSQLQNLPLTYILTCQHDLIRDDGLMYVTRLRNVGVQVVHEHIEDGIHGALSFMTSPFYLRLGLRIRDMYVSWLDKNL

SEQ ID NO: 796352 - protein, 72 aa, Homo sapiens
PIESVQVGVSVQPQCPVVHGVATPDTPVLAAQLTGPAGMRVALERASRSMVHAPLITGGCRQHLSTQADIAA

SEQ ID NO: 796353 - protein, 98 aa, Homo sapiens
PKPKSFNYPLLSSPGDQFEIQLTQQLWSLIPNEDVRRFMSHVIWTLKMECSETHVQGTCAKLMSRTGLLMKLLSEQQEAKASKAEWSVDQWKTDETPS

SEQ ID NO: 796354 - protein, 73 aa, Homo sapiens
RNSGRQTLPPQLIKSSQSCGGLERGGVSGVLSFDDDSDAVPQFGKNNIYEEKMHGHRKKLENLFTNKHGIFSH

SEQ ID NO: 796355 - protein, 73 aa, Homo sapiens
ETRQVRLLPQKQWRVSASKDDTEFFLPRSPPTDDQRRWRTSSYRGQKHSQTSSPTQDSEHNGLKNGPQQSGQS

SEQ ID NO: 796356 - protein, 331 aa, Homo sapiens
MNGQSQVLPGGGHESREGINMAAAPRTVLISGCSSGIGLELAVQLAHDPKKRYQVVATMRDLGKKETLEAAAGEALGQTLTVAQLDVCSDESVAQCLSCIQGEVDVLVNNAGMGLVGPLEGLSLAAMQNVFDTNFFGAVRLVKAVLPGMKRRRQGHIVVISSVMGLQGVIFNDVYAASKFALEGFFESLAIQLLQFNIFISLVEPGPVVTEFEGKLLAQVSMAEFPGTDPETLHYFRDLYLPASRKLFCSVGQNPQDVVQAIVNVISSTRPPLRRQTNIRYSPLTTLKTVDSSGSLYVRTTHRLLFRCPRLLNLGLQCLSCGCLPTRVRPR

SEQ ID NO: 796357 - protein, 258 aa, Homo sapiens
MNGQSQVLPGGGHESREGINMAAAPRTVLISGCSSGIGLELAVQLAHDPKKRYQVVATMRDLGKKETLEAAAGEALGQTLTVAQLDVCSDESVAQCLSCIQGEVDVLVNNAGMGLVGPLEGLSLAAMQNVFDTNFFGAVRLVKAVLPGMKRRRQGHIVVISSVMGLQGVIFNDVYAASKFALEGFFESLAIQLLQFNILFLWLSSQALTLRPCTTSGTSISQPPGSCFAPWDRTHRTWFRPGPGFGEWAPWAGTHRNR

SEQ ID NO: 796358 - protein, 205 aa, Homo sapiens
GRSHFRLVTWERRWPLGLGLVLLLCAPLPPGARAKEVTLMDTSKAQGELGWLLDPPKDGWSEQQQILNGTPLYMYQDCPMQGRRDTDHWLRSNWIYRGEEASRVHVELQFTVRDCKSFPGGAGPLGCKETFNLLYMESDQDVGIQLRRPLFQKVLLPSMPSGSWCRSLVAPYWVPEKVAETGRGCRGRILKRIWRLKAGHGGLCL

SEQ ID NO: 796359 - protein, 255 aa, Homo sapiens
WRCHPGHCPRSRPGAMERRWPLGLGLVLLLCAPLPPGARAKEVTLMDTSKAQGELGWLLDPPKDGWSEQQQILNGTPLYMYQDCPMQGRRDTDHWLRSNWIYRGEEASRVHVELQFTVRDCKSFPGGAGPLGCKETFNLLYMESDQDVGIQLRRPLFQKVTTVAADQSFTIRDLVSGSVKLNVERCSLGRLTRRGLYLAFHNPGACVALVSVRVFYQRCPETLNGLAQFPDTLPGPAGLVEVAGTCLPHARASPR

SEQ ID NO: 796360 - protein, 554 aa, Homo sapiens
ETLLQRIPSPPPGMALSSRARAFSVEALVGRPSKRKLQDPIQAEQPELREKKGGEEEEERRSSAAGKSEPLEKQPKTEPSTSASSGCGSDSGYGNSSESLEEKDIQMELQGSELWKRFHDIGTEMIITKAGRFGSAQAVHKGHTHEALNLPLWRMFPSVRVKVKGLDPGKQYHVAIDVVPVDSKRYRYVYHSSQWMVAGNTDHLCIIPRFYVHPDSPCSGETWMRQIISFDRMKLTNNEMDDKGHIILQSMHKYKPRVHVIEQGSSVDLSQIQSLPTEGVKTFSFKETEFTTVTAYQNQQITKLKIERNPFAKGFRDTGRNRGVLDGLLETYPWRPSFTLDFKTFGADTQSGSSGSSPVTSSGGAPSPLNSLLSPLCFSPMFHLPTSSLGMPCPEAYLPNVNLPLCYKICPTNFWQQQPLVLPAPERLASSNSSQSLAPLMMEVPMLSSLGVTNSKSGSSEDSSDQYLQAPNSTNQMLYGLQSPGNIFLPNSITPEALSCSFHPSYDFYRYNFSMPSRLISGSNHLKVNDDSQVSFGEGKCNHVHWYPAINHYL

SEQ ID NO: 796361 - protein, 533 aa, Homo sapiens
ETLLQRIPSPPPGMALSSRARAFSVEALVGRPSKRKLQDPIQAEQPELREKKGGEEEEERRSSAAGKSEPLEKQPKTEPSTSASSGCGSDSGYGNSSESLEEKDIQMELQGSELWKRFHDIGTEMIITKAGRRMFPSVRVKVKGLDPGKQYHVAIDVVPVDSKRYRYVYHSSQWMVAGNTDHLCIIPRFYVHPDSPCSGETWMRQIISFDRMKLTNNEMDDKGHIILQSMHKYKPRVHVIEQGSSVDLSQIQSLPTEGVKTFSFKETEFTTVTAYQNQQITKLKIERNPFAKGFRDTGRNRGVLDGLLETYPWRPSFTLDFKTFGADTQSGSSGSSPVTSSGGAPSPLNSLLSPLCFSPMFHLPTSSLGMPCPEAYLPNVNLPLCYKICPTNFWQQQPLVLPAPERLASSNSSQSLAPLMMEVPMLSSLGVTNSKSGSSEDSSDQYLQAPNSTNQMLYGLQSPGNIFLPNSITPEALSCSFHPSYDFYRYNFSMPSRLISGSNHLKVNDDSQVSFGEGKCNHVHWYPAINHYL

SEQ ID NO: 796362 - protein, 119 aa, Homo sapiens
MVHHLSEGLGCLMVEAAAMIITIHEIDTAEVRKVAQGAMAIFILVVMRTLAEKTKGIHLLWIGCTLLLLKHMVVQVMCHLQEMVGKVNLKKATKADFKPERCCFRETRQQHHSATTSRG

SEQ ID NO: 796363 - protein, 115 aa, Homo sapiens
CKKVHKAEVPSCTPTHSYESMIYLVKREKRNVSVLIVPSSRQVTHLHFDPSIIYFINLKDGMHAAYFYQNFKNGAWVVETSTFCSLWSNCNLLRGTNILSNPSIILITIALVLIF

SEQ ID NO: 796364 - protein, 158 aa, Homo sapiens
KQTKEGPYETHPQSNQPIQEKKTHTSQGSVGFPGWGALTPCSSPAQAPSTPPRPAERCPVYLSRASLSKALSLSLYNSLTLSLSLLPPPLRSLLWGSLFPPLSRLPLLCLSLYRCLSVPLVLFLHPSLPCSPSVAGGAADKTPQTPSCRREGFIQLGA

SEQ ID NO: 796365 - protein, 137 aa, Homo sapiens
LQPGWLSSHLGKLLFPKPSILAGSATEVTAGSGSPGWPAHQPTVPVQQCLSSDSSTASLAGSRPCSPARRLQATVSPPSISLGRHQGEQSAGAPRSPPDLSGAPFILPDVARPRSGPAPAPPAGLPLALCRRPGLSE

SEQ ID NO: 796366 - protein, 215 aa, Homo sapiens
GTIHNVCQEKGCHGGACTRIVCVSIESADFISFLKGCDRKSVRITGIDSIKQPAVIRRNQFSFLKGRKLVLNALAEQKLKEGHETPMDIDSDDSKAASPPLKGSVSSEASELDKKEKGICVICMDTISNKKVLPKCKHEFCAPCINKAMSYKPICPTCQTSYGIQKGNQPEGSMVFTVSRDSLPGYESFGTIVITYSMKAGIQTEEHPNPGKRYP

SEQ ID NO: 796367 - protein, 267 aa, Homo sapiens
TELLQEISEIEKRYDICSKVSEKGQKTCILFESKDRQVDLSVHAYASFIDAFQHASCQLMREVLLLKSLGKERKHLHQTKFADDFRKRHPNVHFVLNQESMTLTGLPNHLAKAKQYVLKGGGMSSLAGKKLKEGHETPMDIDSDDSKAASPPLKGSVSSEASELDKKEKGICVICMDTISNKKVLPKCKHEFCAPCINKAMSYKPICPTCQTSYGIQKGNQPEGSMVFTVSRDSLPGYESFGTIVITYSMKAGIQTEEHPNPGKRYP

SEQ ID NO: 796368 - protein, 75 aa, Homo sapiens
HCVATRRFEHYARSIQRGAQFSNSHCGAWALEMPFSLYHQHPPFLGYTVSLPFSSCSQRQALSEVRRKGDFGLQF

SEQ ID NO: 796369 - protein, 133 aa, Homo sapiens
TWDYSSPFPRPAWVCCLLCCQNSLCLNFHPAHFPGRPNCSPFSHIKTDLADNWPAAWLTNCCCSVHLGCKFSELHFTRSLSSCPHFTILGKVSMMFHWCCPLLPGSSEAGGPSPLLTSPQASCLTSLTGFHLQ

SEQ ID NO: 796370 - protein, 145 aa, Homo sapiens
NTHNRHKHKHTHKDTHRHKHTYTCTDTTHTYTNTYIHTDTHMHADTRHNTHRHTHMLLPAEQKACLLWGRGYQCITTSTLDGPPGLWHWPWHLREEWRSIPTQVFESPCWGEQGCWVTLKAPSDLASLPRADAPTSSPSVPVSTF

SEQ ID NO: 796371 - protein, 129 aa, Homo sapiens
LFEPLVEPLGSVGGPVTYQLFHYMLWTPPRPTWVGGKGLQEVGGVQGTQSSLLGPNTLTFKVPLEGSMRLSSCSPPGLCSCEGLGVPCFLLGALLVRITEKLFAVDLSASVSFGKPFYDSVALSVKWVE

SEQ ID NO: 796372 - protein, 76 aa, Homo sapiens
QGVDGPRWQEGGFLSCMSLLRVSLGRGHLRMGPAEGPPGTPSPTGQQYTVGLEWWWPQEMSVTGNQGHSQSYHVTG

SEQ ID NO: 796373 - protein, 472 aa, Homo sapiens
MNNSQGRVTFEDVTVNFTQGEWQRLNPEQRNLYRDVMLENYSNLVSVGQGETTKPDVILRLEQGKEPWLEEEEVLGSGRAEKNGDIGGQIWKPKDVKESLAREVPSINKETLTTQKGVECDGSKKILPLGIDDVSSLQHYVQNNSHDDNGYRKLVGNNPSKFVGQQLKCNACRKLFSSKSRLQSHLRRHACQKPFECHSCGRAFGEKWKLDKHQKTHAEERPYKCENCGNAYKQKSNLFQHQKMHTKEKPYQCKTCGKAFSWKSSCINHEKIHNAKKSYQCNECEKSFRQNSTLIQHKKVHTGQKPFQCTDCGKAFIYKSDLVKHQRIHTGEKPYKCSICEKAFSQKSNVIDHEKIHTGKRAYECDLCGNTFIQKKNLIQHKKIHTGEKPYECNRCGKAFFQKSNLHSHQKTHSGERTYRCSECGKTFIRKLNLSLHKKTHTGQKPYGCSECGKAFADRSYLVRHQKRIHSR

SEQ ID NO: 796374 - protein, 200 aa, Homo sapiens
RTPEEEFSVGDKLFRQQSVPAASSYDSPMPPSMEDRAPLPPVPAEKFACLSPGYYSPDYGLPSPKVDALHCPPAAVVTVTPSPEGVFSSLQAKPSPSPRAELLVPSLEGALPPDLDTSEDQQATAAIIPPEPSYLEPLDEGPFSAVITEEPVEWAHPSEQALASSLIGGTSENPVSWPVGSDLLLKSPQRFPESPKRFCP

SEQ ID NO: 796375 - protein, 129 aa, Homo sapiens
RRVIHKEKRFIWLAILQTVQEAWCQHLSLVRPSGSFYSCWKAVGSWHGLARGKEGEGKALFHKQFSLWHQAIYEGPTPMTQSPPTEHHLQHWGSHCNMRFRGDKYSNCITGRWGYRKSSHSPPMAPFST

SEQ ID NO: 796376 - protein, 126 aa, Homo sapiens
IVVTMLSCLGDFCPEGFENAVYLHQLYSISIKTVVPCLLSIVAAPFYILFYRVAEAAFAPSTLCSITKLISLLPPPCPAGASLIRQQLGKDKGRSHREVLMDQACKWSMLPLLRSTGHISWSHGHT

SEQ ID NO: 796377 - protein, 176 aa, Homo sapiens
PLQGFWTKGSSVDLSGNVLGAWGWVSLFRFPTDEENLPEPRRPSVILPCPSCSYCVFFSCPFMLQPQWPVPNMPCSQPLHLLFLLPRRLFPQLFTSLTPYHLGPSSTETLERPFLKSPPSTLHHCRKFYWVPLLLTTDMHYTFLLLSFAHVICFAWNALPHLNRNPTPVEFGNMLK

SEQ ID NO: 796378 - protein, 68 aa, Homo sapiens
KATHLPHNLCTRKFPVGLKIFTLEQLLGFHPGNVSGQLIFTGADKGQNSKSSLCSPETNAYLTASSAL

SEQ ID NO: 796379 - protein, 84 aa, Homo sapiens
GNLDRNFLYKSHILSLFSGTALLFYTEVCTSLVCKLYTGIASFLQIPLQRIFLHNMMREVEDMLTAVDSYPEITTITIKRKIKQ

SEQ ID NO: 796380 - protein, 80 aa, Homo sapiens
LTHTENPRQGDHRKSPFVHILGTRYSEHGCKFISEINACLREQLFPCYFLPPWAASSGTFQTTVTTVTVVGAGRVASFRP

SEQ ID NO: 796381 - protein, 96 aa, Homo sapiens
GAEEELRCGGAEEELRCGGAEEELRCGGGEEDLRYGGAEDGTLTSAVCSKFLPKEPGGVTHSEPSTEVLQTSYTKMSSRGMMWFKPSSIWKILWNR

SEQ ID NO: 796382 - protein, 136 aa, Homo sapiens
MLRGREDGELEEGELEDDGAEETQDTSGGPERSRKEKGEKHHSDSDEEKSHRRLKRKRKKEREKEKRRSKKRRKSKHKRHASSSDDFSDFSDDSDFSPSEKGHRKYREYSPPYAPVSDWHALLSSGAGRSSTACVS

SEQ ID NO: 796383 - protein, 85 aa, Homo sapiens
RRRPRGAAGFGAAHYRAVPNPPGRPGIAGPREVGVGAAVQCPAQATGLPCGSLHRSAYSRKSWVPQGRGRVFCLVWGPSPDTVDV

SEQ ID NO: 796384 - protein, 120 aa, Homo sapiens
MQALQQQPVFPDLLKAIPVSIHVNVILFSAILIVLTMVGTAFFMYNAFGKPFETLHGPLGLYLLSFISGSCGCLVMILFASEVKIHHLSEKIANYKEGTYVYKTQSEKYTTSFWLTKGHS

SEQ ID NO: 796385 - protein, 30 aa, Homo sapiens
MQALQQQPGYKLCETTGILSILFYGSTSNT

SEQ ID NO: 796386 - protein, 108 aa, Homo sapiens [sequence omitted]

SEQ ID NO: 796387 - protein, 106 aa, Homo sapiens [sequence omitted]

SEQ ID NO: 796388 - protein, 113 aa, Homo sapiens
AQPWRGYCVEWAQAPSPPQQGKGTFLAVDPGLTPISCPVSWIELSGLGEGRRVRHPGRPPRNKSLLALSFCQMGHGAQSVGVQERVSSLPQGDQREWIQTQIPNKSRWEQGRG

SEQ ID NO: 796389 - protein, 133 aa, Homo sapiens
PLRLPWSSALQCCRPALLQRPRVARTGMDGNVAEATVDPEVFCLCLLTSYETKHSHTASKMTIFSFNLQRTALLVANILKQTKCGQVELTSHYFPEECCVNSRSPSALISPVNGFLPSGRVPSPALPPNPTQH

SEQ ID NO: 796390 - protein, 576 aa, Homo sapiens
STLILPVAGEPGVVRALRVLIGCARHGEKLERLLRVLQAPSVSSGWTPRRTAVTSLSPVDSSVSRSFQEAIPRPGCGEAAGTAEVPPDAKQRAEAAASGEDERQRARSSHLSQPVVKSVLVYRNGDPFYAGRRVVIHEKKVSSFEVFLKEVTGGVQAPFGAVRNIYTPRTGHRIRKLDQIQSGGNYVAGGQEAFKKLNYLDIGEIKKRPMEVVNTEVKPVIHSRINVSARFRKPLQEPCTIFLIANGDLINPASRLLIPRKTLNQWDHVLQMVTEKITLRSGAVHRLYTLEGKLVESGAELENGQFYVAVGRDKFKKLPYGELLFDKSTMRRPFGQKASSLPPIVGSRKSKGSGNDRHSKSTVGSSDNSSPQPLKRKGKKEDVNSEKLTKLKQNVKLKNSQETIPNSDEGIFKAGAERSETRGAAEVQEDEDTQVEVPVDQRPAEIVDEEEDGEKANKDAEQKEDFSGMNGDLEEEGGREATDAPEQVEEILDHSEQQARPARVNGGTDEENGEELQQVNNELQLVLDKERKSQGAGSGQDEADVDPQRPPRPEVKITSPEENENNQQNKDYAAVA

SEQ ID NO: 796391 - protein, 236 aa, Homo sapiens
GPLNVFSMKMWNNWGWCGGRRRGCTKILSTKKGIQMSIKNKHLIVIPAFSHTMSQLDFDFHCVFVSIDEGIFKAGAERSETRGAAEVQEDEDTQVEVPVDQRPAEIVDEEEDGEKANKDAEQKEDFSGMNGDLEEEGGREATDAPEQVEEILDHSEQQARPARVNGGTDEENGEELQQVNNELQLVLDKERKSQGAGSGQDEADVDPQRPPRPEVKITSPEENENNQQNKDYAAVA

SEQ ID NO: 796392 - protein, 576 aa, Homo sapiens; identical to SEQ ID NO: 796390

SEQ ID NO: 796393 - protein, 236 aa, Homo sapiens; identical to SEQ ID NO: 796391

SEQ ID NO: 796394 - protein, 576 aa, Homo sapiens; identical to SEQ ID NO: 796390

SEQ ID NO: 796395 - protein, 319 aa, Homo sapiens
NNFRATILFWAAAAWAKSGKPSGEMDEVGVQKCKNALKLPVLEVLPGGGWDNLRNVDMGRVMELTYSNCRTTEDGQYIIPDEIFTIPQKQSNLEMNSEILESWANYQSSTSYSINTELSLFSKVNGKFSTEFQRMKTLQVKDQAITTRVQVRNLVYTVKINPTLELSSGFRKELLDISDRLENNQTRMATYLAELLVLNYGTHVTTSVDAGAALIQEDHLRASFLQDSQSSRSAVTASAGLAFQNTVNFKFEENYTSQNVLTKSYLSNRTNSRVQSIGGVPFYPGITLQAWQQGITNHLVAIDRSGLPLHFFINPNMLP

SEQ ID NO: 796396 - protein, 35 aa, Homo sapiens
MRKRKEEGRGRRKKRKEEGGGRRRRRKKEKKKRRK

SEQ ID NO: 796397 - protein, 95 aa, Homo sapiens
LLVVMCVCEASFCCHHFAATEEARPKRNQHREAQESPGKGREIAHSAHKATACVSFWLTKRLWLSQFELGFLCLHPRACILFLPKACSTLQGSLW

SEQ ID NO: 796398 - protein, 69 aa, Homo sapiens
LPGIPHLALTPQLGDEKDLQGTGLAKGLSPDSVHLCNHHNLRERQMLTICNNNSHLWSQPFSSPFSSCN

SEQ ID NO: 796399 - protein, 136 aa, Homo sapiens
RAPRSCLLLLRGSDGPFKPEAGSGPSCFMRFWSCCAGDRSGADSPRPRTNPATAEGLPWPTLLTALHQSLLALPSLLPCPCSRFDTWSSPHLPDLQGWPGPSTSPDPLPPSSAAEAPSSFLPPPGAFFLPRWDYRS

SEQ ID NO: 796400 - protein, 191 aa, Homo sapiens
DVLAQNLSGGQKRKLTFGIAILGDPQIFLLDEPTAGLDPFSRHQVWNLLKERKTDRVILFSTQFMDEADILADRKVFLSQGKLKCAGSSLFLKKKWGIGYHLSLQLNEICVEENITSLVKQHIPDAKLSAKSEGKLIYTLPLERTNKFPELYKDLDSYPDLGIENYGVSMTTLNEVFLKLEGKSTINESGK

SEQ ID NO: 796401 - protein, 103 aa, Homo sapiens
DVLAQNLSGGQKRKLTFGIAILGDPQIFLLDEPTAGLDPFSRHQVWNLLKERKTDRVILFSTQFMDEADILADRKVFLSQGKLKCAGSSLFLKKKWGIGYHLR

SEQ ID NO: 796402 - protein, 102 aa, Homo sapiens
ESEAHPVAQLECSGVISAHCNLHLPGSSDSPASASQVAGITGACHQARLIFVFLVETGFCHVGQTGLELLTSGDPPTSASQSAGITGVSHRARPDLPFPSLR

SEQ ID NO: 796403 - protein, 49 aa, Homo sapiens
KQRQRFIERSKVQLRDQVPRSTFGSGLLYTGLVLGFLLLLDSSLRWAAA

SEQ ID NO: 796404 - protein, 295 aa, Homo sapiens
MSKSTKLCGKTSCPRSNIFCNLLDKIVKRPSLQFLGQWGYHCYEPRIYRSLAKILRYVDLDGFDALLTDYIAFVEKSGYRFEVSFNLDFTEICVNTILYWVFARKGNPDFVELLLKKTKDYVQDRSCNLALIWRTFTPVYCPSPLSGITPLFYVAQTRQSNIFKILLQYGILEREKNPINIVLTIVLYPSRVRVMVDRELADIHEDAKTCLVLCSRVLSVISVKEIKTQLSLGRHPIISNWFDYIPSTRYKDPCELLHLCRLTIRNQLLTNNMLPDGIFSLLIPARLQNYLNLEI

SEQ ID NO: 796405 - protein, 139 aa, Homo sapiens
MSKSTKLCGKTSCPRSNIFCNLLDKIVKRPSLQFLGQWGYHCYEPRIYRSLAKILRYVDLDGFDALLTDYIAFVEKSGYRFEVSFNLDFTEICVNTILYWVFARKGNPDFVELLLKKTKDYVQDRSCNLALIWSSDKTV

SEQ ID NO: 796406 - protein, 100 aa, Homo sapiens
CCMWLQALNIVTWRLPQHIVRSKPQEPEQQNSCHPQKPAPGTAVQIGRRSSQQWLLRTPLTQQRSPDACRSPEAALSALDMAGDTQVWPSQSLFAKLKVK

SEQ ID NO: 796407 - protein, 89 aa, Homo sapiens
PVMPVSWGCPSKTPQTRAYTRCVYFLMVLEAGVGGHSVSRVGSLEVPPWLVAATTSPHPHVVVLLCGSPSRLLTGTPVMPDQGPPNNLT

SEQ ID NO: 796408 - protein, 86 aa, Homo sapiens
TALHRPVHHPCCWYEGLQKCVSPAPTATSPQPMHMHPTTLPLLLALVNKLESCCHCLKEPLWLAPLIRVLWSVVREHLGPTNAARS

SEQ ID NO: 796409 - protein, 40 aa, Homo sapiens
MQGSQTAQPSRRPLLGRDLQPPLNSHGARWIVTESVTDLE

SEQ ID NO: 796410 - protein, 113 aa, Homo sapiens
SPRLECNAAISAHCNAARVQASAPASFLVETGFHHVGQAGLYLPTSDDPPASASQSAGVTGVSHRARPVIIFSKVPLTLKKSIVWGNPLGSPSTLCKLCSFALHNKSCCCSKK

SEQ ID NO: 796411 - protein, 123 aa, Homo sapiens
  misc_feature (121)..(121): Xaa can be any naturally occurring amino acid
MAIPLCAGAVIIGFRSKIKNALAHFLPQGTPTPLIPILVIIETISLLIQPIALAVRLTANITAGHLLMHLIGSATLAISTINLPSTLIIFTILILLTILEIAVALIQAYVFTLLVSLYLHXHT

SEQ ID NO: 796412 - protein, 87 aa, Homo sapiens
LNMCTKNSPAVCLPGTAFQPLTLGLLVLWSLHLLRTLTFLARVCWISPPGGPASLVFIRETAHTSTGGEKGCLWGLLYSFSSGKLEV

SEQ ID NO: 796413 - protein, 114 aa, Homo sapiens
HCPYLEDIELSMNLLLSPGRNILSLFTSISLSVCLRPVFLVLAAWSFFHFLQFWLLSPMTSTLYYASSQPTELITMFYLSFCTSVFNILPFPLITDINFEQALQFVLLLQPLGF

SEQ ID NO: 796414 - protein, 79 aa, Homo sapiens
CGGSSTESRSRALFPRELGVLRAFPNAHTGGTRVSPNTPGQSGGFDHREGAAELLCLLAPLPHAPHSGLQQWAQRTVWH

SEQ ID NO: 796415 - protein, 455 aa, Homo sapiens
GARPPVCTGSTMSLTVVSMACVGFFLLQGAWPLMGGQDKPFLSARPSTVVPQGGHVALQCHYRRGFNNFMLYKEDRSHVPIFHGRIFQESFIMGPVTPAHAGTYRCRGSRPHSLTGWSAPSNPLVIMVTGNHRKPSLLAHPGTLLKSGETVILQCWSDVMFEHFFLHREGISEDPSRLVGQIHDGVSKANFSIGPLMPVLAGTYRCYGSVPHSPYQLSAPSDPLDIVITGLYEKPSLSAQPGPTVQAGENVTLSCSSWSSYDIYHLSREGEAHERRLRAVPKVNRTFQADFPLGPATHGGTYRCFGSFRALPCVWSNSSDPLLVSVTGNPSSSWPSPTEPSSKSGICRHLHVLIGTSVVIFLFILLLFFLLYRWCSNKKNAAVMDQEPAGDRTVNRQDSDEQDPQEVTYAQLDHCVFIQRKISRPSQRPKTPLTDTSVYTELPNAEPRSKVVSCP

SEQ ID NO: 796416 - protein, 166 aa, Homo sapiens
FVLFCFETGSHSVAQAGLQWHDHSSLQPRLPRLKPSSHLSLPSSWDYGHVPSHIFVVVLRQGLKKTKTKPRRGHGTFVDSTEVNLLSHTERTAHTPTPVIPHCCPGTRTERRLPGGRERGNAPRSSHGQQSSHLPPHNPGVCLLVSTPGDPRPQSMHSGLKLELLP

SEQ ID NO: 796417 - protein, 119 aa, Homo sapiens
MVPLHSSLGERAKLRLKKTKTKPRRGHGTFVDSTEVNLLSHTERTAHTPTPVIPHCCPGTRTERRLPGGRERGNAPRSSHGQQSSHLPPHNPGVCLLVSTPGDPRPQSMHSGLKLELLP

SEQ ID NO: 796418 - protein, 86 aa, Homo sapiens
GGAEGAGTAAPARGPVRPANRSPCPAGFLYFLGVGGGFPAFSTTAPPPAAMWLMLIKSCIKELTAAENRSTKATSLSGSIHGLLNR

SEQ ID NO: 796419 - protein, 205 aa, Homo sapiens
MRLFAGAVLSINHNKASRGRGRMDGTTAPVTKSGAAKLVKRNFLEALKSNDFGKLKAILIQRQIDVDTVFEVEDENMVLASYKQGYWLPSYKLKSSWATGLHLSVLFGHVECLLVLLDHNATINCRPNGKTPLHVACEMANVDCVKILCDRGAKLNCYSLSGHTALHFCTTPSSILCAKQLVWRGKPFWVANIVVCLYTHGFKTL

SEQ ID NO: 796420 - protein, 371 aa, Homo sapiens
MRLFAGAVLSINHNKASRGRGRMDGTTAPVTKSGAAKLVKRNFLEALKSNDFGKLKAILIQRQIDVDTVFEVEDENMVLASYKQGYWLPSYKLKSSWATGLHLSVLFGHVECLLVLLDHNATINCRPNGKTPLHVACEMANVDCVKILCDRGAKLNCYSLSGHTALHFCTTPSSILCAKQLVWRGANVNMKTNNQDEETPLHTAAHFGLSELVAFYVEHGAIVDSVNAHMETPLAIAAYWALRFKEQEYSTEHHLVCRMLLDYKAEVNARDDDFKSPLHKAAWNCDHVLMHMMLEAGAEANLMDINGCAAIQYVLKVTSVRPAAQPEICYQLLLNHGAARIYPPQFHKVRLCPVVSRLRKIQMAALSEISK

SEQ ID NO: 796421 - protein, 448 aa, Homo sapiens
MRLFAGAVLSINHNKASRGRGRMDGTTAPVTKSGAAKLVKRNFLEALKSNDFGKLKAILIQRQIDVDTVFEVEDENMVLASYKQGYWLPSYKLKSSWATGLHLSVLFGHVECLLVLLDHNATINCRPNGKTPLHVACEMANVDCVKILCDRGAKLNCYSLSGHTALHFCTTPSSILCAKQLVWRGANVNMKTNNQDEETPLHTAAHFGLSELVAFYVEHGAIVDSVNAHMETPLAIAAYWALRFKEQEYSTEHHLVCRMLLDYKAEVNARDDDFKSPLHKAAWNCDHVLMHMMLEAGAEANLMDINGCAAIQYVLKVTSVRPAAQPEICYQLLLNHGAARIYPPQFHKVIQACHSCPKAIEVVVNAYEHIRWNTKWRRAIPDDDLEKYWDFYHSLFTVCCNSPRTLMHLSRCAIRRTLHNRCHRAIPLLSLPLSLKKYLLLEPEGIIY

SEQ ID NO: 796422 - protein, 353 aa, Homo sapiens
MRLFAGAVLSINHNKASRGRGRMDGTTAPVTKSGAAKLVKRNFLEALKSNDFGKLKAILIQRQIDVDTVFEVEDENMVLASYKQGYWLPSYKLKSSWATGLHLSVLFGHVECLLVLLDHNATINCRPNGLCDRGAKLNCYSLSGHTALHFCTTPSSILCAKQLVWRGANVNMKTNNQDEETPLHTAAHFGLSELVAFYVEHGAIVDSVNAHMETPLAIAAYWALRFKEQEYSTEHHLVCRMLLDYKAEVNARDDDFKSPLHKAAWNCDHVLMHMMLEAGAEANLMDINGCAAIQYVLKVTSVRPAAQPEICYQLLLNHGAARIYPPQFHKVRLCPVVSRLRKIQMAALSEISK

SEQ ID NO: 796423 - protein, 79 aa, Homo sapiens
QVDPEPGRIQWGALHGQQVKPLGDAQGSKGDIIDGKAALLGLWVCHHSGLETGAAAFPMLGSLWTRHEVLSARAPWLEV

SEQ ID NO: 796424 - protein, 138 aa, Homo sapiens
KKGRQPSQCLLCSGSGALDTPGDSVLHGPAFSKRSDQSYRRSRLCGLGALRRFRCNLSDFWTGFFCLTWLMYVCRRVAHGTLSACCATKPLLLQVSRSQWAAQCPSAEWRRGLPLLPSLPGRRRVSETSARVNPGPCY

SEQ ID NO: 796425 - protein, 161 aa, Homo sapiens
LGGVNKENLFSSLNYDVAAKKRKKDMLNSKTKTQYFHQEKWIYVHKGSTKERHGYCTLGKAFNRLDFSTAILDSRRFNYVVRLLELIAKSQLTSLSGIAQKNFMNILEKVVLKVLEDQQNIRLIRELLQTLYTSLCTLVQRVGKSVLVGNINMWVYRMETI

SEQ ID NO: 796426 - protein, 144 aa, Homo sapiens
ITTEPTTEVKLSPTTEKTSTQPPDPGLAITPEPTTEIGHSTALGKTTAPHPDQLQTLHRKLTEVTGPPTELEPTQDSLVQSESYIQDKALTAPEEQKASTSTNICELCTCGDEMLSCIDLNPEQRLRQVPVPEPNTHNGTFTIL

SEQ ID NO: 796427 - protein, 97 aa, Homo sapiens
RSPGILSVPKLLRLPCPFPQGPWLWWLQKWEEGMWGSLGKATFHDALPSQEERRNNLVPVLDPGLQEAEPTAGSALGPLPLWSWPYPRWPLCLRPGI

SEQ ID NO: 796428 - protein, 103 aa, Homo sapiens
MSNCNPQCWRWGLVESDGIMGANFPLQCCAHRRVLTRFGCSKVCSPCPLFLFLLFQPCKMCPFLFAFSHDCKFPDTSLVTNKCQHHAPCTAFGTVNQLNFFSL

SEQ ID NO: 796429 - protein, 106 aa, Homo sapiens
LPCPQSKLVCCLGEKHIVPLSTPVCSHQESEPARVCLSLLCRQETTKALSKGNLRSRAERFLGKRGQGPDFACYEEGSKTNMLQIKKGSLQRPVVAHTCNPSYSEG

SEQ ID NO: 796430 - protein, 352 aa, Homo sapiens
MTAESGPPPPQPEVLATVKEERARKRPLQRGKPPYSYIALIAMAIAHAPERRLTLGGIYKFITERFPFYRDNPKKWQNSIRHNLTLNDCFLKIPREAGRPGKGNYWALDPNAEDMFESGSFLRRRKRFKRSDLSTYPAYMHDAAAAAAAAAAAAAAAAIFPGAVPAARPPYPGAVYAGYAPPSLAAPPPVYYPAASPGPCRVFGLVPERPLSPELGPAPSGPGGSCAFASAGAPATTTGYQPAGCTGARPANPSAYAAAYAGPDGAYPQGAGSAIFAAAGRLAGPASPPAGGSSGGVETTVDFYGRTSPGQFGALGACYNPGGQLGGASAGAYHARHAAAYPGGIDRFVSAM

SEQ ID NO: 796431 - protein, 373 aa, Homo sapiens
MTAESGPPPPQPEVLATVKEERGETAAGAGVPGEATGRGAGGRRRKRPLQRGKPPYSYIALIAMAIAHAPERRLTLGGIYKFITERFPFYRDNPKKWQNSIRHNLTLNDCFLKIPREAGRPGKGNYWALDPNAEDMFESGSFLRRRKRFKRSDLSTYPAYMHDAAAAAAAAAAAAAAAAIFPGAVPAARPPYPGAVYAGYAPPSLAAPPPVYYPAASPGPCRVFGLVPERPLSPELGPAPSGPGGSCAFASAGAPATTTGYQPAGCTGARPANPSAYAAAYAGPDGAYPQGAGSAIFAAAGRLAGPASPPAGGSSGGVETTVDFYGRTSPGQFGALGACYNPGGQLGGASAGAYHARHAAAYPGGIDRFVSAM

SEQ ID NO: 796432 - protein, 296 aa, Homo sapiens
SGCARREVEAQVRAKGDTVAERARRGGRWLTRSGMEHLERCEWLLRGTLVRAAVRRYLPWALVASMLAGSLLKELSPLPESYLSNKRNVLNVYFVKVAWAWTFCLLLPFIALTNYHLTGKAGLVLRRLSTLLVGTAIWYICTSIFSNIEHYTGSCYQSPALEGVRKEHQSKQQCHQEGGFWHGFDISGHSFLLTFCALMIVEEMSVLHEVKTDRSHCLHTAITTLVVALGILTFIWVLMFLCTAVYFHNLSQKVFGTLFGLLSWYGTYGFWYPKAFSPGLPPQSCSLNLKQDSYKK

SEQ ID NO: 796433 - protein, 124 aa, Homo sapiens
SGCARREVEAQVRAKGDTVAERARRGGRWLTRSGMEHLERCEWLLRGTLVRAAVRRYLPWALVASMLAGSLLKELSPLPESYLSNKRNVLNVDRVSPCCPDWSRTPGAQVILLSWPPKVLGLQV

SEQ ID NO: 796434 - protein, 52 aa, Homo sapiens
MSEPAMRDVWALGPESGLEASLGWSRVWVRALSRAGDSLTAVDPGSACAPAL

SEQ ID NO: 796435 - protein, 41 aa, Homo sapiens
METEETWVPELLLALSNSQCGQRTQALKGSFIPSKLEITAR

SEQ ID NO: 796436 - protein, 38 aa, Homo sapiens
MTPGVMRAWLGRALGAARRRCWRLGHTTLNAPGSPLIC

SEQ ID NO: 796437 - protein, 119 aa, Homo sapiens
MPNCCRKHATYRETPKKRQDQGMTRNGNKPTGPPKTHCINLWGVIAREVTKDFPPRRMHQVVTQKSRMSSHGRGILPQKPKTSGATANKPESPACPMPADDDSYRETIATIRGLRTGFF

SEQ ID NO: 796438 - protein, 105 aa, Homo sapiens
EKLSKTGLRADSTNVEPEKLHDCGEGGEGETQVRQGQHGEKQIHALVDRWLCANDSEDGGIAHDGDGVETADGDGDPDVGGLKSRDVREDEVDAFLCGVSHLGHD

SEQ ID NO: 796439 - protein, 109 aa, Homo sapiens
PAPTRILSATAALVGEGWEDLSSLPHLRPPQKESPWSCRVVRGWPVSAAVVSTWRLGWERESDKHICRQRLRKPVANNCGLPRLDASVRCRNRNHGPRNFVLVQERGSH

SEQ ID NO: 796440 - protein, 115 aa, Homo sapiens
YSKTKPSGPDGFTGEFYHTLMEGIISVLYNLFQKIEADRILSNSSCGTSITLKPKPDKGITTKLQTNISNDSRCKKFSTICEKIHIPQPSGTYLRYTRLVQHLKVSECNSFTSLG

SEQ ID NO: 796441 - protein, 114 aa, Homo sapiens
LVIPSSADPSGTQLRAQHQLRASWPCPHLQISLPTSTLFLIQCALCTAVRVTLLLSFCPASPVFTSCGWLFIAFRRKHKYLSLTFEVLNTVTLSNFPGFLPAQLFLNCYSYPHA

SEQ ID NO: 796442 - protein, 104 aa, Homo sapiens
FKGVGLAPAQTLAAHPASLGKFHLLLHSPHPLFGTPISHLGPNGMWHSASSNSRWTVGVVKGARCPCLSLAERAQGPHEGSRGLETGMHHLLSGPGPEGHTQGS

SEQ ID NO: 796443 - protein, 67 aa, Homo sapiens
QDTLARKSLPTEVTVRRRREITVYRVCMCGRGGIGDRLWVNRRGPHTVPHGPAPSSSGALASLRGQA

SEQ ID NO: 796444 - protein, 75 aa, Homo sapiens
NTERKTNSMGLLAWRKPKCTFLQSYYIWVHLATSAMLPKFNPNEISHIPARCPGGKLGTMSALALKINPLDLSPK

SEQ ID NO: 796445 - protein, 120 aa, Homo sapiens
MQNAAGRETGEPREPRVPDNRVHSKCHGPRPATRRNRTAELRIRPRPRLLAGSKGTACCLASSAPSLHRDMAQMRKSCQTASQAWGGRGQRFMQEWILGASALSIRAAGMENTEKPSPRT

SEQ ID NO: 796446 - protein, 76 aa, Homo sapiens
MPVAPSNHCDNQCPHIFSKALVVSVAPSPPRDKPAPYTFTDVSSLCGLQKKCEGGKAMLFTLKRDRFSFLLFVSHC

SEQ ID NO: 796447 - protein, 82 aa, Homo sapiens
MCVYYIFKLERHVFAPKVGYMIYLRNVQVENGWQKDCSSFLVCLYQNSSLFTYILALVPFSEALFVSLTFLVWIRLKYKIHL

SEQ ID NO: 796448 - protein, 281 aa, Homo sapiens
SAARLDPQPPSSITNKWLGRRSWPQPFPLRAGGLVFWVWGRGEGEGRATPVPSPEFSTLLSAPASPGPRGALVIEMSSEGAARAARKMAPAEQLRHQPWRQARPSAILAPSNRTPPPNIPHLGRLGGGANSITPARTRPKMRRPSRTSLLAGAANSAGLAGDARLGRRSSARLGARPDAAADPRRCFEKAARRLGRGSPAAGARRRRGLGAGAGTGPGRLACPELSPPHPGPALLAAAARRCGGNGEARMKNKPRLRRLPPHPLPSPSPDAGSILPRRKKM

SEQ ID NO: 796449 - protein, 109 aa, Homo sapiens
MKLDIGIINENQRVSMSRNIESRSTSPWNYTVTWDPNRYPSEVVQAQCRNLGCINAQGKEDISMNSVPIQQETLVVRRKHQGCSVSFQLEKVLVTVGCTCVTPVIHHVQ

SEQ ID NO: 796450 - protein, 163 aa, Homo sapiens
MTVKTLHGPAMVKYLLLSILGLAFLSEAAARKIPKVGHTFFQKPESCPPVPGGSMKLDIGIINENQRVSMSRNIESRSTSPWNYTVTWDPNRYPSEVVQAQCRNLGCINAQGKEDISMNSVPIQQETLVVRRKHQGCSVSFQLEKVLVTVGCTCVTPVIHHVQ

SEQ ID NO: 796451 - protein, 73 aa, Homo sapiens
LTSTSCLSSDRRILLQPDDSLQILAPVEADVGFYTCNATNALGYDSVSIAVTLAGLCCHTVLQSHMLPPCISV

SEQ ID NO: 796452 - protein, 139 aa, Homo sapiens
KISAAQQLSASEVVTHLGQTVALASGTLSVLLHCEAIGHPRPTISWARNGEEVQFSDRILLQPDDSLQILAPVEADVGFYTCNATNALGYDSVSIAVTLAGKPLVKTSRMTVINTEKPAVTVDIGSTIKTVQGVNVTIN

SEQ ID NO: 796453 - protein, 109 aa, Homo sapiens
KSLFGATGGRGRINHRCFGRPCVLMSWDPNPVPRTLRCWRLRRASETALQSSRRAVEDQLKICGHRRDADVFELFLSKKNKRSNYSRPHQSNGPTILRQCPLPNPHLPL

SEQ ID NO: 796454 - protein, 129 aa, Homo sapiens
LQGSQKQHVEHSLCSPPCEDPTRRWPSATHKRTLTRTQSRWHPHLGLPASKTAVEDQLKICGHRRDADVFELFLSKKELTEVIDLSRFKKLKYLWLHHNKSWGVLYSSVKMDEYRELALAEWDTATKIT

SEQ ID NO: 796455 - protein, 106 aa, Homo sapiens
LQGSQKQHVEHSLCSPPCEDPTRRWPSATHKRTLTRTQSRWHPHLGLPASKTAVEDQLKICGHRRDADVFELFLSKKELTEVIDLSRFKKLKYLWLHHNKDGHDGR

SEQ ID NO: 796456 - protein, 81 aa, Homo sapiens
KSLFGATGGRGRINHRCFGRPCVLMSWDPNPVPRTLRCWRLRRASETALQSSRRAVEDQLKICGHRRDADVFELFLSKKTG

SEQ ID NO: 796457 - protein, 108 aa, Homo sapiens
KSLFGATGGRGRINHRCFGRPCVLMSWDPNPVPRTLRCWRLRRASETALQSSRRAVEDQLKICGHRRDADVFELFLSKKELTEVIDLSRFKKLKYLWLHHNKDGHDGR

SEQ ID NO: 796458 - protein, 101 aa, Homo sapiens
YFHYQIFNYGCILDSTQSITFSVDIQTHINFDSFWYTVPNTAKFHKFGSCFFFPLPTCHHPKLRISFFSLELLPWSPSCVSQSSQQANIPNVPTSLSYSPA

SEQ ID NO: 796459 - protein, 71 aa, Homo sapiens
KGTSPFGKCRDMIHKLCCLCGSKAYHLQKSTCGKCGSPAKRKRKCNWTATAKRKYHGDWLNEAPKHCILQI

SEQ ID NO: 796460 - protein, 138 aa, Homo sapiens
PCIPIVGPPEPCLGGGTGKRGLPHQEHTPHRASSAQGKGPRDAKPRPHSQLPIDLLERQSMTHKSDEKWPLPEDKCSLSPQWPLNIHTIAVLTQTPLPSFIFHTYGGRKGLCSFLLGNIWVRQWNMWMNQTIQMLSVV

SEQ ID NO: 796461 - protein, 108 aa, Homo sapiens
TPPDGPLNTTGCPTGLSTSPPATPVLAPLCPTRLPQRLQTFPSKPGHLQLYFPLNRGSVWRLLSHCGPQHSGPLSAPTPAPVSSMPFFPLFLPLSMGARLTTFLQTSA

SEQ ID NO: 796462 - protein, 204 aa, Homo sapiens
MLRKTLKESDSEELEITQETPNLVPFGDVVGCLGIHIKNCRHFMPKISLQHYANLFIRISINKAVKCTKMCSLLSKNDEKNTVIKFDEVKYFSVQVPRRYDDKRNNILLELIQYDNREKRAFLLGSVQIHLYEVIQKGCFIEEVQVLHGNIFVCRLEVEFMFSYGNFGYGFSHQLKPLQKITEPSMVMNLGTTSRKNRSRDKCF

SEQ ID NO: 796463 - protein, 67 aa, Homo sapiens
TVRKPRCSRDADRVCRAVARACVCTCACVFDARTRRRCARRGGCDSCIDPSCSEMAIKKGRDNRVVE

SEQ ID NO: 796464 - protein, 159 aa, Homo sapiens
QTKGNLILVIIEDVEESIEWKTLQKKKQQKIKEKLRIRTKAAVKIQAWWRGTLVRRTLLHAALRAWIIQCWWRMTLSRVLEKKRQAALIAYATRERAVIKLQSLVRMWRVRWRYCQVLNAIYIIQGHWQCHNCQTCALLQGHCVVTATHLQFHIEIINS

SEQ ID NO: 796465 - protein, 93 aa, Homo sapiens
AAAATTTTTAAPEELQVGLAKLVDYRPTLIIYKGDRPENSNLEEPLNIRLHKKDSERKIPHQFLRVKNTLLGNHNLLSTKRFIQQRNLTCVVA

SEQ ID NO: 796466 - protein, 96 aa, Homo sapiens
AVAQRLAQDGAHVVVSRRKQQNVDQAVATLQGEGLSMTGTVCHVGKMKDWERLVATVSCREMGTEPGGGKGSQPEPPSLLSWTALVRSNAVMLTKT

SEQ ID NO: 796467 - protein, 140 aa, Homo sapiens
MGSLGQREDLQDEDRNSAFTWKVQANNRAYNGQFKEKVILCWQRKKYKTNVIRTAKYNFYSFLPLNLYEQFHRVSNLFFLIIIILQSIPDISTLPWFSLSTPMVCLLFIRATRDLVDDMGRHKSDRAINNRPCQILMGKR

SEQ ID NO: 796468 - protein, 226 aa, Homo sapiens
MGTGPAQTPRSTRAGPEPSPAPPGPGDTGDSDVTQEGSGPAGIRGGETVIRAGMGDSPGRGAPERRHKAQPGRARKYEWRPEGPTSMGSLGQREDLQDEDRNSAFTWKVQANNRAYNGQFKEKVILCWQRKKYKTNVIRTAKYNFYSFLPLNLYEQFHRVSNLFFLIIIILQSIPDISTLPWFSLSTPMVCLLFIRATRDLVDDMGRHKSDRAINNRPCQILMGKR

SEQ ID NO: 796469 - protein, 213 aa, Homo sapiens
GGAPGRAGSSGQRATPWPRKPGTQGPEGVGWDAPTLVFQGKALESSRCARQPREERQPEDLGPPAVPWDSCPSGEEGGPRTMAAVHDLEMESMNLNMGREMKEELEEEEKMREDGGGKDRAKSKKVHRIVSKWMLPEKSRGTYLERANCFPPPVFIISISLAELAVFIYYAVWKPQKQWITLDTGILESPFIYSPEKREEAWRFISYMLVHAG

SEQ ID NO: 796470 - protein, 384 aa, Homo sapiens
GGAPGRAGSSGQRATPWPRKPGTQGPEGVGWDAPTLVFQGKALESSRCARQPREERQPEDLGPPAVPWDSCPSGEEGGPRTMAAVHDLEMESMNLNMGREMKEELEEEEKMREDGGGKDRAKSKKVHRIVSKWMLPEKSRGTYLERANCFPPPVFIISISLAELAVFIYYAVWKPQKQWITLDTGILESPFIYSPEKREEAWRFISYMLVHAGVQHILGNLCMQLVLGIPLEMVHKGLRVGLVYLAGVIAGSLASSIFDPLRYLVGASGGVYALMGGYFMNVLVNFQEMIPAFGIFRLLIIILIIVLDMGFALYRRFFVPEDGSPVSFAAHIAGGFAGMSIGYTVFSCFDKALLKDPRFWIAIAAYLACVLFAVFFNIFLSPAN

SEQ ID NO: 796471 - protein, 346 aa, Homo sapiens
GGAPGRAGSSGQRATPWPRKPGTQGPEGVGWDAPTLVFQGKALESSRCARQPREERQPEDLGPPAVPWDSCPSGEEGGPRTMAAVHDLEMESMNLNMGREMKEELEEEEKMREDGGGKDRAKSKKVHRIVSKWMLPEKSRGTYLERANCFPPPVFIISISLAELAVFIYYAVWKPQKQWITLDTGILESPFIYSPEKREEAWRFISYMLVHAGVQHILGNLCMQLVLGIPLEMVHKGLRVGLVYLAGVIAGSLASSIFDPLRYLVGASGGVYALMGGYFMNVLVNFQEMIPAFGIFRLLIIILIIVLDMGFALYRRFFVPEDGSPVSSVSFFYKIEISLLSKRVIK

SEQ ID NO: 796472 - protein, 384 aa, Homo sapiens; identical to SEQ ID NO: 796470

SEQ ID NO: 796473 - protein, 46 aa, Homo sapiens
MAAVHDLEMESMNLNMGREMKEELEEEEKMREDGGGKDRAKSKKVH

SEQ ID NO: 796474 - protein, 59 aa, Homo sapiens
QICHSHGASIHRSQRCPDLPLPRGLHPQKPEMPRSATPTGPPSTEARDAQMCHSHGASI

SEQ ID NO: 796475 - protein, 86 aa, Homo sapiens
QRETKSAVPAWGDGAQRQFCPLSHSDAKKNLKESPGLSRGTEMGSSGVLRSLSTQQPFPGSPLHTTSYQKPSAQVKLYRAHAQEVT

SEQ ID NO: 796476 - protein, 49 aa, Homo sapiens
HLGRKFTLFDAADEFPSLVLQCVSKLLQLIQGTGDVWGPLGWGWACQED

SEQ ID NO: 796477 - protein, 68 aa, Homo sapiens
MPARLPSPRSPGFPIRAGTSCFPCTGEGAGVTSADARRELQNPLPTARSRERGEPGSRLTIKKSSRTE

SEQ ID NO: 796478 - protein, 95 aa, Homo sapiens
SSFNPMFLLSIALLGACCSGPAQLQASDWDHRLLKTSFEMYVEAAKPPAFLLPARQQNPHHMDTVKAYDFTFWNCGMSPTWSCISHSWGSQGALC

SEQ ID NO: 796479 - protein, 68 aa, Homo sapiens
GREADPGTGKVEAGKMRRPGGRTSTRNMGQEYNLGDRARVCLKKKKKKKKRNTQPNPCPSPSSLFSQM

SEQ ID NO: 796480 - protein, 43 aa, Homo sapiens
MTSFSAEPMKTSLMKGNCEGMLELIQVQVGGSIRPRQTEPPSR

SEQ ID NO: 796481 - protein, 101 aa, Homo sapiens
LQAACVLSKEGTIQGSANASQVCKSANILRLYTVLKKRIVSLIPLEYCAFVLYSTKMQFSFRINLFFQTIYVLFCLIVILGEQLYYLHCCYIPKTQKTDVQ

SEQ ID NO: 796482 - protein, 106 aa, Homo sapiens
MDPTPTSLLCCFMSAVSPARTLCGARFLLSTEVVWAKRSCLNENGERCQEKEDLVLATNSICCNQSLGHPHSYTPSFPRIHLPKCPHLGKTYLPLSQRDPTPIRKP

SEQ ID NO: 796483 - protein, 93 aa, Homo sapiens
TRGRTASELPLWVLCMWGSPVLQGAAPLLLLYTVPSIKVANTTTLPLNSFLGKAKNPVGLSRSSGVRLPCITSTVEGHKLTAFSSVNKAWQYL

SEQ ID NO: 796484 - protein, 170 aa, Homo sapiens
RGLSARRLRRRTDGRTADGRTDPNPRAPGAVDLRRGRFAMSPAPAEPGASEDVRAEEGFLAIRGLALALRGFPRGCEPSACAQPSHNGDCSVLPGILQKHCCILPDRNTGRLQTIVLLDWCTKYGFGVCVIQSIAPTKPQKLPRADVPLSVRLQDTVPLLHGASRCLSLT

SEQ ID NO: 796485 - protein, 152 aa, Homo sapiens
RGLSARRLRRRTDGRTADGRTDPNPRAPGAVDLRRGRFAMSPAPAEPGASEDVRAEEGFLAIRGLALALRGFPRGCEPSACAQPSHNGDCSVLPGILQKHCCILPDRNTGNAVKRQREFRWLLSHTVLFSCLFSEKCVCWWRRMRPRRPSFS

SEQ ID NO: 796486 - protein, 110 aa, Homo sapiens
MADRRIHCPGRVLPGILQKHCCILPDRNTGPLKSTGSFLLSRGENLCHLVLAYLDSPDALEQRRSSGRQRPAVQVPHLMVHLGEPGRKPERVAVQRSAGSRKIQTAQLNP

SEQ ID NO: 796487 - protein, 122 aa, Homo sapiens
PPPSQQMTLFKSCLCQALASPPASSVPGSPPHQPRSLVCGWRVVKKLQGMARGPRNTLTPLKFLGSAYGQSHLSAPWRALACTGHAEFPEPQDWQLANFFDWTHRNNIFCIMTQNTHRENFY

SEQ ID NO: 796488 - protein, 95 aa, Homo sapiens
RCGPCWCLVPFYSRAMCCCVEMPHVCLFIRSQTRLGFCDLAKFPKPAGGITGTRPHRRWASEQGATCRPPWPLRTQPGGGGAGKGFLEAFWSDLW

SEQ ID NO: 796489 - protein, 119 aa, Homo sapiens
RKEGRKERKREKERKKRERERRKRKKKEKERKRKKKERKERKKRRKKEKERREGGREGRKEKEKDERERRKKAKKEKRKERKKKKKRREGKKEGTKEIVHKKVNHKSWYYYCSFLILHL

SEQ ID NO: 796490 - protein, 247 aa, Homo sapiens
LQLCQCGPCVGGEPCLATLPLQCSVTCGNGTQERPVLCRTADDSFGICQEERPETARTCRLGPCPRNISDPSKKSYVVQWLSRPDPDSPIRKISSKGHCQGDKSIFCRMEVLSRYCSIPGYNKLCCKSCNLYNNLTNVEGRIEPPPGKHNDIDVFMPTLPVPTVAMEVRPSPSTPLEVPLNASSTNATEDHPETNAVDEPYKIHGLEDEVQPPNLIPRRPSPYEKTRNQRIQELIDEMRKKEMLGKF

SEQ ID NO: 796491 - protein, 134 aa, Homo sapiens
GDERIRRCSVLCCKSCNLYNNLTNVEGRIEPPPGKHNDIDVFMPTLPVPTVAMEVRPSPSTPLEVPLNASSTNATEDHPETNAVDEPYKIHGLEDEVQPPNLIPRRPSPYEKTRNQRIQELIDEMRKKEMLGKF

SEQ ID NO: 796492 - protein, 92 aa, Homo sapiens
MANVTLVTGFLLMGFSNIQKLRILYGVLFLLIYLAALMSNLLIITLITLDVKLQTPMYFFLKNLSFLDVFLVSVPIPKFIVNNLTHNNSISI

SEQ ID NO: 796493 - protein, 40 aa, Homo sapiens
LPIRGILTYLWTHQFIDGTLSPMSFALDHLHKIENDLSLS

SEQ ID NO: 796494 - protein, 102 aa, Homo sapiens
NGIGAEDRAVQTPVCKGRLSAFQGGWNIWCKEYAWDMRLDSQAESRSWRFVNPGLLRCGCQDKTAHIWSFFFCLFVCLFLRLSFTLVAEAGESLEPKRRRSP

SEQ ID NO: 796495 - protein, 115 aa, Homo sapiens
PRTQARGTSVTPPGLPLVPFPSLARSPRWVGTVGCDNGSRLLFLPGGRCARIRFNQMPLFAWSPGSSPPLRSTIISLRSDYLPGMASGLAESLGSLRNERWEPSLPMFLPHALLG

SEQ ID NO: 796496 - protein, 84 aa, Homo sapiens
SPPSQPPPGPLPLLLVSLVQARVPEHENELHSGDYAPPGSSVEIAKIFQADVVPRLQEGAVIVLGSTAHAVLAAPPYSIIKTSE

SEQ ID NO: 796497 - protein, 102 aa, Homo sapiens
RHNGCKFLGDEKYPSSTIFPKQDKYKCMRRTIVKWQITKDSILKLSREKGLNVYKGKTPAHLSIATMHVVEYYLQSVGEKKVNLELHKNKIIFVRIRAYNMF

SEQ ID NO: 796498 - protein, 44 aa, Homo sapiens
MRGGKLPVLRSMQALAGGDATQKIGGVLVRHSETPVLSEGLPRS

SEQ ID NO: 796499 - protein, 437 aa, Homo sapiens
LSSHAPFRNVSRQTSRQMSLCGTPEKSSYRQLSVSDRSSIRVEEIIPAARVAIQTMEVSDFTSTVACFMRLSWAAAAGRLDLVGSSQPIKESNSLCPAGIRNRLSSSGSNCSSGSEGEPVALHAGICVRQQSVSTKDSLIAGEALSLLVTCLQLRSQQLASFYNLPCVADFIIDILLGSPSAEIRRVACDQLYTLSQTDTSAHPDVQKPNQFLLGVILTAQLPLWSPTSIMRGVNQRLLSQCMEYFDLRCQLLDDLTTSEMEQLRISPATMLEDEITWLDNFEPNRTAECETSEADNILLAGHLRLIKTLLSLCGAEKEMLGSSLIKPLLDDFLFRASRIILNSHSPAGSAAISQQDFHPKCSTANSRLAAYEVLVMLADSSPSNLQIIIKELLSMHHQPDPALTKEFDYLPPVDSRSSSGFVGLRNGGATCYMNAV

SEQ ID NO: 796500 - protein, 297 aa, Homo sapiens
GQARRVAMEEERGSALAAESALEKNVAELTVMDVYDIASLVGHEFERVIDQHGCEAIARLMPKVVRVLEILEVLVSRHHVAPELDELRLELDRLRLERMDRIEKERKHQKELELVEDVWRGEAQDLLSQIAQLQEENKQLMTNLSHKDVNFSEEEFQKHEGMSERERQVMKKLKEVVDKQRDEIRAKDRELGLKNEDVEALQQQQTRLMKINHDLRHRVTVVEAQGKALIEQKVELEADLQTKEQEMGSLRAELGKLRERLQEGAQPAMGEEEPETEPVGEEKHIRPQNKGGHGPKD

SEQ ID NO: 796501 - protein, 219 aa, Homo sapiens
GQARRVAMEEERGSALAAESALEKNVAELTVMDVYDIASLVGHEFERVIDQHGCEAIARLMPKVVRVLEILEVLVSRHHVAPELDELRLELDRLRLERMDRIEKERKHQKELELVEDVWRGEAQDLLSQIAQLQEENKQLMTNLSHKDVNFSEEEFQKHEGHTACRLPIIYGWTCETSPPFGCCESCCCEHRAQAFVWTYVFSSLRSLSPAWATQRDSQ

SEQ ID NO: 796502 - protein, 216 aa, Homo sapiens
GQARRVAMEEERGSALAAESALEKNVAELTVMDVYDIASLVGHEFERVIDQHGCEAIARLMPKVVRVLEILEVLVSRHHVAPELDELRLELDRLRLERMDRIEKERKHQKELELVEDVWRGEAQDLLSQIAQLQEENKQLMTNLSHKDVNFSEEEFQKHEGMSELTTTQTLQLALLFVLMVSHKASLMQAVLFSRQSTNPSPQHPSGAIIREHFVN

SEQ ID NO: 796503 - protein, 162 aa, Homo sapiens
VRYSLGTGPCTVLVCLSLQAFAPLVPLLKCPFLPLSGSGPYPFGLRCTLPCSSCAFASPSPARAILRFCVPVPYHSTWRNLFGAGLRSGSPPVSHHTVAHRSGTQQASENGERMNGRAGQGEMWEAPRVHSICKCSLVLATWKGAWLLTETHWSNNSYYFFF

SEQ ID NO: 796504 - protein, 108 aa, Homo sapiens
NHFAFLFFGGVGNRKGIKNPISVNKSYQHVSKFRLCHTCGWKAVATQNNSLKSKTCSSEKSDKANPCPQDPAGMPLGGRRPEFGCRNLENLEVLFHSNFFLQVVYTLP

SEQ ID NO: 796505 - protein, 101 aa, Homo sapiens
QPKCKSHSSRAAAYDLLVEMVKGSVENYRLIHNWVMAQHMQSHAPYKWDYWPHEDVRAECRFVGLTNLGATCYLASTIQQLYMIPEARQAVFTAKVEFSSL

SEQ ID NO: 796506 - protein, 168 aa, Homo sapiens
MANGGGGGGGSSGGGGGGGGSSLRMSSNIHANHLSLDASSSSSSSSSSSSSSSSSSSSSSVHEPKMDALIIPVTMEVPCDSRGQRMWWAFLASSMVTFFGGLFIILLWRTLKYLWTVCCHCGGKTKATHFGSPEMPPAARSWSGSPPEAAVLRGASSLALEVARCRRL

SEQ ID NO: 796507 - protein, 275 aa, Homo sapiens
MANGGGGGGGSSGGGGGGGGSSLRMSSNIHANHLSLDASSSSSSSSSSSSSSSSSSSSSSVHEPKMDALIIPVTMEVPCDSRGQRMWWAFLASSMVTFFGGLFIILLWRTLKYLWTVCCHCGGKTKVTRAPGARPLRQPHRFSASPAAHLLAPRRAVPPSIPAAFPSPPSLPSALPVLSDRGSGRRAGGEELPPASALRDADAQSCPLVYCRVVGGCGWGRGRGLTGSGAVVRGGDSQLSGDGGSWGQLGACFAPLTCRGSAPGGGREGAHPPIL

SEQ ID NO: 796508 - protein, 128 aa, Homo sapiens
MANGGGGGGGSSGGGGGGGGSSLRMSSNIHANHLSLDASSSSSSSSSSSSSSSSSSSSSSVHEPKMDALIIPVTMEVPCDSRGQRMWWAFLASSMVTFFGGLFIILLWRTLKYLWTVCCHCGGKTKVL

SEQ ID NO: 796509 - protein, 48 aa, Homo sapiens
MANETQKVGAIHFPFPFTPYSIQEDFMAELYRVLEAGKIGIFESPTGT

SEQ ID NO: 796510 - protein, 104 aa, Homo sapiens
YLLVAPGKDFFKLCHQRWDYWLLVSVHLISLSLARLRSQMAALFTLSPAVRVNSSFTTFFCQDTILPFSLTFASQMGNNVLLHGDFKLLSLTISNFEQIFNILS

SEQ ID NO: 796511 - protein, 119 aa, Homo sapiens
PPSPLPRFTCYATPKETRISKPQELKGKAYLVTLICHSFCIYHKMISSQKGLNFTLLLACKQASFFPIAVQHRESSLCFYDQIKSVLTFLFLWVYFPSRYGDLNYLGNAVCLQFLCFSK

SEQ ID NO: 796512 - protein, 121 aa, Homo sapiens
SFSVVSPCSLALTANLHILLSKTKARSLPRPLVGSPCSGPALKDLTLPQAAGPHPTTIPFNPQKTLCRGVLEYLLFSILGHLWGGFSPSRWGHQKLPCFPDLNPSQCPWGCAKHLQRNVFK

SEQ ID NO: 796513 - protein, 96 aa, Homo sapiens
IKSKNYMIISIDTQKAYNIIQHPLMTKALNRLSIKVAYLKIVKAIYDKPTANVILNEQKLERFPLGTGTRQVCPLSPLLFNIVLDVLASAMKKGNK

SEQ ID NO: 796514 - protein, 98 aa, Homo sapiens
VETVSPEGRGEKRPRPDREETLVTQIDEPPSYEEALKQGLPTTRPIAPMATGVLGQHTPVTLDLPPPADTQQKPVLPGPSAVVVTRPSRASCACRQRS

SEQ ID NO: 796515 - protein, 220 aa, Homo sapiens
MASESDTEEFYDAPEDVHLGGGYPVGSPGKVGLSTFKETENTAYKVGNESPVQELKQDVSKKIIESIIEESQKVLQLEDDSLDSKGKELSDQATASPIVARTDLSNIPGLLAIDQVLPEESQKAESQNTFEETELELKKCFPSDETCEKPVDETTKLTQTSSTEQLNVLETETEVLNKEAVEVKGGGDVLEPVSSDSLSTKDFAAVEEVAPAKPPRHLTP

SEQ ID NO: 796516 - protein, 131 aa, Homo sapiens
HLSCVLWLSREGAACSDMKAAEVSQDGGLVTSTLENAQLEDGWSLKVLSALCSLVSLYEDEISDSKAQLAAITLIIGTFERMKCFSEENHEPLRTQCALAASKLLKKPDQGRAVSTCAHLFWSGRNTDKNG

SEQ ID NO: 796517 - protein, 189 aa, Homo sapiens
TTRSTTGMSCIVLGNVLHYNTEDLSINDHVDSIVNLVSILYTLSPFILLKTLELKNGGVDHSLVGRFIHLLRSEDPDQQYLILNTARKHFGAGGNQRIRFTLPPLVFAAYQLAFRYKENSKVDDKWEKKCQKIFSFAHQTISALIKAELAELPLRLFLQGALAAGEIGFENHETVAYEFMSQAFIPGEY

SEQ ID NO: 796518 - protein, 260 aa, Homo sapiens
TTRSTTGMSCIVLGNVLHYNTEDLSINDHVDSIVNLVSILYTLSPFILLKTLELKNGGVDHSLVGRFIHLLRSEDPDQQYLILNTARKHFGAGGNQRIRFTLPPLVFAAYQLAFRYKENSKVDDKWEKKCQKIFSFAHQTISALIKAELAELPLRLFLQGALAAGEIGFENHETVAYEFMSQAFSLYEDEISDSKAQLAAITLIIGTFERMKCFSEENHEPLRTQCALAASKLLKKPDQGRAVSTCAHLFWSGRNTDKNG

SEQ ID NO: 796519 - protein, 113 aa, Homo sapiens
FLKIIYLVRSIICIKPLQLNNTKTNQFMENEARIRIDISGKKVHKWLVAHENTLKIISHQGNANQICRKYHFTITRLAIIKKNRQYRVIQSHYLALALFNPKVETQMSIHRRQ

SEQ ID NO: 796520 - protein, 87 aa, Homo sapiens
EAEKDYVFDKRLRYSVRQNESNCRFRDIVVRKEEGFTHILLSSQTSDNNALTPEGAEDGNSVHKNLTAARNLLIILHTLSHLIFMTV

SEQ ID NO: 796521 - protein, 110 aa, Homo sapiens
FHPKSSADLCNNNNIIIIIMIATTRRTIMTSLPGILQYFYSWQNQAARRLIFRIFTDLTNNSAKMINAAVRLSSVIIVGTTFAQTTGPYSLCWSKKQSIFKSTLYSLIFF

SEQ ID NO: 796522 - protein, 72 aa, Homo sapiens
DFMSKTPKAMATKAKIDKWNLIKLKSFCTAKETTIRVNRQPTKWEKIFATYSSDKGLISRIFNVLISLPVNS

SEQ ID NO: 796523 - protein, 347 aa, Homo sapiens
MLAVGCALLAALLAAPGAALAPRRCPAQEVARGVLTSLPGDSVTLTCPGVEPEDNATVHWVLRKPAAGSHPSRWAGMGRRLLLRSVQLHDSGNYSCYRAGRPAGTVHLLVDVPPEEPQLSCFRKSPLSNVVCEWGPRSTPSLTTKAVLLVRKFQNSPAEDFQEPCQYSQESQKFSCQLAVPEGDSSFYIVSMCVASSVGSKFSKTQTFQGCGILQPDPPANITVTAVARNPRWLSVTWQDPHSWNSSFYRLRFELRYRAERSKTFTTWMVKDLQHHCVIHDAWSGLRHVVQLRAQEEFGQGEWSEWSPEAMGTPWTDRLSPRCPGWSTAVQSQLTATSASWVQAILP

SEQ ID NO: 796524 - protein, 353 aa, Homo sapiens
RLHAGSVGSPRRAAAEGGPRALATAAAALASVTRQQGVRMRRSSRPGSASSSRKHTPNFFSENSSMSITSEDSKGLRSAEPGPGEPEGRRARGPSCGEPALSAGVPGGTTWAGSSQQKPAPRSHNWQTACGAATVRGGASEPTGSPVVSEEPLDLLPTLDLRQEMPPPRVFKSFLSLLFQGLSVLLSLAGDVLVSMYREVCSIRFLFTAVSLLSLFLSAFWLGLLYLVSPLENEPKEMLTLSEYHERVRSQGQQLQQLQAELDKLHKEVSTVRAANSERVAKLVFQRLNEDFVRKPDYALSSVGASIDLQKTSHDYADRNTAYFWNRFQLLELRTAAHGYPGAPRVPWELLGF

SEQ ID NO: 796525 - protein, 189 aa, Homo sapiens
MPPPRVFKSFLSLLFQGLSVLLSLAGDVLVSMYREVCSIRFLFTAVSLLSLFLSAFWLGLLYLVSPLENEPKEMLTLSEYHERVRSQGQQLQQLQAELDKLHKEVSTVRAANSERVAKLVFQRLNEDFVRKPDYALSSVGASIDLQKTSHDYADRNTAYFWNLLQLLELRTAAHGYPGAPRVPWELLGF

SEQ ID NO: 796526 - protein, 224 aa, Homo sapiens
RLHAGSVGSPRRAAAEGGPRALATAAAALASVTRQQGVRMRRSSRPGSASSSRKHTPNFFSENSSMSITSEDSKGLRSAEPGPGEPEGRRARGPSCGEPALSAGVPGGTTWAGSSQQKPAPRSHNWQTACGAATVRGGASEPTGSPVVSEEPLDLLPTLDLRQEMPPPRVFKSFLSLLFQGLSVLLSLAGDVLVSMYRSEEGTLAPQEQLFGGGGEQGRNLAGA

SEQ ID NO: 796527 - protein, 248 aa, Homo sapiens
MPPPRVFKSFLSLLFQGLSVLLSLAGDVLVSMYREVCSIRFLFTAVSLLSLFLSAFWLGLLYLVSPLENEPKEMLTLSEYHERVRSQGQQLQQLQAELDKLHKEVSTVRAANSERVAKLVFQRLNEDFVRKPDYALSSVGASIDLQKTSHDYADRNTAYFWNRFSFWNYARPPTVILEPHVFPGNCWAFEGDQGQVVIQLPGRVQLSDITLQHPPPSVEHTGGANSAPRDFAVFFLLSFFTQPGPPGL

SEQ ID NO: 796528 - protein, 88 aa, Homo sapiens
PGEEQPALYPQGLQTLFLEMLFKLLGRGFVPSKLARGVMRWAQPYQLLGPQWEEQTLPPAGTPDIPALETGALNSESVSWAPSRPRTK

SEQ ID NO: 796529 - protein, 66 aa, Homo sapiens
GYIKIEGRTATFRIRGHGNYQLQWFTDSAFGLSTFPGLTQCLCEAEVSVLAVKKSNPPVKISENEE

SEQ ID NO: 796530 - protein, 136 aa, Homo sapiens
PGRRGVPGQLVGPPKGGRVCGGGSWGSGSGGGWAGGSSWWLAPGQLEPVQREGAGSAHAASGSPSESPSAFLGWSPSLSLSLCLCLFLSVSLCLLSLCSLCVSLPVSVSFSSPSLSVFLSLSLFLSVSAYLFLSLC

SEQ ID NO: 796531 - protein, 85 aa, Homo sapiens
QYPFRSHWHSKFGAGRVGRGLVYQQPPEHVHIWPGCDSIQAWPQLSSPLEWALRAERGQGVGSGTFKPVGAGDFLGPQERRDAMV

SEQ ID NO: 796532 - protein, 80 aa, Homo sapiens
MGGGPSGTKLPEEGSGSNICCTAKFAVLQPLLVIPRKTASRVDLQQTPTDLQLRDLTVRRKTNKQKRIASTSTKRPSTPA

SEQ ID NO: 796533 - protein, 101 aa, Homo sapiens
GGLSSTQCSCHCQLFAIAKPCTVKFQVLLKGTVPPTWQEGMFSLIPGMNTMHRVAIAKAKAVPHLLSVPPFPQMQHRGSSRTLSIPHDRLSGLITGASPGM

SEQ ID NO: 796534 - protein, 69 aa, Homo sapiens
LKVRGGKRGRNRHTVCSRGWSPLRQLEARSKAQVSLCLRPWDASNAPPAARGPAAGNLELCVSAGHRHK

SEQ ID NO: 796535 - protein, 69 aa, Homo sapiens; identical to SEQ ID NO: 796534

SEQ ID NO: 796536 - protein, 74 aa, Homo sapiens
EDQGSHPERLGAEDDVPHPVSEGPLWLRTVPSKPRRDGGGQVVGGDMGHMSRDQLWPERLGACPGMEGASGGGI

SEQ ID NO: 796537 - protein, 67 aa, Homo sapiens
RLISSPSSFCPPPAPNEQLSHCGFKSGAPLRLHFPLSPSTVGSAGSQWPGIDGFVIKLGGLEDGGCC

SEQ ID NO: 796538 - protein, 149 aa, Homo sapiens
MAYSLGTSAASLLGLLGLWLPRPVPLVAGAGVHLLLTFILFFWAPVPRVLQHSWILCVAAALWGVGSALNNTGLSTLLGILYKDKERQDFIFTIYHWWQAVAIFTVYLGSSLHMKAKLAMLLVTLVAAAVSYLRMEQKLRRGVAPPQPR

SEQ ID NO: 796539 - protein, 94 aa, Homo sapiens
IGGGFKAQHLGSCVNYALLNRRSEWWCIFMAAGRPRCVITSGIGGFLVSPTSRMKPWILVLTESSFKDPVKCLAINLPRADPDGSHHPKSQTTH

SEQ ID NO: 796540 - protein, 239 aa, Homo sapiens
KCNECGKAFNQQSHLSRHRRLHTGEKPYKCEACDKVFGQKSALESHKRIHTGEKPYRCQVCDTAFTWNSQLARHTRIHTGEKTYKCNECGKTFSYKSSLVWHRRLHGGEKSYKCKVCDKAFVCRSYVAKHTRIHSGMKPYKCNECSKTFSNRSSLVCHRRIHSGEKPYKCSECSKTFSQKATLLCHRRLHSGEKPYKCNDCGNTFRHWSSLVYHRRLHTGEKSYKCTVCDKAFVRNSYL

SEQ ID NO: 796541 - protein, 297 aa, Homo sapiens
EVCQLGGGEGGDGPGMGSPGMVLGLLVQIWALQEASSLSVQQGPNLLQVRQGSQATLVCQVDQATAWERLRVKWTKDGAILCQPYITNGSLSLGVCGPQGRLSWQAPSHLTLQLDPVSLNHSGAYVCWAAVEIPELEEAEGNITRLFVDPDDPTQNRNRIASFPGFLFVLLGVGSMGVAAIVWGAWFWGRRSCQQRDSGNSPGNAFYSNVLYRPRGAPKKSEDCSGEGKDQRGQSIYSTSFPQPAPRQPHLASRPCPSPRPCPSPRPGHPVSMVRVSPRPSPTQQPRPKGFPKVGEE

SEQ ID NO: 796542 - protein, 158 aa, Homo sapiens
RGVSHTASHAHSQKGRLYLFCPPALQEASSLSVQQGPNLLQVRQGSQATLVCQVDQATAWERLRVKWTKDGAILCQPYITNGSLSLGVCGPQGRLSWQAPSHLTLQLDPVSLNHSGAYVCWAAVEIPELEEAEGNITRLFVDPGTGASGEREGQWGGS

SEQ ID NO: 796543 - protein, 45 aa, Homo sapiens
LPNLAQKTVHAKPLPASQPLHGLFPCPAEFYLLFEPPSKLLFNLQ

SEQ ID NO: 796544 - protein, 132 aa, Homo sapiens
MSNFTFKRLYQLDILPEMHVTECVVKFINFCQPDRQEIVSQCCFNCIPLIMSECEQVSCLRAISISFAVNCLLTKAKPATEMDRKLSHLAPRIGPAPWIELHGDLRLACFLSPIHTPSTQGRQNSIPPRGGP

SEQ ID NO: 796545 - protein, 178 aa, Homo sapiens
MFSWVLSLAVLAASSTSWNFSANFVSCCSEENPKPNTVLALLSAHCPDVCDVLVKVIFCVIVLFMVTLALLHTDDPIAVPCDIIETGNGDRLLLAGIQFFLVLGSIWKTRARGVKMGCSPILTLLQRPLRPGLWRWLSARWASAPRAARAAAPARLAQPWRRSIPPGAGGQELWKKLF

SEQ ID NO: 796546 - protein, 178 aa, Homo sapiens; identical to SEQ ID NO: 796545

SEQ ID NO: 796547 - protein, 178 aa, Homo sapiens; identical to SEQ ID NO: 796545

SEQ ID NO: 796548 - protein, 47 aa, Homo sapiens
MIRGFEAPMAENPPPPPPPVIFCHDSPKRVLVSVIRTTPIKPTCGGG

SEQ ID NO: 796549 - protein, 114 aa, Homo sapiens
ALFSHPWNLLGFMSPLCHLHSCKLPILALLPNPLELTVSNPASTVPFLGIQDKLTLLYAFLVLLYTSIRYKLHNIALYLWLPHCKVFMYMFSSSLHFQRLAGEKCEERKRERDR

SEQ ID NO: 796550 - protein, 71 aa, Homo sapiens
RVGDTGNVKACLCTHFWRKDKRGRSQAIVPRYGKEAPCMAGFPEDAQQVGLCGMYRRSPNGESRHEPPCPA

SEQ ID NO: 796551 - protein, 175 aa, Homo sapiens
MDPVGLQLGNKNLWSCLVRLLTKDPEWLNAKMKFFLPNTDLDSRNETLDPEQRVILQLNKLHVQGSDTWQSFIHCVCMQLEVPLDLEVLLLSTFGYDDGFTSQLGAEGKSQPESQLHHGLKRPHQSCGSSPRRKQCKKQQLELAKKYLQLLRTSAQQRYRSQIPGSDVPGSLDDP

SEQ ID NO: 796552 - protein, 175 aa, Homo sapiens; identical to SEQ ID NO: 796551

SEQ ID NO: 796553 - protein, 200 aa, Homo sapiens
MDPVGLQLGNKNLWSCLVRLLTKDPEWLNAKMKFFLPNTDLDSRNETLDPEQRVILQLNKLHVQGSDTWQSFIHCVCMQLEVPLDLEVLLLSTFGYDDGFTSQLGAEGKSQPESQLHHGLKRPHQSCGSSPRRKQCKKQQLELAKKYLQLLRTSAQQRYRSQIPGSGQPHAFHQVYVPPILRRATASLDTPEGAIMGDVK

SEQ ID NO: 796554 - protein, 233 aa, Homo sapiens
MDPVGLQLGNKNLWSCLVRLLTKDPEWLNAKMKFFLPNTDLDSRNETLDPEQRVILQLNKLHVQGSDTWQSFIHCVCMQLEVPLDLEVLLLSTFGYDDGFTSQLGAEGKSQPESQLHHGLKRPHQSCGSSPRRKQCKKQQLELAKKYLQLLRTSAQQRYRSQIPGSGQPHAFHQVYVPPILRRATASYDEYVQWLHFAEGSAMLPLMLNLYVGRLGEAGAPLHPRIESEVANY

SEQ ID NO: 796555 - protein, 68 aa, Homo sapiens
GIIQSKGRRSPLTPEQLVPSPGVSLCSDLCLCSRLFRVRSGSHPCASLCLVTLQVAHGSSFLHLAFAT

SEQ ID NO: 796556 - protein, 74 aa, Homo sapiens
PHYSPMSPHRLLMSPHYSLVSPHRLLMSPLLSGVPSPPSDVPSLLSGVPSLPSDVSSPPSDVPSLLSDVPSLLS

SEQ ID NO: 796557 - protein, 130 aa, Homo sapiens
ETTVFSLLELGCLWTRASLVTSRSSRYCVWDVALAPLGRDYVVYESQALTPKAGAHGISLQCITLLNFRPRRGLAACLEHTVVLQACLCMDALPTNIRGLQRPRTLPWPATPGCPQDLHPQLTLLLGRWF

SEQ ID NO: 796558 - protein, 111 aa, Homo sapiens
GWGLIQYDWCPYKKRKLGHRQAQSDDHVKTQGRDGHLPPRHGHLPSKPWSPITKPQSSTIQATVTYHPSHGHLPAKPWPPTRQAMVTYPPSHGRLPSKERGLEQILPQSPQ

SEQ ID NO: 796559 - protein, 134 aa, Homo sapiens [sequence omitted]

SEQ ID NO: 796560 - protein, 82 aa, Homo sapiens
KMLVSAAASLQPEGSNADRQQAAGTLDRCEDLGSGDAVELLDEPTLDLPYRQTFCDPSARKLQGYQLYLFPRPESRQMENGF

SEQ ID NO: 796561 - protein, 144 aa, Homo sapiens
APLMASNLPAVISNHTIRPHSSLPTTRTFWQPMNMSHSDCPAPNTILFVPHLECAFSSDSPRRTLPGPLLCNGLSSNLSTVLPPPLPPVRWSRPGPSLHAWRAAHSGHSACPELPPQPASSAALSSQDTEEFWGLLVWHCFYDG

SEQ ID NO: 796562 - protein, 145 aa, Homo sapiens
PPPWDLTHSSPLGPTHHHGTSFTHTLWDLPTAMGTHSHPMGPAYHHGTRLPPWDLTPYGTCLPPWDPLITHALWDPPTAMGPHSRPMGPAHRHGTSLTPYGTRPPPWDLTHALWDPSTAMGPHSLIPCGTHSLPWDLSHSQLFFL

SEQ ID NO: 796563 - protein, 291 aa, Homo sapiens
MSMLPTFGFTQEQVACVCEVLQQGGNIERLGRFLWSLPACEHLHKNESVLKAKAVVAFHRGNFRELYKILESHQFSPHNHAKLQQLWLKAHYIEAEKLRGRPLGAVGKYRVRRKFPLPRSIWDGEETSYCFKEKSRSVLREWYAHNPYPSPREKRELAEATGLTTTQVSNWFKNRRQRDRAAEAKERENNENSNSNSHNPLNGSGKSVLGSSEDEKTPSGTPDHSSSSPALLLSPPPPGLPSLHSLGHPPGPSAVPVPVPGGGGADPLQHHHGLQDSILNPMSANLVDLGS

SEQ ID NO: 796564 - protein, 131 aa, Homo sapiens
MKKKQTVQGTFSKLFGKKHTTTPSTSLYATNPPWIFTQEAPEEGTGGFDGIYYGDNRFNTVSESGTATLKARPRVRPLLTFLPLNAQENHGLAVPTPSVPDDFADKEVTGTSSLVNGTSDCTGPGLYDVTQ

SEQ ID NO: 796565 - protein, 121 aa, Homo sapiens
MKKKQTVQGTFSKLFGKKHTTTPSTSLYATNPPWIFTQEAPEEGTGGFDGIYYGDNRFNTVSESGTATLKARPRVRPLLTFLPLTEFHSCCPGWSGTMASSRLPATSTSWVQAILLPQPPK

SEQ ID NO: 796566 - protein, 121 aa, Homo sapiens; identical to SEQ ID NO: 796565

SEQ ID NO: 796567 - protein, 115 aa, Homo sapiens
MKKKQTVQGTFSKLFGKKHTTTPSTSLYATNPPWIFTQEAPEEGTGGFDGIYYGDNRFNTVSESGTATLKARPRVRPLLTFLPLTEFHSCCPGWSCSEPRLHHCTPAWTTERDSI

SEQ ID NO: 796568 - protein, 103 aa, Homo sapiens
TVGSKNRALALLSWDSVLHTFTRVRDISSSHHLCRVGSINSKLVKRFRALGTLSIDTAWCRPRGFSTKGRFAHKGTFGNVEDIFGVISGWCHWHLVGRGQGCC

SEQ ID NO: 796569 - protein, 105 aa, Homo sapiens
YCRTLQASLCLTVDPADPDGVSLWHPQAKLLPFGSLYGASSCLAVASSGQAHAPWRLFQAQLLPFAACSRPRMSLTRHLQDELILPVRLQARLLPHNNLFWPNSC

SEQ ID NO: 796570 - protein, 258 aa, Homo sapiens
GDVSDVGSRTTESEAEGPLDAPRPGPAMAGPLSSCRLSARPEGGSGRGRRAERVSPSRSNEVISPEILKMRAALFCIFTYLDTRTLLHAAEVCRDWRFVARHPAVWTRVLLENARVCSKFLAMLAQWCTQAHSLTLQNLKPRQRGKKESKEEYARSTRGCLEAGLESLLKAAGGNLLILRISHCPNILTDRSLWLASCYCRALQAVTYRSATDPVGHEVIWALGAGCREIVSLQVAPLHPCQQPTRFSNRCLQMIGRC

SEQ ID NO: 796571 - protein, 116 aa, Homo sapiens
FVVLLLLFGDQILDKRNLDFFLLESLLKAAGGNLLILRISHCPNILTDRSLWLASCYCRALQAVTYRSATDPVGHEVIWALGAGCREIVSLQVAPLHPCQQPTRFSNRCLQMIGRC

SEQ ID NO: 796572 - protein, 63 aa, Homo sapiens
SASGWPSGLRRCVQVAVSPGGVGSNPTPDKRSFPVFQKRNLRRPHTKRGPQTQRTVRFTHNPK

SEQ ID NO: 796573 - protein, 115 aa, Homo sapiens
TRGSSAKEGLWKFCSSLCLFHCSVLCGELSRIGQCLNPGQRSSSQVEDDCIQLALLGFLMPTFQSNFLFPSHKDLCQATSLCHSLYVREFIQMYICTRGYTVFKVHFRIFQYAKI

SEQ ID NO: 796574 - protein, 199 aa, Homo sapiens
MSFQKPKGTIEYTVESRDSLNSIALKFDTTPNELVQLNKLFSRAVVTGQVLYVPDPEYVSSVESSPSLSPVSPLSPTSSEAEFDKTTNPDVHPTEATPSSTFTGIRPARVVSSTSEEEEAFTEKFLKINCKYITSGKGTVSGVLLVTPNNIMFDPHKNDPLVQENGCEEYGIMCPMEEVMSAAMYKEILDSKIKESLPM

SEQ ID NO: 796575 - protein, 287 aa, Homo sapiens
MSVSNLSWLKKKSQSVDINAPGFNPLAGAGKQTPQASKPPAPKTPIIEEEQNNAANTQKHPSRRSELKRFYTIDTGQKKTLDKKDGRRMSFQKPKGTIEYTVESRDSLNSIALKFDTTPNELVQLNKLFSRAVVTGQVLYVPDPEYVSSVESSPSLSPVSPLSPTSSEAEFDKTTNPDVHPTEATPSSTFTGIRPARVVSSTSEEEEAFTEKFLKINCKYITSGKGTVSGVLLVTPNNIMFDPHKNDPLVQENGCEEYGIMCPMEEVMSAAMYKEILDSKIKESLPM

SEQ ID NO: 796576 - protein, 203 aa, Homo sapiens
PDLVIHLPRPLKVLGLQVESRDSLNSIALKFDTTPNELVQLNKLFSRAVVTGQVLYVPDPEYVSSVESSPSLSPVSPLSPTSSEAEFDKTTNPDVHPTEATPSSTFTGIRPARVVSSTSEEEEAFTEKFLKINCKYITSGKGTVSGVLLVTPNNIMFDPHKNDPLVQENGCEEYGIMCPMEEVMSAAMYKEILDSKIKESLPM

SEQ ID NO: 796577 - protein, 280 aa, Homo sapiens
MDYLTTFTEKSGRLLRGTANRLLGFGGGGEARQVRFEDYLREPAQGDLGCGSPPHRPPAPSSPEGPDTGQKKTLDKKDGRRMSFQKPKGTIEYTVESRDSLNSIALKFDTTPNELVQLNKLFSRAVVTGQVLYVPDPEYVSSVESSPSLSPVSPLSPTSSEAEFDKTTNPDVHPTEATPSSTFTGIRPARVVSSTSEEEEAFTEKFLKINCKYITSGKGTVSGVLLVTPNNIMFDPHKNDPLVQENGCEEYGIMCPMEEVMSAAMYKEILDSKIKESLPM

SEQ ID NO: 796578 - protein, 52 aa, Homo sapiens
MREYGRHSRRCVPGDGVRDGLSVSVEEEGTGKTPEFPPTLCGCTAVLGRLLS

SEQ ID NO: 796579 - protein, 54 aa, Homo sapiens
MWPGLLKECMKSTQHPLQLCPSILPDYPLPLHSQPCPLCGALVLSPSTFAGEHT

SEQ ID NO: 796580 - protein, 224 aa, Homo sapiens
SLSIFKPRSTQYSQGRIHTFKPRSTQYSQGRIHTFKPRSTQYSQGRIHTFKPRSTQYSQGRIHTFKPRSTQYSQGRIHTFKPRSTQYSQGRIHTFKPRSTQYSQGRIHTFKPRSTQYSQGRIHTFKPRSTQYSQGRIHTFKPRSTQYSQGRIHTFKPRSTQYSQGRIHTFKPRSTQYSQGRIHTFKPRSTQYSQGRIHTFKPRSTQYLQGRIHTFKPRSTQYSQ

SEQ ID NO: 796581 - protein, 368 aa, Homo sapiens
MEPGQPREPQEPREPGPGAETAAAPVWEEAKIFYDNLAPKKKPKSPKPQNAVTIAVSSRALFRMDEEQQIYTEQGVEEYVRYQLEHENEPFSPGPAFPFVKALEAVNRRLRELYPDSEDVFDIVLMTNNHAQVGVRLINSINHYDLFIERFCMTGGNSPICYLKAYHTNLYLSADAEKVREAIDEGIAAATIFSPSRDVVVSQSQLRVAFDGDAVLFSDESERIVKAHGLDRFFEHEKAHENKPLAQGPLKGFLEALGRLQKKFYSKGLRLECPIRTYLVTARSAASSGARALKTLRSWGLETDEALFLAGAPKGPLLEKIRPHIFFDDQMFHVAGAQEMGTVAAHVPYGVAQTPRRTAPAKQAPSAQ

SEQ ID NO: 796582 - protein, 68 aa, Homo sapiens
MCPGDFPFIFKQFFFPLGLTNSIFDLNKSEGKLPIMGNKSSEVAKFPHTQKKRWGGGGEKNSQQKEKK

SEQ ID NO: 796583 - protein, 120 aa, Homo sapiens
RLEFFLLVVRDLAGSGVKLQTFTEIVKSGSISKSPPVAVTLPCPVKCCLLLTFLPKHHEMWRRKNTQMCPGDFPFIFKQFFFPLGLTNSIFDLNKSEGKLPIMGNKSSEVAKFPHTQKKR

SEQ ID NO: 796584 - protein, 73 aa, Homo sapiens
QEPKITVSAEPVPSELWVGESVLLVAADSLWCSLACRHRTPVPVFVVTWPSPCVLSVSVSKFPSFIRVPVILH

SEQ ID NO: 796585 - protein, 122 aa, Homo sapiens
MCSSRPPAACESLPARVSGFLQVQDGVWQARLVLGNATFRNKNRNACPHLGPWAQAHGSPHEGPAFLYPCSPPVSSPPSEEVHLTAVKIWMMTSLKLLPGDRGCCFGENSSEIPPRGLSKGF

SEQ ID NO: 796586 - protein, 132 aa, Homo sapiens
RISLHLHCSISAKSPRLSGNSGATSPQCGTSHPKAPREVFSNHSPEKPRHYDHWHPCLFPPDPPRPSHPIKPSFRSHLHPPCTLPNPENGQAGKPCQLTSPRDSGVPDFHVFTRSSSETLTSPGSTTQTRTG

SEQ ID NO: 796587 - protein, 102 aa, Homo sapiens
  misc_feature (5)..(6): Xaa can be any naturally occurring amino acid
  misc_feature (54)..(54): Xaa can be any naturally occurring amino acid
TVEEXXVERAEMKLRLDSIVIQQGRLVDQNLNKIGKDEMLQMIRHGATHVFASXESEITDEDIDGILERGAKKTAEMNEKLSKMGESSLRNFTMHTEPVFEF

SEQ ID NO: 796588 - protein, 102 aa, Homo sapiens; identical to SEQ ID NO: 796587
  misc_feature (5)..(6): Xaa can be any naturally occurring amino acid
  misc_feature (54)..(54): Xaa can be any naturally occurring amino acid

SEQ ID NO: 796589 - protein, 95 aa, Homo sapiens
ERTSALTIGSGMVLEALGTAVRRTRKEKACRSQRKKRNCLFTDDAVVFVGNPKVSTKNTPRIMKRGRAQRLTPAIPALWEAKAGQSPEVGSSRPA

SEQ ID NO: 796590 - protein, 194 aa, Homo sapiens
PCRRKLLTGKPRGRGTSRPWPFPLKGRGNIGLGNPGRGSGHYYRWSLRVASTRPGGPPRPATSCDLWKVTWLAPQFSVFWRTCGLRVATSHAFALGASAWCKHCGGFVPQLGGHRADSAALPMRAWPQFPRQGTELPSKCNTSIVFSAIPCVTPWDPCNAGSAPKKQRKVMTLEEKVELLDMYGGVTIPIKEWP

SEQ ID NO: 796591 - protein, 106 aa, Homo sapiens
HGDWLIPVISALEEAEAGRSPELRSSRPACATWRNPISTKKNTKIGTHLWSQLLERLRWGESLEPRRQRLQSAKIASLHCSLGDRVRPCLKNQNKIIKLLPKCFTL

SEQ ID NO: 796592 - protein, 118 aa, Homo sapiens
  misc_feature (5)..(5): Xaa can be any naturally occurring amino acid
  misc_feature (32)..(33): Xaa can be any naturally occurring amino acid
AQLNXIFPDYGTRLWTGGLDNTVRCWDLREGXXLQQHDFKPQIFSLGHCPNQDWLAVGMESSNVEILHVRKPEKYQLHLHESCVLSLKFASCGRWFVSTGKDNLLNAWRTPYGASIFQ

SEQ ID NO: 796593 - protein, 106 aa, Homo sapiens
PPGNTWVALEYAMGLCSGNLVLMVGYYYCCFTLLLFLLSLEMLLREASKSADLGSFGWVHFNSNPLIQFSSTTSFQRTGTHGRRQVYAVCICTETLFEGNSWRILR

SEQ ID NO: 796594 - protein, 164 aa, Homo sapiens
GAQEDPRTRNTSTPSFSPSVHNVTGTVSQKTSPSGETATSSLCSVTNTSMMTSEKITVTTSTGSTLGNPGETSSVPVTGSLMPVTSAALVTVDPEGQSPATFSRTSTQDTTAFSKNHQTQSVETTRVSQINTLNTLTPVTTSTVLSSPSGSLSGILYERQHPGT

SEQ ID NO: 796595 - protein, 121 aa, Homo sapiens
MPVTSAALVTVDPEGQSPATFSRTSTQDTTAFSKNHQTQSVETTRVSQINTLNTLTPVTTSTVLSSPSGFNPSGTVSQETFPSGETTISSPSSVSNTFLVTSKVFRMPISREGRSSREGRS

SEQ ID NO: 796596 - protein, 260 aa, Homo sapiens
VTSAVSITAGQEGQSRTTSWRTSIQDTSASSQNHWTRSTQTTRESQEDPRQGTTSTPSFSPSVHNVTGTVSQKTSPSGETATSSLCSVTNTSMMTSEKITVTTSTGSTLGNPGETSSVPVTGSLMPVTSAALVTVDPEGQSPATFSRTSTQDTTAFSKNHQTQSVETTRVSQINTLNTLTPVTTSTVLSSPSGFNPSGTVSQETFPSGETTISSPSSVSNTFLVTSKVFRMPISRDSTLGNTEETSLSVSVPCRQGTTSG

SEQ ID NO: 796597 - protein, 290 aa, Homo sapiens
VTSAVSITAGQEGQSRTTSWRTSIQDTSASSQNHWTRSTQTTRESQEDPRQGTTSTPSFSPSVHNVTGTVSQKTSPSGETATSSLCSVTNTSMMTSEKITVTTSTGSTLGNPGETSSVPVTGSLMPVTSAALVTVDPEGQSPATFSRTSTQDTTAFSKNHQTQSVETTRVSQINTLNTLTPVTTSTVLSSPSGFNPSGTVSQETFPSGETTISSPSSVSNTFLVTSKVFRMPISRDSTLGNTEETSLSVSGTISAITSKVSTIWWSDTLSTALSPSSLPPKISTAFHTQQ

SEQ ID NO: 796598 - protein, 265 aa, Homo sapiens
VTSAVSITAGQEGQSRTTSWRTSIQDTSASSQNHWTRSTQTTRESQEDPRQGTTSTPSFSPSVHNVTGTVSQKTSPSGETATSSLCSVTNTSMMTSEKITVTTSTGSTLGNPGETSSVPVTGSLMPVTSAALVTVDPEGQSPATFSRTSTQDTTAFSKNHQTQSVETTRVSQINTLNTLTPVTTSTVLSSPSGFNPSGTVSQETFPSGETTISSPSSVSNTFLVTSKVFRMPISRDSTLGNTEETSLSVSDPYAGDPLESAKPRH

SEQ ID NO: 796599 - protein, 190 aa, Homo sapiens
VTSAVSITAGQEGQSRTTSWRTSIQDTSASSQNHWTRSTQTTRESQEDPRQGTTSTPSFSPSVHNVTGTVSQKTSPSGETATSSLCSVTNTSMMTSEKITVTTSTGSTLGNPGETSSVPVTGSLMPVTSAALVTVDPEGQSPATFSRTSTQDTTAFSKNHQTQSVETTRVSQINTLNTLEVPQVVPCRVP

SEQ ID NO: 796600 - protein, 157 aa, Homo sapiens
LQAFSYLEVQAMALQETPPQVTFELESLRELVLEFPGVAALEQLAQHVAAAIKKVFPRSTLGKLFRRPTPASMLARLERSSPSESTDPCSPCGGFLETYEALCDYNGFPFREEIQWDVDTIYHRQGCRHFSLGDFSHLGSRDLALSVAALSYNLWFR

SEQ ID NO: 796601 - protein, 132 aa, Homo sapiens
MGCRFRCLPQTPAVSRAWMLPSVAAGAQGFGPTLHTADASEHRVFGPCALCLACAPTEGCYWCKPGRPRQRLGGVRPWGLLRVPRCCGDSGSRASLCRDGAPVPLQGCPPFAVHSLPCWALSVAVLPAQSLV

SEQ ID NO: 796602 - protein, 120 aa, Homo sapiens
SVREALGRRGRFIRANFAESVFEGRGCEDRIFRDAFHVGRRSTPGTVSSRRLKSSSGRGASGLAAAGPNGSGAHAVLTAWLQCLAWHLLSCNWPTRGPTQASPAAGKGLCFRKCLGREPA

SEQ ID NO: 796603 - protein, 131 aa, Homo sapiens
MTHSSQDTGSCGIQEDGKLYVVDSINDLNKLNLCPAGSQHLFPLEDKIPVLGTNSGNGSRSLFFVGLLIVLIVSLALVFFVIFLIVQTGNKMDDVSRRLTAEGKDIDDLKRINNMIVKRLNQLNQLDSEQN

SEQ ID NO: 796604 - protein, 96 aa, Homo sapiens
  misc_feature (4)..(4): Xaa can be any naturally occurring amino acid
PPAXTAARDDRRGLTERLRTFLLGDLRSPTDPHHLSRRTRYNTHMGQTGRGGAEGGIGVEIYIHTDLGMLKNHPQGRERWLTPVIPTLGDQGGRTT

SEQ ID NO: 796605 - protein, 97 aa, Homo sapiens
PHTFILSSSFLNLQNLLKKESTSQSPLPPFTFTPPTPHALISITISINSITSHPVYIINPAVIANAASSSRAPCLPDIQLVTKFCRSASEMSLESST

SEQ ID NO: 796606 - protein, 142 aa, Homo sapiens
EAPRSSWAGRARAGFSSAVAECGSAPSSPGSTARLFWRHSQQQRPCVFAAAQLALAWAPAAAAAGTGGLCPGLPFDPPPFPGALREPLPGSPLQAASAALAAAPAGSSSGSFSRRRRLGCCWGGSPRRAPRGEQGAAPPALG

SEQ ID NO: 796607 - protein, 119 aa, Homo sapiens
HLTLFSHSPHRGILWLLSLKPDSMELRPQTITGHIIFMKFKKRLGWARWLMPVVLALWEAKEGRSPEVRNSRPAWLTWQNPVSTKNTKIILAWWQVPIIPATREAEAGEALESGGQSFQ

SEQ ID NO: 796608 - protein, 105 aa, Homo sapiens
MVQRAELLQVLQSLEAVLIQTVYNTKMASVGLSDIAMDTTVTHATSHGRAHSVEECKVPEPAGLGTTETLARIEEKRQGLTVLAATLLVLSPQMPHWLFWLCPAR

SEQ ID NO: 796609 - protein, 105 aa, Homo sapiens; identical to SEQ ID NO: 796608

SEQ ID NO: 796610 - protein, 136 aa, Homo sapiens
MVHRGCHCRSLPQAFAEVRVGVGNTRELPRMEAACASFNLSFFSLQSSRERMAPKAGTLCCSHRPLRRLCRTSQQPLMLPSYSMASGAILSTETVSIVTLSLTWKNGTGNIPLGADVGEESSFQSPGARTWRSQLL

SEQ ID NO: 796611 - protein, 67 aa, Homo sapiens
KKRTATVNPVVKDGLPGKVTFLLRPEGIQEEKQVKSFQVDRENREPGGNGPSTPTQHDKVAAGAWHE

SEQ ID NO: 796612 - protein, 58 aa, Homo sapiens
GLCRSHAGQAKLFSQHGKLCEGSHTGRRYRHQHIHSHAHSRLWPAADGGPLCLVCPSV

SEQ ID NO: 796613 - protein, 67 aa, Homo sapiens
RADARGGTSSPAWVPAVLSLRREGYGAFKELEENHYCWWIVLLLLMERIPPPHQKQQRNSNWKITES

SEQ ID NO: 796614 - protein, 120 aa, Homo sapiens
QGVLLQSRSLQACWGRWGGMWFQKPTPPGGGLSADSLGASVCLNRTGQCLTSLTVMVPALIVSQKNYCHHPARPRDISFQLEYGQPSFENPQSANCGIRKRKLPFSKKQGGPTHLARPLL

SEQ ID NO: 796615 - protein, 101 aa, Homo sapiens
VLHSPLTSGMRVAFPDTKTYCFDAFPNIEKVSKITSPVLIIHGIEDEVIDFSHGLALYERCPKAVEPLWVEGAGHNDIELYSQYLERLRRFISQELPSQRA

SEQ ID NO: 796616 - protein, 57 aa, Homo sapiens
PSSRYTPSSRYALPPAIPSSSRYALFLPLHPLPPATPSSSRYALPPTTPSSSRYALP

SEQ ID NO: 796617 - protein, 246 aa, Homo sapiens
MGAVWSRGPQPPGRRLILVHDLLGTGLQQQEDLYHQSYECVCVLFASVPDFKEFYSESNINHEGLECLRLLNEIIADFDELLSKPKFSGVEKIKTIGSTYMAATGLNATSGQDAQQDAERSCSHLGTMVEFAVALGSKLDVINKHSFNNFRLRVGLNHGPVVAGVIGAQKPQYDIWGNTVNVASRMESTGVLGKIQVTEETAWALQSLGYTCYSRGVIKVKGKGQLCTYFLNTDLTRTGPPSATLG

SEQ ID NO: 796618 - protein, 414 aa, Homo sapiens
QRCVLKGPKMLHWLPALSGLVATRPGLRIALGTATILLVFAMAITSLFFFPTSSDCPFQAPNVSSMISNLSWELPGSLPLISVPYSMHCCTLGFLSCSLFLHMSFELKLLLLLLWLAASCSLFLHSHAWLSECLIVRLYLGPSGLQNEYYCRLDFLWKKKLRQEREETETMENLTRLLLENVLPAHVAPQFIGQNRRNEDLYHQSYECVCVLFASVPDFKEFYSESNINHEGLECLRLLNEIIADFDELLSKPKFSGVEKIKTIGSTYMAATGLNATSGQDAQQDAERSCSHLGTMVEFAVALGSKLDVINKHSFNNFRLRVGLNHGPVVAGVIGAQKPQYDIWGNTVNVASRMESTGVLGKIQVTEETAWALQSLGYTCYSRGVIKVKGKGQLCTYFLNTDLTRTGPPSATLG

SEQ ID NO: 796619 - protein, 442 aa, Homo sapiens
QRCVLKGPKMLHWLPALSGLVATRPGLRIALGTATILLVFAMAITSLFFFPTSSDCPFQAPNVSSMISNLSWELPGSLPLISVPYSMHCCTLGFLSCSLFLHMSFELKLLLLLLWLAASCSLFLHSHAWLSECLIVRLYLGPLDSRPGVLKEPKLMGAISFFIFFFTLLVLARQNEYYCRLDFLWKKKLRQEREETETMENLTRLLLENVLPAHVAPQFIGQNRRNEDLYHQSYECVCVLFASVPDFKEFYSESNINHEGLECLRLLNEIIADFDELLSKPKFSGVEKIKTIGSTYMAATGLNATSGQDAQQDAERSCSHLGTMVEFAVALGSKLDVINKHSFNNFRLRVGLNHGPVVAGVIGAQKPQYDIWGNTVNVASRMESTGVLGKIQVTEETAWALQSLGYTCYSRGVIKVKGKGQLCTYFLNTDLTRTGPPSATLG

SEQ ID NO: 796620 - protein, 308 aa, Homo sapiens
MAPGDPPQNEYYCRLDFLWKKKLRQEREETETMENLTRLLLENVLPAHVAPQFIGQNRRNEDLYHQSYECVCVLFASVPDFKEFYSESNINHEGLECLRLLNEIIADFDEPDPLTPKAWGWASGRGDGESKRDWDRTLLYIQLLSKPKFSGVEKIKTIGSTYMAATGLNATSGQDAQQDAERSCSHLGTMVEFAVALGSKLDVINKHSFNNFRLRVGLNHGPVVAGVIGAQKPQYDIWGNTVNVASRMESTGVLGKIQVTEETAWALQSLGYTCYSRGVIKVKGKGQLCTYFLNTDLTRTGPPSATLG

SEQ ID NO: 796621 - protein, 232 aa, Homo sapiens
MAPGDPPQNEYYCRLDFLWKKKLRQEREETETMENLTRLLLENVLPAHVAPQFIGQNRRNEDLYHQSYECVCVLFASVPDFKEFYSESNINHEGLECLRLLNEIIADFDEPDPLTPKAWGWASGRGDGESKRDWDRTLLYIQLLSKPKFSGVEKIKTIGSTYMAATGLNATSGQDAQQDAERSCSHLGTMVEFAVALGSKLDVINKHSFNNFRLRVGERLPLLQQSGTSSPS

SEQ ID NO: 796622 - protein, 145 aa, Homo sapiens
MERVRETGDRTLLYIQLLSKPKFSGVEKIKTIGSTYMAATGLNATSGQDAQQVRQPFLTYHPPLGSHLMGLLVGLIPVPSLAHPGGRAHCQDAERSCSHLGTMVEFAVALGSKLDVINKHSFNNFRLRVGERLPLLQQSGTSSPS

SEQ ID NO: 796623 - protein, 90 aa, Homo sapiens
SQPEIAGSTPLDESSPDSSLGQLKPSTSHHCAQEATCLFNSSSPLQFFFPTSSDCPFQAPNVSSMISNLSWELPGSLPLISVPVSVPTCP

SEQ ID NO: 796624 - protein, 241 aa, Homo sapiens
RPVTCRGRQHRALEMKTLFLGVTLGLAAALSFTLEEEDITGTWYVKAMVVDKDFPEDRRPRKVSPVKVTALGGGNLEATFTFMREDRCIQKKILMRKTEEPGKFSAYGGRKLIYLQELPGTDDYVFYCKDQRRGGLRYMGKLVAAPCRAVPLSPPWLTWPPHLQVGILIPTWRPWKNLRNWCSTRDSRRRTFSCPCRREAAFSNTRQPPGLHLQSPPYHQTQSPDHLDLPSSHDPSLLPPT

SEQ ID NO: 796625 - protein, 184 aa, Homo sapiens
RPVTCRGRQHRALEMKTLFLGVTLGLAAALSFTLEEEDITGTWYVKAMVVDKDFPEDRRPRKVSPVKVTALGGGNLEATFTFMREDRCIQKKILMRKTEEPGKFSAYGGRKLIYLQELPGTDDYVFYCKDQRRGGLRYMGKLVGRNPNTNLEALEEFKKLVQHKGLSEEDIFMPLQTGSCVLEH

SEQ ID NO: 796626 - protein, 160 aa, Homo sapiens
RPVTCRGRQHRALEMKTLFLGVTLGLAAALSFTLEEEDEGGSVHPEENPDAEDGGAWQIQRLWGQEAHIPAGAARDGRLRLLLQRPAPWGPALHGKACGCSLQGRAAVPTLAHLATSPAGRNPNTNLEALEEFKKLVQHKGLSEEDIFMPLQTGSCVLEH

SEQ ID NO: 796627 - protein, 90 aa, Homo sapiens
MPPRVVTHQRKCNFWPPAQLQGPSDSSNSNCTSRRSEAHAGWASVQRLGRAPWPLSFSLLPFTLLPLPKDCNQLPVLNPSLLEIPPVQSK

SEQ ID NO: 796628 - protein, 73 aa, Homo sapiens
GERAPQVPFIRALVPFRLMGLNQTLAECCGFFACSSSPQFAKADKADTMGLSTIFFHIHKMSALPVSDWQYPA

SEQ ID NO: 796629 - protein, 226 aa, Homo sapiens
MALSDVDVKKQIKHMMAFIEQEANEKAEEIDAKAEEEFNIEKGRLVQTQRLKIMEYYEKKEKQIEQQKKILMSTMRNQARLKVLRARNDLISDLLSEAKLRLSRIVEDPEVYQGLLDKLVLQGLLRLLEPVMIVRCRPQDLLLVEAAVQKAIPEYMTISQKHVEVQIDKEAYLAVNAAGGVEVYSGNQRIKVSNTLESRLDLSAKQKMPEIRMALFGANTNRKFFI

SEQ ID NO: 796630 - protein, 226 aa, Homo sapiens; identical to SEQ ID NO: 796629

SEQ ID NO: 796631 - protein, 226 aa, Homo sapiens; identical to SEQ ID NO: 796629

SEQ ID NO: 796632 - protein, 226 aa, Homo sapiens; identical to SEQ ID NO: 796629

SEQ ID NO: 796633 - protein, 226 aa, Homo sapiens; identical to SEQ ID NO: 796629

SEQ ID NO: 796634 - protein, 141 aa, Homo sapiens
VKAEPRRGRAITRAHGAFCLLPLGPTRLRPRESRTRAFPGMLGLPPARVRTGRRPFRCPSSFGITQCTARCAGKMCLSGFPRLWSLHSCSTKGSSSAERWIVPCCLVIPERELTVCLSRLVCLLPSLEKHAIPKTYYPEKQ

SEQ ID NO: 796635 - protein, 123 aa, Homo sapiens
VKAEPRRGRAITRAHGAFCLLPLGPTRLRPRESRTRAFPGMLGLPPARVRTGRRPFRCPSSFGITQCTARCAGKMCLSGFPRLWSLHSCSTKGSSSAERWIVPCCLVIPEKHAIPKTYYPEKQ

SEQ ID NO: 796636 - protein, 226 aa, Homo sapiens
RDPLLCVEFFRLLLETMPKVVSRSVVCSDTRDREEYDDGEKPLHVYYCLCGQVVLVLDCQLEKLPMRPRDRSRVIDAAKHAHKFCNTEDEETMYLRRPEGIELQYRKKCAKCGLLLFYQSQPKNAPVTFIVDGAVVKFGQGFGKTNIYTQKQEPPKKVMMTKRTKDMGKFSSVTVSTIDEEEEEIEAREVADSYAQNAKVIEKQLERKGMSKRPLQELAEWEPQEK

SEQ ID NO: 796637 - protein, 83 aa, Homo sapiens
ESHISQLDSISLSLKWNQPMCTQDRIQGGDPWKEHRPPALRRHGHHSRPTSSWRRAREWKKQETLFTRLRSHPRAREIGQGLW

SEQ ID NO: 796638 - protein, 69 aa, Homo sapiens
SRSDFPGATVPGLRGALPHSQRRKPLSKAWGHLESRNFRAEASHRDHPAPSLCRGEHRPEQGGDLPKGT

SEQ ID NO: 796639 - protein, 80 aa, Homo sapiens
PLGATSLGPPSRACAAPCRTPSAGSPCRRPGATLKAGISERRRATETCQKARKHLALSQSWSSGPQSSVQGTPGLFLTKL

SEQ ID NO: 796640 - protein, 123 aa, Homo sapiens
RLCACAWVVCGACMCVGCICVAWWVCVCLHVCGMCVWVVVFAGPVVAALPEVGTSAPQLPAWSSLVGGPPASPAGCMRFSMVLPVCHLPFVIALSDRQLFNILAKVAFVVFFFLKPLKLRVKK

SEQ ID NO: 796641 - protein, 260 aa, Homo sapiens
MRRARAKATFATWIGRRSFGRPDLRKSHICAPVRPLLLRMLRHVKKFEEGNFAAFLAWLPGVASKFGGATAAVMFLLLNCIVAVSQNMGIGKNGDLPRPPLRNEFRYFQRMTTTSSVEGKQNLVIMGRKTWFSIPEKNRPLKDRINLVLSRELKEPPQGAHFLSRSLDDALKLTEQPELANKVDMVWIVGGSSVYKEAMNHPGHLKLFVTRIMQDFESDTFFPEIDLEKYKLLPEYPGVLSDVQEEKGIKYKFEVYEKND

SEQ ID NO: 796642 - protein, 73 aa, Homo sapiens
NCSSRKSGPTLWPPSGRHRQQQAGQASPQDPVWHACATPCVALPCHGSGRQALAAKGMVDLSSGPLEACVDVS

SEQ ID NO: 796643 - protein, 101 aa, Homo sapiens
QKVCTGCRSKLKPYFLKETCGGHPVFKALSKHALSHKTIHTSSVTLFTLFCFIVFRALTLPCLFFTRHSFMRTERLLVLFTSVSPVPRTVYRTQIAPQNFN

SEQ ID NO: 796644 - protein, 120 aa, Homo sapiens
QNRKGHLPEAPDLENQLHNPRNFQGNYISYIDGNVWKVYSWTEKLILRENNLTELHKDSFEGLLSLQYLDLSCNKIQSIERHTFEPLPFLKFINLSCNVITELSFGTFQAWHEMQFLHKL

SEQ ID NO: 796645 - protein, 45 aa, Homo sapiens
MYMEVPTDVSGVVCRPSTRFQGFEERSCFRKRQNNSDNSSGILEV

SEQ ID NO: 796646 - protein, 96 aa, Homo sapiens
ATVCRTPHFSTSHLNRHLLNRPVPTCCHGNEYHPATMLYTGWAGQARRLQVSSKSRFGFLILRHLRSGKVISFPWKPFSLHFISLFLTPKPQVAEH

SEQ ID NO: 796647 - protein, 192 aa, Homo sapiens
TNHLNQVADMNLVICVLLLSIWKNNCMTTNQTNGSSTTGDKPVESMQTKLNYLRRNLLILVGIIIMVFVFICFCYLHYNCLSDDASKAGMVKKKGIAAKSSKTSFSEAKTASQCSPETQPMLSTADKSSDSSSPERASAQSSTEKLIRPSSLQKPSIPNSAGKLTRPSYPKRSFQVIMLKKIKQVISPGKGT

SEQ ID NO: 796648 - protein, 72 aa, Homo sapiens
NALIEAGAHMDATNAFKKTAYTLLEEKLLARGTMQPFSYVTLQCLAAQALGKNKIPYKGFIPEDLEAFIELH

SEQ ID NO: 796649 - protein, 66 aa, Homo sapiens
METIDGKVRLQMLGEPGLGAEKGLQLGMPGTLLPLLNPTQGRFLAPPFSPPRSSPESPTESVGYRA

SEQ ID NO: 796650 - protein, 570 aa, Homo sapiens
YAFTHLSLQEFLAALHLMASPKVNKDTLTQYVTLHSRWVQRTKARLGLSDHLPTFLAGLASCTCRPFLSHLAQGNEDCVGAKQAAVVQVLKKLATRKLTGPKVVELCHCVDETQEPELASLTAQSLPYQLPFHNFPLTCTDLATLTNILEHREAPIHLDFDGCPLEPHCPEALVGCGQIENLSFKSRKCGDAFAEALSRSLPTMGRLQMLGLAGSKITARGISHLVKALPLCPQLKEVSFRDNQLSDQVVLNIVEVLPHLPRLRKLDLSSNSICVSTLLCLARVAVTCPTVRMLQAREADLIFLLSPPTETTAELQRAPDLQESDGQRKGAQSRSLTLRLQKCQLQVHDAEALIALLQEGPHLEEVDLSGNQLEDEGCRLMAEAASQLHIARKLDLSNNGLSVAGVHCVLRAVSACWTLAELHISLQHKTVIFMFAQEPEEQKGPQERAAFLDSLMLQMPSELPLSSRRMRLTHCGLQEKHLEQLCKALGGSCHLGHLHLDFSGNALGDEGAARLAQLLPGLGALQSLNLSENGLSLDAVLGLVRCFSTLQWLFRLDISFEANIILLNGS

SEQ ID NO: 796651 - protein, 448 aa, Homo sapiens
YAFTHLSLQEFLAALHLMASPKVNKDTLTQYVTLHSRWVQRTKARLGLSDHLPTFLAGLASCTCRPFLSHLAQGNEDCVGAKQAAVVQVLKKLATRKLTGPKVVELCHCVDETQEPELASLTAQSLPYQLPFHNFPLTCTDLATLTNILEHREAPIHLDFDGCPLEPHCPEALVGCGQIENLSFKSRKCGDAFAEALSRSLPTMGRLQMLGLAGSKITARGISHLVKALPLCPQLKEVSFRDNQLSDQVVLNIVEVLPHLPRLRKLDLSSNSICVSTLLCLARVAVTCPTVRMLQAREADLIFLLSPPTETTAELQRAPDLQESDGQRKGAQSRSLTLRLQKCQLQVHDAEALIALLQEGPHLEEVDLSGNQLEDEGCRLMAEAASQLHIARKLDLSNNGLSVAGVHCVLRAVSACWTLAELHISLQHKTVIFMFAQEPEEQKGPQER

SEQ ID NO: 796652 - protein, 211 aa, Homo sapiens
YAFTHLSLQEFLAALHLMASPKVNKDTLTQYVTLHSRWVQRTKARLGLSDHLPTFLAGLASCTCRPFLSHLAQGNEDCVGAKQAAVVQVLKKLATRKLTGPKVVELCHCVDETQEPELASLTAQSLPYQLPFHNFPLTCTDLATLTNILEHREAPIHLDFDGCPLEPHCPEALVGCGQIENLSFKSRKCGDAFAEALSRSLPTMGRLQMLG

SEQ ID NO: 796653 - protein, 375 aa, Homo sapiens
  misc_feature (23)..(24): Xaa can be any naturally occurring amino acid
  misc_feature (27)..(27): Xaa can be any naturally occurring amino acid
  misc_feature (31)..(31): Xaa can be any naturally occurring amino acid
  misc_feature (33)..(33): Xaa can be any naturally occurring amino acid
  misc_feature (37)..(37): Xaa can be any naturally occurring amino acid
  misc_feature (68)..(68): Xaa can be any naturally occurring amino acid
  misc_feature (75)..(75): Xaa can be any naturally occurring amino acid
AFAKTLSKNLQKKGKLQKLGLKXXKKXERRXNXMVKXLHLCPKLKKINFREKKINKKVVLKNVEVLPXIKRLRKXNLSSNSICVSTLLCLARVAVTCPTVRMLQAREADLIFLLSPPTETTAELQRAPDLQESDGQRKGAQSRSLTLRLQKCQLQVHDAEALIALLQEGPHLEEVDLSGNQLEDEGCRLMAEAASQLHIARKLDLSNNGLSVAGVHCVLRAVSACWTLAELHISLQHKTVIFMFAQEPEEQKGPQERAAFLDSLMLQMPSELPLSSRRMRLTHCGLQEKHLEQLCKALGGSCHLGHLHLDFSGNALGDEGAARLAQLLPGLGALQSLNLSENGLSLDAVLGLVRCFSTLQWLFRLDISFEANTSS

SEQ ID NO: 796654 - protein, 219 aa, Homo sapiens
MGIEGGLQPHNTVHWAPRLSLSGNQLEDEGCRLMAEAASQLHIARKLDLSNNGLSVAGVHCVLRAVSACWTLAELHISLQHKTVIFMFAQEPEEQKGPQERAAFLDSLMLQMPSELPLSSRRMRLTHCGLQEKHLEQLCKALGGSCHLGHLHLDFSGNALGDEGAARLAQLLPGLGALQSLNLSENGLSLDAVLGLVRCFSTLQWLFRLDISFEANTSS

SEQ ID NO: 796655 - protein, 66 aa, Homo sapiens
RVCASGRRGSRGLRLQPAAERGQAAETGELFAFPGSHFYMRRNPTHSYSVRLPRKGCSAVAALVRQ

SEQ ID NO: 796656 - protein, 187 aa, Homo sapiens
ASAPPAAAAPGASACSRRRNEGRRLRQASYLHSPAVIFICGGNEVVSGAPSVAEPDIQIALPAPPAPARWSREPQAARALHRIAALPRDRARLLVLPRAFVSVSFSFPSSFVSGQTQPQKPATLPRPTARDPSRREKPNTQLFCQAAEKRLFGSCSPGEAMRRKGGRTCLEWLKEGSEHPRSWGWFS

SEQ ID NO: 796657 - protein, 89 aa, Homo sapiens
FEAKQPFTPLLKIPVNEVRTGPFQSASHFQGGTVVAFQCRSAQERRPNSPPALTFAHHTSQLQLAITVVPGTVAATSEGRHFSKHLFLG

SEQ ID NO: 796658 - protein, 84 aa, Homo sapiens
PSPPELRWSQRDRSRGFAWTAFLTRAESRTQYSVTFCPSKNVSHFKKMRVPTLPCPAVPQSLSPTLKPWEGHTPFDRCRLNTAD

SEQ ID NO: 796659 - protein, 109 aa, Homo sapiens
  misc_feature (9)..(9): Xaa can be any naturally occurring amino acid
MSFWHMYVXTHCIPASRPLHCPQMLPQLCDHAVSQPGKLEAGIKTRQTGRRCIRSLGPDAVGPLPPCMPVTWNTRVVPRTMRTGEQLFPLSDYQALVGGQTGRRRLSLP

SEQ ID NO: 796660 - protein, 342 aa, Homo sapiens
MQAVDNLTSAPGNTSLCTRDYKITQVLFPLLYTVLFFVGLITNGLAMRIFFQIRSKSNFIIFLKNTVISDLLMILTFPFKILSDAKLGTGPLRTFVCQVTSVIFYFTMYISISFLGLITIDRYQKTTRPFKTSNPKNLLGAKILSVVIWAFMFLLSLPNMILTNRQPRDKNVKKCSFLKSEFGLVWHEIVNYICQVIFWINFLIVIVCYTLITKELYRSYVRTRGVGKVPRKKVNVKVFIIIAVFFICFVPFHFARIPYTLSQTRDVFDCTAENTLFYVKESTLWLTSLNACLDPFIYFFLCKSFRNSLISMLKCPNSATSLSQDNRKKEQDGGDPNEETPM

SEQ ID NO: 796661 - protein, 342 aa, Homo sapiens; identical to SEQ ID NO: 796660

SEQ ID NO: 796662 - protein, 324 aa, Homo sapiens
MQAVDNLTSAPGNTSLCTRDYKITQVLFPLLYTVLFFVGLITNGLAMRIFFQIRSKSNFIIFLKNTVISDLLMILTFPFKILSDAKLGTGPLRTFVCQVTSVIFYFTMYISISFLGLITIDRYQKTTRPFKTSNPILSLPNMILTNRQPRDKNVKKCSFLKSEFGLVWHEIVNYICQVIFWINFLIVIVCYTLITKELYRSYVRTRGVGKVPRKKVNVKVFIIIAVFFICFVPFHFARIPYTLSQTRDVFDCTAENTLFYVKESTLWLTSLNACLDPFIYFFLCKSFRNSLISMLKCPNSATSLSQDNRKKEQDGGDPNEETPM

SEQ ID NO: 796663 - protein, 104 aa, Homo sapiens [sequence omitted]

SEQ ID NO: 796664 - protein, 155 aa, Homo sapiens
ASARRSPGTGTQSRGRLWGRQGSGLPRRRLTGGNRPRALGRGTQGLPTGLRGTQRPRHRIRPNPVPSRNGLLQLQSACRILSAKLEHKAAHQPSTDLNRQLRREPGMPALKCSPLEVFPCQRKKPSLVSRWSGVQDQPGQHGETPSLQKNTNISQ

SEQ ID NO: 796665 - protein, 46 aa, Homo sapiens
TSGSSLPFGIPSCFLVPEGFLFSKAGDRIIQALGLSGPGSGPADPL

SEQ ID NO: 796666 - protein, 102 aa, Homo sapiens
KLCSVLTQKTYNLIGNKQRNDHVDLPKLVSPGLQISVAYILTQVCLRPTHTSFRCQVLQLGSPRGLLAPAFHLHGLLTQVTALDWPAMGDTLLFFHQLGLIN

SEQ ID NO: 796667 - protein, 162 aa, Homo sapiens
GRRRPGPTSTSGVTREETGRKRNSGWLRGKPIQLGLRRLQGGGPKEVLAPPFKGPSLRVWEWDSRRLHRRKQDKTRELRRVTALIPSVPAAARTQAPLYPAVRRWSRGEGAPAGPLPRPAALPLLSQQPTASPALDPAGELPLIPGSAPRVAAPQARSPSGA

SEQ ID NO: 796668 - protein, 103 aa, Homo sapiens [sequence omitted]

SEQ ID NO: 796669 - protein, 371 aa, Homo sapiens
ERRNHHWRSYKLMIDPALKKGHHKLYRYDGQHFSLAMSSNRPVEIVEDPRVVGIWTKNKELELSVPKFKIDEFYVGPVPPKQVTFAKLNDNIRENFLRDMCKKYGEVEEVEILYNPKTKKHLGIAKVVFATVRGAKDAVQHLHSTSVMGNIIHVELDTKGETRMRFYELLVTGRYTPQTLPVGELDAVSPIVNETLQLSDALKRLKDGGLSAGCGSGSSSVTPNSGGTPFSQDTAYSSCRLDTPNSYGQGTPLTPRLGTPFSQDSSYSSRQPTPSYLFSQDPAVTFKARRHESKFTDAYNRRHEHHYVHNSPAVTAVAGATAAFRGSSDLPFGAVGGTGGSSGPPFKAQPQDSATFAHTPPPAQATPAPGF

SEQ ID NO: 796670 - protein, 306 aa, Homo sapiens
  misc_feature (306)..(306): Xaa can be any naturally occurring amino acid
ERRNHHWRSYKLMIDPALKKGHHKLYRYDGQHFSLAMSSNRPVEIVEDPRVVGIWTKNKELELSVPKFKIDEFYVGPVPPKQVTFAKLNDNIRENFLRDMCKKYGEVEEVEILYNPKTKKHLGIAKVVFATVRGAKDAVQHLHSTSVMGNIIHVELDTKGETRMRFYELLVTGRYTPQTLPVGELDAVSPIVNETLQLSDALKRLKDGGLSAGCGSGSSSVTPNSGGTPFSQDTAYSSCRLDTPNSYGQGTPLTPRLGTPFSQDSSYSSRQPTPSYLFSQDPAVTFKARRHESKFTDADALMDELX

SEQ ID NO: 796671 - protein, 305 aa, Homo sapiens
ERRNHHWRSYKLMIDPALKKGHHKLYRYDGQHFSLAMSSNRPVEIVEDPRVVGIWTKNKELELSVPKFKIDEFYVGPVPPKQVTFAKLNDNIRENFLRDMCKKYGEVEEVEILYNPKTKKHLGIAKVVFATVRGAKDAVQHLHSTSVMGNIIHVELDTKGETRMRFYELLVTGRYTPQTLPVGELDAVSPIVNETLQDSSYSSRQPTPSYLFSQDPAVTFKARRHESKFTDAYNRRHEHHYVHNSPAVTAVAGATAAFRGSSDLPFGAVGGTGGSSGPPFKAQPQDSATFAHTPPPAQATPAPGF

SEQ ID NO: 796672 - protein, 69 aa, Homo sapiens
RPSTAAEHLVVVTVDAGCREARTPIPGFGLTLRLMQRAQRGAAGRDLLAGVPASSCLLHVNPESGGPSV

SEQ ID NO: 796673 - protein, 159 aa, Homo sapiens
SNTAPESDILDQEREDDFFMAFHTLPRRSSPHPFAQNGGEDGGGGLQGGVGALKRSSSMFIPQLLTSIDARPTCSSSVQISLQRKATDGATDGCGPPEGADDGPPCATPDPRDQASATATTRASPQSGSREPSPRDTPGSSPPRAARDPGLQVNGTCGR

SEQ ID NO: 796674 - protein, 164 aa, Homo sapiens
SAGKSVQCRKGQAESWLPAPNACLPPWGPGWHRSQACQWETWGKLGALVQQPALQQQAWPLEAVVLLASRIAFPFFLELQPLRKSEALAGTLPLCCAFTQRSIRADSQFQHCSWLGSALISGSPHRESAGPRGCGCLRAGLPCDSLLSWAWEWTPPIPAVHPVE

SEQ ID NO: 796675 - protein, 104 aa, Homo sapiens
YSFPALHPTSWAHCPHGQGILAETSAGPWGRRLLLTQQMGGWGDGEGYVFPTLPRSPVPLCHPCFHICPLGLETQALYSETLRPSGSPSKAALGEGCYRALLSC

SEQ ID NO: 796676 - protein, 79 aa, Homo sapiens
CGHESLEETNPQLTGAEGLVVRPNLARIGTISEPEEDSGGGELCPVVFTDWGAGARLFLGQNPVIGIVLTSTSAQLLWS

SEQ ID NO: 796677 - protein, 79 aa, Homo sapiens; identical to SEQ ID NO: 796676

SEQ ID NO: 796678 - protein, 184 aa, Homo sapiens [sequence omitted]

SEQ ID NO: 796679 - protein, 148 aa, Homo sapiens
LNFSLASWLPKGYTASAGLMSQNFDVAGLRHHFAIHYPGRGGLLDGLPGVAAVWGITKTEVLTIFQQVTVGGDLSLQLDLDVQQGLLLLGLALSLCRVCASSDSRCSRIQSTGSAPSAGCSGPPPPSGCSASWPSDFSCSPGQYPRTG

SEQ ID NO: 796680 - protein, 136 aa, Homo sapiens
  misc_feature (46)..(46): Xaa can be any naturally occurring amino acid
RQDSLPVSPSHRLHLSKPPFHSLSHLQPGDISLLLCTLFLSRIFAXQALTCTCSPPPPPALSPLIALPPSPFPRCAPSSSPPRPASPILPPLYRLCPISLPPFVPTSPPPPSPPLLSSLFPSALSPFSLLSPSRLR

SEQ ID NO: 796681 - protein, 42 aa, Homo sapiens
VPAARAPMETGSCPQVHLGCGGGWFHPGSVCASEKPTQGSTS

SEQ ID NO: 796682 - protein, 137 aa, Homo sapiens
CFPLLLLLSGWSGSGRADTHCLCYDFIITPKFRPEPRWCEVQGLVDERPFLHYDCVNHKAKAFASLRKKVNVTKTWEEQTETLRDFSLLSHTSTLRQTETLRDVGDFLKGQLPDIEMENVIPIGKFKIVQDSREQTQ

SEQ ID NO: 796683 - protein, 113 aa, Homo sapiens [sequence omitted]

SEQ ID NO: 796684 - protein, 147 aa, Homo sapiens
LRPPEQLPRRSRSRMVRGARQPQQPRSRLAPRLTGTVEKPPRKRRSRTEFTLKEIMSSGGAEDDIPQGERKTVTDFCYLLDKSKQLFNGLRLECDGAILLTATSASWVQVILLPPSDSPASKRFSCLGTHRPPTPSSWDYRCLSPCP

SEQ ID NO: 796685 - protein, 303 aa, Homo sapiens
LRPPEQLPRRSRSRMVRGARQPQQPRSRLAPRLTGTVEKPPRKRRSRTEFTLKEIMSSGGAEDDIPQGERKTVTDFCYLLDKSKQLFNGLRDLPQYGQKQWQSYFGRTFDVYTKLWKFQQQHRQVLDNRYGLKRWQIGEIASKIGQLYYHYYLRTSETSYLNEAFSFYSAIRQRSYYSQVNKEDRPELVVKKLRYYARFIVVCLLLNKMDVVKDLVKELSDEIEDYTHRFNTEDQVEWNLVLQEVAAFIEADPVMVLNDDNTIVITSNRLAETGAPLLEQGMIVGQLSLADALIIGNCNNQVK

SEQ ID NO: 796686 - protein, 384 aa, Homo sapiens
MARALVQLWAICMLRVALATVYFQEEFLDGEHWRNRWLQSTNDSRFGHFRLSSGKFYGHKEKDKGLQTTQNGRFYAISARFKPFSNKGKTLVIQYTVKHEQKMDCGGGYIKVFPADIDQKNLNGKSQYYIMFGPDICGFDIKKVHVILHFKNKYHENKKLIRCKVDGFTHLYTLILRPDLSYDVKIDGQSIESGSIEYDWNLTSLKKETSPAESKDWEQTKDNKAQDWEKHFLDASTSKQSDWNGDLDGDWPAPMLQKPPYQDGLKPEGIHKDVWLHRKMKNTDYLTQYDLSEFENIGAIGLELWQVRSGTIFDNFLITDDEEYADNFGKATWGETKGPEREMDAIQAKEEMKKAREEEEEELLSGKINRHEHYFNQFHRRNEL

SEQ ID NO: 796687 - protein, 316 aa, Homo sapiens
MARALVQLWAICMLRVALATVYFQEEFLDGEHWRNRWLQSTNDSRFGHFRLSSGKFYGHKEKDKGPDICGFDIKKVHVILHFKNKYHENKKLIRCKVDGFTHLYTLILRPDLSYDVKIDGQSIESGSIEYDWNLTSLKKETSPAESKDWEQTKDNKAQDWEKHFLDASTSKQSDWNGDLDGDWPAPMLQKPPYQDGLKPEGIHKDVWLHRKMKNTDYLTQYDLSEFENIGAIGLELWQVRSGTIFDNFLITDDEEYADNFGKATWGETKGPEREMDAIQAKEEMKKAREEEEEELLSGKINRHEHYFNQFHRRNEL

SEQ ID NO: 796688 - protein, 72 aa, Homo sapiens
PRLARQSPTSPTVPDQPDSLHQPGSCLTLAPLGPAHASRWPLRAQLPPSLTAPPGPKLPSSMWPKVAQSVPK

SEQ ID NO: 796689 - protein, 135 aa, Homo sapiens
TRRQNPADLRCTVLHVFPGHSRLIILLQREMLYISSSAGPWGSPRPFLSAYRLSCLIIHSRNFARAQLCELWCLATLSDQPFSFVGAPGQSSLCPSPVSVPSHCACGPRMQSLCTYGRSCQHPKQNEAALGTRVN

SEQ ID NO: 796690 - protein, 239 aa, Homo sapiens
MQDPNADTEWNDILRKKGILPPKESLKELEEEAEEEQRILQQSVVKTYEDMTLEELEDHEDEFNEEDERAIEMYRRRRLAEWKATKLKNKFGEVLEISGKDYVQEVTKAGEGLWVILHLYKQGIPLCALINQHLSGLARKFPDVKFIKAISTTCIPNYPDRNLPTIFVYLEGDIKAQFIGPLVFGGMNLTRDELEWKLSESGAIMTDLEENPKKPIEDVLLSSVRRSVLMKRDSDSEGD

SEQ ID NO: 796691 - protein, 239 aa, Homo sapiens; identical to SEQ ID NO: 796690

SEQ ID NO: 796692 - protein, 221 aa, Homo sapiens
MQDPNADTEWNDILRKKGILPPKESLKELEEEAEEEQRILQQSVVKTYEDMTLEELEDHEDEFNEEDERAIEMYRRRRLAEWKATKLKNKFGEVLEISGKDYVQEVTKAGEGLWVILHLYKQGIPLCALINQHLSGLARKFPDVKFIKAISTTCIPNYPDRNLPTIFVYLEGDIKAQFIGPLVFGGMNLTRDELEWKLSESGAIMTDLEDLMKRDSDSEGD

SEQ ID NO: 796693 - protein, 97 aa, Homo sapiens
GACNHLHLFPGKDSAPGDSLLAMGMRTNSPFILEIGLPPHILEEPTEKPAGLPHLDGASGWPGPPRGPLLHLTGSPWGIRLPCHFHCGHWKCGRENS

SEQ ID NO: 796694 - protein, 115 aa, Homo sapiens
WNQCCRAGDQCLWPVKPSPKTFWEALRVSEEPGRKDSLLAMGMRTNSPFILEIGLPPHILEEPTEKPAGLPHLDGASGWPGPPRGPLLHLTGSPWGIRLPCHFHCGHWKCGRENS

SEQ ID NO: 796695 - protein, 319 aa, Homo sapiens
TALLYKPIDRVTRSTLVLHDLLKHTPVDHPDYPLLQDALRISQNFLSSINEDIDPRRTAVTTPKGETRQLVKDGFLVEVSESSRKLRHVFLFTDVLLCAKLKKTSAGKHQQYDCKWYIPLADLVFPSPEESEASPQVHPFPDHELEDMKMKISALKSEIQKEKANKGQSRAIERLKKKMFENEFLLLLNSPTIPFRIHNRNGKSYLFLLSSDYERSEWREAIQKLQKKDLQAFVLSSVELQVLTGSCFKLRTVHNIPVTSNKDDDESPGLYGFLHVIVHSAKGFKQSANLYCSLEVDSFGYLVSKAKTRVFRDTAEPNW

SEQ ID NO: 796696 - protein, 186 aa, Homo sapiens
SRGSMHHSRHELEDMKMKISALKSEIQKEKANKGQSRAIERLKKKMFENEFLLLLNSPTIPFRIHNRNGKSYLFLLSSDYERSEWREAIQKLQKKDLQAFVLSSVELQVLTGSCFKLRTVHNIPVTSNKDDDESPGLYGFLHVIVHSAKGFKQSANLYCSLEVDSFGYLVSKAKTRVFRDTAEPNW

SEQ ID NO: 796697 - protein, 56 aa, Homo sapiens
MSDRMDLRRRYNTHPMMHGWPPQTLMQATPWRSLSWPGSVLFTLLEEHWPGTVAHT

SEQ ID NO: 796698 - protein, 140 aa, Homo sapiens
MGLREMCVGEKRTVIIPPHLGYGEAGVDGEVPGSAVLVFDIELLELVAGLPEGYMFIWNGEVSPNLFEEIDKDGNGEVLLEEFSEYIHAQVASGKGKLAPGFDAELIVKNMFTNQDRNGDGKVTAEEFKLKDQEAKQDEL

SEQ ID NO: 796699 - protein, 108 aa, Homo sapiens
GEMDMFAVLGVVIALWFLHCVCVCVCVCVNDRLLCVPIKSRNLLSYPLRKKFDDNWIRSIIIHLCVFRALGSAIIGGQGAATQDGPCLNRAVLIYLWHRFGFWLSSKI

SEQ ID NO: 796700 - protein, 108 aa, Homo sapiens
PQPSPGLWAAVCLLCCFFLVLSHSGYPFIQLCPLNLWIVMLEGCSFLLHKGIALTRIITQQSHSYPFSFSFSSKSLGRETAPSSTDGEDQIGLGTLRDAVNSMLQGLS

SEQ ID NO: 796701 - protein, 68 aa, Homo sapiens
FPFWRPLVLVTAACWEMESEGRDLCYLWECGLEGTEERGAEGARNQAGAVAHAGIIGVSHHARPDLAN

SEQ ID NO: 796702 - protein, 264 aa, Homo sapiens
LSCGRGSLFRRMGFVKVVKNKAYFKRYQVKFRRRREGKTDYYARKRLVIQDKNKYNTPKYRMIVRVTNRDIICQIAYARIEGDMIVCAAYAHELPKYGVKVGLTNYAAAYCTGLLLARRLLNRFGMDKIYEGQVEVTGDEYNVESIDGQPGAFTCYLDAGLARTTTGNKVFGALKGAVDGGLSIPHSTKRFPGYDSESKEFNAEVHRKHIMGQNVADYMRYLMEEDEDAYKKQFSQYIKNSVTPDMMEEMYKESSCCYTRESSL

SEQ ID NO: 796703 - protein, 358 aa, Homo sapiens
MATADTPAPASSGLSPKEEGELEDGEISDDDNNSQIRSRSSSSSSGGGLLPYPRRRPPHSARGGGSGGGGGSSSSSSSSQQQLRNFSRSRHASERGHLRGPSSYRPKEPFRSHPPSVRMPSSSLSESSPRPSFWERSHLALDRFRFRGRPYRGGSRWSRGRGVGERGGKPGCRPPLGGGAGSGFSSSQSWREPSPPRKSSKSFGRSPSRKQNYSSKNENCVEETFEDLLLKYKQIQLELECINKDEKLALSSKEENVQEDPKTLNFEDQTSTDNVSITKDSSKEVAPEEKTQVKTFQAFELKPLRQKLTLPGDKNRLKKVKDGAKPLSLKSDTTDSSQGIPYRVKEGFTPIPGLKFSA

SEQ ID NO: 796704 - protein, 212 aa, Homo sapiens
MATADTPAPASSGLSPKEEGELEDGEISDDDNNSQIRSRSSSSSSGGGLLPYPRRRPPHSARGGGSGGGGGSSSSSSSSQQQLRNFSRSRHASERGHLRGPSSYRPKEPFRSHPPSVRMPSSSLSESSPRPSFWERSHLALDRFRFRGRPYRGGSRWSRGRGVGERGGKPGCRPPLGGGAGSGFSSSQSWREPSPPRKSCILNVAVGAGCCT

SEQ ID NO: 796705 - protein, 102 aa, Homo sapiens
PSPTPAGQQVLDVDSCLDSSVLDSSFLTSEASTLSEGSTGGPAALAQLGLKTLCTSQQAFAGQMKSDLFLDDSKRLSILWLTIVIVGLTLVEVLGYLSLLCF

SEQ ID NO: 796706 - protein, 91 aa, Homo sapiens
GMPSSISLRRDSQPLDFPRAASCRLVPNDDSLTWTQPVGNILTFVARLQGHRWFGDSQTMIQQTCEAVSSLSEHNLQVVLCHIPGTKLQAQ

SEQ ID NO: 796707 - protein, 84 aa, Homo sapiens
GMPSSISLRRDSQPLDFPRAASCRLVPNDDSLTWTQPVGNILTFVARLQGHRWFGDSQTMIQQTCEAVSSLSEHNLQEALEHIT

SEQ ID NO: 796708 - protein, 147 aa, Homo sapiens
  misc_feature (70)..(70): Xaa can be any naturally occurring amino acid
  misc_feature (78)..(78): Xaa can be any naturally occurring amino acid
MGKEKTHINIVVIGHVDSGKSTTTGHLIYKCGGIDKRTIEKFEKEAAEMGKAPSSMPGSGKLKAERERGXTIDISCGXGDQQYYVTIIDAPGHRDFDNVITGTSQVDCAVLIVAAGVGEFEAGISKNGQTSEHALLAYTLDVKQLIV

SEQ ID NO: 796709 - protein, 49 aa, Homo sapiens
MLTVSGHRGGARANRAHAHTVSGHRGGARANTRLSVYSVNKRSLRSYSG

SEQ ID NO: 796710 - protein, 47 aa, Homo sapiens
MVKPLAVPEAFSGPRASYTFCSESMPSTVPCPLAMPFVHQVEPPLKA

SEQ ID NO: 796711 - protein, 69 aa, Homo sapiens
HILDFLGTRERTLGITPDDDDSSPPLVVKDEECSPDCSWQPLCDQRGMSLWMKPTQWREGWRHGRNWAL

SEQ ID NO: 796712 - protein, 68 aa, Homo sapiens
ENTKGTGIEVNAWILQKVPRNPRPSLYSVGATGHVAAQHWKCAWPELRCPPESVRTCQILKIQFEKRM

SEQ ID NO: 796713 - protein, 88 aa, Homo sapiens
RQGSGVKWTVKVNHILSYSLLPAGALQAPPLVTTVEINCMCLNLRVQLLLDGGTFQSLVRPVSTQQVQMPSRCCDLPAISPFLSQPRK

SEQ ID NO: 796714 - protein, 396 aa, Homo sapiens
RNGRHLSLHSAAVAPALKLSRGAAAEAAVAPAPPCWWRSLCLLPTWRKGAGAHATGSVGLRPSSSYSDPRIPRPRSLYASSLAAGRPLHTAAVPCVWTACGRLARPHSPRLAAPLPSMSALEWYAHKSLGDGIFWIQERFYESGNRANIWLVRGSEQDVVIDTGLGLRSLPEYLYSSGLLQDREAKEDAARRPLLAVATHVHFDHSGGLYQFDRVAVHHAEAEALARGDNFETVTWLSDSEVVRAPSPGWRARQFRVQAVQPTLILQDGDVINLGDRQLTVMHMPGHSRGSICLHDKDRKILFSGDVVYDGSLIDWLPYSRISDYVGTCERLIELVDRGLVEKVLPGHFNTFGAERLFRLASNYISKAGICHKVSTFAMRSLASLALRVTNSRTSP

SEQ ID NO: 796715 - protein, 260 aa, Homo sapiens
MNSAAGFSHLDRRERVLKLGESFEKQPRCAFHTVRYDFKPASIDTSSEGYLEVGEGEQVTITLPNIEGSTPPVTVFKGSKKPYLKECILIINHDTGECRLEKLSSNITVKKTRVEGSSKIQYRKEQQQQQMWNSARTPNLVKHSPSEDKMSPASPIDDIERELKAEASLMDQMSSCDSSSDSKSSSSSSSEDSSSDSEDEDCKSSTSDTGNCVSGHPTMTQYRIPDIDASHNRFRDNSGLLMNTLRNDLQLSESGSDSDD

SEQ ID NO: 796716 - protein, 130 aa, Homo sapiens
MWNSARTPNLVKHSPSEDKMSPASPIDDIERELKAEASLMDQMSSCDSSSDSKSSSSSSSEDSSSDSEDEDCKSSTSDTGNCVSGHPTMTQYRIPDIDASHNRFRDNSGLLMNTLRNDLQLSESGSDSDD

SEQ ID NO: 796717 - protein, 271 aa, Homo sapiens
MRWCCAGSAVSLSSVPFSGSVICVFIWFFHAFFSNSIYSLLFSSFSDDFKPASIDTSSEGYLEVGEGEQVTITLPNIEGSTPPVTVFKGSKKPYLKECILIINHDTGECRLEKLSSNITVKKTRVEGSSKIQYRKEQQQQQMWNSARTPNLVKHSPSEDKMSPASPIDDIERELKAEASLMDQMSSCDSSSDSKSSSSSSSEDSSSDSEDEDCKSSTSDTGNCVSGHPTMTQYRIPDIDASHNRFRDNSGLLMNTLRNDLQLSESGSDSDD

SEQ ID NO: 796718 - protein, 130 aa, Homo sapiens; identical to SEQ ID NO: 796716

SEQ ID NO: 796719 - protein, 271 aa, Homo sapiens; identical to SEQ ID NO: 796717

SEQ ID NO: 796720 - protein, 282 aa, Homo sapiens
  misc_feature (3)..(5): Xaa can be any naturally occurring amino acid
  misc_feature (17)..(19): Xaa can be any naturally occurring amino acid
VRXXXHFFPGFGDSDLXXXKVIMNSAAGFSHLDRRERVLKLGESFEKQPRCAFHTVRYDFKPASIDTSSEGYLEVGEGEQVTITLPNIEGSTPPVTVFKGSKKPYLKECILIINHDTGECRLEKLSSNITVKKTRVEGSSKIQYRKEQQQQQMWNSARTPNLVKHSPSEDKMSPASPIDDIERELKAEASLMDQMSSCDSSSDSKSSSSSSSEDSSSDSEDEDCKSSTSDTGNCVSGHPTMTQYRIPDIDASHNRFRDNSGLLMNTLRNDLQLSESGSDSDD

SEQ ID NO: 796721 - protein, 249 aa, Homo sapiens
GVYMSRSLGESFEKQPRCAFHTVRYDFKPASIDTSSEGYLEVGEGEQVTITLPNIEGSTPPVTVFKGSKKPYLKECILIINHDTGECRLEKLSSNITVKKTRVEGSSKIQYRKEQQQQQMWNSARTPNLVKHSPSEDKMSPASPIDDIERELKAEASLMDQMSSCDSSSDSKSSSSSSSEDSSSDSEDEDCKSSTSDTGNCVSGHPTMTQYRIPDIDASHNRFRDNSGLLMNTLRNDLQLSESGSDSDD

SEQ ID NO: 796722 - protein, 130 aa, Homo sapiens; identical to SEQ ID NO: 796716

SEQ ID NO: 796723 - protein, 260 aa, Homo sapiens; identical to SEQ ID NO: 796715

SEQ ID NO: 796724 - protein, 260 aa, Homo sapiens; identical to SEQ ID NO: 796715

SEQ ID NO: 796725 - protein, 245 aa, Homo sapiens
MNSAAGFSHLDRRERVLKLGESFEKQPRCAFHTVRYDFKPASIDTSSEGYLEVGEGEQVTITLPNIEGSTPPVTVFKGSKKPYLKECILIINHDTGECRLEKLSSNITVKKTRVEGSSKIQYRKEQQQQQMWNSARTPNLVKHSPSEDKMSPASPIDDIERELKAEASLMDQMSSCDSSSDSKDEDCKSSTSDTGNCVSGHPTMTQYRIPDIDASHNRFRDNSGLLMNTLRNDLQLSESGSDSDD

SEQ ID NO: 796726 - protein, 69 aa, Homo sapiens
TCVGTHWLHGARFLFPEPCSPALCLSLPSRSAHFLSALGPCGLCFASCPAVMTSFHSSAISVFIVLFDL

SEQ ID NO: 796727 - protein, 123 aa, Homo sapiens
HVLAGHCALNRFFQRTAVTAVFKCALASKDQGGGGGRGCPLYKKCCPASFPTDTLGHLSDSRGGQLCLPQATTAATDGHSHQQSTKKHQSLCELGCDDKNQMFSNLRLVCRTQEIAIRNTLQN

SEQ ID NO: 796728 - protein, 324 aa, Homo sapiens [sequence omitted]

SEQ ID NO: 796729 - protein, 519 aa, Homo sapiens
MTSLAQQLQRLALPQSDASLLSRDEVASLLFDPKEAATIDRDTAFAIGCTGLEELLGIDPSFEQFEAPLFSQLAKTLERSVQTKAVNKQLDENISLFLIHLSPYFLLKPAQKCLEWLIHRFHIHLYNQDSLIACVLPYHETRIFVRVIQLLKINNSKHRWFWLLPVKQSGVPLAKGTLITHCYKDLGFMDFICSLVTKSVKVFAEYPGSSAQLRVLLAFYASTIVSALVAAEDVSDNIIAKLFPYIQKGLKSSLPDYRAATYMIICQISVKVTMENTFVNSLASQIIKTLTKIPSLIKDGLSCLIVLLQRQKPESLGKKPFPHLCNVPDLITILHGISETYDVSPLLHYMLPHLVVSIIHHVTGEETEGMDGQIYKRHLEAILTKISLKNNLDHLLASLLFEEYISYSSQEEMDSNKVSLLNEQFLPLIRLLESKYPRTLDVVLEEHLKEIADLKKQELFHQFVSLSTSGGKYQFLADSDTSLMLSLNHPLAPVRILAMNHLKKIMKTSKVCFRSLFYM

SEQ ID NO: 796730 - protein, 80 aa, Homo sapiens [sequence omitted]

SEQ ID NO: 796731 - protein, 182 aa, Homo sapiens
MYEIKNSFGQRIYFAAEDTNFCIRNCCGRSRPFTLRITDNVGREVITLERPLRCNCCCCPCCLQEIEIQAPPGVPVGYVTQTWHPCLTKFTIKNQKREDVLKISGPCIVCSCIAGVDFEITSLDEQIVVGRISKHWSGFLREAFTDADNFGIQFPRDLDVKMKAVMIGACFLIDYMFFERTR

SEQ ID NO: 796732 - protein, 183 aa, Homo sapiens
AAAWPSGPSAPEAVTARLVGVLWFVSVTTGPWGAVATSAGGEESLKCEDLKVGQYPLWRTPPHGGEVELGSQIFSLGHCPNQDWLAVGMESSNVEILHVRKPEKYQLHLHESCVLSLKFASCGRWFVSTGKDNLLNAWRTPYGASIFQSKESSSVLSCDISRNNKYIVTGSGDKKATVYEVVY

SEQ ID NO: 796733 - protein, 85 aa, Homo sapiens
PASISSRWKGSGRGYIEPLLMLAGALGDLIPSTRQHQQQVLQAVERAKQVTVGELNSLIGVSLSSPCPAMGRRPLPGPWHPPRRC

SEQ ID NO: 796734 - protein, 835 aa, Homo sapiens
AAALAALPPRPLPLPAPLAPRTPTRGGAPTTPGARAWGRARDSRVPCPAPLLPPPSFFGQPPHHPTSASPTLAASISSSSGGAWGAFRIGRMYPQGRHPTPLQSGQPFKFSILEICDRIKEEFQFLQAQYHSLKLECEKLASEKTEMQRHYVMYYEMSYGLNIEMHKQAEIVKRLSGICAQIIPFLTQEHQQQVLQAVERAKQVTVGELNSLIGQQQLQPLSHHAPPVPLTPRPAGLVGGSATGLLALSGALAAQAQLAAAVKEDRAGVEAEGSRVERAPSRSASPSPPESLVEEERPSGPGGGGKQRADEKEPSGPYESDEDKSDYNLVVDEDQPSEPPSPATTPCGKVPICIPARRDLVDSPASLASSLGSPLPRAKELILNDLPASTPASKSCDSSPPQDASTPGPSSASHLCQLAAKPAPSTDSVALRSPLTLSSPFTTSFSLGSHSTLNGDLSVPSSYVSLHLSPQVSSSVVYGRSPVMAFESHPHLRGSSVSSSLPSIPGGKPAYSFHVSADGQMQPVPFPSDALVGAGIPRHARQLHTLAHGEVVCAVTISGSTQHVYTGGKGCVKVWDVGQPGAKTPVAQLDCLNRDNYIRSCKLLPDGRSLIVGGEASTLSIWDLAAPTPRIKAELTSSAPACYALAVSPDAKVCFSCCSDGNIVVWDLQNQTMVRQFQGHTDGASCIDISDYGTRLWTGGLDNTVRCWDLREGRQLQQHDFSSQIFSLGHCPNQDWLAVGMESSNVEILHVRKPEKYQLHLHESCVLSLKFASCGRWFVSTGKDNLLNAWRTPYGASIFQSKESSSVLSCDISRNNKYIVTGSGDKKATVYEVVY

SEQ ID NO: 796735 - protein, 744 aa, Homo sapiens
MYPQGRHPTPLQSGQPFKFSILEICDRIKEEFQFLQAQYHSLKLECEKLASEKTEMQRHYVMYYEMSYGLNIEMHKQAEIVKRLSGICAQIIPFLTQEHQQQVLQAVERAKQVTVGELNSLIGQQQLQPLSHHAPPVPLTPRPAGLVGGSATGLLALSGALAAQAQLAAAVKEDRAGVEAEGSRVERAPSRSASPSPPESLVEEERPSGPGGGGKQRADEKEPSGPYESDEDKSDYNLVVDEDQPSEPPSPATTPCGKVPICIPARRDLVDSPASLASSLGSPLPRAKELILNDLPASTPASKSCDSSPPQDASTPGPSSASHLCQLAAKPAPSTDSVALRSPLTLSSPFTTSFSLGSHSTLNGDLSVPSSYVSLHLSPQVSSSVVYGRSPVMAFESHPHLRGSSVSSSLPSIPGGKPAYSFHVSADGQMQPVPFPSDALVGAGIPRHARQLHTLAHGEVVCAVTISGSTQHVYTGGKGCVKVWDVGQPGAKTPVAQLDCLNRDNYIRSCKLLPDGRSLIVGGEASTLSIWDLAAPTPRIKAELTSSAPACYALAVSPDAKVCFSCCSDGNIVVWDLQNQTMVRQFQGHTDGASCIDISDYGTRLWTGGLDNTVRCWDLREGRQLQQHDFSSQIFSLGHCPNQDWLAVGMESSNVEILHVRKPEKYQLHLHESCVLSLKFASCGRWFVSTGKDNLLNAWRTPYGASIFQSKESSSVLSCDISRNNKYIVTGSGDKKATVYEVVY

SEQ ID NO: 796736 - protein, 823 aa, Homo sapiens
AAALAALPPRPLPLPAPLAPRTPTRGGAPTTPGARAWGRARDSRVPCPAPLLPPPSFFGQPPHHPTSASPTLAASISSSSGGAWGAFRIGRMYPQGRHPTPLQSGQPFKFSILEICDRIKEEFQFLQAQYHSLKLECEKLASEKTEMQRHYVMYYEMSYGLNIEMHKQAEIVKRLSGICAQIIPFLTQEHQQQVLQAVERAKQVTVGELNSLIGQQQLQPLSHHAPPVPLTPRPAGLVGGSATGLLALSGALAAQAQLAAAVKEDRAGVEAEGSRVERAPSRSASPSPPESLVEEERPSGPGGGGKQRADEKEPSGPYESDEDKSDYNLVVDEDQPSEPPSPATTPCGKVPICIPARRDLVDSPASLASSLGSPLPRAKELILNDLPASTPASKSCDSSPPQDASTPGPSSASHLCQLAAKPAPSTDSVALRSPLTLSSPFTTSFSLGSHSTLNGDLSVPSSYVSLHLSPQMAFESHPHLRGSSVSSSLPSIPGGKPAYSFHVSADGQMQPVPFPSDALVGAGIPRHARQLHTLAHGEVVCAVTISGSTQHVYTGGKGCVKVWDVGQPGAKTPVAQLDCLNRDNYIRSCKLLPDGRSLIVGGEASTLSIWDLAAPTPRIKAELTSSAPACYALAVSPDAKVCFSCCSDGNIVVWDLQNQTMVRQFQGHTDGASCIDISDYGTRLWTGGLDNTVRCWDLREGRQLQQHDFSSQIFSLGHCPNQDWLAVGMESSNVEILHVRKPEKYQLHLHESCVLSLKFASCGRWFVSTGKDNLLNAWRTPYGASIFQSKESSSVLSCDISRNNKYIVTGSGDKKATVYEVVY

SEQ ID NO: 796737 - protein, 804 aa, Homo sapiens
AAALAALPPRPLPLPAPLAPRTPTRGGAPTTPGARAWGRARDSRVPCPAPLLPPPSFFGQPPHHPTSASPTLAASISSSSGGAWGAFRIGRMYPQGRHPTPLQSGQPFKFSILEICDRIKEEFQFLQAQYHSLKLECEKLASEKTEMQRHYVMYYEMSYGLNIEMHKQAEIVKRLSGICAQIIPFLTQEHQQQVLQAVERAKQVTVGELNSLIGQQQLQPLSHHAPPVPLTPRPAGLVGGSATGLLALSGALAAQAQLAAAVKEDRAGVEAEGSRVERAPSRSASPSPPESLVEEERPSGPGGGGKQRADEKEPSGPYESDEDKSDYNLVVDEDQPSEPPSPATTPCGKVPICIPARRDLVDSPASLASSLGSPLPRAKELILNDLPASTPASKSCDSSPPQDASTPGPSSASHLCQLAAKPAPSTDSVALRSPLTLSSPFTTSFSLGSHSTLNGDLSVPSSYVSLHLSPQMAFESHPHLRGSSVSSSLPSIPGGKPAYSFHVSADGQMQPVPFPSDALVGAGIPRHARQLHTLAHGEVVCAVTISGSTQHVYTGGKGCVKNRDNYIRSCKLLPDGRSLIVGGEASTLSIWDLAAPTPRIKAELTSSAPACYALAVSPDAKVCFSCCSDGNIVVWDLQNQTMVRQFQGHTDGASCIDISDYGTRLWTGGLDNTVRCWDLREGRQLQQHDFSSQIFSLGHCPNQDWLAVGMESSNVEILHVRKPEKYQLHLHESCVLSLKFASCGRWFVSTGKDNLLNAWRTPYGASIFQSKESSSVLSCDISRNNKYIVTGSGDKKATVYEVVY

SEQ ID NO: 796738 - protein, 653 aa, Homo sapiens
VGGPWSLHQQQVLQAVERAKQVTVGELNSLIGQQQLQPLSHHAPPVPLTPRPAGLVGGSATGLLALSGALAAQAQLAAAVKEDRAGVEAEGSRVERAPSRSASPSPPESLVEEERPSGPGGGGKQRADEKEPSGPYESDEDKSDYNLVVDEDQPSEPPSPATTPCGKVPICIPARRDLVDSPASLASSLGSPLPRAKELILNDLPASTPASKSCDSSPPQDASTPGPSSASHLCQLAAKPAPSTDSVALRSPLTLSSPFTTSFSLGSHSTLNGDLSVPSSYVSLHLSPQVSSSVVYGRSPVMAFESHPHLRGSSVSSSLPSIPGGKPAYSFHVSADGQMQPVPFPSDALVGAGIPRHARQLHTLAHGEVVCAVTISGSTQHVYTGGKGCVKVWDVGQPGAKTPVAQLDCLNRDNYIRSCKLLPDGRSLIVGGEASTLSIWDLAAPTPRIKAELTSSAPACYALAVSPDAKVCFSCCSDGNIVVWDLQNQTMVRQFQGHTDGASCIDISDYGTRLWTGGLDNTVRCWDLREGRQLQQHDFSSQIFSLGHCPNQDWLAVGMESSNVEILHVRKPEKYQLHLHESCVLSLKFASCGRWFVSTGKDNLLNAWRTPYGASIFQSKESSSVLSCDISRNNKYIVTGSGDKKATVYEVVY

SEQ ID NO: 796739 - protein, 828 aa, Homo sapiens
AAALAALPPRPLPLPAPLAPRTPTRGGAPTTPGARAWGRARDSRVPCPAPLLPPPSFFGQPPHHPTSASPTLAASISSSSGGAWGAFRIGRMYPQGRHPTPLQSGQPFKFSILEICDRIKEEFQFLQAQYHSLKLECEKLASEKTEMQRHYVMYYEMSYGLNIEMHKQAEIVKRLSGICAQIIPFLTQEHQQQVLQAVERAKQVTVGELNSLIGQQQLQPLSHHAPPVPLTPRPAGLVGGSATGLLALSGALAAQAQLAAAVKEDRAGVEAEGSRVERAPSRSASPSPPESLVEEERPSGPGGGGKQRADEKEPSGPYESDEDKSDYNLVVDEDQPSEPPSPATTPCGKVPICIPARRDLVDSPASLASSLGSPLPRAKELILNDLPASTPASKSCDSSPPQDASTPGPSSLRQASTFHGQRRPEEPPDSVQSLHHVLQPGLPQHSQRRPLRAQLLRQPPPVPQVSSSVVYGRSPVMAFESHPHLRGSSVSSSLPSIPGGKPAYSFHVSADGQMQPVPFPSDALVGAGIPRHARQLHTLAHGEVVCAVTISGSTQHVYTGGKGCVKVWDVGQPGAKTPVAQLDCLNRDNYIRSCKLLPDGRSLIVGGEASTLSIWDLAAPTPRIKAELTSSAPACYALAVSPDAKVCFSCCSDGNIVVWDLQNQTMVRQFQGHTDGASCIDISDYGTRLWTGGLDNTVRCWDLREGRQLQQHDFSSQIFSLGHCPNQDWLAVGMESSNVEILHVRKPEKYQLHLHESCVLSLKFASCGRWFVSTGKDNLLNAWRTPYGASIFQSKESSSVLSCDISRNNKYIVTGSGDKKATVYEVVY

SEQ ID NO: 796740 - protein, 630 aa, Homo sapiens
MYPQGRHPTPLQSGQPFKFSILEICDRIKEEFQFLQAQYHSLKLECEKLASEKTEMQRHYVMYYEMSYGLNIEMHKQSASPSPPESLVEEERPSGPGGGGKQRADEKEPSGPYESDEDKSDYNLVVDEDQPSEPPSPATTPCGKVPICIPARRDLVDSPASLASSLGSPLPRAKELILNDLPASTPASKSCDSSPPQDASTPGPSSASHLCQLAAKPAPSTDSVALRSPLTLSSPFTTSFSLGSHSTLNGDLSVPSSYVSLHLSPQVSSSVVYGRSPVMAFESHPHLRGSSVSSSLPSIPGGKPAYSFHVSADGQMQPVPFPSDALVGAGIPRHARQLHTLAHGEVVCAVTISGSTQHVYTGGKGCVKVWDVGQPGAKTPVAQLDCLNRDNYIRSCKLLPDGRSLIVGGEASTLSIWDLAAPTPRIKAELTSSAPACYALAVSPDAKVCFSCCSDGNIVVWDLQNQTMVRQFQGHTDGASCIDISDYGTRLWTGGLDNTVRCWDLREGRQLQQHDFSSQIFSLGHCPNQDWLAVGMESSNVEILHVRKPEKYQLHLHESCVLSLKFASCGRWFVSTGKDNLLNAWRTPYGASIFQSKESSSVLSCDISRNNKYIVTGSGDKKATVYEVVY

SEQ ID NO: 796741 - protein, 578 aa, Homo sapiens
AAALAALPPRPLPLPAPLAPRTPTRGGAPTTPGARAWGRARDSRVPCPAPLLPPPSFFGQPPHHPTSASPTLAASISSSSGGAWGAFRIGRMYPQGRHPTPLQSGQPFKFSILEICDRIKEEFQFLQAQYHSLKLECEKLASEKTEMQRHYVMYYEMSYGLNIEMHKQAEIVKRLSGICAQIIPFLTQEHQQQVLQAVERAKQVTVGELNSLIGVSSSVVYGRSPVMAFESHPHLRGSSVSSSLPSIPGGKPAYSFHVSADGQMQPVPFPSDALVGAGIPRHARQLHTLAHGEVVCAVTISGSTQHVYTGGKGCVKVWDVGQPGAKTPVAQLDCLNRDNYIRSCKLLPDGRSLIVGGEASTLSIWDLAAPTPRIKAELTSSAPACYALAVSPDAKVCFSCCSDGNIVVWDLQNQTMVRQFQGHTDGASCIDISDYGTRLWTGGLDNTVRCWDLREGRQLQQHDFSSQIFSLGHCPNQDWLAVGMESSNVEILHVRKPEKYQLHLHESCVLSLKFASCGRWFVSTGKDNLLNAWRTPYGASIFQSKESSSVLSCDISRNNKYIVTGSGDKKATVYEVVY

SEQ ID NO: 796742 - protein, 542 aa, Homo sapiens
MTPLPVPEVQTPRGISSRDRHPSSRLPALPRNRTSHLLSWPTASHLPLPATTPCGKVPICIPARRDLVDSPASLASSLGSPLPRAKELILNDLPASTPASKSCDSSPPQDASTPGPSSASHLCQLAAKPAPSTDSVALRSPLTLSSPFTTSFSLGSHSTLNGDLSVPSSYVSLHLSPQVSSSVVYGRSPVMAFESHPHLRGSSVSSSLPSIPGGKPAYSFHVSADGQMQPVPFPSDALVGAGIPRHARQLHTLAHGEVVCAVTISGSTQHVYTGGKGCVKVWDVGQPGAKTPVAQLDCLNRDNYIRSCKLLPDGRSLIVGGEASTLSIWDLAAPTPRIKAELTSSAPACYALAVSPDAKVCFSCCSDGNIVVWDLQNQTMVRQFQGHTDGASCIDISDYGTRLWTGGLDNTVRCWDLREGRQLQQHDFSSQIFSLGHCPNQDWLAVGMESSNVEILHVRKPEKYQLHLHESCVLSLKFASCGRWFVSTGKDNLLNAWRTPYGASIFQSKESSSVLSCDISRNNKYIVTGSGDKKATVYEVVY

SEQ ID NO: 796743 - protein, 784 aa, Homo sapiens
AAALAALPPRPLPLPAPLAPRTPTRGGAPTTPGARAWGRARDSRVPCPAPLLPPPSFFGQPPHHPTSASPTLAASISSSSGGAWGAFRIGRMYPQGRHPTPLQSGQPFKFSILEICDRIKEEFQFLQAQYHSLKLECEKLASEKTEMQRHYVMYYEMSYGLNIEMHKQAEIVKRLSGICAQIIPFLTQEHQQQVLQAVERAKQVTVGELNSLIGQQQLQPLSHHAPPVPLTPRPAGLVGGSATGLLALSGALAAQAQLAAAVKEDRAGVEAEGSRVERAPSRSASPSPPESLVEEERPSGPGGGGKQRADEKEPSGPYESDEDKSDYNLVVDEDQPSEPPSPATTPCGKVPICIPARRDLVDSPASLASSLGSPLPRAKELILNDLPASTPASKSCDSSPPQDASTPGPSSASHLCQLAAKPAPSTDSVALRSPLTLSSPFTTSFSLGSHSTLNGDLSVPSSYVSLHLSPQVSSSVVYGRSPVMAFESHPHLRGSSVSSSLPSIPGGKPAYSFHVSADGQMQPVPFPSDALVGAGIPRHARQLHTLAHGEVVCAVTISGSTQHVYTGGKGCVKVWDVGQPGAKTPVAQLDCLNRDNYIRSCKLLPDGRSLIVGGEASTLSIWDLAAPTPRIKAELTSSAPACYALAVSPDAKVCFSCCSDGNIVVWDLQNQTMVRQFQGHTDGASCIDISDYGTRLWTGGLDNTVRCWDLREGRQLQQHDFSSQIFSLGHCPNQDWLAVGMESSNVEILHVRKPEKYQLHLHESCVLSLKFASCVQGVVLSPEL

SEQ ID NO: 796744 - protein, 292 aa, Homo sapiens
  misc_feature (3)..(4): Xaa can be any naturally occurring amino acid
LKXXLKGFPEDFQETGSTKHVYTGGKGCVKVWDVGQPGAKTPVAQLDCLNRDNYIRSCKLLPDGRSLIVGGEASTLSIWDLAAPTPRIKAELTSSAPACYALAVSPDAKVCFSCCSDGNIVVWDLQNQTMVRQFQGHTDGASCIDISDYGTRLWTGGLDNTVRCWDLREGRQLQQHDFSSQIFSLGHCPNQDWLAVGMESSNVEILHVRKPEKYQLHLHESCVLSLKFASCGRWFVSTGKDNLLNAWRTPYGASIFQSKESSSVLSCDISRNNKYIVTGSGDKKATVYEVVY

SEQ ID NO: 796745 - protein, 754 aa, Homo sapiens
AAALAALPPRPLPLPAPLAPRTPTRGGAPTTPGARAWGRARDSRVPCPAPLLPPPSFFGQPPHHPTSASPTLAASISSSSGGAWGAFRIGRMYPQGRHPTPLQSGQPFKFSILEICDRIKEEFQFLQAQYHSLKLECEKLASEKTEMQRHYVMYYEMSYGLNIEMHKQAEIVKRLSGICAQIIPFLTQEHQQQVLQAVERAKQVTVGELNSLIGQQQLQPLSHHAPPVPLTPRPAGLVGGSATGLLALSGALAAQAQLAAAVKEDRAGVEAEGSRVERAPSRSASPSPPESLVEEERPSGPGGGGKQRADEKEPSGPYESDEDKSDYNLVVDEDQPSEPPSPATTPCGKVPICIPARRDLVDSPASLASSLGSPLPRAKELILNDLPASTPASKSCDSSPPQDASTPGPSSASHLCQLAAKPAPSTDSVALRSPLTLSSPFTTSFSLGSHSTLNGDLSVPSSYVSLHLSPQVSSSVVYGRSPVMAFESHPHLRGSSVSSSLPSIPGGKPAYSFHVSADGQMQPVPFPSDALVGAGIPRHARQLHTLAHGEVVCAVTISGSTQHVYTGGKGCVKVWDVGQPGAKTPVAQLDCLNRDNYIRSCKLLPDGRSLIVGGEASTLSIWDLAAPTPRIKAELTSSAPACYALAVSPDAKVCFSCCSDGNIVVWDLQNQTMVRQFQGHTDGASCIDISDYGTRLWTGGLDTLAHGEVVCAVTISGSTQHVYTGGKGCVKVWDVGQPGAKTPVAQLDCLNRDN

SEQ ID NO: 796746 - protein, 136 aa, Homo sapiens
GRPRRAPAPAAAPARPARPAHPNPGRGSHDPGRARLGARQGLQGPLPRAASPSSLFLRAASPPPHFSLPHSCRLHIIKLWWRLGGFSDRQDVPPGKAPDPAPVRPALQVLDLGDLRPHQRRIPVSSGSIPQPQARM

SEQ ID NO: 796747 - protein, 78 aa, Homo sapiens
  misc_feature (6)..(6): Xaa can be any naturally occurring amino acid
SDPPGXQEIRGRVDTACEEDDKKGRDEAPCPEELTSQQFTGYGYRGESGGESIVGVAPLTSRMASRDPASWWPLSPSY

SEQ ID NO: 796748 - protein, 75 aa, Homo sapiens
MICRQDVHFFPLLGFFAQLLLDTPAGLFSRGHHRGSCRGLVLQDPLDWPVRGSPGRHFWALWLLAQGRCLAWSPE

SEQ ID NO: 796749 - protein, 126 aa, Homo sapiens
MPRHPGSPILGYTVFYSEVGADKSLQEQLHSVPLSRDIPTTEEVIGDLKPGTEYRVSIAAYSQAGKGRLSSPRHVTTLSQDSCLPPAAPQQPHVIVVSDSEVALSWKPGASEGSAPIQYYSVEFIR

SEQ ID NO: 796750 - protein, 201 aa, Homo sapiens
MDLIRGVLLRLLLLASSLGPGAVSLRAAIRKPGKVGPPLDIKLGALNCTAFSIQWKMPRHPGSPILGYTVFYSEVGADKSLQEQLHSVPLSRDIPTTEEVIGDLKPGTEYRVSIAAYSQAGKGRLSSPRHVTTLSQDSCLPPAAPQQPHVIVVSDSEVALSWKPGASEGSAPIQYYSVEFIRPDFDKKWTSIHERIQMDSM

SEQ ID NO: 796751 - protein, 386 aa, Homo sapiens
LARPALPCKMAAPRWSASGPWIRGNGQGCGSLFTLVSKPFCAAAAASTAINAQRLAEKLRAQKREQDTKKEPVSTNAVQRRVQEIVRFTRQLQRVHPNVLAKALTRGILHQDKNLVVINKPYGLPVHGGPGVQLCITDVLPILAKMLHGHKAEPLHLCHRLDKETTGVMVLAWDKDMAHQVQELFRTRQVVKKYWAITVHVPMPSAGVVDIPIVEKEAQGQQQHHKMTLSPSYRMDDGKMVKVRRSRNAQVAVTQYQVLSSTLSSALVELQPITGIKHQLRVHLSFGLDCPILGDHKYSDWNRLAPQKLSVGTLKKLGLEQSKARYIPLHLHARQLILPALGSGKEELNLVCKLPRFFVHSLHRLRLEMPNEDQNENNEAKCLGAQ

SEQ ID NO: 796752 - protein, 214 aa, Homo sapiens
LARPALPCKMAAPRWSASGPWIRGNGQGCGSLFTLVSKPFCAAAAASTAINAQRLAEKLRAQKREQDTKKEPVSTNAVQRRVQEIVRFTRQLQRVHPNVLAKALTRGILHQDKNLVVINKPYGLPVHGGPGVQLCITDVLPILAKMLHGHKAEPLHLCHRLDKETTGVMVLAWDKDMAHQVQELFRTRQVVKKYWNKTSASSSLVFWIGLSNPW

SEQ ID NO: 796753 - protein, 184 aa, Homo sapiens
MPSAGVVDIPIVEKEAQGQQQHHKMTLSPSYRMDDGKMVKVRRSRNAQVAVTQYQVLSSTLSSALVELQPITGIKHQLRVHLSFGLDCPILGDHKYSDWNRLAPQKLSVGTLKKLGLEQSKARYIPLHLHARQLILPALGSGKEELNLVCKLPRFFVHSLHRLRLEMPNEDQNENNEAKCLGAQ

SEQ ID NO: 796754 - protein, 143 aa, Homo sapiens
MPSAGVVDIPIVEKEAQGQQQHHKMTLSPSYRMDDGKMVKVRRSRNAQVAVTQYQVLSSTLSSALVELQPITGIKHQLRVHLSFGLDCPILGDHKYSDWNRLAPQKLSVGTLKKLGLEQSKARYIPLHLHARQITCTHEAGWV

SEQ ID NO: 796755 - protein, 199 aa, Homo sapiens
LARPALPCKMAAPRWSASGPWIRGNGQGCGSLFTLVSKPFCAAAAASTAINAQRLAEKLRAQKREQDTKKEPVSTNAVQRRVQEIVRFTRQLQRVHPNVLAKALTRGILHQDKNLVVINKPYGLPVHGGPGVQLCITDVLPILAKMLHGHKAEPLHLCHRLDKETTGVMVLAWDKDMAHQVQELFRTRQVVKKYWYEAC

SEQ ID NO: 796756 - protein, 184 aa, Homo sapiens; identical to SEQ ID NO: 796753

SEQ ID NO: 796757 - protein, 193 aa, Homo sapiens
MVAITVHVPMPSAGVVDIPIVEKEAQGQQQHHKMTLSPSYRMDDGKMVKVRRSRNAQVAVTQYQVLSSTLSSALVELQPITGIKHQLRVHLSFGLDCPILGDHKYSDWNRLAPQKLSVGTLKKLGLEQSKARYIPLHLHARQLILPALGSGKEELNLVCKLPRFFVHSLHRLRLEMPNEDQNENNEAKCLGAQ

SEQ ID NO: 796758 - protein, 386 aa, Homo sapiens; identical to SEQ ID NO: 796751

SEQ ID NO: 796759 - protein, 386 aa, Homo sapiens; identical to SEQ ID NO: 796751

SEQ ID NO: 796760 - protein, 67 aa, Homo sapiens
LVQSRTTMTAISSSSHCTSSIDGKHVDVVSDQAALQLSPKGKLSESPKEESLEEPSMRQSSPAETVD

SEQ ID NO: 796761 - protein, 82 aa, Homo sapiens
DSEGDRVLGEWMGGEHPVVSAAGAAEGLGLLLGYRKHHFWGIVSWTLVTLTADPWNLHQRGFPWGKISVSGRLMVLLPQHHQ

SEQ ID NO: 796762 - protein, 368 aa, Homo sapiens
NFDCEDSGHLTDSECNQKHTSKKGSLIERKRSSGRVRRKGDEPQASGYHSEGETLKEKQAPRNASKPSSSTNRLRDFKETVSNMIHNRPSLASQTNVGSHCRGRGGDQPDKKPPRTLPLHSRDWEIESTSSESKSSSSSKYRPTWRPKRESLNIDSIFSKDKRKHCGYTQLSPFSEDSAKEFIPDEPSKPPSYDIKFGGPSPQYKRWGPARPGSHLLEQHPRLIQRMESGYESSERNSSSPVSLDAALPESSNVYRDPSAKRSAGLVPSWRHIPKSHSSSILEVDSTASMGGWTKSQPFSGEEISSKSELDELQEEVARRAQEQELRRKREKELEAAKGFNPHPSRFMDLDELQNQGRSDGFERSLQE

SEQ ID NO: 796763 - protein, 121 aa, Homo sapiens
AGPVSPYVPSVLHVEHLRFPATHQGLQEIQTQPSPPQSRKPQLSAGGGSMQLLQPCPLLLPQGCLGVGHSVPERAVIWRPGMLTSVQGLSEGPSAPRRCCGYRKQTEGLLLLSVGGRGMDV

SEQ ID NO: 796764 - protein, 108 aa, Homo sapiens
MLATIILCHKMRSKCWQNVAVFPDDGEHSQHTLKEIRGGSCALLRVTASSASKQQWTKATQGSGKPSYSDLPWGRVFKGDTQQPPPYLARQRQRTRNCEHEHGLVPDG

SEQ ID NO: 796765 - protein, 112 aa, Homo sapiens
HLVVTTFPPDIFSSQKNEHSPHLKQPERLGLQGRYRPYGRQLVGKSPGFYALRGHLWGTLRPSPAGLLAFGLELHHQLSEVSTRQLTLQITELVSLHNCRSQCLIIKSLSLV

SEQ ID NO: 796766 - protein, 86 aa, Homo sapiens
LTAAVSSQGDPHRNTQSLLLRTKDRVSVIYSHLPVTKKTRTFPLKIANVSFKQGAPCARGCGRSEESGFVPAAVSKAWVTPSIAEA

SEQ ID NO: 796767 - protein, 124 aa, Homo sapiens
YGSPGDIDLWPALMVEDLIPGTRVGPTLMCLFVTQFQRLRDGDRFWYENPGVFTPAQLTQLKQASLSRVLCDNGDSIQQVQADVFVKAEYPQDYLNCSEIPKVDLRVWQDCCAETVGVEDSSEQ

SEQ ID NO: 796768 - protein, 131 aa, Homo sapiens
ARTQVTGQPLPSCVPLISRSCLQHRTEHLLSIRPWGGSLATERKEDSCPGGAPTLWADAGGREMTVAGEWEKSLDSQAPRAITDRLLMTANIRKPNVLGVGISVFPGKAPSMQYLSRAKRQLPRHSVCTWY

SEQ ID NO: 796769 - protein, 520 aa, Homo sapiens
METWSVEQVCSWLVEKNLGELVHRFQEEEVSGAALLALNDRMVQQLVKKIGHQAVLMDLIKKYKQNTQGLKSPENPKKAALVMQTEAARDYRDEESSSPARHGEQMPSFYPAENLDNGLIDQRVLKQRRNVKQILARSKALQWTKSYVLPEFPYDVKCMLAEQKCPDHSMRIRIIEFLQADMTKYLEGSLYPSTQQYNDVVNALLQAHPFLDEDGCGFFLWKRALKDRFKYVRRPIEDDEQVIRNKCKFGHRRGQTRKSLADIRFDEIKLVQIKEEAVCFDSELDEHIKWFQQEYVKTEKDWREIDKRMSQTLEIRRKMIGSRTPLKDILKLFPFLKCPYQMFREFQLLTRTDIYKKTRHILESYSENILTSFSVVDNPINIVLQEKMKHYTDEDMLKYMKMTATCLLLPDVFGDDPSLFVIMNEQVQVSTPVLEVKNPFNMEVCEFSLYLERERLTKVDDCVTALAALVAAFHVFRIECPRRLSQTFNFLETLIFDMHSPYFPSLKEKENEVGFQHPLT

SEQ ID NO: 796770 - protein, 520 aa, Homo sapiens; identical to SEQ ID NO: 796769

SEQ ID NO: 796771 - protein, 279 aa, Homo sapiens
METWSVEQVCSWLVEKNLGELVHRFQEEEVSGAALLALNDRMVQQLVKKIGHQAVLMDLIKKYKQNTQGLKSPENPKKAALVMQTEAARDYRDEESSSPARHGEQMPSFYPAENLDNGLIDQRVLKQRRNVKQILARSKALQWTKSYVLPEFPYDVKCMLAEQKCPDHSMRIRIIEFLQADMTKYLEGSLYPSTQQYNDVVNALLQAHPFLDEDGCGFFLWKRALKDRFKYVRRPIEDDEQVIRNKCKFGHRRGQTRKSLADIRFDEIKLVQIKVRLNS

SEQ ID NO: 796772 - protein, 324 aa, Homo sapiens
AGQPGSGQVVRPQQCCPKCVEPHTPSGLRAPPKSCQHNGTMYQHGEIFSAHELFPSRLPNQCVLCSCTEGQIYCGLTTCPEPGCPAPLPLPDSCCQACKAGSSWGLLCSVSDFHPSCHLQRHPQDPCSSDAGRKRGPGTPAPTGLSAPLSFIPRHFRPKGAGSTTVKIVLKEKHKKACVHGGKTYSHGEVWHPAFRAFGPLPCILCTCEDGRQDCQRVTCPTEYPCRHPEKVAGKCCKICPEDKADPGHSEISSTRCPKAPGRVLVHTSVSPSPDNLRRFALEHEASDLVEIYLWKLVKGHWNVFLAQTLELKVTASPDKVTKT

SEQ ID NO: 796773 - protein, 90 aa, Homo sapiens
GDRSRISKENRQKKTGFTVEATGRQGRGMTGNLPLDSDQESQEARLPERGTALPTARWPPRRSLERLPSPDPGAEGHGQSRQSDQDITKT

SEQ ID NO: 796774 - protein, 377 aa, Homo sapiens
AGQPGSGQVVRPQQCCPKCVEPHTPSGLRAPPKSCQHNGTMYQHGEIFSAHELFPSRLPNQCVLCSCTEGQIYCGLTTCPEPGCPAPLPLPDSCCQACKAGSSWGLLCSVSDFHPSCHLQRHPQDPCSSDAGRKRGPGTPAPTGLSAPLSFIPRHFRPKGAGSTTVKIVLKEKHKKACVHGGKTYSHGEVWHPAFRAFGPLPCILCTCEDGRQDCQRVTCPTEYPCRHPEKVAGKCCKICPEDKADPGHSEISSTRCPKAPGRVLVHTSVSPSPDNLRRFALEHEASDLVEIYLWKLVKDEETEAQRGEVPGPRPHSQNLPLDSDQESQEARLPERGTALPTARWPPRRSLERLPSPDPGAEGHGQSRQSDQDITKT

SEQ ID NO: 796775 - protein, 355 aa, Homo sapiens
AGQPGSGQVVRPQQCCPKCVEPHTPSGLRAPPKSCQHNGTMYQHGEIFSAHELFPSRLPNQCVLCSCTEGQIYCGLTTCPEPGCPAPLPLPDSCCQACKAGSSWGLLCSVSDFHPSCHLQRHPQDPCSSDAGRKRGPGTPAPTGLSAPLSFIPRHFRPKGAGSTTVKIVLKEKHKKACVHGGKTYSHGEVWHPAFRAFGPLPCILCTCEDGRQDCQRVTCPTEYPCRHPEKVAGKCCKICPEDKADPGHSEISSTRCPKAPGRVLVHTSVSPSPDNLRRFALEHEASDLVEIYLWKLVKGIFHLTQIKKVRKQDFQKEAQHFRLLAGPHEGHWNVFLAQTLELKVTASPDKVTKT

SEQ ID NO: 796776 - protein, 103 aa, Homo sapiens
IPLLSNSPMQCLLISTEKQEAPGTPFRDCHQSTRKSFMKGETLTHSFFILWHGDEHTWYHPLSCTAGSVTSLFRHGVCNLSHGLCHLLSQEPQTSSRTYSLTD

SEQ ID NO: 796777 - protein, 248 aa, Homo sapiens
MQPNPNLNVSKESLSPAKFDYKLKNIFRLHELPVSCVSMQPHKDILVSCGEDRLWKVLGLPKCNVLLTGFGHTDWLSDCCFHPSERCRCTLYGHTDSVNSIEFFPFSNTLLTSSADKTLSIWDARTGICEQSLYGHMHSINDAIFDPRGHMIASCDACGVTKLWDFRKLLPIVSIDIGPSPGNEVNFDSSGRVLAQASGNGVIHLLDLKSGEIHKLMGHENEAHTVVFSHDGEILFSGGSDGTVRTWS

SEQ ID NO: 796778 - protein, 268 aa, Homo sapiens
MQPNPNLNVSKESLSPAKFDYKLKNIFRLHELPVSCVSMQPHKDILVSCGEDRLWKVLGLPKCNVLLTGFGHTDWLSDCCFHPSERCRCTLYGHTDSVNSIEFFPFSNTLLTSSADKTLSIWDARTGICEQSLYGHMHSINDAIFDPRHKGLHEDDGAMLWDFPASRTGHMIASCDACGVTKLWDFRKLLPIVSIDIGPSPGNEVNFDSSGRVLAQASGNGVIHLLDLKSGEIHKLMGHENEAHTVVFSHDGEILFSGGSDGTVRTWS

SEQ ID NO: 796779 - protein, 154 aa, Homo sapiens
YYCELSDKCGTITHFLVCPQPWGLGQRTGVLAIFSQLPPCAGLRVLRSYLLGERVQARYEPGLAERVLVSSDTCSVLCSWFGLALLLRTPGLSLQATREGSLEQQHLPLPLADTSFRLTQRRSLGTATARPGLPRQLAEPMRRPQHPSDGCSSP

SEQ ID NO: 796780 - protein, 242 aa, Homo sapiens
MASSPWGCVCGLLLLLLPLLGTGPALGRGFPRPLENSEIPMIPGAHPKGSVGSEPQAFDVFPENPRADSHRNSDVRHAPAEEMPEKPVASPLGPALYGPKAAQGAQRERLPVTDDLQMAQGPSSHGWTGPLDSQELLEQEAVAPHPVGHPHLTFIPTTPRRQLRVATVPPSLQHEGQEGQWPPRDEGLKAKTKSRVPPTSPSDHQGPPHTLVSHSGTVKRPVLEGQGGFEEHLQEAAQGPHF

SEQ ID NO: 796781 - protein, 242 aa, Homo sapiens; identical to SEQ ID NO: 796780

SEQ ID NO: 796782 - protein, 416 aa, Homo sapiens
YDKAVQSYKDVFSYLPTDNKVMLELAQLYLLQGHLDLCEQHCAILLQTEQNHETASVLMADLMFRKQKHEAAINLYHQVLEKAPDNFLVLHKLIDLLRRSGKLEDIPAFFELAKKVSSRVPLEPGFNYCRGIYCWHIGQPNEALKFLNKARKDSTWGQSAIYHMVQICLNPDNEVVGGEAFENQGAESNYMEKKELEQQGVSTAEKLLREFYPHSDSSQTQLRLLQGLCRLATREKANMEAALGSFIQIAQAEKDSVPALLALAQAYVFLKQIPKARMQLKRLAKTPWVLSEAEDLEKSWLLLADIYCQGSKFDLALELLRRCVQYNKSCYKAYEYMGFIMEKEQSYKDAVTNYKLAWKYSHHANPAIGFKLAFNYLKDKKFVEAIEICNDVLREHPDYPKIREEILEKARKSLRP

SEQ ID NO: 796783 - protein, 371 aa, Homo sapiens
YDKAVQSYKDVFSYLPTDNKVMLELAQLYLLQGHLDLCEQHCAILLQTEQNHETASVLMADLMFRKQKHEAAINLYHQVLEKAPDNFLVLHKLIDLLRRSGKLEDIPAFFELAKKVSSRVPLEPGFNYCRGIYCWHIGQPNEALKFLNKARKDSTWGQSAIYHMVQICLNPDNEVVGGEAFENQGAESNYMEKKELEQQGVSTARNCCKDSVPALLALAQAYVFLKQIPKARMQLKRLAKTPWVLSEAEDLEKSWLLLADIYCQGSKFDLALELLRRCVQYNKSCYKAYEYMGFIMEKEQSYKDAVTNYKLAWKYSHHANPAIGFKLAFNYLKDKKFVEAIEICNDVLREHPDYPKIREEILEKARKSLRP

SEQ ID NO: 796784 - protein, 409 aa, Homo sapiens
YDKAVQSYKDVFSYLPTDNKVMLELAQLYLLQGHLDLCEQHCAILLQTEQNHETASVLMADLMFRKQKHEAAINLYHQVLEKAPDNFLVLHKLIDLLRRSGKLEDIPAFFELAKKVSSRVPLEPGFNYCRGIYCWHIGQPNEALKFLNKARKDSTWGQSAIYHMVQICLNPDNEVVGGEAFENQGAESNYMEKKELEQQGVSTAEKLLREFYPHSDSSQTQLRLLQGLCRLATREKANMEAALGSFIQIAQAEKDSVPALLALAQAYVFLKQIPKARMQLKRLAKTPWVLSEAEDLEKSWLLLADIYCQGSKFDLALELLRRCVQYNKSCYKAYEYMGFIMEKEQSYKDAVTNYKLAWKYSHHANPAIGFKLAFNYLKDKKFVEAIEICNDVSQQPWWGGPGVVVGKPA

SEQ ID NO: 796785 - protein, 77 aa, Homo sapiens
WAGGTGMVSSAEEQSCVPKSSGGDSSNAGPGLGLLPPCCMTCRESRLLCLSFPFRQTGARKGLPSQVCPLRSAVRWQ

SEQ ID NO: 796786 - protein, 99 aa, Homo sapiens
LNPKGSDFRTPRGMSPFALVEGRRARISRSVETPHPRYRIAGDLEAQPQYNTEQNSPPQCDFQSTRSASWSGRIYKHRTEARPPWSQRVPVLRKKTTRK

SEQ ID NO: 796787 - protein, 127 aa, Homo sapiens
SHSSDTYCEPYTSWCQDTYSQSKPKMQSLVQWGLDSYDYLQNAPPGFFPRLGVIGFAGLIGLLLTRGSKMKKLVYLPGFMRLAASLYYPQQTIVFAQVSGERLYDWSLRFVEGELSKARKCEEFTWN

SEQ ID NO: 796788 - protein, 102 aa, Homo sapiens
PGSQAKQAFENATVSSPVEGFTNHKVAIIRQDPGQGEGQPDCPFLYPCLGPGGILSRESLCFVPFSLSCLPASPPLPSCPRQKGCQKRQTHSTEVSVTKEAL

SEQ ID NO: 796789 - protein, 282 aa, Homo sapiens
AEAISVNETIVLVETRIRAMDKDAKKRIHNFSVINPVPGQAITQIFAVDNREDLQKWMEAFWQHFFDLSQWKHCCEELMKIEIMSPRKPPLFLTKEATSVYHDMSIDSPMKLESLTDIIQKKIEETNGQFLIGQREESLPPPWATLFDGNHQMVIQKKVLYPASEPLHDEKGKKRQAPLPPSDKLPFSLKSQSNTDQLVKDNWGKTSVSQTSSLDTKLSTLMHHLQKPMAAPRKLLPARRNRLSDGEHTDTKTNFEAKPVPAPRQKSIKDILDPRSWLQAQV

SEQ ID NO: 796790 - protein, 82 aa, Homo sapiens
SRSTETIFTGTCDSVAAMSGILKGKFEEVNGSSPCSSVQESDDEVFSCDSTESVDSVNRSVLMILPEKMRKYQQTENMFSEA

SEQ ID NO: 796791 - protein, 120 aa, Homo sapiens
DAVSLMSPSLECSGAISAHCNLRLLGSSDSPASASRVSGITAMRLHTQLIFVFSVETEFHHVGQAGLELLTSSDLPTLASQGVGITGVSHRTRPIHTILYHVVMKMKWEAACEILGTVLT

SEQ ID NO: 796792 - protein, 155 aa, Homo sapiens
SAPARDHLGKKRDPDIEEGEASLGRPATPGSPGPARGSRAVSCRHPGTGSPARSHSARSPLRDWVRSKGRGNLWAPRLVLPTRVSCLRFPAFPTLPGRGFGVPCSGPARSPPTGWLGSGRGGRQRGRETGVAPHALRAPRAAAPAQRPPVPDHAA

SEQ ID NO: 796793 - protein, 761 aa, Homo sapiens
MSAITVALLSLLFITSGTIENHKDLGGHFFSTTQSPPATQGSTAAQRSTATQHSTATQSSTATQTSPVPLTPESPLFQNFSGYHIGVGRADCTGQVADINLMGYGKSGQNAQGILTRLYSRAFIMAEPDGSNRTVFVSIDIGMVSQRLRLEVLNRLQSKYGSLYRRDNVILSGTHTHSGPAGYFQYTVFVIASEGFSNQTFQHMVTGILKSIDIAHTNMKPGKIFINKGNVDGVQINRSPYSYLQNPQSERARYPSNTDKEMIVLKMVDLNGDDLGLISWFAIHPVSMNNSNHLVNSDNVGYASYLLEQEKNKGYLPGQGPFVAAFASSNLGDVSPNILGPRCINTGESCDNANSTCPIGGPSMCIAKGPGQDMFDSTQIIGRAMYQRAKELYASASQEVTGPLASAHQWVDMTDVTVWLNSTHASKTCKPALGYSFAAGTIDGVGGLNFTQGKTEGDPFWDTIRDQILGKPSEEIKECHKPKPILLHTGELSKPHPWHPDIVDVQIITLGSLAITAIPGEFTTMSGRRLREAVQAEFASHGMQNMTVVISGLCNVYTHYITTYEEYQAQRYEAASTIYGPHALSAYIQLFRNLAKAIATDTVANLSRGPEPPFFKQLIVPLIPSIVDRAPKGRTFGDVLQPAKPEYRVGEVAEVIFVGANPKNSVQNQTHQTFLTVEKYEATSTSWQIVCNDASWETRFYWHKGLLGLSNATVEWHIPDTAQPGIYRIRYFGHNRKQDILKPAVILSFEGTSPAFEVVTI

SEQ ID NO: 796794 - protein, 210 aa, Homo sapiens
ERSDGVEADLRSRNCEQAQRYEAASTIYGPHALSAYIQLFRNLAKAIATDTVANLSRGPEPPFFKQLIVPLIPSIVDRAPKGRTFGDVLQPAKPEYRVGEVAEVIFVGANPKNSVQNQTHQTFLTVEKYEATSTSWQIVCNDASWETRFYWHKGLLGLSNATVEWHIPDTAQPGIYRIRYFGHNRKQDILKPAVILSFEGTSPAFEVVTI

SEQ ID NO: 796795 - protein, 174 aa, Homo sapiens
ACNFVTRGWCYVYYGMDLEPDSPEPPFFKQLIVPLIPSIVDRAPKGRTFGDVLQPAKPEYRVGEVAEVIFVGANPKNSVQNQTHQTFLTVEKYEATSTSWQIVCNDASWETRFYWHKGLLGLSNATVEWHIPDTAQPGIYRIRYFGHNRKQDILKPAVILSFEGTSPAFEVVTI

SEQ ID NO: 796796 - protein, 67 aa, Homo sapiens
LSLFTDDMIAYLENPKDSSKKILDLINKSSKVSGYKINVRKPVALLYTNSNQAENQINYSTPLTTPA

SEQ ID NO: 796797 - protein, 104 aa, Homo sapiens
LTKNPGMALKTSLGSVQFMEQFCWPHLRSFCETCVGSWSIQMRQHHHQSSFPGSLPQETNLTLKVCKPQAPQKLDPTLSSCFFIESCGAQVPVEGSRRETSITV

SEQ ID NO: 796798 - protein, 41 aa, Homo sapiens
MAGSLAGNLQELSARYLSSSPSSLTPGPTIKKGPRKKRWTD

SEQ ID NO: 796799 - protein, 134 aa, Homo sapiens
ALHTPARTPPPQRAPAGTFRALHTPAHTPPPQHAPAGTSRALHTPDCTPPPQCAPAGTSRALHTPAHTPPPQHAWTLYIPACIPPPQCAPAGTFGVLHTPSPTQRPPQAPPPLYICIVRFGAHRCSDIGISSSA

SEQ ID NO: 796800 - protein, 80 aa, Homo sapiens
MPSQKRIFFYIVAVADAKKSREFNPNNSTAVLRKGICEYHLKNYAAALETFIGGQKLVQMLISVTGLKGVKKLRMAQNLR

SEQ ID NO: 796801 - protein, 41 aa, Homo sapiens
TGGPGGRAALSCGPETASERRPVLGRGLCRDCSRENVFIIP

SEQ ID NO: 796802 - protein, 67 aa, Homo sapiens
VALHPHQHLVWSVFWIFTILIEIHGSIRVVRAPLAPLCGYSPVPFSEATGQKPLYNTLPNSRILKET

SEQ ID NO: 796803 - protein, 148 aa, Homo sapiens
GCIVHRLEQHDSCPVCRKSLPGHNTATNTPAPGPTGMNCSSSCPPPPPARPVKRTPQVTPEPAWAGTHHCPLRLRLRGNRGDFPNHPQPGPHGTHRLGAPEAPVLAGQRYRPRLFQGRILDRPTGSLAREGVGHMVPSGAPSASPSFV

SEQ ID NO: 796804 - protein, 119 aa, Homo sapiens
MCPLNTAMLLETDCHFMWTQPLNRMCAFVSAAIPSSVIALLHFCWSQGRGVPANVRVVRPQPLPFYTVLGCLLACGGGRGSQYLCTVYCPEPAFIPNFSKIALKGGGRGSNIVLKGGTG

SEQ ID NO: 796805 - protein, 61 aa, Homo sapiens
MHYSKTIIYPCNAPGTAAFPFQSPHPVFPRRLHRPGQALNDSRCHCHFYKALFRVKSLFVS

SEQ ID NO: 796806 - protein, 101 aa, Homo sapiens
RLSTWLIRHLLYVSAQRCLSETFLIIIFRITVPTSYWELLTTPPTSSICFLHGLSNIHHVIICILFTVSPHVECKLPKDRDFDLFSLLRYQPGARIGPDRW

SEQ ID NO: 796807 - protein, 82 aa, Homo sapiens
QPEPPYLPTLFPATSQHPFLLQVGLNPLCSSRGSSTLILAQNISHPPDWASTLHGEPNHGKAGFHKPPCKPTDRRRLPSTTA

SEQ ID NO: 796808 - protein, 173 aa, Homo sapiens
PVADTENKENEVEEVKEEGPKEMTLDEWKAIQNKDWAKVEFNICKPNEGVDGQWKKGFVLHKSKSEEAHAEDSVMDHHFRKPANDITSQLEINFGDLAAQDVAAGEDEVDVGVVGAQTVAAGPTSQVLLLLMWMTQRHSQLWLNWMPEDNPGSFVNPSVQSFCMLKDSKRLRN

SEQ ID NO: 796809 - protein, 108 aa, Homo sapiens
WLSSSTVSRTHLCCSVLSLSIKNRHTDQWNRIEKPEISPHIYSELIFEKGTKNTHWGKNILFNKWCWETWIATCRRMELDSYLSPYTKINSKWIKDLNVRARNMKLFE

SEQ ID NO: 796810 - protein, 167 aa, Homo sapiens
QFVWGSHLARHQQTHTGERPYSCLKCEKTFGRRHHLIRHQKTHLHDKTSRCSECGKNFRCNSHLASHQRVHAEGKSCKGQEVGESPGTRKRQRAPPVPKCHVCTECGKSFGRRHHLVRHWLTHTGEKPFQCPRCEKSFGRKHHLDRHLLTHQGQSPRNSWDRGTSVF

SEQ ID NO: 796811 - protein, 783 aa, Homo sapiens
MVAKPPVMSFHFAQDLWPEQNIKDSFQKVTLRRYGKCEYENLQLRKGCKHVDECTGHKGGHNTVNQCLTATPSKIFQCNKYVKVFDKFSNSNRYKRRHTGNKHFKCKECSKSFCVLSQLTQHRRIHTRVNSYKCEECGKAFNWFSTLTKHKRIHTGEKPYKCEECGKAFNQSSQLTRHKIIHTEEKPNKCEECGKAFKQASHLTIHKIIHTGEKPYKYEECGKVFSQSSHLTTQKILHTGENLYKCKECGKAFNLFSNLTNHKRIHAGEKPYKCKECGRAFNISSNLNKQEKIHTGGKLNKCEECDKAFNRSLKLTAHKKILMEEKPYKCEECGKVFNQFSTLTRHKIIHTGEKPYKCKECGKAFNQSSNLTEHKKIHTAEKSYKCEECGKAFNQHSNLINHRKIYSGEKPYKCEECGKAFNRSSTLTRHKKIHTGEKPYKCEECDRAFSQSSNLTEHKKIHTGEKPYKCEECGKAFNRFSTLTKHKRIHTGEKPYKCEECGKAFNQSYQLTRHKIVHTKEKLNKCEEFGKAFKQSSHRTIHKIIHTGEKPYKCEEHGKVFNQSSNLTTQKIIHTGENLYKFEEHGKAFNLFSNITNHKIIYTGEKPHKCEECGKAYNRFSNLTIHKRIHTGEKPYQCAECGKAFNCSSTLNRHKIIHTGEKPYKCKECGKAFNLSSTLTAHKKIHTGEKPYKCEECGKAFNQSSNLTTHKKIHTSEKPYKCEECGKSFNQFSSLNIHKIIHTGEKPYKCGDYGRAFNLSSNLTTHKKIHTGEKPYKCEYGKT

SEQ ID NO: 796812 - protein, 142 aa, Homo sapiens
MQSLANFSINEMTENILTGRAVQLLRSYMSSLTHYTSNEKPIHGPVTTNAVLTFQAPLCIQHNLSSGLPLGHLLFHQCNYALQLQAPTDCINFQVSQTATFKQPVRFSKPPEVISTSLLNKQSGFCNGRHTHCMTIHPWTSC

SEQ ID NO: 796813 - protein, 142 aa, Homo sapiens; identical to SEQ ID NO: 796812

SEQ ID NO: 796814 - protein, 142 aa, Homo sapiens; identical to SEQ ID NO: 796812

SEQ ID NO: 796815 - protein, 142 aa, Homo sapiens; identical to SEQ ID NO: 796812

SEQ ID NO: 796816 - protein, 783 aa, Homo sapiens; identical to SEQ ID NO: 796811

SEQ ID NO: 796817 - protein, 783 aa, Homo sapiens; identical to SEQ ID NO: 796811

SEQ ID NO: 796818 - protein, 67 aa, Homo sapiens
YGRESIEFAGAFSRDHAEAAFGSSPGSASPNSRTISYFHSASVRSIYTNIPGQVGPSPLKNTQKFIL

SEQ ID NO: 796819 - protein, 296 aa, Homo sapiens
MTKTALLKLFVAIVITFILILPEYFKTPKERTLELSCLEVCLQSNFTYSLSSLNFSFVTFLQPVRETQIIMRIFLNPSNFRNFTRTCQDITGEFKMCSSCLVCESKGNMDFISQEQTSKVLIRRGSMEVKANDFHSPCQHFNFSVAPLVDHLEEYNTTCHLKNHTGRSTIMEDEPSKEKSINYTCRIMEYPNDCIHISLHLEMDIKNITCSMKITWYILVLLVFIFLIILTIRKILEGQRRVQKWQSHRDKPTSVLLRGSDSEKLRALNVQVLSAETTQRLPLDQVQEVLPPIPEL

SEQ ID NO: 796820 - protein, 296 aa, Homo sapiens; identical to SEQ ID NO: 796819

SEQ ID NO: 796821 - protein, 268 aa, Homo sapiens
MTKTALLKLFVAIVITFILILPEYFKTPKERTLELSCLEVCLQSNFTYSLSSLNFSFVTFLQPVRETQIIMRIFLNPSNFRNFTRTCQDITVLIRRGSMEVKANDFHSPCQHFNFSVAPLVDHLEEYNTTCHLKNHTGRSTIMEDEPSKEKSINYTCRIMEYPNDCIHISLHLEMDIKNITCSMKITWYILVLLVFIFLIILTIRKILEGQRRVQKWQSHRDKPTSVLLRGSDSEKLRALNVQVLSAETTQRLPLDQVQEVLPPIPEL

SEQ ID NO: 796822 - protein, 180 aa, Homo sapiens
KTFLHGSEFNRHQKIHTGERNYECKECGKTFFRGSELNRHQKIHTGKRPYECEECGKAFLWGSQLTRHQRMHTGEEPYVCKECGKSFIWGSQLTRHKKIHTDAEPYGCKKSSHIFSHHSYFTEQKIHNSANLCEWTDYGNTFSHESNFAQHQNIYTFEKSYEFKDFEKAFSSSSHFISLL

SEQ ID NO: 796823 - protein, 86 aa, Homo sapiens
KEASLNTSLPIHCRTNSNRGCFCSGTRWAPSAALTSGPCSLGPCGSASKWDPLSHTGSAGVPPALWELVTLSTVKGRGWRHRRSGS

SEQ ID NO: 796824 - protein, 70 aa, Homo sapiens
AARAKSGRLEPLSPRCGRELHGGAPAALGKMPRPELPLPEGWEEARDFDGKVYYIDHTNRTTSWIDPRDR

SEQ ID NO: 796825 - protein, 228 aa, Homo sapiens
AAARAKSGRLEPLSPRCGRELHGGAPAALGKMPRPELPLPEGWEEARDFDGKVYYIDHTNRTTSWIDPRDRYTKPLTFADCISDELPLGWEEAYDPQVGDYFIDHNTKTTQIEDPRVQWRREQEHMLKDYLVVAQEALSAQKEIYQVKQQRLELAQQEYQQLHAVWEHKLGSQVSLVSGSSSSSKYDPEILKAEIATAKSRVNKLKREMVHLQHELQFKERGFQTLKK

SEQ ID NO: 796826 - protein, 179 aa, Homo sapiens [sequence omitted]

SEQ ID NO: 796827 - protein, 167 aa, Homo sapiens
MTAGTVVITGGILATVILLCIIAVLCYCRLQYYCCKKSGTEVADEEEEREHDLPTHPRGPTCNACSSQALDGRGSLAPLTSEPCSQPCGVAASHCTTCSPYSSPFYIRTADMVPNGGGGERLSFAPTYYKEGGPPSLKLAAPQSYPVTWPGSGREAFTNPRAISTDV

SEQ ID NO: 796828 - protein, 167 aa, Homo sapiens; identical to SEQ ID NO: 796827

SEQ ID NO: 796829 - protein, 127 aa, Homo sapiens
LFPLSRHRCLLWKLPCSTSGPAAASHGAGTCVSTWSCLPCHSSWHAWLYAVAGPCTCSATHHSSLCAWPTLGGCRIQAGSMSQVQPASLSGQNELNRCKQYSGRKHQWTQRFPADEVTHQRSCDIYY

SEQ ID NO: 796830 - protein, 154 aa, Homo sapiens
MEIMPMNIVSIISPLIDVSPGRRGRLKNAGGGIRLAERVNRRADRNVLRREKGLALGRVTFPRAGRGSRVSAPARSEPGPAAVPGGVRRADDRKFPPGASQPAFRSRRFQAAAGGPSYANDPTSSAKPVKLLPRERAGLKVTNFSQSREREGSA

SEQ ID NO: 796831 - protein, 71 aa, Homo sapiens
WTLKITHITSPVPKWLFLWLTLAVSLPTRPMVSSVPMLCISTRPYTLSDLSEDPGTACAAPVNLRGAIRFA

SEQ ID NO: 796832 - protein, 177 aa, Homo sapiens
SSPRSMERQMTEHSLRIQGPLQHCSRSASPQTSRGTQAAPLPAPPRAQQRAELRVILQLFSEHKSGTAGMVQTTPRRRPLDKMTPKRKAREPHGTQRKGAGKARQCRTQAAPGLGGGQAGVVTTSGSSRKYRTFSRKLLGIMKNKSWAGLGEGQGLSLPAGSHGLAARPERGPGNQR

SEQ ID NO: 796833 - protein, 239 aa, Homo sapiens
LLPSHLALGSCLASRKQLHRGGEPRRISQLQSNSNTEDSAVATMGSVNSRGHKAEAQVVMMGLDSAGKTTLLYKLKGHQLVETLPTVGFNVEPLKAPGHVSLTLWDVGGQAPLRASWKDYLEGTDILVYVLDSTDEARLPESAAELTEVLNDPNMAGVPFLVLANKQEAPDALPLLKIRNRLSLERFQDHCWELRGCSALTGEGLPEALQSLWSLLKSRSCMCLQARAHGAERGDSKRS

SEQ ID NO: 796834 - protein, 239 aa, Homo sapiens; identical to SEQ ID NO: 796833

SEQ ID NO: 796835 - protein, 163 aa, Homo sapiens
MDCELQSSLQWPLFFPVDASCSGVFRPRPVSPSSLLDTAISEEARQGPGLEEEQDTQESLPSSTGRRHTLAEVSTRLSPLTAPCIVVSPSTTASPAEGTSSDSCLTFSASKSPAGLSGTPATQGLLGACSPVRLASPFLGSQSATPVLQAQGGLGGAVLLPVS

SEQ ID NO: 796836 - protein, 85 aa, Homo sapiens
IQKPRDGNSASSAGALIDLGSARGSSQGSPEPSSVGVLLTLHDRMLWVGLCTCVFVHTEETSVGGDQGHFYKQKSCSISITQLVG

SEQ ID NO: 796837 - protein, 68 aa, Homo sapiens
GNQIWICPGCNKPDDGSPMIGCDDCDDWYHWPCVGIMTAPPEEMQWFCPKCANKKKDKKHKKRKHRAH

SEQ ID NO: 796838 - protein, 68 aa, Homo sapiens; identical to SEQ ID NO: 796837

SEQ ID NO: 796839 - protein, 68 aa, Homo sapiens; identical to SEQ ID NO: 796837

SEQ ID NO: 796840 - protein, 149 aa, Homo sapiens
AAPSSWPRGSLGDSVQYSPRGLCCAKAAPADAAAPVDGALPWEQSWNSSKRIKDNCVGRLPRFVAVPPQTSEMNTALETRRIQVAEAFRCCVNPSRAIPDAPQDSAERTAVSLGGPGLLLPPLLWAEHQGSASVFFSQLVQERTLKLFL

SEQ ID NO: 796841 - protein, 684 aa, Homo sapiens
MLKQARRPLFRNVLSATQWKKVKITRLVQISGASLAEKQEKHQDFLIQRQTKTKDRRFNDEIDKLTGYKTKSLLCMPIRSSDGEIIGVAQAINKIPEGAPFTEDDEKVMQMYLPFCGIAISNAQLFAASRKEYERSRALLEVVNDLFEEQTDLEKIVKKIMHRAQTLLKCERCSVLLLEDIESPVVKFTKSFELMSPKCSADAENSFKESMEKSSYSDWLINNSIAELVASTGLPVNISDAYQDPRFDAEADQISGFHIRSVLCVPIWNSNHQIIGVAQVLNRLDGKPFDDADQRLFEAFVIFCGLGINNTIMYDQVKKSWAKQSVALDVLSYHATCSKAEVDKFKAANIPLVSELAIDDIHFDDFSLDVDAMITAALRMFMELGMVQKFKIDYETLCRWLLTVRKNYRMVLYHNWRHAFNVCQLMFAMLTTAGFQDILTEVEILAVIVGCLCHDLDHRGTNNAFQAKSGSALAQLYGTSATLEHHHFNHAVMILQSEGHNIFANLSSKEYSDLMQLLKQSILATDLTLYFERRTEFFELVSKGEYDWNIKNHRDIFRSMLMTACDLGAVTKPWEISRQVAELVTSEFFEQGDRERLELKLTPSAIFDRNRKDELPRLQLEWIDSICMPLYQALVKVNVKLKPMLDSVATNRSKWEELHQKRLLASTASSSSPASVMVAKEDRN

SEQ ID NO: 796842 - protein, 490 aa, Homo sapiens
MSPKCSADAENSFKESMEKSSYSDWLINNSIAELVASTGLPVNISDAYQDPRFDAEADQISGFHIRSVLCVPIWNSNHQIIGVAQVLNRLDGKPFDDADQRLFEAFVIFCGLGINNTIMYDQVKKSWAKQSVALDVLSYHATCSKAEVDKFKAANIPLVSELAIDDIHFDDFSLDVDAMITAALRMFMELGMVQKFKIDYETLCRWLLTVRKNYRMVLYHNWRHAFNVCQLMFAMLTTAGFQDILTEVEILAVIVGCLCHDLDHRGTNNAFQAKSGSALAQLYGTSATLEHHHFNHAVMILQSEGHNIFANLSSKEYSDLMQLLKQSILATDLTLYFERRTEFFELVSKGEYDWNIKNHRDIFRSMLMTACDLGAVTKPWEISRQVAELVTSEFFEQGDRERLELKLTPSAIFDRNRKDELPRLQLEWIDSICMPLYQALVKVNVKLKPMLDSVATNRSKWEELHQKRLLASTASSSSPASVMVAKEDRN

SEQ ID NO: 796843 - protein, 684 aa, Homo sapiens; identical to SEQ ID NO: 796841

SEQ ID NO: 796844 - protein, 934 aa, Homo sapiens [sequence omitted]

SEQ ID NO: 796845 - protein, 574 aa, Homo sapiens
MYLPFCGIAISNAQLFAASRKEYERSRALLEVVNDLFEEQTDLEKIVKKIMHRAQTLLKCERCSVLLLEDIESPVVKFTKSFELMSPKCSADAENSFKESMEKSSYSDWLINNSIAELVASTGLPVNISDAYQDPRFDAEADQISGFHIRSVLCVPIWNSNHQIIGVAQVLNRLDGKPFDDADQRLFEAFVIFCGLGINNTIMYDQVKKSWAKQSVALDVLSYHATCSKAEVDKFKAANIPLVSELAIDDIHFDDFSLDVDAMITAALRMFMELGMVQKFKIDYETLCRWLLTVRKNYRMVLYHNWRHAFNVCQLMFAMLTTAGFQDILTEVEILAVIVGCLCHDLDHRGTNNAFQAKSGSALAQLYGTSATLEHHHFNHAVMILQSEGHNIFANLSSKEYSDLMQLLKQSILATDLTLYFERRTEFFELVSKGEYDWNIKNHRDIFRSMLMTACDLGAVTKPWEISRQVAELVTSEFFEQGDRERLELKLTPSAIFDRNRKDELPRLQLEWIDSICMPLYQALVKVNVKLKPMLDSVATNRSKWEELHQKRLLASTASSSSPASVMVAKEDRN

SEQ ID NO: 796846 - protein, 144 aa, Homo sapiens
MLKQARRPLFRNVLSATQWKKVKITRLVQISGASLAEKQEKHQDFLIQRQTKTKDRRFNDEIDKLTGYKTKSLLCMPIRSSDGEIIGVAQAINKIPEGAPFTEDDEKVMQMYLPFCGIAISNAQLFAASRKEYERSRSYVRDVY

SEQ ID NO: 796847 - protein, 45 aa, Homo sapiens
MPVVRPEVYRDSMAWMATYMAGVLKVSNMIWVIFSRLALGFRGAS

SEQ ID NO: 796848 - protein, 49 aa, Homo sapiens
  misc_feature (13)..(13): Xaa can be any naturally occurring amino acid
PYRGNREKMTQIXFETFNTPATYMAGVLKVSNMIWVIFSRLALGFRGAS

SEQ ID NO: 796849 - protein, 113 aa, Homo sapiens [sequence omitted]

SEQ ID NO: 796850 - protein, 153 aa, Homo sapiens
ASAICEAADKEEPPSQKKRVDTWPAGQPGTNPCHRTTWTRLKCTAATPSRAHSWPPTFEVCDSILNIGPCTNAAMGEPAFLSEEFQNNPEPDLEIVVCSSHRKNGALSVLQKSIQPQVVTTFELPGCYDMWTVIALVPKEEKENPKGEGTEQE

SEQ ID NO: 796851 - protein, 69 aa, Homo sapiens
HAGNAAMDKTARLCPHRTQSPVVESDPSQDNDDRGGSTGMGDPRGLWEHKGGSPTQPGSQGGLPGGGGT

SEQ ID NO: 796852 - protein, 160 aa, Homo sapiens
IPEKGVSIKSFPHIMQKSQEPFAQFIAQLQQSVRHQIPHTAPAKMLTLTLAFENANADCKCALAPVRCTNSLGNFLKACQDVGTELHRSTVLAQVIANLVVNKSEKGQGLSPKVGKCYNCGKIGHFKKEYHQTSGQKGSYNAIPPPPPRPAPPNTHTQKK

SEQ ID NO: 796853 - protein, 140 aa, Homo sapiens
ALGPAPPEARGDPTAGCLRPADSFTLRKQAGARRRPALGAQQTRGPARPLDLHREEEMEMGSPPTKEGGEGMAAMPRCRDRSRGPRAPLGPLEGPACASLSLCHFHWPYRATTAETACVTPGNRVLLDESCSKLGGKFTG

SEQ ID NO: 796854 - protein, 129 aa, Homo sapiens
MGFTTPAGENHLSSDCGPLHGPQLWEALGATPQPYFSFSLSPHTLIPSCVLFALCGHFTEKVDSAFLSRSTVFCPLTPSLTSSEPTSSCAQSVVSFLCLSSALRLPCPSCPFVPSAGLLPGMFHLTLSL

SEQ ID NO: 796855 - protein, 105 aa, Homo sapiens
MAHCSLDLSGSGDPPTSTSQVARTIGACHHVQLIFVFFGETGFHHVAPLVLELLDSSDPPTLASQSGGNRHEPPHRALKHIFLKHIWLFSFYFHQNGHEETMDQI

SEQ ID NO: 796856 - protein, 107 aa, Homo sapiens
THIHTHTHTHTHTHILFCREQDGNNLSVPMAGINHPLTEKKLEGISENYISFLHYERKHLKCLKHKRVVCWISISEDSHNHHMGQEIEHCKSPVCSFSYTLKINTTQ

SEQ ID NO: 796857 - protein, 114 aa, Homo sapiens
HWPIHHPGRLSTCRMRHRGHGRLSHPRPSLCPVFPRYPFLPSLPSQILSWSAAGCSATSVKPWGRPCRPSEGYSKDATVTPPSGPPHPGTGTGTVLCGSQHFTHLYALLQNNKH

SEQ ID NO: 796858 - protein, 135 aa, Homo sapiens
EPWQALQLLLAILLTLMALPYQARKKTFLSVHEVMAVENYAKDSLQWITDQYNKESDDKYHFRIFRVLKVQRQVTDHLEYHLNVEMQWTTCQKPETTNCVPQERELHKQVNCFFSVFAVPWFEQYKILNKSCSSD

SEQ ID NO: 796859 - protein, 100 aa, Homo sapiens
EPWQALQLLLAILLTLMALPYQARKKTFLSVHEVMAVENYAKDSLQWITDQYNKESDDKYHFRIFRVLKVQRQQVNCFFSVFAVPWFEQYKILNKSCSSD

SEQ ID NO: 796860 - protein, 361 aa, Homo sapiens
SHGHLSRPFLLEPARGACSRDTFLSASPRLPRPRQAASLAHRPEKSAPGADCPSGRRAAALDVRGPLWAGRGASALPSSSRVRSYPLGSRGTARGPVRSRADRSARQSGLAAANGARARTRLGSTFQSSGVANGTGTRAGGRGAAAAGRFPAQVPSAHQPSASGGAAVAPAAPRSCFLGGVASGARAAQSSFSIPNSSSGPQDSQDSVHSSPEDGGGGGQHRPVGGSPGGPRLVIGSLPAHLSPRMFGDASKIWCHDSDWGTSLGDQSLSSCSLLHEKDRPTTSGPQTDQPKEHFTNFKSETKVKRFICEPKTPAPVTESGRVFPWCLTTWGCLHDYSPMFQRCLTTEGCLSWSFTLSGPH

SEQ ID NO: 796861 - protein, 134 aa, Homo sapiens
KCDCSFQKRLWNRGPNKRMPGLLTQTHSNGIRTCLPLKVKADVCPPRKPLSIKASLTIIPGLQRASAFQECQLLSHQCVFFLKFASQGMALLFKFRCTRQVQKTRVKMRHQQPHTEDDSFSSSPLHKQAWYSSI

SEQ ID NO: 796862 - protein, 118 aa, Homo sapiens
KCDCSFQKRLWNRGPNKRMPGLLTQTHSNGIRTCLPLKVKADVCPPRKPLSIKASLTIIPGLQRASAFQECQLLSHQCVFFLKGSRSNTLLGDAAEARGLPDASQLNQQSFPLIALLD

SEQ ID NO: 796863 - protein, 74 aa, Homo sapiens
LLMHLSDKKSENVKLKTEDAQQLPESSPPRPALRDGRLPKRNRWWKSHVSLPLEGGTGQGRFGFRISPHLGAGR

SEQ ID NO: 796864 - protein, 110 aa, Homo sapiens
MRCGSWRPSWAPGGLTCASCGCPQTWAPRLACSPLLGALRQLPRTEELQQLLFINNAGSPGDVSKGFVDLGDSTQVNKDWALNLTSMLSLPDLQRLEGLTNQSWPQQNCG

SEQ ID NO: 796865 - protein, 219 aa, Homo sapiens
MVPDRQNSCPRLASAPPKGSPPLVKPLAPQRPHGVPPQARALAPKESHSDVFEMGLVPGPVLLPPGAGQPQKEDKSAWKDNRTTEPSGRCSSELGRRLDPPKVILIALTDKPVLGCRPEYCAPRVRRRKHPGLLFWPLCSGVNFVYCSLVQRGYGTRGCETQKWLGTQKGCRPGTCDLMGGGRRERNRQTWDRFGEAEREESEIAKGRCYSDFCVLCDK

SEQ ID NO: 796866 - protein, 118 aa, Homo sapiens
EGVPLSHCLGIWAWNLGHRSMMCSSLEQALAVLVTTFHKYSCQEGDKFKLSKGEMKELLHKELPSFVGEKVDEEGLKKLMGSLDENSDQQVDFQEYAVFLALITVMCNDFFQGCPDRP

SEQ ID NO: 796867 - protein, 147 aa, Homo sapiens
MQPLPSHSERGFVRWLGGIGQKWILQAELKAPRASAVYPSPRHLCSHRSMMCSSLEQALAVLVTTFHKYSCQEGDKFKLSKGEMKELLHKELPSFVGEKVDEEGLKKLMGSLDENSDQQVDFQEYAVFLALITVMCNDFFQGCPDRP

SEQ ID NO: 796868 - protein, 118 aa, Homo sapiens
TRGSTHASGVCLCHLVCHRSMMCSSLEQALAVLVTTFHKYSCQEGDKFKLSKGEMKELLHKELPSFVGEKVDEEGLKKLMGSLDENSDQQVDFQEYAVFLALITVMCNDFFQGCPDRP

SEQ ID NO: 796869 - protein, 117 aa, Homo sapiens
RYRRWKLGDDIDLIVRCEHDGVMTGANGEVSFINIKTLNEWDSRHCNGVDWRQKLELLHKELPSFVGEKVDEEGLKKLMGSLDENSDQQVDFQEYAVFLALITVMCNDFFQGCPDRP

SEQ ID NO: 796870 - protein, 122 aa, Homo sapiens
RLLLLNARSCRPWVCLCHLVCHRSMMCSSLEQALAVLVTTFHKYSCQEGDKFKLSKGEMKELLHKELPSFVGEKVDEEGLKKLMGSLDENSDQQVDFQEYAVFLALITVMCNDFFQGCPDRP

SEQ ID NO: 796871 - protein, 98 aa, Homo sapiens
MMCSSLEQALAVLVTTFHKYSCQEGDKFKLSKGEMKELLHKELPSFVGEKVDEEGLKKLMGSLDENSDQQVDFQEYAVFLALITVMCNDFFQGCPDRP

SEQ ID NO: 796872 - protein, 138 aa, Homo sapiens
MCSSLEQALAVLVTTFHKYSCQEGDKFKLSKGEMKELLHKELPSFVGHSREPCAVRAFRVHLFNPVIGDLRNQSPEGKSDCPKITQQLEKVDEEGLKKLMGSLDENSDQQVDFQEYAVFLALITVMCNDFFQGCPDRP

SEQ ID NO: 796873 - protein, 77 aa, Homo sapiens
MCSSLEQALAVLVTTFHKYSCQEGDKFKLSKGEMKELLHKELPSFVGEKVDEEGLKKLMGSLDENSDQQWVVSADPL

SEQ ID NO: 796874 - protein, 117 aa, Homo sapiens
VSSPCGGEAERKQVHSHRSMMCSSLEQALAVLVTTFHKYSCQEGDKFKLSKGEMKELLHKELPSFVGEKVDEEGLKKLMGSLDENSDQQVDFQEYAVFLALITVMCNDFFQGCPDRP

SEQ ID NO: 796875 - protein, 118 aa, Homo sapiens; identical to SEQ ID NO: 796866

SEQ ID NO: 796876 - protein, 147 aa, Homo sapiens; identical to SEQ ID NO: 796867

SEQ ID NO: 796877 - protein, 118 aa, Homo sapiens
VDSACSRELHIMDLWQTRWQRQTQEGEQALAVLVTTFHKYSCQEGDKFKLSKGEMKELLHKELPSFVGEKVDEEGLKKLMGSLDENSDQQVDFQEYAVFLALITVMCNDFFQGCPDRP

SEQ ID NO: 796878 - protein, 113 aa, Homo sapiens
MQPLPSHSERGFVRWLGGIGQKWILQAELRPQEPQQCTHHLAPLQPQIHDVQFSGAGAGCAGHYLPQVLGLKKLMGSLDENSDQQVDFQEYAVFLALITVMCNDFFQGCPDRP

SEQ ID NO: 796879 - protein, 98 aa, Homo sapiens; identical to SEQ ID NO: 796871

SEQ ID NO: 796880 - protein, 98 aa, Homo sapiens; identical to SEQ ID NO: 796871

SEQ ID NO: 796881 - protein, 98 aa, Homo sapiens; identical to SEQ ID NO: 796871

SEQ ID NO: 796882 - protein, 109 aa, Homo sapiens
IKYSSIARVRLPTFCNTGNSDLQKEVSHLCIKSELGRDIPQRLYIYSSLPLSGLSKDLRMFLRFLHSSYYHIQTEYQNAGFLEGHLVSRNFLVSSLKNSLAYSPLMFWQ

SEQ ID NO: 796883 - protein, 97 aa, Homo sapiens
RKSRNCTKNRKDGLAPVNSNNNQVSSSSHLQSDTKDYSLPSASWSPIMVRLYNEFMEKTVDGSWTRLPGCWCSVQFLKEADLTKIAKAVPAIFLQMK

SEQ ID NO: 796884 - protein, 207 aa, Homo sapiens
RPLRGDQEAGAALDNQHAEMSEEAEVDVRERETQRDREPKRARDLTLRDSCTDNSMQFGTRTTTAEPGFMGTWQNADTNLLFRMSQQAIRCTLVNCTCECFQPGKINLRTCDQCKHGWVAHALDKLSTQHLYHPTQVEIVQSNVVFDISSLMLYGTQAVPVRLKILLDRLFSVLKQEEVLHILHGLGWTLRDYVRGYILQDAAGRGA

SEQ ID NO: 796885 - protein, 171 aa, Homo sapiens
RPLRGDQEAGAALDNQHAEMAHLGPTPPPHSLNYKSEDRLSEQDWPAYFKVPCCGVDTSQIESEEAEVDVRERETQRDREPKRARDLTLRDSCTDNSMQFGTRTTTAEPGFMGTWQNADTNLLFRMSQQAIRCTLVNCTCECFQPGKINLRTCDQCKHGWVAHETLKSCLQ

SEQ ID NO: 796886 - protein, 68 aa, Homo sapiens
IVPIFMSCTFPIFICYTVAIFISYMAPIFISHTFPILYIPYLHVIYGPIFRPFMVPIFIPYTFLIFMS

SEQ ID NO: 796887 - protein, 101 aa, Homo sapiens
TKASQELIVLQECVQTNIKEDGSNSSHLPPSPLIKKCSPTATVLEKKPGTGRGKDLCDLNLAFLAQSPIWHFFLDAHGSGIVLYPAWAVASALYSLLLYLP

SEQ ID NO: 796888 - protein, 71 aa, Homo sapiens
GIDNEWSGKLQRTENDSVKDFQEKMAASTHISDTPLSEMHYQMSQYFFAKIRTCKIGQFSCRIRHETESRS

SEQ ID NO: 796889 - protein, 107 aa, Homo sapiens
MLMPKNRIAIYELLFKEGVMVAKKDVHMPKHRELADKDVPNLHVMKAMQPLKSRGYVKEQFAWRHFHWYVTNEGIQYLRDYLHLPRRLCLPLYAAAVQRLEVLSLKV

SEQ ID NO: 796890 - protein, 66 aa, Homo sapiens
FQGLRSFAVVNWYRHPITTTSFIGLQGISVWKSNGVQSTSLIAKDCQNYKTCCGALTCQKPLEKEV

SEQ ID NO: 796891 - protein, 71 aa, Homo sapiens
TRRRRKVAQAVDRAEKATSGLLEFAGGALQTLFACLSPTEAAEQQRLLSVTSSGSFIPEGHLPDASRSSPL

SEQ ID NO: 796892 - protein, 71 aa, Homo sapiens; identical to SEQ ID NO: 796891

SEQ ID NO: 796893 - protein, 139 aa, Homo sapiens
MVIYRCTSWQRDLQVASSPFSRQAVPQDRVLLCHPGWSTMYNGVIIADCSLDLLGLSHPPALASCVAGTTGTHHRAQLAVVILSALSACPSWRLCQVPGPHTVNRAVSPQAHQPLVSTYFDFCPSERQKLNKTKEFGCS

SEQ ID NO: 796894 - protein, 262 aa, Homo sapiens
AAWRGSDRLAWHFWLSGPPFADWKPRAILLGGCGRGSSSLLMASWGGEKRGGAGGSPKPAVYATRKTPSVGSQEDQWYLDYPGDQWSLGFSYSWWKNSVGSESKHGEGALDQLQHDVRLEDLGELHRAARSGDVPGVEHVLAPGDTGVDKRDRKKSIQQLVPEYKEKQTPESLPQNNNPAAPSQAEGGEGGVACGTVEQMTWLCSLPHAVGGGDGDHSSTGAVGGHPRGPGEYCHLHEQRVHHHIFARGKRKGKNHVSNVVR

SEQ ID NO: 796895 - protein, 120 aa, Homo sapiens
MGSSFSWRWLLCLEPEACPLGGMPPQKEASYHKGQHHVLPSLLLNRLFLNEKDFGSNQQFGFLLFTSMSQSSLLPGSPTKPNENKFNVCPLSLAWEFLRSTQNHGLSVTPKTILPNSTCS

SEQ ID NO: 796896 - protein, 73 aa, Homo sapiens
PSGRGWADHSFPGLRPCLLGFCGDFVVVWGFVSFQRLQALGVRKEAAKLRKRRSSSHSKTKLKVTLYCLQSAQ

SEQ ID NO: 796897 - protein, 163 aa, Homo sapiens
MERLCSDGFAFPHYYIKPYHLKRIHRAVLRGNLEKLKYLLLTYYDANKRDRKERTALHLACATGQPEMVHLLVSRRCELNLCDREDRTPLIKAVQLRQEACATLLLQNGADPNITDVFGRTALHYAVYNEDTSMIEKLLSHGTNIEECSKCLPQKQRAGEGYK

SEQ ID NO: 796898 - protein, 151 aa, Homo sapiens
MERLCSDGFAFPHYYIKPYHLKRIHRAVLRGNLEKLKYLLLTYYDANKRDRKERTALHLACATGQPEMVHLLVSRRCELNLCDREDRTPLIKAVQLRQEACATLLLQNGADPNITDVFGRTALHYAVYNEDTSMIEKLLSHGTNIEECSKV

SEQ ID NO: 796899 - protein, 185 aa, Homo sapiens
MERLCSDGFAFPHYYIKPYHLKRIHRAVLRGNLEKLKYLLLTYYDANKRDRKERTALHLACATGQPEMVHLLVSRRCELNLCDREDRTPLIKAVQLRQEACATLLLQNGADPNITDVFGRTALHYAVYNEDTSMIEKLLSHGTNIEECSKNEYQPLLLAVSRRKVKMVEFLLKKKANVNAIDYLG

SEQ ID NO: 796900 - protein, 134 aa, Homo sapiens
MFRKGSLFNPWYWENWQDVCRNWTPFFHHMPKLIQDALKTLKPKTIKIPEENLGSTILDMGTGKDFMTETPKAMATKAKIDKWDLIKLRSFCTTKETSIRANRQPTEWEKIFANYASHKGLISGIYEEFKHICK

SEQ ID NO: 796901 - protein, 71 aa, Homo sapiens
WSQLPGVESVQFLVGQAILFSPPSADAGVRLAQLGTFKGLSELQENKNLKWIESTGSGVPADLPGQDGRRT

SEQ ID NO: 796902 - protein, 325 aa, Homo sapiens
LGSRCERPPCPRTALSAHRRASRAGPSTSAPRGRTEAASSAAGCGADPGDEMTTSTLQKAIDLVTKATEEDKAKNYEEALRLYQHAVEYFLHAIKYEAHSDKAKESIRAKCVQYLDRAEKLKDYLRSKEKHGKKPVKENQSEGKGSDSDSEGDNPEKKKLQEQLMGAVVMEKPNIRWNDVAGLEGAKEALKEAVILPIKFPHLFTGKRTPWRGILAVRTPWHREILPGQSRGNRGQQSTFLLCVLLRSDVQVAGGRVKKLVKNLFELARQHKPSIIFIDDGGFPLRVRNENESEAAGGSKRSSWSRCRVGNNNDGTLVLGATNIP

SEQ ID NO: 796903 - protein, 141 aa, Homo sapiens
LGSRCERPPCPRTALSAHRRASRAGPSTSAPRGRTEAASSAAGCGADPGDEMTTSTLQKAIDLVTKATEEDKAKNYEEALRLYQHAVEYFLHAIKYEAHSDKAKESIRAKCVQYLDRAEKLKDYLRSKEKHGKLCLKDRVT

SEQ ID NO: 796904 - protein, 113 aa, Homo sapiens
TLCFVIVMTSGQMWTYIRGEPYVQRDPHTGHKHYISKFSQAQFAAETFIISLFNMCVSLGMVLLDKAATSTMNIRKRKMMCLAGMCLVAIFFSRLLSLFRFKVPDYPYSFVWD

SEQ ID NO: 796905 - protein, 103 aa, Homo sapiens
EEEGKPGSLPRSGGVCVGLRCVLAWVEGGDVHLLESGVLRPRLEAWPRAGAWSLGVGGGGRGGGRPLLGGLLSARPRPRQAAYLHGERRRPMGARGRACWDRA

SEQ ID NO: 796906 - protein, 70 aa, Homo sapiens
  misc_feature (2)..(2): Xaa can be any naturally occurring amino acid
  misc_feature (4)..(4): Xaa can be any naturally occurring amino acid
FXHXGSDCPSVMNEGDSSLATDLQEDVEENPSPTVEENNVVVKKQGPNLHNWSGDWSFWNALLSGSMKWN

SEQ ID NO: 796907 - protein, 165 aa, Homo sapiens
PVTRSARWRWARGGAVRCARGGAAAAEGAAMEGAPTVRQVMNEGDSSLATDLQEDVEENPSPTVEENNVVVKKQGPNLHNWSGDWSFWISSSTYKDRNEEYRRQFTHLPDTERLIADYACALQRDILLQGRLYLSENWLCFYSNIFRWETTVRHFAFDLLIQIIA

SEQ ID NO: 796908 - protein, 333 aa, Homo sapiens
PVTRSARWRWARGGAVRCARGGAAAAEGAAMEGAPTVRQVMNEGDSSLATDLQEDVEENPSPTVEENNVVVKKQGPNLHNWSGDWSFWISSSTYKDRNEEYRRQFTHLPDTERLIADYACALQRDILLQGRLYLSENWLCFYSNIFRWETTISIALKNITFMTKEKTARLIPNAIQIVTESEKFFFTSFGARDRSYLSIFRLWQNVLLDKSLTRQEFWQLLQQNYGTELGLNAEEMENLSLSIEDVQPRSPGRSSLDDSGERDEKLSKSISFTSESISRVSETESFDGNSSKGGLGKEESQNEKQTKKSLLPTLEKKLTRVPSSLDLNMYLSL

SEQ ID NO: 796909 - protein, 68 aa, Homo sapiens
MGPALGASKKFSKHHLRGAAGAPDGQRCTTGPQRAPQEPPGPRRRRGTSHPIKKPPGGTRAFWTTPEG

SEQ ID NO: 796910 - protein, 86 aa, Homo sapiens
  misc_feature (19)..(19): Xaa can be any naturally occurring amino acid
  misc_feature (29)..(29): Xaa can be any naturally occurring amino acid
PELATGAHSPTALFASDGXQMVHRRPPTXATLLGDVVLRIFKHQQKLQLLKRTVPKGLAELVRRARLLANDYSGSRIPSRAGYQGQ

SEQ ID NO: 796911 - protein, 117 aa, Homo sapiens
NGLSCPPATTDWLSEERLWSPLHGFLVQTQISFPLAAFLKLIKSWLKKASSCQQDEKTECREAQGQKQGCQLHEVGDLACCIHFYLLEQRLAQSLSNSNGCKEKEEEVEKRNAVSSA

SEQ ID NO: 796912 - protein, 409 aa, Homo sapiens
AAGLPAVVTGRRCHLQHSVKNMLAAFISRVLRRVAQKSARRVLVASRNSSNDATFEIKKCDLYLLEEGPPVTTVLTRAEGLKYYRMMLTVRRMELKADQLYKQKFIRGFCHLCDGQEACCVGLEAGINPSDHVITSYRAHGVCYTRGLSVRSILAELTGRRGGCAKGKGGSMHMYTKNFYGGNGIVGAQGPLGAGIALACKYKGNDEICLTLYGDGAANQGQIAEAFNMAALWKLPCVFICENNLYGMGTSTERAAASPDYYKRGNFIPGLKVDGMDVLCVREATKFAANYCRSGKGPILMELQTYRYHGHSMSDPGVSYRTREEIQEVRSKRDPIIILQDRMVNSKLATVEELKEIGAEVRKEIDDAAQFATTDPEPHLEELGHHIYSSDSSFEVRGANPWIKFKSVS

SEQ ID NO: 796913 - protein, 82 aa, Homo sapiens
RSFRAQTPSPRPSASPLPGAGSLLGPLRSSAFQAKGKSEPWRTVRRGAETWMRPAISFPAPAFSAHPGSFPPKPLTYKYSAS

SEQ ID NO: 796914 - protein, 136 aa, Homo sapiens [sequence omitted]

SEQ ID NO: 796915 - protein, 353 aa, Homo sapiens [sequence omitted]

SEQ ID NO: 796916 - protein, 353 aa, Homo sapiens [sequence omitted]

SEQ ID NO: 796917 - protein, 100 aa, Homo sapiens
GDEGKEEEEMVAENRRRKTAGVLPVEVQPLLLSDSPECLVLGGGDTNPDLLRHMPTDRGVGDQVRRTWNLKLQTFGILPRCKELTSFIAFVYFSRLRYHC

SEQ ID NO: 796918 - protein, 130 aa, Homo sapiens
ISQITNLNYATNLTHLYLQNNCISCIENLRSLKKLEKLYLGGNYIAVIEGLEGLGELRELHVENQRLPLGEKLLFDPRTLHSLAKSLCILNISNNNIDDITDLELLENLNQLIAVDNQLLHVKESLFEAI

SEQ ID NO: 796919 - protein, 229 aa, Homo sapiens
ISQITNLNYATNLTHLYLQNNCISCIENLRSLKKLEKLYLGGNYIAVIEGLEGLGELRELHVENQRLPLGEKLLFDPRTLHSLAKSLCILNISNNNIDDITDLELLENLNQLIAVDNQLLHVKDLEFLLNKLMKLWKIDLNGNPVCLKPKYRDRLILVSKSLEFLDGKEIKNIERQFLMNWKASKDAKKISKKRSSKNEDASNSLISNFKTMHHIVPVYYPQESLFEAI

SEQ ID NO: 796920 - protein, 185 aa, Homo sapiens
ISQITNLNYATNLTHLYLQNNCISCIENLRSLKKLEKLYLGGNYIAVIEGLEGLGELRELHVENQRLPLGEKLLFDPRTLHSLAKSLCILNISNNNIDDITDLELLENLNQLIAVDNQLLHVKDLEFLLNKLMKLWKIDLNGNPVCLKPKYRDRLILVSKSLGNFKTMHHIVPVYYPQESLFEAI

SEQ ID NO: 796921 - protein, 248 aa, Homo sapiens
ISQITNLNYATNLTHLYLQNNCISCIENLRSLKKLEKLYLGGNYIAVIEGLEGLGELRELHVENQRLPLGEKLLFDPRTLHSLAKSLCILNISNNNIDDITDLELLENLNQLIAVDNQLLHVKDLEFLLNKLMKLWKIDLNGNPVCLKPKYRDRLILVSKSLEFLDGKEIKNIERQFLMNWKASKDAKKISKKRSSKNEDASNSLISNFKTMHHIVPVYYPQVGKPKLAFFSEIQRYPVNANASPESS

SEQ ID NO: 796922 - protein, 125 aa, Homo sapiens
ISQITNLNYATNLTHLYLQNNCISCIENLRSLKKLEKLYLGGNYIAVIEGLEGLGELRELHVENQRLPLGEKLLFDPRTLHSLAKSLCILNISNNNIDDITDLELLENLNQLIAVDNQLLHVKVV

SEQ ID NO: 796923 - protein, 75 aa, Homo sapiens
IDKEEVKLLLFADNMIIYLENPKASSKKLLELINEFTKVSGYKINVHKSVALLYTNSHQAENQIKNSTPFTIAAK

SEQ ID NO: 796924 - protein, 95 aa, Homo sapiens
TCPIGGERRGFLTQLPQTAANSDHSGRVCLLFTPPQLQTMTFSQTSSSNLTLAPSTILYTGNKVLFNEWNFSVHEKAQYLHIQFPLSNVCTRIAN

SEQ ID NO: 796925 - protein, 99 aa, Homo sapiens
VETVSPEGRGEKRPRPDREETLVTQIDEPPSYEEALKQGLPTTRPIAPMATGVLGQHTPVTLDLPPPADTQQKPVLPGPSAVVVTRPSRASLRRAASGP

SEQ ID NO: 796926 - protein, 95 aa, Homo sapiens
LGAKNPGSGNFGQRMRARDAPSQTHTHFSPGLGKSPKAAPSAGKQTLLTEGKDSSIPPALPAATAIDPSFTRGSCNSPAARVGMDFGPWPLGMQR

SEQ ID NO: 796927 - protein, 134 aa, Homo sapiens
HWEGGRWGTIWGFSFPLPQPPPRCQSDLPRLWFPARPIFPLLPEPPTACEINRASASASLGGSGLWALGSGLRVQGRVGTQAVLAQLVPWVTGPHPDPTGVPLTVPASRPLCSARNTSSPHPFHPGKPHPSFKA

SEQ ID NO: 796928 - protein, 86 aa, Homo sapiens
GQQDQATVNSGSASAGRHQLPAARGLALWGSAPCTVSASAGLYGDPAGIPQAGKSLSSPLYTRGNRSLKLVVTFGRADGTMLAVWL

SEQ ID NO: 796929 - protein, 107 aa, Homo sapiens
MSFLFALVPLCLHRGDAGLPGAGAVFTVGLHSQPRIPEFRKPPILRSLPVNPANFSYGGRSYLYYPGQESNLLSASEEDTNLAVQMSLKRESWITHGELPPTPATIF

SEQ ID NO: 796930 - protein, 74 aa, Homo sapiens
MGLVPLEKGLMYPVCPLPLLPREDTEKVPSMRNRPSSDTRSVGALIFNFLASKTVSNTFLLFINDPVCNGGIGK

SEQ ID NO: 796931 - protein, 67 aa, Homo sapiens
YNSTIYRSLEKEDVFTIYTYLIQITGGFQRLRGKAPESKHRTSLVLSVPIAKWPPSKAAALFTPRAM

SEQ ID NO: 796932 - protein, 58 aa, Homo sapiens
MALCRRSYPLHSATSWSLIAEVLVLTLNQNAEPALCSRGSPRTAPTPVKGEPFPGPRR

SEQ ID NO: 796933 - protein, 122 aa, Homo sapiens
MWAEHSDSEAAESGKPSPGKCKHQEQDRKIIHAKRNLRNKFSPETGHGNSPPVFLKKCRLNQHLPTPGKTQELRIPGISAGLLGRAELGWSHGFWADSRFSPAFATCDGWRVSEDDSSVLSL

SEQ ID NO: 796934 - protein, 553 aa, Homo sapiens
MAFSELLDLVGGLGRFQVLQTMALMVSIMWLCTQSMLENFSAAVPSHRCWAPLLDNSTAQASILGSLSPEALLAISIPPGPNQRPHQCRRFRQPQWQLLDPNATATSWSEADTEPCVDGWVYDRSIFTSTIVAKWNLVCDSHALKPMAQSIYLAGILVGAAACGPASDRFGRRLVLTWSYLQMAVMGTAAAFAPAFPVYCLFRFLLAFAVAGVMMNTGTLLMEWTAARARPLVMTLNSLGFSFGHGLTAAVAYGVRDWTLLQLVVSVPFFLCFLYSWWLAESARWLLTTGRLDWGLQELWRVAAINGKGAVQDTLTPEVLLSAMREELSMGQPPASLGTLLRMPGLRFRTCISTLCWFAFGFTFFGLALDLQALGSNIFLLQMFIGVVDIPAKMGALLLLSHLGRRPTLAASLLLAGLCILANTLVPHEMGALRSALAVLGLGGVGAAFTCITIYSSELFPTVLRMTAVGLGQMAARGGAILGPLVRLLGVHGPWLPLLVYGTVPVLSGLAALLLPETQSLPLPDTIQDVQNQAVKKATHGTLGNSVLKSTQF

SEQ ID NO: 796935 - protein, 107 aa, Homo sapiens
MPLSILLGRSQAPVSSGEKDKSSPGRRQLRAGPCYSARALNTPGDATIRCACSVTQGAEAKGRSSAVKAECISEHCTQHRNDQLSPSQLTGLVCSKFSPAPLLLPTR

SEQ ID NO: 796936 - protein, 70 aa, Homo sapiens
WQGSKALGQEMLVESWKTMWGTGSGHRMVIVLLQDLDMDGEKQRRTFQVCPTGHAHHTLPALSRRPVRNT

SEQ ID NO: 796937 - protein, 218 aa, Homo sapiens
SFLFCVRPYFLDSLVFSLSFSFLALMEGPFTSCFWFSPESGIQNSGFCSKNSSYPTFSFAPPTLEGSSVLAFSALLNSHAGLPSYKIWLVFLWEVSGLILFLFLIIILKFLLVFLRQSETLSFKGNGCLSDLILNVDSTIRNPFWKYLIVVSLGGCCLVCTWLMYTAEFIAGPELGRFSIHCGPLVKSEALYLAGFWECILAFGCTSNVISSVLAERL

SEQ ID NO: 796938 - protein, 81 aa, Homo sapiens
AAPGITRSIRNCGGWHFHWKACGCRWKCSPAGLVTEPPGSSDSGVLSPYPSLAAEPGREAMSGTEGKLPTSPAFRLQALDK

SEQ ID NO: 796939 - protein, 73 aa, Homo sapiens
LERKPMERSCAGRKHEVIQMTKRLHAEKSTRHCHRSSVSGVVLSIMLMPRDHGTVPLFPRATANRKIFMQWLF

SEQ ID NO: 796940 - protein, 135 aa, Homo sapiens
PSQTPLQPTGTPAGRIPISPELKKEGPRLHHSPYFHHMSRQDLRTTSCSCMVGMLTSTPGSTANQPSTLAGAGTPADTPPFCTSVHSTVTVHMVPPCTPHLQNSRTSSIPLGTFFGEKLLGSVGACPHRHWYLTP

SEQ ID NO: 796941 - protein, 148 aa, Homo sapiens
FKWAGDLGADEESIRNLFDFTPKYRATHEDQKFKKVKECSSELKYSMELDEDGAWYLKPKLWKKLRSDEPLIDPKLLLKKPDEPDVLDDLYGPIAFKDFILSKGYEMPGIIQRLFARRGWTYDSVKTPIQRAMIFYKYKEIVEASEED

SEQ ID NO: 796942 - protein, 269 aa, Homo sapiens
LRRGAQSRFVRVDCPESAAGAGMEPSRHGYHSFLVEPISCHAWNKDRTQIAICPNNHEVHIYEVTGIDWAPESNRIVTCGTDRNAYVWTLKGRTWKPTLVILRINRAARCVRWAPNENKFAVGSGSRVISICYFEQENDWWVCKHIKKPIRSTVLSLDWHPNNVLLAAGSCDFKCRIFSAYIKEVEERPAPTPWGSKMPFGELMFESSSSCGWVHGVCFSASGSRVAWVSHDSTVCLADADKKMAVATLASETLPLRGWVHGVCFSASG

SEQ ID NO: 796943 - protein, 287 aa, Homo sapiens
LRRGAQSRFVRVDCPESAAGAGMEPSRHGYHSFLVEPISCHAWNKDRTQIAICPNNHEVHIYEKSGAKWTKVHELKEHNGQVTGIDWAPESNRIVTCGTDRNAYVWTLKGRTWKPTLVILRINRAARCVRWAPNENKFAVGSGSRVISICYFEQENDWWVCKHIKKPIRSTVLSLDWHPNNVLLAAGSCDFKCRIFSAYIKEVEERPAPTPWGSKMPFGELMFESSSSCGWVHGVCFSASGSRVAWVSHDSTVCLADADKKMAVATLASETLPLRGWVHGVCFSASG

SEQ ID NO: 796944 - protein, 111 aa, Homo sapiens
ESRCWTLCPAVDDSSPSGSAVLYPGLAASWSPQQSGTGSQNCLHPIGLSCCLPGLLVTRPTGLDIPPTGQLPVQAQLLPAQKDVSGYPFPPHFPALCSSSWCTPSFSPPPC

SEQ ID NO: 796945 - protein, 107 aa, Homo sapiens
FFGKKAFVTLLSSSCLGPMCTGLDVQQPYLITIMARATYYAGETRRQKKRTTANPFDTCGIRNKCYRNLRDTQGNQKTKWRRENHRLGFVLEKIIQKLIPSVLITIC

SEQ ID NO: 796946 - protein, 102 aa, Homo sapiens
MASTLIDICDLVTSPTFFWHTDCSSLPPVLHLSLAVIPIVLFILLLNKSVSFCKAVFWLVLHNNKPLETWLFTLTSDIILMDFGTHRKTTGSPFSKGLFFQN

SEQ ID NO: 796947 - protein, 119 aa, Homo sapiens
AEDPDTVQESLVPQRAQKSMNKQGFQRTQEQRPHPRRPARKHPSARSQQHGPPGRGGLWVPEYLAVQGAPQYSSEVTSQGPQERHQNSSGTREVQAGSGRFLETAPSWSLGPKVEVPDS

SEQ ID NO: 796948 - protein, 200 aa, Homo sapiens
RRQLQTQAKLVLEENKLLLEQLEIQQRKAKDSHQERLQEVSKLTKQLMLLEAKTHGQEKELAENREQLEILRAKCQELKTHSDGKIAVEVHKSIVNELKSQIKKEEETERAEMEELMEKLTVLQAQKKSLLLEKNSLTEQNKALEAELERAQKINRKSQKKIEVLKKQVEKAMGKRNVLLIQYLANLCWLAEKYTQERDS

SEQ ID NO: 796949 - protein, 153 aa, Homo sapiens
MLLEAKTHGQEKELAENREQLEILRAKCQELKTHSDGKIAVEVHKSIVNELKSQIKKEEETERAEMEELMEKLTVLQAQKKSLLLEKNSLTEQNKALEAELERAQKINRKSQKKIEVLKKQVEKAMGKRNVLLIQYLANLCWLAEKYTQERDS

SEQ ID NO: 796950 - protein, 105 aa, Homo sapiens
MLHPLKLNTYMNMFSGLKAALCLNLLRAGLSILCKSVDSHCAPDFHPSLETSCFQVGTRQGINMITWLRVWTLESDMVWLCPHPNLILNCNSHNSHMWWVDPGGR

SEQ ID NO: 796951 - protein, 108 aa, Homo sapiens
AAATTAISKVRRNCLCGPLIPHSEGGGSWVVQGIRKGKPGTCCALQCSFQRKAARGGRHLHLDVRNALPGWARWLTPVIPALWEAEVDRSRSQEMETILANTLKSRLY

SEQ ID NO: 796952 - protein, 189 aa, Homo sapiens
GTEPSALVDDNGSEEDFSYEDLCQASPRYLQPGGEQLAINELISDGNVVCAEALWDHVTMDDQELGFKAGDVIQVLEASNKDWWWGRSEDKEAWFPASFVRLRVNQEELSENSSSTPSEEQDEEASQSRHRHCENKQQMRTNVIREIMDTERVYIKHLRDICEGYIRQCRKHTGMFTVAQLATIFGNIE

SEQ ID NO: 796953 - protein, 122 aa, Homo sapiens
AYLSCRVFLYSNTHPYGSSGILEMTAGRITGVGARDKAGRGLATQGIEYPIDAGHSSFPTRDAQAFHSFTDSNLALRKERLMCDYSLWKIRRKQIRRNRKNKVSLAKVKLQRGTSLKGKTKA

SEQ ID NO: 796954 - protein, 146 aa, Homo sapiens
QSQKELSNHLCVPLLRNEGAAAEAAPLSCVTSGAGPPSLACCWWCSCVLTLGHFLNNISSITAVAPVSKISLRQVLCLLLSIPLGHPVCPECPCDQSHSCFAVREAKQGAESRQTFQCVLYWDSSLQAQKFSFALPICPGGHPSCT

SEQ ID NO: 796955 - protein, 92 aa, Homo sapiens
KKEKSCHRPSSPVPLVSDFESLGGSESSGQQNQKIPQLPSSPENLVSEIPPPQLGYAVSDENLTLGKKAELQHFPGIWKVLNSEMVLFLQIC

SEQ ID NO: 796956 - protein, 119 aa, Homo sapiens
KKEKSCHRPSSPVPLVSDFESLGGSESSGQQNQKIPQLPSSPENLVSEIPPPQLGYAVSDENLTLGKKAELQVSNNAGEDTTEVNTDPFPETWLAIQPSLSLALPSSETDLTQGANPQL

SEQ ID NO: 796957 - protein, 106 aa, Homo sapiens
RPWPLLTPPPGGPGLDGKLNLATLVLELPYLCIFAPARRCPPVSPHLQHSQAAAGSGDGLCVGSGRYDAPLCCLAAGRPWEFCLISAAQLSFLSIVTPTSLDYWED

SEQ ID NO: 796958 - protein, 113 aa, Homo sapiens
SRSGVPAAFGELGSLVSFWYQSPHCTGQAEVEAEADPSLGPDAYSAAFPTVSAPRLTCPPPRQSSVPGPLLFMRRAGGTWGWGCRTLTGCWAVRKRRNRWLLKLLWSQETQGL

SEQ ID NO: 796959 - protein, 328 aa, Homo sapiens
EQIVARVDVSPFCSGLHTATGRIRSFCCFPQVALECLYHREKRIGIDLVHDNVEKNLIREVDLLKCCQEQMRKLAQRIDIQMRDNRDAQHVLERDLEDKSSAQCIDEKCFNLRNTSDCISFFHGMEKIDGTISVPETWAKFSNDNIKHSQNMRANSIRLREEAEHLFETLSDQMWRQFTDTNLAFNARISEVTDVKNKLQTQLAKTLQEIFQAENTIMLLERSIMAKEGPLKVAQTRLECRTRRPNMELCRDIPQLKLVNEVFTIDDTLQTLKLRLRETQDTLQLLVMTKCRLEHELAIKANTLCIDKEKCMGMRKTFPCTPRLVGHT

SEQ ID NO: 796960 - protein, 330 aa, Homo sapiens
VRPRLGGRVVLTTSPNCPSTGRSAKRGFHAYSQVALECLYHREKRIGIDLVHDNVEKNLIREVDLLKCCQEQMRKLAQRIDIQMRDNRDAQHVLERDLEDKSSAQCIDEKCFNLRNTSDCISFFHGMEKIDGTISVPETWAKFSNDNIKHSQNMRANSIRLREEAEHLFETLSDQMWRQFTDTNLAFNARISEVTDVKNKLQTQLAKTLQEIFQAENTIMLLERSIMAKEGPLKVAQTRLECRTRRPNMELCRDIPQLKLVNEVFTIDDTLQTLKLRLRETQDTLQLLVMTKCRLEHELAIKANTLCIDKEKCMGMRKTFPCTPRLVGHT

SEQ ID NO: 796961 - protein, 139 aa, Homo sapiens
SSAFHHDCKAFLVMWNTLQEIFQAENTIMLLERSIMAKEGPLKVAQTRLECRTRRPNMELCRDIPQLKLVNEVFTIDDTLQTLKLRLRETQDTLQLLVMTKCRLEHELAIKANTLCIDKEKCMGMRKTFPCTPRLVGHT

SEQ ID NO: 796962 - protein, 69 aa, Homo sapiens
VFPPVSGQLKPRDDADENILVCVYTMNCQSSDLMVVKKIGNSQTLLRTTFTSLSASTGSPYSQETHRYT

SEQ ID NO: 796963 - protein, 254 aa, Homo sapiens
MGAAGSDGRCCVRSGRAGTGGAGSKWVVMDLWTGGAGSRRAVLGPDGRWVRWAVLGSVRMGGARSKWAAPDPMGGAGFGPDWRVRVWTGGAGSKWGCSAGSGRAVLGPNGRWVPWAVLGSVRTGGAGSKWAALGPMGGTGSGRAVLGLDGRCSIQMGAAGSGRAVLGSVRTGGAGSKWAVLGSAGDRWAWRHRYGAQGRWSALSEGPCAPRARCSSCPRIAPGLLRVSSRVIPFRWVTSKPTFSSCFLPRRTRC

SEQ ID NO: 796964 - protein, 254 aa, Homo sapiens; identical to SEQ ID NO: 796963

SEQ ID NO: 796965 - protein, 254 aa, Homo sapiens; identical to SEQ ID NO: 796963

SEQ ID NO: 796966 - protein, 107 aa, Homo sapiens
ILCQPRLECSSMISAHCNLCLLDSSDSPASASRIAGITDVHHHAWLIFAFLVETGFHHVGHASLELLTSDDPSASASQTAGITGVSHRARPEFFTSFSTRSVHRNAL

SEQ ID NO: 796967 - protein, 47 aa, Homo sapiens
QFLQNNHEIFELEKGDGPGVVAHACNPNTLGSLGRRIASAQESETSL

SEQ ID NO: 796968 - protein, 65 aa, Homo sapiens
PLCFQLTKLLYLLENGSPALPTCEPCLKGARACQWNHLQELQLLLSLIPLCLFFERDKLFMVLHF

SEQ ID NO: 796969 - protein, 131 aa, Homo sapiens [sequence omitted]

SEQ ID NO: 796970 - protein, 68 aa, Homo sapiens
GWGGRQDGGCGRGSSLLSSPAHPPSPSLPPPSLQERAFAPPPPCSVPARLPESRVSPNPHAQDLRTKV

SEQ ID NO: 796971 - protein, 68 aa, Homo sapiens; identical to SEQ ID NO: 796970

SEQ ID NO: 796972 - protein, 65 aa, Homo sapiens
MERAAVQRSAEGGSPKKPGTGFDHQGSGPRPTVRPTPPAARGLKTKKKRQKKPRIRKEKEQHDRD

SEQ ID NO: 796973 - protein, 117 aa, Homo sapiens
SPWEQVWELRASPGTGTSQDVRKTHASCPRILPCGLRTAGPREGRCSSHVPVAAAWLLQVQLALLAPAARKAEPKGAPWAPGALSHFRSSGMWGFVSGFSLAMFVGSNSYALLPEPV

SEQ ID NO: 796974 - protein, 106 aa, Homo sapiens
PSSGGPACSRQAAGSRQVLSGCGRCGPSHLCVLCSALCLGMARPQQILCSTVTPMEPSKKTVSNFPRCWGPPRSWSRAWPAGSTGWWTVAVSRRASSGSRRTQLAR

SEQ ID NO: 796975 - protein, 2149 aa, Homo sapiens
MAQVPGEVDNMEGLPAPNNNPAARWESPDRGWEREQPAASTAAASLFECSRIKALADEREAVQKKTFTKWVNSHLARVGCHIGDLYVDLRDGFVLTRLLEVLSGEQLPRPTRGRMRIHSLENVDKALQFLKEQRVHLENVGSHDIVDGNHRLTLGLVWTIILRFQIQVIKIETEDNRETRSAKDALLLWCQMKTAGYPEVNIQNFTTSWRDGLAFNALIHRHRPDLVDFSKLTKSNANYNLQRAFRTAEQHLGLARLLDPEDVNMEAPDEKSIITYVVSFYHYFSKMKALAVEGKRIGKVLDQVLEVGKIIERYEELAAELLAWIHRTVGLISNQKFANSLSGVQQQLQAFTAYCTLEKPVKFQEKGNLEVLLFSIQSKLRACNRRLFVPREGCGIWDIDKAWGELEKAEHEREAALRAELIRQEKLELLAQRFDHKVAMRESWLNENQRLVSQDNFGYELPAVEAAMKKHEAIEADIAAYEERVQGVAELAQALAAEGYYDIRRVAAQRDSVLRQWALLTGLVGARRTRLEQNLALQKVFQEMVYMVDWMEEMQAQLLSRECGQHLVEADDLLQKHGLLEGDIAAQSERVEALNAAALRFSQPCDPQVICNRVNHVHGCLAELQEQAARRRAELEASRSLWALLQELEEAESWARDKERLLEAAGGGGAAGAAGAAGTAGGAHDLSSTARLLAQHKILQGELGGRRASLQQALRCGEELVAAGGAVGPGADTVHLVGLAERAASARRRWQRLEEAAARRERRLQEARALHQFGADLDGLLDWLRDAYRLAAAGDFGHDEASSRRLARQHRALTGEVEAHRGPVSGLRRQLATLGGASGAGPLVVALQVRVVEAEQLFAEVTEVAALRRQWLRDALAVYRMFGEVHACELWIGEKEQWLLSMRVPDSLDDVEVVQHRFESLDQEMNSLMGRVLDVNHTVQELVEGGHPSSDEVRSCQDHLNSRWNRIVELVEQRKEEMSAVLLVENHVLEVAEVRAQVREKRRAVESAPRAGGALQWRLSGLEAALQALEPRQAALLEEAALLAERFPAQAARLHQGAEELGAEWGALASAAQACGEAVAAAGRLQRFLHDLDAFLDWLVRAQEAAGGSEGPLPNSLEEADALLARHAALKEEVDQREEDYARIVAASEALLAADGAELGPGLALDEWLPHLELGWHKLLGLWKARRKALVQAHIYQLFLRDLRQALVVLRNQEMALSGAELPGTVESVEEALKQHRDFLTTMELSQQKMQVAVQAAEGLLRQGNIYGEQAQEAVTRLLEKNQENQLRAQQWMQKLHDQLELQHFLRDCHELDGWIHEKMLMARDGTREDNHKLHKRWLRHQAFMAELAQNKEWLEKIEREGQQLMQEKPELAASVRKKLGEIRQCWAELESTTQAKARQLFEASKADQLVQSFAELDKKLLHMESQLQDVDPGGDLATVNSQLKKLQSMESQVEEWYREVGELQAQTAALPLEPASKELVGERQNAVGERLVRLLEPLQERRRLLLASKELHQVAHDLDDELAWVQERLPLAMQTERGNGLQAVQQHIKKNQGLRREIQAHGPRLEEVLERAGALASLRSPEAEAVRRGLEQLQSAWAGLREAAERRQQVLDAAFQVEQYYFDVAEVEAWLGEQELLMMSEDKGKDEQSTLQLLKKHLQLEQGVENYEESIAQLSRQCRALLEMGHPDSEQISRRQSQVDRLYVALKELGEERRVALEQQYWLYQLSRQVSELEHWIAEKEVVAGSPELGQDFEHVSVLQEKFSEFASETGMAGRERLAAVNQMVDELIECGHTAAATMAEWKDGLNEAWAELLELMGTRAQLLAASRELHKFFSDARELQGQIEEKRRRLPRLTTPPEPRPSASSMQRTLRAFEHDLQLLVSQVRQLQEGAAQLRTVYAGEHAEAIASREQEVLQGWKELLSACEDARLHVSSTADALRFHSQVRDLLSWMDGIASQIGAADKPRDVSSVEVLMNYHQGLKTELEARVPELTTCQELGRSLLLNKSAMADEIQAQLDKLGTRKEEVSEKWDRHWEWLQQMLEVHQFAQEAVVADAWLTAQEPLLQSRELGSSVDEVEQLIRRHEAFRKAAAAWEERFSSLRRLTTPRREDHLNPGVQDQPWQHTEKPSLPKPKANKEKTARRDGTCL

SEQ ID NO: 796976 - protein, 2588 aa, Homo sapiens
MAQVPGEVDNMEGLPAPNNNPAARWESPDRGWEREQPAASTAAASLFECSRIKALADEREAVQKKTFTKWVNSHLARVGCHIGDLYVDLRDGFVLTRLLEVLSGEQLPRPTRGRMRIHSLENVDKALQFLKEQRVHLENVGSHDIVDGNHRLTLGLVWTIILRFQIQVIKIETEDNRETRSAKDALLLWCQMKTAGYPEVNIQNFTTSWRDGLAFNALIHRHRPDLVDFSKLTKSNANYNLQRAFRTAEQHLGLARLLDPEDVNMEAPDEKSIITYVVSFYHYFSKMKALAVEGKRIGKVLDQVLEVGKIIERYEELAAELLAWIHRTVGLISNQKFANSLSGVQQQLQAFTAYCTLEKPVKFQEKGNLEVLLFSIQSKLRACNRRLFVPREGCGIWDIDKAWGELEKAEHEREAALRAELIRQEKLELLAQRFDHKVAMRESWLNENQRLVSQDNFGYELPAVEAAMKKHEAIEADIAAYEERVQGVAELAQALAAEGYYDIRRVAAQRDSVLRQWALLTGLVGARRTRLEQNLALQKVFQEMVYMVDWMEEMQAQLLSRECGQHLVEADDLLQKHGLLEGDIAAQSERVEALNAAALRFSQPCDPQVICNRVNHVHGCLAELQEQAARRRAELEASRSLWALLQELEEAESWARDKERLLEAAGGGGAAGAAGAAGTAGGAHDLSSTARLLAQHKILQGELGGRRASLQQALRCGEELVAAGGAVGPGADTVHLVGLAERAASARRRWQRLEEAAARRERRLQEARALHQFGADLDGLLDWLRDAYRLAAAGDFGHDEASSRRLARQHRALTGEVEAHRGPVSGLRRQLATLGGASGAGPLVVALQVRVVEAEQLFAEVTEVAALRRQWLRDALAVYRMFGEVHACELWIGEKEQWLLSMRVPDSLDDVEVVQHRFESLDQEMNSLMGRVLDVNHTVQELVEGGHPSSDEVRSCQDHLNSRWNRIVELVEQRKEEMSAVLLVENHVLEVAEVRAQVREKRRAVESAPRAGGALQWRLSGLEAALQALEPRQAALLEEAALLAERFPAQAARLHQGAEELGAEWGALASAAQACGEAVAAAGRLQRFLHDLDAFLDWLVRAQEAAGGSEGPLPNSLEEADALLARHAALKEEVDQREEDYARIVAASEALLAADGAELGPGLALDEWLPHLELGWHKLLGLWKARRKALVQAHIYQLFLRDLRQALVVLRNQEMALSGAELPGTVESVEEALKQHRDFLTTMELSQQKMQVAVQAAEGLLRQGNIYGEQAQEAVTRLLEKMPHYPSCSSAPSLGTPIPPQIQQLEARHRNQENQLRAQQWMQKLHDQLELQHFLRDCHELDGWIHEKMLMARDGTREDNHKLHKRWLRHQAFMAELAQNKEWLEKIEREGQQLMQEKPELAASVRKKLGEIRQCWAELESTTQAKARQLFEASKADQLVQSFAELDKKLLHMESQLQDVDPGGDLATVNSQLKKLQSMESQVEEWYREVGELQAQTAALPLEPASKELVGERQNAVGERLVRLLEPLQERRRLLLASKELHQVAHDLDDELAWVQERLPLAMQTERGNGLQAVQQHIKKNQGLRREIQAHGPRLEEVLERAGALASLRSPEAEAVRRGLEQLQSAWAGLREAAERRQQVLDAAFQVEQYYFDVAEVEAWLGEQELLMMSEDKGKDEQSTLQLLKKHLQLEQGVENYEESIAQLSRQCRALLEMGHPDSEQISRRQSQVDRLYVALKELGEERRVALEQQYWLYQLSRQVSELEHWIAEKEVVAGSPELGQDFEHVSVLQEKFSEFASETGMAGRERLAAVNQMVDELIECGHTAAATMAEWKDGLNEAWAELLELMGTRAQLLAASRELHKFFSDARELQGQIEEKRRRLPRLTTPPEPRPSASSMQRTLRAFEHDLQLLVSQVRQLQEGAAQLRTVYAGEHAEAIASREQEVLQGWKELLSACEDARLHVSSTADALRFHSQVRDLLSWMDGIASQIGAADKPRDVSSVEVLMNYHQGLKTELEARVPELTTCQELGRSLLLNKSAMADEIQAQLDKLGTRKEEVSEKWDRHWEWLQQMLEVHQFAQEAVVADAWLTAQEPLLQSRELGSSVDEVEQLIRRHEAFRKAAAAWEERFSSLRRLTTIEKIKAEQSKQPPTPLLGRKFFGDPTELAAKAAPLLRPGGYERGLEPLARRASDTLSAEVRTRVGYVRQELKPERLQPRIDRLPEIPGRVEPAALPAAPEDAAETPATPAAAEQVRPRPERQESADRAEELPRRRRPERQESVDQSEEAARRRRPERQESAEHEAAHSLTLGRYEQMERRRERRERRLERQESSEQEMPIRGDLVKGKATLADIVEQLQEKEAGPGLPAGPSLPQPRELPPGRLPNGLELPERTPRPDRPRARDRPKPRRRPRPREGGEGGGSRRSRSAPAQGGSAPAPPPPPTHTVQHEGFLLRKRELDANRKSSNRSWVSLYCVLSKGELGFYKDSKGPASGSTHGGEPLLSLHKATSEVASDYKKKKHVFKLQTQDGSEFLLQAKDEEEMNGWLEAVASSVAEHAEIARWGQTLPTTSSTDEGNPKREGGDRRASGRRK

SEQ ID NO: 796977 - protein, 51 aa, Homo sapiens
MSPFSEQISRRQSQVDRLYVALKELGEERRVALEQQYWLYQLSRQVSELEH

SEQ ID NO: 796978 - protein, 2559 aa, Homo sapiens
MAQVPGEVDNMEGLPAPNNNPAARWESPDRGWEREQPAASTAAASLFECSRIKALADEREAVQKKTFTKWVNSHLARVGCHIGDLYVDLRDGFVLTRLLEVLSGEQLPRPTRGRMRIHSLENVDKALQFLKEQRVHLENVGSHDIVDGNHRLTLGLVWTIILRFQIQVIKIETEDNRETRSAKDALLLWCQMKTAGYPEVNIQNFTTSWRDGLAFNALIHRHRPDLVDFSKLTKSNANYNLQRAFRTAEQHLGLARLLDPEDVNMEAPDEKSIITYVVSFYHYFSKMKALAVEGKRIGKVLDQVLEVGKIIERYEELAAELLAWIHRTVGLISNQKFANSLSGVQQQLQAFTAYCTLEKPVKFQEKGNLEVLLFSIQSKLRACNRRLFVPREGCGIWDIDKAWGELEKAEHEREAALRAELIRQEKLELLAQRFDHKVAMRESWLNENQRLVSQDNFGYELPAVEAAMKKHEAIEADIAAYEERVQGVAELAQALAAEGYYDIRRVAAQRDSVLRQWALLTGLVGARRTRLEQNLALQKVFQEMVYMVDWMEEMQAQLLSRECGQHLVEADDLLQKHGLLEGDIAAQSERVEALNAAALRFSQPCDPQVICNRVNHVHGCLAELQEQAARRRAELEASRSLWALLQELEEAESWARDKERLLEAAGGGGAAGAAGAAGTAGGAHDLSSTARLLAQHKILQGELGGRRASLQQALRCGEELVAAGGAVGPGADTVHLVGLAERAASARRRWQRLEEAAARRERRLQEARALHQFGADLDGLLDWLRDAYRLAAAGDFGHDEASSRRLARQHRALTGEVEAHRGPVSGLRRQLATLGGASGAGPLVVALQVRVVEAEQLFAEVTEVAALRRQWLRDALAVYRMFGEVHACELWIGEKEQWLLSMRVPDSLDDVEVVQHRFESLDQEMNSLMGRVLDVNHTVQELVEGGHPSSDEVRSCQDHLNSRWNRIVELVEQRKEEMSAVLLVENHVLEVAEVRAQVREKRRAVESAPRAGGALQWRLSGLEAALQALEPRQAALLEEAALLAERFPAQAARLHQGAEELGAEWGALASAAQACGEAVAAAGRLQRFLHDLDAFLDWLVRAQEAAGGSEGPLPNSLEEADALLARHAALKEEVDQREEDYARIVAASEALLAADGAELGPGLALDEWLPHLELGWHKLLGLWKARRKALVQAHIYQLFLRDLRQALVVLRNQEMALSGAELPGTVESVEEALKQHRDFLTTMELSQQKMQVAVQAAEGLLRQGNIYGEQAQEAVTRLLEKNQENQLRAQQWMQKLHDQLELQHFLRDCHELDGWIHEKMLMARDGTREDNHKLHKRWLRHQAFMAELAQNKEWLEKIEREGQQLMQEKPELAASVRKKLGEIRQCWAELESTTQAKARQLFEASKADQLVQSFAELDKKLLHMESQLQDVDPGGDLATVNSQLKKLQSMESQVEEWYREVGELQAQTAALPLEPASKELVGERQNAVGERLVRLLEPLQERRRLLLASKELHQVAHDLDDELAWVQERLPLAMQTERGNGLQAVQQHIKKNQGLRREIQAHGPRLEEVLERAGALASLRSPEAEAVRRGLEQLQSAWAGLREAAERRQQVLDAAFQVEQYYFDVAEVEAWLGEQELLMMSEDKGKDEQSTLQLLKKHLQLEQGVENYEESIAQLSRQCRALLEMGHPDSEQISRRQSQVDRLYVALKELGEERRVALEQQYWLYQLSRQVSELEHWIAEKEVVAGSPELGQDFEHVSVLQEKFSEFASETGMAGRERLAAVNQMVDELIECGHTAAATMAEWKDGLNEAWAELLELMGTRAQLLAASRELHKFFSDARELQGQIEEKRRRLPRLTTPPEPRPSASSMQRTLRAFEHDLQLLVSQVRQLQEGAAQLRTVYAGEHAEAIASREQEVLQGWKELLSACEDARLHVSSTADALRFHSQVRDLLSWMDGIASQIGAADKPRDVSSVEVLMNYHQGLKTELEARVPELTTCQELGRSLLLNKSAMADEIQAQLDKLGTRKEEVSEKWDRHWEWLQQMLEVHQFAQEAVVADAWLTAQEPLLQSRELGSSVDEVEQLIRRHEAFRKAAAAWEERFSSLRRLTTIEKIKAEQSKQPPTPLLGRKFFGDPTELAAKAAPLLRPGGYERGLEPLARRASDTLSAEVRTRVGYVRQELKPERLQPRIDRLPEIPGRVEPAALPAAPEDAAETPATPAAAEQVRPRPERQESADRAEELPRRRRPERQESVDQSEEAARRRRPERQESAEHEAAHSLTLGRYEQMERRRERRERRLERQESSEQEMPIRGDLVKGKATLADIVEQLQEKEAGPGLPAGPSLPQPRELPPGRLPNGLELPERTPRPDRPRARDRPKPRRRPRPREGGEGGGSRRSRSAPAQGGSAPAPPPPPTHTVQHEGFLLRKRELDANRKSSNRSWVSLYCVLSKGELGFYKDSKGPASGSTHGGEPLLSLHKATSEVASDYKKKKHVFKLQTQDGSEFLLQAKDEEEMNGWLEAVASSVAEHAEIARWGQTLPTTSSTDEGNPKREGGDRRASGRRK

SEQ ID NO: 796979 - protein, 723 aa, Homo sapiens
RPPEPQPSPPLPLPSQLRGEHPPARCRDAPPTPLPLQLDGWIHEKMLMARDGTREDNHKLHKRWLRHQAFMAELAQNKEWLEKIEREGQQLMQEKPELAASVRKKLGEIRQCWAELESTTQAKARQLFEASKADQLVQSFAELDKKLLHMESQLQDVDPGGDLATVNSQLKKLQSMESQVEEWYREVGELQAQTAALPLEPASKELVGERQNAVGERLVRLLEPLQERRRLLLASKELHQVAHDLDDELAWVQERLPLAMQTERGNGLQAVQQHIKKNQGLRREIQAHGPRLEEVLERAGALASLRSPEAEAVRRGLEQLQSAWAGLREAAERRQQVLDAAFQVEQYYFDVAEVEAWLGEQELLMMSEDKGKDEQSTLQLLKKHLQLEQGVENYEESIAQLSRQCRALLEMGHPDSEQISRRQSQVDRLYVALKELGEERRVALEQQYWLYQLSRQVSELEHWIAEKEVVAGSPELGQDFEHVSVLQEKFSEFASETGMAGRERLAAVNQMVDELIECGHTAAATMAEWKDGLNEAWAELLELMGTRAQLLAASRELHKFFSDARELQGQIEEKRRRLPRLTTPPEPRPSASSMQRTLRAFEHDLQLLVSQVRQLQEGAAQLRTVYAGEHAEAIASREQEVLQGWKELLSACEDARLHVSSTADALRFHSQVRDLLSWMDGIASQIGAADKPRCPSSLLGLPASPWWPTPATPSPLTAPFSME

SEQ ID NO: 796980 - protein, 164 aa, Homo sapiens
MEVTCLLLLALIPFHCRGQGVYAPAQAQIVHAGQACVVKEDNISERVYTIREGDTLMLQCLVTGHPRPQVRWTKTAGSASDKFQETSVFNETLRIERIARTQGGRYYCKAENGVGVPAIKSIRVDVQCELRPPLSPGPDSPARARGRPRDEVRWGSGHGVERRS

SEQ ID NO: 796981 - protein, 92 aa, Homo sapiens
MGERGCRCRALSAEAPTPCESDSLTLPRLAAQVRWTKTAGSASDKFQETSVFNETLRIERIARTQGGRYYCKAENGVGVPAIKSIRVDVQCE

SEQ ID NO: 796982 - protein, 106 aa, Homo sapiens
GAPLAVRAVTPVSIAHGTAVMRLSVPPQQASGQTPPRVIGVVIQGPEVKSKAVAKKQERDVETLQFVEEKLADGNKTVTHVVVVSVPSATALPVTMKTEGLVTCEK

SEQ ID NO: 796983 - protein, 160 aa, Homo sapiens
TKGRAKIRKMKVTTKINHHDKINGKRKTAKKQKMFQRAQELRRRAEDYHKCKIPPSARKALCNWVRMAAAEHRHSSGLPYWPYLTAEILKNRMGHQPPPPTQQHSIIDNSLSLKTPPECLLTPLPPSADDYLKTPPECLLTPLPPSAPPSSDDNLKTPPE

SEQ ID NO: 796984 - protein, 160 aa, Homo sapiens; identical to SEQ ID NO: 796983

SEQ ID NO: 796985 - protein, 160 aa, Homo sapiens; identical to SEQ ID NO: 796983

SEQ ID NO: 796986 - protein, 160 aa, Homo sapiens; identical to SEQ ID NO: 796983

SEQ ID NO: 796987 - protein, 160 aa, Homo sapiens; identical to SEQ ID NO: 796983

SEQ ID NO: 796988 - protein, 89 aa, Homo sapiens
AQMGAVPEMLILSVQRERMRAGLEGRRHKTAKEEEDYRHEATRSYSAALPSSPGDSPVTTQTLRECGLANRRGTTQGQNTEAYSPGMSI

SEQ ID NO: 796989 - protein, 101 aa, Homo sapiens
RRSRHANTDSSWPTGFSQPSESAAPPASLFQPGRRDALRACALSRPPSPLSPAGALVRVGRGEQVPLLQRPRPRRLRNGHLRPLSPPESLSLSHLQAKQHT

SEQ ID NO: 796990 - protein, 141 aa, Homo sapiens
RAKEISTIGMLMLVHKKSFTKYLVTSIMSSDRRQHSHWHRLWGQLCFWGQHCFWGMALFLGRPPSAQAATNRSDTQSQEVVMNSLLWLKLFAAWCFLKDFSLNNRAKTQTAFIQNKRKSYPELNLHMRIKHALPSPRKSNT

SEQ ID NO: 796991 - protein, 71 aa, Homo sapiens
LAAQHGGPAPPQPPDAEPEEPRFQLEELALPSGLWRPKLAGQASSLHHPATGDQGAGFPRTRENCSHLCTC

SEQ ID NO: 796992 - protein, 102 aa, Homo sapiens
MPPKNKEKGKKSGAHKKKKNWGESWWVEVPPASPCSAMKTTQSSSRENSAFCRTGWSSLDLPLSCPHSQIQGAEEVGKWSPTLSFKPHLALCLPNIFVMCIL

SEQ ID NO: 796993 - protein, 85 aa, Homo sapiens
PGTAGLSKAMTCTLPSATTEPGGLAASCVTNLEECGTGHFCSQRVYCPLLCRPKVTEADLPRSEIYFAQVEDVRGKKKYKFQCYL

SEQ ID NO: 796994 - protein, 112 aa, Homo sapiens
DSSSNGFEWNHRIKLIEIIIKWNRMVSLNGIEWNHHQMEMNGIVIEWNRMESSNGLEWNNHGTESNGIIIGWKRMESSSNGNERSHHLMELHGIIIKWNRMESTSNGIKWNH

SEQ ID NO: 796995 - protein, 74 aa, Homo sapiens
RPGALQDPPSPPLLGSLDQHPFLGGWSLVLISSYISHSLQGKISSPYPSCFCRRAPGCVGRTSVSRVDLPSTEE

SEQ ID NO: 796996 - protein, 111 aa, Homo sapiens
MAPPQARACLGIRAALAVACSLTTRREPCPAEKKSPSVREEAPTKLRTRAETRRRWGRCLGAVPLPPLTLQMTELRPRAAKWLAQGHPAGTGRKSLPQGLCGSSVTIKDQR

SEQ ID NO: 796997 - protein, 124 aa, Homo sapiens [sequence omitted]

SEQ ID NO: 796998 - protein, 474 aa, Homo sapiens
MKFIQLERLYHEQLLANLSAIQEQWETKWKTVQPHTVTALRNSEKGFNGEDFERLTKICATHQDPLLSKHKIAAVEKSQERKCSTQLLVSEDPKEGGATTKESESKTCLGTESSKESQHTVEPLGSSPCCHQMDVQTDSPSLSVTAGKDHMEELLCSAEATLALHTQSSETAGSPSGPDSSEDACEDDSRLQLAQTEACQDVARIEGIAEDPKVFLSSKSKTEPLISPGCDRIPPALISEGKYSQAQRKELRLPLRDASEALPTDQLENNELNELQQPDLTDSDGKSPQAQADSDGSENVLCGNNQISDLGILLPEVCMAPEEKGDKDDQLNKETEDYLNSLLEGCLKDTEDSLSYEDNQDDDSDLLQDLSPEEASYSLQENLPSDESCLSLDDLAKRIEIAEVVPTEGLVSILKKRNDTVGDHPAQMQHKPSKRRVRFQEIDDSLDQESLGFGELRTLNECSYVHKSYLNKVV

SEQ ID NO: 796999 - protein, 407 aa, Homo sapiens [sequence omitted]

SEQ ID NO: 797000 - protein, 119 aa, Homo sapiens
LLCNGEKRGPLPAAPALLPRPARAREDHEGTGVGAGSVWGQRVGLWGGYRKETGRVQLFERFSPSTSVCEKARSWVEGSCQDCLLDWVIVHFFILHLKRPRDLSKLIYLPMTVRKTKKL

SEQ ID NO: 797001 - protein, 89 aa, Homo sapiens
LLCNGEKRGPLPAAPALLPRPARAREDHEGTGVGAGSVWGQRVGLWGGYRKETGRVQLFERFSPSTSVCEKARSWVEGSCQDCLLDWVR

SEQ ID NO: 797002 - protein, 82 aa, Homo sapiens
SPGSRRSTSRLDSLSRTLSPSLSRASGLGRESPDSRLSLGRSCLEEWDDGASMALSEACSQYSHPSLARSLSVPPRPRSSAS

SEQ ID NO: 797003 - protein, 120 aa, Homo sapiens
FFETESCSVAQAGAQWRDLSSLQHLLGSSDSPASASQVAGITGMRHHARLIFVFLVETGFRHVGQAGLKLLTLSDPSASSSQSARITGMSHHAQPLLRALCAALHLILIYIIYPLEVSSI

SEQ ID NO: 797004 - protein, 132 aa, Homo sapiens
MAFDSTWKVDRSENYDKFMEKMGVNIVKRKLAAHDNLKLTITQEGNKFTVKESSAFRNIEVVFELGVTFNYNLADGTELRGTWSLEGNKLIGKFKRTDNGNELNTVREIIGDELVQTYVYEGVEAKRIFKKD

SEQ ID NO: 797005 - protein, 140 aa, Homo sapiens
SSEGSQIPQPPGARAGQPPAGHTFSQQPRRGVCCPPHRAGHDLLEVLAQLAGGEVGGQPGAAGLDHRHLPDPWAWLRPEHYPNSPTPFQPSSPNPKPAGPQVEAGQRPGGQPLPSPVTPLPSGHGRSHRQPSPRDVCVCV

SEQ ID NO: 797006 - protein, 149 aa, Homo sapiens
MALRWGIVSVGLISSDFTAVLQTLPRSEHQVVAVAARDLSRAKEFAQKHDIPKAYGSYEELAKDPSVGHLDPLLSCLRGSEVCFGPGNSRRPPGGSGRIWEESHPRSPGRRPGPGWGGPAGHRHLLCPVHLHGLWRAEAREDFCRGKAS

SEQ ID NO: 797007 - protein, 334 aa, Homo sapiens
MALRWGIVSVGLISSDFTAVLQTLPRSEHQVVAVAARDLSRAKEFAQKHDIPKAYGSYEELAKDPSVEVAYIGTQHPQHKAAVMLCLAAGKAVLCEKPTGVNAAEVREMVAEARSRALFLMEAIWTRFFPASEALRSVLAQGTLGDLRVARAEFGKNLIHVPRAVDRAQAGGALLDIGIYCVQFTSMVFGGQKPEKISVVGRRHETGVDDTVTVLLQYPGEVHGSFTCSITVQLSNTASVSGTKGMVQLLNPCWCPTELVVKGEHKEFPLPPVPKDCNFDNGAGMSYEAKHVWECLRKGMKESPVIPLSESELLADILEEVRKAIGVTFPQDKR

SEQ ID NO: 797008 - protein, 228 aa, Homo sapiens
MALRWGIVSVGLISSDFTAVLQTLPRSEHQVVAVAARDLSRAKEFAQKHDIPKAYGSYEELAKDPSVEVAYIGTQHPQHKAAVMLCLAAGKAVLCEKPTGVNAAEVREMVAEARSRALFLMEAIWTRFFPASEALRSVLAQGTLGDLRVARAEFGKNLIHVPRAVDRAQAGGALLDIGIYCVQFTSMVFGGQKPEKISVVGRRHETGTIYPGIFHGDGNDSVSLGALN

SEQ ID NO: 797009 - protein, 36 aa, Homo sapiens
CPSQKILWPPPYGPVLLPYATSSVTYPKGPGLVFVP

SEQ ID NO: 797010 - protein, 100 aa, Homo sapiens
ARGSWGGTPPAATTRFADDIPLAVMELVSAWRRLDPGRLQGPESHPSHSLEAGSAVGKLPAKAQERVILYPVQLHLGGFSFLTTSSSTGFVTVLTPTQTS

SEQ ID NO: 797011 - protein, 87 aa, Homo sapiens
  misc_feature (4)..(4): Xaa can be any naturally occurring amino acid
  misc_feature (8)..(8): Xaa can be any naturally occurring amino acid
  misc_feature (15)..(15): Xaa can be any naturally occurring amino acid
  misc_feature (45)..(45): Xaa can be any naturally occurring amino acid
LVVXPMVXPTVKEFXTRAQKKGTIPAVVIRQRKSYRRKDGVFLYXEDNAGVIVNNKGEMKGSAITGPVAKECADLWPRIASNAGSIA

SEQ ID NO: 797012 - protein, 83 aa, Homo sapiens
VGCFKGGTMKKLLWKPLWGPGLVTKLALLIVIIDGGIFSFSQTAGAVETCPALCDQFISNKTAKIRASVNLLVKLDTSSFCFM

SEQ ID NO: 797013 - protein, 101 aa, Homo sapiens
RCPCQKDPWRTEHRMTRAGARGFLGAVPSFQATAVLLDGVRALGCRSDFQVLLSTSLLINQLQESACQVVSHKQGTLTVIWLKHLSSVTDASPASSLIKGQ

SEQ ID NO: 797014 - protein, 206 aa, Homo sapiens
  misc_feature (27)..(28): Xaa can be any naturally occurring amino acid
RDRSSTGANKEQTNPRIPSKEYTFVMXXGPETWVGGPGSVVIAAKMGKRPLNTSLVPNSARAHQCKVSMTALFLMSMLFGLACGQAMSFCIPTEYTMHIERRECAYCLTINTTICAGYCMTRDINGKLFLPKYALSQDVCTYRDFIYRTVEIPGCPLHVAPYFSYPVALSCKCGKCNTDYSDCIHEAIKTNYCTKPQKSYLVGFSV

SEQ ID NO: 797015 - protein, 154 aa, Homo sapiens
  misc_feature (27)..(28): Xaa can be any naturally occurring amino acid
RDRSSTGANKEQTNPRIPSKEYTFVMXXGPETWVGGPGSVVIAAKMGKRPLNTSLVPNSARAHQCKVSMTALFLMSMLFGLACGQAMSFCIPTEYTMHIERRECAYCLTINTTICAGYCMTRDINGKLFLPKYALSQDVCTYSMLLPIFPILLL

SEQ ID NO: 797016 - protein, 117 aa, Homo sapiens
KRQNCGDSKNHQWLRGWRVGEERAEPRVFRSMKPFCILCKWRTRVLHLSESTEWLTPRVGSNGCRGLGVMAHPCGLAALINVCSGGRGCAGVMVREAVHAWGQGVCGTLCTFCSILP

SEQ ID NO: 797017 - protein, 116 aa, Homo sapiens
  misc_feature (111)..(111): Xaa can be any naturally occurring amino acid
MSKGHRIEEVPELPLVVEDKVEGYKKTKEAVLLLKKLKAWNDIKKDYASQRMRAGKGKMRNRHCIQCTGPYIIYNEDNGIIKAFRNIPGITLLNVSKLNILKLAPGWACWXFLHLD

SEQ ID NO: 797018 - protein, 1371 aa, Homo sapiens [sequence omitted]

SEQ ID NO: 797019 - protein, 1275 aa, Homo sapiens
MSLDFGSVALPVQNEDEEYDEEDYEREKELQQLLTDLPHDMLDDDLSSPELQYSDCSEDGTDGQPHHPEQLEMSWNEQMLPKSQSVNGPSCQGLEPYNKVTYKPYQSSAQNNGSPAQEITGSDTFEGLQQQFLGANENSAENMQIIQLQVLNKAKERQLENLIEKLNESERQIRYLNHQLVIIKDEKDGLTLSLRESQKLFQNGKEREIQLEAQIKALETQIQALKVNEEQMIKKSRTTEMALESLKQQLVDLHHSESLQRAREQHESIVMGLTKKYEEQVLSLQKNLDATVTALKEQEDICSRLKDHVKQLERNQEAIKLEKTEIINKLTRSLEESQKQCAHLLQSGSVQEVAQLQFQLQQAQKAHAMSANMNKALQEELTELKDEISLYESAAKLGIHPSDSEGELNIELTESYVDLGIKKVNWKKSKVTSIVQEEDPNEELSKDEFILKLKAEVQRLLGSNSMKRHLVSQLQNDLKDCHKKIEDLHQVKKDEKSIEVETKTDTSEKPKNQLWPESSTSDVVRDDILLLKNEIQVLQQQNQELKETEGKLRNTNQDLCNQMRQMVQDFDHDKQEAVDRCERTYQQHHEAMKTQIRESLLAKHALEKQQLFEAYERTHLQLRSELDKLNKEVTAVQECYLEVCREKDNLELTLRKTTEKEQQTQEKIKEKLIQQLEKEWQSKLDQTIKAMKKKTLDCGSQTDQVTTSDVISKKEMAIMIEEQKCTIQQNLEQEKDIAIKGAMKKLEIELELKHCENITKQVEIAVQNAHQRWLGELPELAEYQALVKAEQKKWEEQHEVSVNKRISFAVSEAKEKWKSELENMRKNILPGKELEEKIHSLQKELELKNEEVPVVIRAELAKARSEWNKEKQEEIHRIQEQNEQDYRQFLDDHRNKINEVLAAAKEDFMKQKTELLLQKETELQTCLDQSRREWTMQEAKRIQLEIYQYEEDILTVLGVLLSDTQKEHISDSEDKQLLEIMSTCSSKWMSVQYFEKLKGCIQKAFQDTLPLLVENADPEWKKRNMAELSKDSASQGTGQGDPGPAAGHHAQPLALQATEAEADKKKVLEIKDLCCGHCFQELEKAKQECQDLKGKLEKCCRHLQHLERKHKAVVEKIGEENNKVVEELIEENNDMKNKLEELQTLCKTPPRSLSAGAIENACLPCSGGALEELRGQYIKAVKKIKCDMLRYIQESKERAAEMVKAEVLRERQETARKMRKYYLICLQQILQDDGKEGAEKKIMNAASKLATMAKLLETPISSKSQSKTTQSGMSK

SEQ ID NO: 797020 - protein, 1368 aa, Homo sapiens
MSLDFGSVALPVQNEDEEYDEEDYEREKELQQLLTDLPHDMLDDDLSSPELQYSDCSEDGTDGQPHHPEQLEMSWNEQMLPKSQSVNGYNEIQSLYAGEKCGNVWEENRSKTEDRHPVYHPEEGGDEGGSGYSPPSKCEQTDLYHLPENFRPYTNGQKQEFNNQATNVIKFSDPQWNHFQGPSCQGLEPYNKVTYKPYQSSAQNNGSPAQEITGSDTFEGLQQQFLGANENSAENMQIIQLQVLNKAKERQLENLIEKLNESERQIRYLNHQLVIIKDEKDGLTLSLRESQKLFQNGKEREIQLEAQIKALETQIQALKVNEEQMIKKSRTTEMALESLKQQLVDLHHSESLQRAREQHESIVMGLTKKYEEQVLSLQKNLDATVTALKEQEDICSRLKDHVKQLERNQEAIKLEKTEIINKLTRSLEESQKQCAHLLQSGSVQEVAQLQFQLQQAQKAHAMSANMNKALQEELTELKDEISLYESAAKLGIHPSDSEGELNIELTESYVDLGIKKVNWKKSKVTSIVQEEDPNEELSKDEFILKLKAEVQRLLGSNSMKRHLVSQLQNDLKDCHKKIEDLHQVKKDEKSIEVETKTDTSEKPKNQLWPESSTSDVVRDDILLLKNEIQVLQQQNQELKETEGKLRNTNQDLCNQMRQMVQDFDHDKQEAVDRCERTYQQHHEAMKTQIRESLLAKHALEKQQLFEAYERTHLQLRSELDKLNKEVTAVQECYLEVCREKDNLELTLRKTTEKEQQTQEKIKEKLIQQLEKEWQSKLDQTIKAMKKKTLDCGSQTDQVTTSDVISKKEMAIMIEEQKCTIQQNLEQEKDIAIKGAMKKLEIELELKHCENITKQVEIAVQNAHQRWLGELPELAEYQALVKAEQKKWEEQHEVSVNKRISFAVSEAKEKWKSELENMRKNILPGKELEEKIHSLQKELELKNEEVPVVIRAELAKARSEWNKEKQEEIHRIQEQNEQDYRQFLDDHRNKINEVLAAAKEDFMKQKTELLLQKETELQTCLDQSRREWTMQEAKRIQLEIYQYEEDILTVLGVLLSDTQKEHISDSEDKQLLEIMSTCSSKWMSVQYFEKLKGCIQKAFQDTLPLLVENADPEWKKRNMAELSKDSASQGTGQGDPGPAAGHHAQPLALQATEAEADKKKVLEIKDLCCGHCFQELEKAKQECQDLKGKLEKCCRHLQHLERKHKAVVEKIGEENNKVVEELIEENNDMKNKLEELQTLCKTPPRSLSAGAIENACLPCSGGALEELRGQYIKAVKKIKCDMLRYIQESKERAAEMVKAEVLRERQETARKMRKYYLICLQQILQDDGKEGAEKKIMNAASKLATMAKLLETPISSKSQSKTTQSGMSK

SEQ ID NO: 797021 - protein, 72 aa, Homo sapiens
PCRSLYTNLPASRQLSPLEPKLYMSACTGMGSSPPKSKDMDNEGRDKAEIEDEDEDEFKDEDQDEDKDEDGV

SEQ ID NO: 797022 - protein, 83 aa, Homo sapiens
MGKFMKPGKVVLVLAGRYSGCKAVIVKNIDDSTSDCPYSHALVSGIDHYPCKVTAAMGKKKITKGSKIKSFAKVCNYNHLMPK

SEQ ID NO: 797023 - protein, 1074 aa, Homo sapiens
MSLKNEPRVNTSALQKIAADMSNIIENLDTRELHFEGEEVDYDVSPSDPKIQEVYIPFSAIYNTQGFKEPNIQTYLSGCPIKAQVLEVERFTSTTRVPSINLYTIELTHGEFKWQVKRKFKHFQEFHRELLKYKAFIRIPIPTRRHTFRRQNVREEPREMPSLPRSSENMIREEQFLGRRKQLEDYLTKILKMPMYRNYHATTEFLDISQLSFIHDLGPKGIEGMIMKRSGGHRIPGLNCCGQGRACYRWSKRWLIVKDSFLLYMKPDSGAIAFVLLVDKEFKIKVGKKETETKYGIRIDNLSRTLILKCNSYRHARWWGGAIEEFIQKHGTNFLKDHRFGSYAAIQENALAKWYVNAKGYFEDVANAMEEANEEIFITDWWLSPEIFLKRPVVEGNRWRLDCILKRKAQQGVRIFIMLYKEVELALGINSEYTKRTLMRLHPNIKVMRHPDHVSSTVYLWAHHEKLVIIDQSVAFVGGIDLAYGRWDDNEHRLTDVGSVKRVTSGPSLGSLPPAAMESMESLRLKDKNEPVQNLPIQKSIDDVDSKLKGIGKPRKFSKFSLYKQLHRHHLHDADSISSIDSTSSYFNHYRSHHNLIHGLKPHFKLFHPSSESEQGLTRPHADTGSIRSLQTGVGELHGETRFWHGKDYCNFVFKDWVQLDKPFADFIDRYSTPRMPWHDIASAVHGKAARDVARHFIQRWNFTKIMKSKYRSLSYPFLLPKSQTTAHELRYQVPGSVHANVQLLRSAADWSAGIKYHEESIHAAYVHVIENSRHYIYIENQFFISCADDKVVFNKIGDAIAQRILKAHRENQKYRVYVVIPLLPGFEGDISTGGGNALQAIMHFNYRTMCRGENSILGQLKAELGNQWINYISFCGLRTHAELEGNLVTELIYVHSKLLIADDNTVIIGSANINDRSMLGKRDSEMAVIVQDTETVPSVMDGKEYQAGRFARGLRLQCFRVVLGYLDDPSEDIQDPVSDKFFKEVWVSTAARNATIYDKVFRCLPNDEVHNLIQLRDFINKPVLAKEDPIRAEEELKKIRGFLVQFPFYFLSEESLLPSVGTKEAIVPMEVWT

SEQ ID NO: 797024 - protein, 279 aa, Homo sapiens
MSLKNEPRVNTSALQKIAADMSNIIENLDTRELHFEGEEVDYDVSPSDPKIQEVYIPFSAIYNTQGFKEPNIQTYLSGCPIKAQVLEVERFTSTTRVPSINLYTIELTHGEFKWQVKRKFKHFQEFHRELLKYKAFIRIPIPTRRHTFRRQNVREEPREMPSLPRSSENMIREEQFLGRRKQLEDYLTKILKMPMYRNYHATTEFLDISQLSFIHDLGPKGIEGMIMKRSGGHRIPGLNCCGQGRACYRWSKRLQNPPVCVHSSLGSVNSSQEQPSAKN

SEQ ID NO: 797025 - protein, 347 aa, Homo sapiens
PLCSAMIVRPPQPCGTLLRSAADWSAGIKYHEESIHAAYVHVIENSRHYIYIENQFFISCADDKVVFNKIGDAIAQRILKAHRENQKYRVYVVIPLLPGFEGDISTGGGNALQAIMHFNYRTMCRGENSILGQLKAELGNQWINYISFCGLRTHAELEGNLVTELIYVHSKLLIADDNTVIIGSANINDRSMLGKRDSEMAVIVQDTETVPSVMDGKEYQAGRFARGLRLQCFRVVLGYLDDPSEDIQDPVSDKFFKEVWVSTAARNATIYDKVFRCLPNDEVHNLIQLRDFINKPVLAKEDPIRAEEELKKIRGFLVQFPFYFLSEESLLPSVGTKEAIVPMEVWT

SEQ ID NO: 797026 - protein, 313 aa, Homo sapiens
SSVPVKAHPIENSRHYIYENQFFISCADDKVVFNKIGDAIAQRILKAHRENQKYRVYVVIPLLPGFEGDISTGGGNALQAIMHFNYRTMCRGENSILGQLKAELGNQWINYISFCGLRTHAELEGNLVTELIYVHSKLLIADDNTVIIGSANINDRSMLGKRDSEMAVIVQDTETVPSVMDGKEYQAGRFARGLRLQCFRVVLGYLDDPSEDIQDPVSDKFFKEVWVSTAARNATIYDKVFRCLPNDEVHNLIQLRDFINKPVLAKEDPIRAEEELKKIRGFLVQFPFYFLSEESLLPSVGTKEAIVPMEVWT

SEQ ID NO: 797027 - protein, 971 aa, Homo sapiens
MSLKNEPRVNTSALQKIAADMSNIIENLDTRELHFEGEEVDYDVSPSDPKIQEVYIPFSAIYNTQGFKEPNIQTYLSGCPIKAQVLEVERFTSTTRVPSINLYTIELTHGEFKWQVKRKFKHFQEFHRELLKYKAFIRIPIPTRRHTFRRQNVREEPREMPSLPRSSENMIREEQFLGRRKQLEDYLTKILKMPMYRNYHATTEFLDISQLSFIHDLGPKGIEGMIMKRSGGHRIPGLNCCGQGRACYRWSKRWLIVKDSFLLYMKPDSGAIAFVLLVDKEFKIKVGKKETETKYGIRIDNLSRTLILKCNSYRHARWWGGAIEEFIQKHGTNFLKDHRFGSYAAIQENALAKWYVNAKGYFEDVANAMEEANEEIFITDWWLSPEIFLKRPVVEGNRWRLDCILKRKAQQGVRIFIMLYKEVELALGINSEYTKRTLMRLHPNIKVMRHPDHVSSTVYLWAHHEKLVIIDQSVAFVGGIDLAYGRWDDNEHRLTDVGSVKRVTSGPSLGSLPPAAMESMESLRLKDKNEPVQNLPIQKSIDDVDSKLKGIGKPRKFSKFSLYKQLHRHHLHDADSISSIDSTSSYFNHYRSHHNLIHGLKPHFKLFHPSSESEQGLTRPHADTGSIRSLQTGVGELHGETRFWHGKDYCNFVFKDWVQLDKPFADFIDRYSTPRMPWHDIASAVHGKAARDVARHFIQRWNFTKIMKSKYRSLSYPFLLPKSQTTAHELRYQVPGSVHANVQLLRSAADWSAGIKYHEESIHAAYVHVIENSRHYIYIENQFFISCADDKVVFNKIGDAIAQRILKAHRENQKYRVYVVIPLLPGFEGDISTGGGNALQAIMHFNYRTMCRGENSILGQLKAELGNQWINYISFCGLRTHAELEGNLVTELIYVHSKLLIADDNTVIIGSANINDRSMLGKRDSEMAVIVQDTETVPSVMDGKEYQAGRFARGLRLQCFRSKMTPGVEDP

SEQ ID NO: 797028 - protein, 1074 aa, Homo sapiens; identical to SEQ ID NO: 797023

SEQ ID NO: 797029 - protein, 399 aa, Homo sapiens [sequence omitted]

SEQ ID NO: 797030 - protein, 1074 aa, Homo sapiens; identical to SEQ ID NO: 797023

SEQ ID NO: 797031 - protein, 135 aa, Homo sapiens
ASSCPPPSCRCMGRLVPAAPASLVGSTLALPLLRPEVDFVVFRGCLAFRPFWGSGIMTFDLKDSRDFGRDPWAPGSSSTGLSPGSSWLCPWGATGRNSPGHPWDQRGLTSDVRYPAFSQGPPFYFSEALPGRSQK

SEQ ID NO: 797032 - protein, 139 aa, Homo sapiens
MSSHLVQSCHIKMSYQNIQEYFGNMDSQVVFVGAKRTAGHVQSNVWKESAISEEPKSGVIIIMEDESVFQCLPHSFPKVNHPGLGCSNIWNSLSTTSTSVTQNVTHLLPMFSDHIESERGNKTYKLLSPRLTNSVVLKG

SEQ ID NO: 797033 - protein, 127 aa, Homo sapiens [sequence omitted]

SEQ ID NO: 797034 - protein, 127 aa, Homo sapiens [sequence omitted]

SEQ ID NO: 797035 - protein, 76 aa, Homo sapiens
LSSPPIFHHNYYNATHHPYVAILYKAVISKCHIKISKSTLEIWIPKLFLWVPKGLLVMFKAMYGKSPPSQRNQRVE

SEQ ID NO: 797036 - protein, 127 aa, Homo sapiens [sequence omitted]

SEQ ID NO: 797037 - protein, 155 aa, Homo sapiens
FVKLQVLLFYYNKRATVISHLVQSCHIKMSYQNIQEYFGNMDSQVVFVGAKRTAGHVQSNVWKESAISEEPKSGVIIIMEDESVFQCLPHSFPKVNHPGLGCSNIWNSLSTTSTSVTQNVTHLLPMFSDHIESERGNKTYKLLSPRLTNSVVLKG

SEQ ID NO: 797038 - protein, 127 aa, Homo sapiens [sequence omitted]

SEQ ID NO: 797039 - protein, 218 aa, Homo sapiens
MSFVGENSGVKMGSEDWEKDEPQCCLEDPAGSPLEPGPSLPTMNFVHTSPKVKNLNPKKFSIHDQDHKVLVLDSGNLIAVPDKNYIRPEIFFALASSLSSASAEKGSPILLGVSKGEFCLYCDKDKGQSHPSLQLKKEKLMKLAAQKESARRPFIFYRAQVGSWNMLESAAHPGWFICTSCNCNEPVGVTDKFENRKHIEFSFQPVCKAEMSPSEVSD

SEQ ID NO: 797040 - protein, 218 aa, Homo sapiens; identical to SEQ ID NO: 797039

SEQ ID NO: 797041 - protein, 192 aa, Homo sapiens
MSGCDRRETETKGKNSFKKRLRGPKVKNLNPKKFSIHDQDHKVLVLDSGNLIAVPDKNYIRPEIFFALASSLSSASAEKGSPILLGVSKGEFCLYCDKDKGQSHPSLQLKKEKLMKLAAQKESARRPFIFYRAQVGSWNMLESAAHPGWFICTSCNCNEPVGVTDKFENRKHIEFSFQPVCKAEMSPSEVSD

SEQ ID NO: 797042 - protein, 192 aa, Homo sapiens; identical to SEQ ID NO: 797041

SEQ ID NO: 797043 - protein, 178 aa, Homo sapiens
MSFVGENSGVKMGSEDWEKDEPQCCLEDPAGSPLEPGPSLPTMNFVHTKIFFALASSLSSASAEKGSPILLGVSKGEFCLYCDKDKGQSHPSLQLKKEKLMKLAAQKESARRPFIFYRAQVGSWNMLESAAHPGWFICTSCNCNEPVGVTDKFENRKHIEFSFQPVCKAEMSPSEVSD

SEQ ID NO: 797044 - protein, 114 aa, Homo sapiens
TASSGDRTTPPRLHPGLPPPWTPVDDLPLSPPRPCPSSSLPGLGAPLAGPPSATAPDRPRPLPERRHPLPLGLPSPVLAGPLPPGKPGRRVPPPSSGGLYRPRLRPGPAEELPT

SEQ ID NO: 797045 - protein, 83 aa, Homo sapiens
TASSGDRTTPPRLHPGLPPPWTPVDDLPLSPPRPCPSSSLPGLGAPLAGPLPPGKPGRRVPPPSSGGLYRPRLRPGPAEELPT

SEQ ID NO: 797046 - protein, 36 aa, Homo sapiens
  misc_feature (26)..(26): Xaa can be any naturally occurring amino acid
  misc_feature (36)..(36): Xaa can be any naturally occurring amino acid
MWSTSVNIKVSGFMEAGEATYNYTMXCPYFTWASRX

SEQ ID NO: 797047 - protein, 111 aa, Homo sapiens
MNLLQRGRISRKNSTFQNQGFQARAAPHTRCRASSHCGFKSTEIHKTMYNCKLNTTAIKAIIPNTGNTSRTPFFYLPRLKSRIFRTIIRAQADFNIKAWSNTIYYFSITSL

SEQ ID NO: 797048 - protein, 70 aa, Homo sapiens
SWWWGVKIAPGGMGSFHAMINSSVHVIMYLYYRLSAFGPVAQPYLWWKKHMTAIQLIQFVLVSLHISQYY

SEQ ID NO: 797049 - protein, 69 aa, Homo sapiens
ALGGARAVWACRLPPRGAACHPHPYPYPYLHPKAYPGLARRSPEIRSGPASGICFPLTSPAEHFGLTNS

SEQ ID NO: 797050 - protein, 86 aa, Homo sapiens
GPSTPSAAAGPGAKSLIAPGQQGWPAAPSAGPAKPTPTRNSSWPASAAGSPSSRSRLSLHTSLQAEGVGSSLGHPGRGGAESKRGL

SEQ ID NO: 797051 - protein, 104 aa, Homo sapiens
TTGPVLGRTMTGALSSWSCSDWRIILGRWFSPGKVCSPGSPANQQGARRWCKNTDLSHLVSPHFPLWSQASGSGHFCQGTSVLQSSQDSPCHPPPRSGSKLAFS

SEQ ID NO: 797052 - protein, 325 aa, Homo sapiens
MSFKDKDERISCLEAYVTLTSKSSRFTDETEILKMSQRHSGQAGTEAGNGADSPPIVNSKYSTFRDFCSTSSFQDSGYNELKSCSFDNIDKEYLGKKEKGPTLLYEHPETSGLGLTHPLESPTQKKKCILPRKEKDKTPELCETPKISGKKCLPRRRLNVSFALLKGDFESQNSSLESSISQVINLEKNIPSSASGFSRANNFSPLVTSTLKTEEVTSCSQKLRLNFSQQKTSTIDDSKDDCSLFEVECISPIQGNNFKDSITHDFSDSSLCINDENACPELLGSSVSGTTCGTDEDIFVTPISNLVANIRFNASQILSPSPEVR

SEQ ID NO: 797053 - protein, 131 aa, Homo sapiens
HGFLDEIFFTFFFNVLGQGDGTTSGHTSLWSFFMYGSCSFVVEKLYFHLHYSRGWGTWKRVPIYVIFIYVWELSWGLGLRTCGACSWDYSHYPLNFMGLITLMYLPGWIFLSVYQDLISNVLWRVQYVPAN

SEQ ID NO: 797054 - protein, 68 aa, Homo sapiens
  misc_feature (14)..(14): Xaa can be any naturally occurring amino acid
  misc_feature (17)..(17): Xaa can be any naturally occurring amino acid
GCLESGTVGGEQTXQEXRSHSKWLRVPDGRAVQVVLWLASPPPPQLQRGRSARTPCLAGTGPSSQGTE

SEQ ID NO: 797055 - protein, 67 aa, Homo sapiens
IHPIPHSPPRSIWSPLSQDPGSQKSQEQKEEGTKEPAHGCGPSIRGCRKENSLIQPPYQPLSSSPQY

SEQ ID NO: 797056 - protein, 108 aa, Homo sapiens
AGAQAHPDIQSRLLGASGNPVGKGAVAMAPEMLPKHPHTPRDRRPQADTSLHGNLAGAPLPLLAGASTHFPSKRLIKVCSSAPPRPTRRFHTVCSQALSRPVVNAHLH

SEQ ID NO: 797057 - protein, 103 aa, Homo sapiens
YVPCSPLPAPSPCPQVSPVVGDAGPVFLWGTGFGDHPCPDPCSLILSKCLISPPDPYPLILSKCLIFPSGSPGRHLLSRYGAAGICLPNLTLHKSVPSTLSSP

SEQ ID NO: 797058 - protein, 140 aa, Homo sapiens
MGGTDLSNIYPTAIHLTSKDGRPSCSRLSCNGSFAFDGIITLTDVLAINWGLSASNPNSHRWITGSWGAKTLLCLFLLLPEPGQSSPFLDPTLICTELNYTKGCTQECMSEVKCNLWDLMWTFQVRVYKIKERKSWGTPQ

SEQ ID NO: 797059 - protein, 115 aa, Homo sapiens
DIQEGEQDKDCPLKNHPLLATLASALLLPALCTLKRTGAGFIRKGRRGALEVKWVPGGSCTQNGGGGPGSVDGVGGGLAEGARPHFLPQLHLSLSSPSPLPPLTRNKNIIMVLYR

SEQ ID NO: 797060 - protein, 114 aa, Homo sapiens
HEEEAQPTSACTCGQRGAESVKAPPGVGAAKIMATVPPTGAQAGRLGCAASAARPRNVQVRPGARRPQLHPCPSPSGDGGERPGCLRADCLGFHRSPLLEQIPGLGSLCSSWTP

SEQ ID NO: 797061 - protein, 152 aa, Homo sapiens
RWSFTRDGAPLSHMLECNGTVSAHCNLHLPDSSSSSTSASRVAGITGARHHAQLIFVVLAEMGFHHAGQAGLELLSSGDPPTLASQSAGITGTSHHARPPLPSFLSNQNLPIYTTPHSHTCFPFNLLFFFEMESRSCRSGWSAVVRSWLTAS

SEQ ID NO: 797062 - protein, 74 aa, Homo sapiens
GSGRAVCLHTGLPPRTGHRDRDTQGAPQELAPGTLTATPAAPHTMALHGVYFLLSISADSTLSSPPFLCLTVLA

SEQ ID NO: 797063 - protein, 58 aa, Homo sapiens
MAVILFTQLTAPMTVILFTQLTAPMAVILFTQLTAPMAVILFTQLTTPMAVILFTQLT

SEQ ID NO: 797064 - protein, 121 aa, Homo sapiens
AARTPRRELRSSLPSGVCTPGFFPAGGQGPSTTVPPAGHPAPTLPLGGSWFWSRLAHSGCLWTRFLNFSTKDVAAVCSVGSWKIAVLGSSRLSLAPPGPGKINPPLPPDPRAVTWCLVAPL

SEQ ID NO: 797065 - protein, 70 aa, Homo sapiens
DILPRHCTVRAGPEHPAMVRPSRGAPVTHNGCLLLREAELHPGDLLGLGEHFLFMYKDPRTGGSGPARPP

SEQ ID NO: 797066 - protein, 487 aa, Homo sapiens
YCEGMKVLPASGLAVFLIMALKFSTAAPSLVAASPRTWRNNYRLAQAYLDKYYTNKEGHQIGEMVARGSNSMIRKIKELQAFFGLQVTGKLDQTTMNVIKKPRCGVPDVANYRLFPGEPKWKKNTLTYRISKYTPSMSSVEVDKAVEMALQAWSSAVPLSFVRINSGEADIMISFENGDHGDSYPFDGPRGTLAHAFAPGEGLGGDTHFDNPEKWTMGTNGFNLFTVAAHEFGHALGLAHSTDPSALMYPTYKYKNPYGFHLPKDDVKGIQALYGPRKVFLGKPTLPHAPHHKPSIPDLCDSSSSFDAVTMLGKELLLFKDRIFWRRQVHLRTGIRPSTITSSFPQLMSNVDAAYEVAERGTAYFFKGPHYWITRGFQMQGPPRTIYDFGFPRHVQQIDAAVYLREPQKTLFFVGDEYYSYDERKRKMEKDYPKNTEEEFSGVNGQIDAAVELNGYIYFFSGPKTYKYDTEKEDVVSVVKSSSWIGC

SEQ ID NO: 797067 - protein, 140 aa, Homo sapiens
MSNVDAAYEVAERGTAYFFKGPHYWITRGFQMQGPPRTIYDFGFPRHVQQIDAAVYLREPQKTLFFVGDEYYSYDERKRKMEKDYPKNTEEEFSGVNGQIDAAVELNGYIYFFSGPKTYKYDTEKEDVVSVVKSSSWIGC

SEQ ID NO: 797068 - protein, 244 aa, Homo sapiens
MLYPSHEEAMSGPTDETAGDLPVKDTGLNLFGMGGLQETSTTRTMKSRQAVSRVSREELEDRFLRLHDENILLKQHARKQEDKIKRMATKLIRLVNDKKRYERVGGGPKRLGRDVEMEEMIEQLQEKVHELEKQNETLKNRLISAKQQLQTQGYRQTPYNNVQSRINTGRRKANENAGLQECPRKGIKFQDADVAETPHPMFTKYGNSLLEEARGEIRNLENVFRSQRGQIEEVEHWLEIVKIS

SEQ ID NO: 797069 - protein, 235 aa, Homo sapiens
MSGPTDETAGDLPVKDTGLNLFGMGGLQETSTTRTMKSRQAVSRVSREELEDRFLRLHDENILLKQHARKQEDKIKRMATKLIRLVNDKKRYERVGGGPKRLGRDVEMEEMIEQLQEKVHELEKQNETLKNRLISAKQQLQTQGYRQTPYNNVQSRINTGRRKANENAGLQECPRKGIKFQDADVAETPHPMFTKYGNSLLEEARGEIRNLENVFRSQRGQIEEVEHWLEIVKIS

SEQ ID NO: 797070 - protein, 134 aa, Homo sapiens
MLYPSHEEAMSGPTDETAGDLPVKDTGLNLFGMGGLQETSTTRTMKSRQAVSRVSREELEDRFLRLHDENILLKQHARKQEDKIKRFKEKVRQPLKNENRVFLLRIHPKEVVPVQFLLCGLQQPTGMLCAGLLL

SEQ ID NO: 797071 - protein, 107 aa, Homo sapiens
IGKAPLPLGFLFNGWVFPVKVSPCRKSELQRSARSRCLLSHLPVCQVAEDWLCSSTKGHSPCQGTSCPACHLGLFFPPCMFPDLGLAAAPFYWYPRGTVPAMSSCFI

SEQ ID NO: 797072 - protein, 108 aa, Homo sapiens
ILTYSCRDRHCIASGRTPAPKVSPCRKSELQRSARSRCLLSHLPVCQVAEDWLCSSTKGHSPCQGTSCPACHLGLFFPPCMFPDLGLAAAPFYWYPRGTVPAMSSCFI

SEQ ID NO: 797073 - protein, 108 aa, Homo sapiens
PLAAHPGTPRHRMAPHAYLVHPDSRALGPLRQLSGAHPGPAPPHRCALRSPEAADLKMTKGQKTPWLTSSDHPAPSSSCLWFQPDNNPGPQRPLPGRLPTSGQFGPVP

SEQ ID NO: 797074 - protein, 782 aa, Homo sapiens
  misc_feature (6)..(7): Xaa can be any naturally occurring amino acid
SLFGSXXYNTLAFKKQAVGRNLGSPEVWRWCGGSRLGTRTPAMNPPGSLEALDPNVDEHLSTQILAPSVHSDNSQERIQARRLRIAARLEARRREALGEYLDGKKESEEDQSKSYKQKEESRLKLAKLLLCGTELVTNIQVAIDIREIHRRVEEEEIKRQRIEKLENEVKTSQDKFDEITSKWEEGKQKRIPQELWEMLNTQQLHCAGLLEDKNKLISELQQELKTKDDQYVKDLKKQSDDICLLLERMEEQVKNVMKTFREELYNIEKAFEVERQELLASNKKKWEQALQAHNAKELEYLNNRMKKVEDYEKQLNRQRIWDCEEYNMIKIKLEQDVQILEQQLQQRKAIYQLNQEKLEYNLQVLKKRDEESTVIKSQQKRKINRLHDILNNLRSKYAKQIKQFQEENQSLTSDYKRLVMQFKELQKAMRHFALIDDEKFWEIWLMNEEEAKDLIARAFDVDRIIHTHHLGLPWAAPDFWFLNNVGPISQQPQKSATQIVEEMLMRSEEEEAEEAAAEPESYLDLPKQISEKTTKRILMLLCDESGFLIESKLLSLLLPLEQNECYLLRLDAIFSALGIESEDDLYKLVNFFLKYRAHRLSSSLQIKPCSQASMEKASMEETSTRSELELAEQTEMEGEKEESLVEGEKEEEEETPPSPWVIHPNDVLKILEAFVMGLKKPRDSRAPLRVQKNVRDNSKDSEYWQALTTVIPSSKQNLWDALYTALEKYHLVLTQRAKLLLENSSLEQQNTELQALLQQYLNSKINSELQVPPTQVLRVPTK

SEQ ID NO: 797075 - protein, 96 aa, Homo sapiens
  misc_feature (6)..(8): Xaa can be any naturally occurring amino acid
SLFGSXXXNTLAFKKQAVGRNLGSPEVWRWCGGSRLGTRTPAMNPPGSLEALDPNVDEHLSTQILAPSVHSDNSQERIQARRLRIAARLEARRRLT

SEQ ID NO: 797076 - protein, 127 aa, Homo sapiens
MSQGLPAAGSVLQRSVAAPGNQPQPQPQQQSPEDDDRKVRRREKNRVAAQRSRKKQTQKADKLHEEYESLEQENTMLRREIGKLTEELKHLTEALKEHEKMCPLLLCPMNFVPVPPRPDPVAGCLPR

SEQ ID NO: 797077 - protein, 76 aa, Homo sapiens
FYASVNPDGEETEQEYESLEQENTMLRREIGKLTEELKHLTEALKEHEKMCPLLLCPMNFVPVPPRPDPVAGCLPR

SEQ ID NO: 797078 - protein, 71 aa, Homo sapiens
VYVCKKCVNEYESLEQENTMLRREIGKLTEELKHLTEALKEHEKMCPLLLCPMNFVPVPPRPDPVAGCLPR

SEQ ID NO: 797079 - protein, 105 aa, Homo sapiens
KRPRAKAAGDGCLSGQCSKGSPGMFGDSAGGSLPALKTCRGQAKKQASKQAAACACCRRRQLWGNLQVLPSACGSSLVLSCFLFSSGGPGISSFLTAPLKIYSNI

SEQ ID NO: 797080 - protein, 320 aa, Homo sapiens
QKRQPLSVSDRHVYKYRCNHCSLAFKTMQKLQIHSQYHAIRAATMCNLCQRSFRTFQALKKHLEAGHPELSEAELQQLYASLPVNGELWAESETMSQDDHGLEQEMEREYEVDHEGKASPVGSDSSSIPDDMGSEPKRTLPFRKGPNFTMEKFLDPSRPYKCTVCKESFTQKNILLVHYNSVSHLHKLKKVLQEASSPVPQETNSNTDNKPYKCSICNVAYSQSSTLEIHMRSVLHQTKARAAKLEPSGHVAGGHSIAANVNSPGQGMLDSMSLAAVNSKDTHLDAKELNKKQTPDLISAQPAHHPPQSPAQIQMQLQHE

SEQ ID NO: 797081 - protein, 77 aa, Homo sapiens
RIPLRCWASAILLPQTSKIARTTGTHPEEEEIPGAHDPRKSHLRTRQEGRHLQAKERGLRRNRTCHTLILDFQPSEL

SEQ ID NO: 797082 - protein, 66 aa, Homo sapiens
AQACPPDVGPGQSRSQEGLRGQQSEAEGFAELRPAVTWRAACLCYCLHSQPGLLGLSMGPAPRRSD

SEQ ID NO: 797083 - protein, 140 aa, Homo sapiens
SAETQKGERGKPHPLRGCDAVNVFLQGKSCFWIFLELQEVLRKLRDCGRCGSAAPPNPPAPVGKVTPPLPASWESDSFLWAEGSGPGGSPRALRVTRGAACSPAPPSGASAHTHLRGRKRRALLCLPHPGPLQFVCPHPG

SEQ ID NO: 797084 - protein, 107 aa, Homo sapiens [sequence omitted]

SEQ ID NO: 797085 - protein, 107 aa, Homo sapiens [sequence omitted]

SEQ ID NO: 797086 - protein, 364 aa, Homo sapiens
MHPQVVILSLILHLADSVAGSVKVGGEAGPSVTLPCHYSGAVTSMCWNRGSCSLFTCQNGIVWTNGTHVTYRKDTRYKLLGDLSRRDVSLTIENTAVSDSGVYCCRVEHRGWFNDMKITVSLEIVPPKVTTTPIVTTVPTVTTVRTSTTVPTTTTVPMTTVPTTTVPTTMSIPTTTTVLTTMTVSTTTSVPTTTSIPTTTSVPVTTTVSTFVPPMPLPRQNHEPVATSPSSPQPAETHPTTLQGAIRREPTSSPLYSYTTDGNDTVTESSDGLWNNNQTQLFLEHSLLTANTTKGIYAGVCISVLVLLALLGVIIAKKYFFKKEVQQLSVSFSSLQIKALQNAVEKEVQAEDNIYIENSLYATD

SEQ ID NO: 797087 - protein, 363 aa, Homo sapiens
MHPQVVILSLILHLADSVAGSVKVGGEAGPSVTLPCHYSGAVTSMCWNRGSCSLFTCQNGIVWTNGTHVTYRKDTRYKLLGDLSRRDVSLTIENTAVSDSGVYCCRVEHRGWFNDMKITVSLEIVPPKVTTTPIVTTVPTVTTVRTSTTVPTTTTVPMTTVPTTTVPTTMSIPTTTTVLTTMTVSTTTSVPTTTSIPTTTSVPVTTTVSTFVPPMPLPRQNHEPVATSPSSPQPAETHPTTLQGAIRREPTSSPLYSYTTDGNDTVTESSDGLWNNNQTQLFLEHSLLTANTTKGIYAGVCISVLVLLALLGVIIAKMFHLAAFKLKLCKMQLKRKSKQKTISTLRIVFMPPRPALFPFCLFP

SEQ ID NO: 797088 - protein, 401 aa, Homo sapiens
MHPQVVILSLILHLADSVAGSVKVGGEAGPSVTLPCHYSGAVTSMCWNRGSCSLFTCQNGIVWTNGTHVTYRKDTRYKLLGDLSRRDVSLTIENTAVSDSGVYCCRVEHRGWFNDMKITVSLEIVPPKVTTTPIVTTVPTVTTVRTSTTVPTTTTVPMTTVPTTTVPTTMSIPTTTTVLTTMTVSTTTSVPTTTSIPTTTSVPVTTTVSTFVPPMPLPRQNHEPVATSPSSPQPAETHPTTLQGAIRREPTSSPLYSYTTDGNDTVTESSDGLWNNNQTQLFLEHSLLTANTTKGIYAGVCISVLVLLALLGVIIAKMFHLAAFKLKLCKMQLKRKSKQKTISTLRIVFMPRTKTQWCSLRVYAHECRRLNRHQHIRRLLDPKTIFLFQFHLAFQHVSDTG

SEQ ID NO: 797089 - protein, 372 aa, Homo sapiens
GLGGGWPWLIGRGYSGAVTSMCWNRGSCSLFTCQNGIVWTNGTHVTYRKDTRYKLLGDLSRRDVSLTIENTAVSDSGVYCCRVEHRGWFNDMKITVSLEIVPPKVTTTPIVTTVPTVTTVRTSTTVPTTTTCSNDNCSNNNEHSNDNDCSDDNDCFNDNERSNDNEHSNNNKCSSDNNVSTFVPPMPLPRQNHEPVATSPSSPQPAETHPTTLQGAIRREPTSSPLYSYTTDGNDTVTESSDGLWNNNQTQLFLEHSLLTANTTKGIYAGVCISVLVLLALLGVIIAKMFHLAAFKLKLCKMQLKRKSKQKTISTLRIVFMPRTKTQWCSLRVYAHECRRLNRHQHIRRLLDPKTIFLFQFHLAFQHVSDTG

SEQ ID NO: 797090 - protein, 359 aa, Homo sapiens
MHPQVVILSLILHLADSVAGSVKVGGEAGPSVTLPCHYSGAVTSMCWNRGSCSLFTCQNGIVWTNGTHVTYRKDTRYKLLGDLSRRDVSLTIENTAVSDSGVYCCRVEHRGWFNDMKITVSLEIVPPKVTTTPIVTTVPTVTTVRTSTTVPTTTTCSNDNCSNNNEHSNDNDCSDDNDCFNDNERSNDNEHSNNNKCSSDNNVSTFVPPMPLPRQNHEPVATSPSSPQPAETHPTTLQGAIRREPTSSPLYSYTTDGNDTVTESSDGLWNNNQTQLFLEHSLLTANTTKGIYAGVCISVLVLLALLGVIIAKKYFFKKEVQQLSVSFSSLQIKALQNAVEKEVQAEDNIYIENSLYATD

SEQ ID NO: 797091 - protein, 401 aa, Homo sapiens; identical to SEQ ID NO: 797088

SEQ ID NO: 797092 - protein, 401 aa, Homo sapiens; identical to SEQ ID NO: 797088

SEQ ID NO: 797093 - protein, 88 aa, Homo sapiens
PIKAAWNGAVPCKGTGAELPKTMGAYFLHQCDLNVRHRVKGDYFGALKFNDYPAGFWTCMGPLALLFCPVLLFGIGASSSNACTLIVS

SEQ ID NO: 797094 - protein, 129 aa, Homo sapiens
GGEKRGSIKPLPLGQPAEHLPGLGPGHTTQVSNESLILKNKRRLTTDPKRKQEYNLRSWWATRGQRLTSIHTALRLASCGYPGPGRVLQSRSRKGTGCSHRTSCHRSGSQGALVLVPTLPLSCLMATGE

SEQ ID NO: 797095 - protein, 52 aa, Homo sapiens
MVSDSPHQLQNVPIPLRLSFCIFITLTLVRFQALFAATLTGTSTFKFLMKSS

SEQ ID NO: 797096 - protein, 156 aa, Homo sapiens
MAPAVTRLLFLQLVLGPTLVMDIKMQIGSRNFYTLSIDYPRVNYPKGFRGYCNGLMSYMRGKMQNSDCPKIHYVIHAPWKAIQKFCKYSDSFCENYNEYCTLTQDSLPITVCSLSHQQPPTSCYYNSTLTNQKLYLLCSRKYEADPIGIAGLYSGI

SEQ ID NO: 797097 - protein, 156 aa, Homo sapiens; identical to SEQ ID NO: 797096

SEQ ID NO: 797098 - protein, 132 aa, Homo sapiens
PRDLEDRSACVPKDYSATRGSFSQRAETRRLSDCLGCVSLCHCCMSGACVSHSLFSLCHSLSVCFSHFLSLCVCVCAPVCVCVYVPSALQSDLMHVRVSFVGSCLRLCLDHVGCCQSFLRRFHFGFLKTSTM

SEQ ID NO: 797099 - protein, 75 aa, Homo sapiens
EDGPKFLKSGDVAIIDMVPGKPMCVESFSDYPPLGCFAACDMRQTVALGVIKAADKKAAGAGKVTKYPQKAQKAK

SEQ ID NO: 797100 - protein, 128 aa, Homo sapiens
KELPTEPPYTAYVGNLPFNTVRGDIDAIFKDLSIRSVRLVRDKDTDKFKGFCYVEFDEVDSLKEALTYDGALLGDRSLRVDIAEGRKQDKGGFGFRKGGPDDRGFRDDFLGGVWAAVLRHFSFAFSLL

SEQ ID NO: 797101 - protein, 126 aa, Homo sapiens
KELPTEPPYTAYVGNLPFNTVRGDIDAIFKDLSIRSVRLVRDKDTDKFKGFCYVEFDEVDSLKEALTYDGALLGDRSLRVDIAEGRKQDKGGFGFRKGGPDDRGFRDDFLGGRGGSRPGDRRTGPP

SEQ ID NO: 797102 - protein, 288 aa, Homo sapiens
MRDRLPDLTACRKNDDGDTVVVVEKDHFMDDFFHQVEEIRNSIDKITQYVEEVKKNHSIILSAPNPEGKIKEELEDLNKEIKKTANKIRAKLKAIEQSFDQDESGNRTSVDLRIRRTQHSVLSRKFVEAMAEYNEAQTLFRERSKGRIQRQLEITGRTTTDDELEEMLESGKPSIFTSDIISDSQITRQALNEIESRHKDIMKLETSIRELHEMFMDMAMFVETQGEMINNIERNVMNATDYVEHAKEETKKAIKYQSKARRKKWIIIAVSVVLVAIIALIIGLSVGK

SEQ ID NO: 797103 - protein, 288 aa, Homo sapiens; identical to SEQ ID NO: 797102

SEQ ID NO: 797104 - protein, 288 aa, Homo sapiens; identical to SEQ ID NO: 797102

SEQ ID NO: 797105 - protein, 79 aa, Homo sapiens
KILLLRQVSDVCRSRERRPQADPPAPQFSMSSHPHPLPERCNPASSADLVMYEFTEEAQPNVLFSDSAVSTVGVMRDPE

SEQ ID NO: 797106 - protein, 269 aa, Homo sapiens
MRDRLPDLTACRKNDDGDTVVVVEKDHFMDDFFHQVEEIRNSIDKITQYVEEVKKNHSIILSAPNPEGKIKEELEDLNKEIKKTANKIRAKLKAIEQSFDQDESGNRTSVDLRIRRTQHSVLSRKFVEAMAEYNEAQTLFRERSKGRIQRQLEITGRTTTDDELEEMLESGKPSIFTSDIISDSQITRQALNEIESRHKDIMKLETSIRELHEMFMDMAMFVETQGEMINNIERNVMNATDYVEHAKEETKKAIKYQSKARRVSLASKN

SEQ ID NO: 797107 - protein, 313 aa, Homo sapiens
MRDRLPDLTACRKNDDGDTVVVVEKDHFMDDFFHQVEEIRNSIDKITQYVEEVKKNHSIILSAPNPEGKIKEELEDLNKEIKKTANKIRAKLKGFRCVQKQREATTSRPPSSTVLHELPPAPAPSYSEAHPRHLDFITIEQSFDQDESGNRTSVDLRIRRTQHSVLSRKFVEAMAEYNEAQTLFRERSKGRIQRQLEITGRTTTDDELEEMLESGKPSIFTSDIISDSQITRQALNEIESRHKDIMKLETSIRELHEMFMDMAMFVETQGEMINNIERNVMNATDYVEHAKEETKKAIKYQSKARRVSLASKN

SEQ ID NO: 797108 - protein, 87 aa, Homo sapiens
QLPLRNFIAGSPGLPRPPQDCTGLPWAGGAALTFHTSPPSCAQAAFWTRDVQASPVPAVSHDNQLTIVLMPKRHVWRCHILVSYNIQ

SEQ ID NO: 797109 - protein, 95 aa, Homo sapiens
WVRLASWRVHPPALLGCSYQLFQHLLEKPYPTPRSVRSHPSPGAATAPQTPDHQLLSINWRNLLVLPRNLSATGAAEAEQMAKGSGSSKAERTCG

SEQ ID NO: 797110 - protein, 102 aa, Homo sapiens
MMDFFNAQMRLGGLTQPLEPVLAVQINQDKNFAFLEVPSGTRLPRYGFDGSSSRQSLKIEGSRLQRSWCRETSLFAGVGCGGPHCPRLGGPHREPAKGTWAR

SEQ ID NO: 797111 - protein, 103 aa, Homo sapiens
AEVAEAAGAGGKARRKLHRALRGRLSMSDFDEFERQLNENKQERDKENRHRKRSHSRSRSRDRKRRSRSRDRRNRDQRSASRDRRRRSKPLTRGAKEEHGGLM

SEQ ID NO: 797112 - protein, 157 aa, Homo sapiens
AEVAEAAGAGGKARRKLHRALRGRLSMSDFDEFERQLNENKQERDKENRHRKRSHSRSRSRDRKRRSRSRDRRNRDQRSASRDRRRRSKPLTRGAKEEHGGLIRSPRHEKKKKVRKYWDVPPPGFEHITPMQYKAMQAAGQIPATALLPTMTLTVWL

SEQ ID NO: 797113 - protein, 82 aa, Homo sapiens
  misc_feature (1)..(2): Xaa can be any naturally occurring amino acid
  misc_feature (10)..(10): Xaa can be any naturally occurring amino acid
  misc_feature (14)..(14): Xaa can be any naturally occurring amino acid
  misc_feature (31)..(31): Xaa can be any naturally occurring amino acid
XXINRLPAGXAFFXVTCPGESFSPDLKGFSXAVGREVLASEAILNVPDKSDWRQCQISKEDEETLARRFRKDFEPYDFTLDD

SEQ ID NO: 797114 - protein, 82 aa, Homo sapiens; identical to SEQ ID NO: 797113
  misc_feature (1)..(2): Xaa can be any naturally occurring amino acid
  misc_feature (10)..(10): Xaa can be any naturally occurring amino acid
  misc_feature (14)..(14): Xaa can be any naturally occurring amino acid
  misc_feature (31)..(31): Xaa can be any naturally occurring amino acid

SEQ ID NO: 797115 - protein, 132 aa, Homo sapiens
PPNREKHHRKAFHKLTTAGTWRVEAHETALGKTCGNRKRCVILTTQFVSQVCLVPHPQSLRYFKHLVILPLMAFRKCTDASRCITNAKGPHSKATTWKVKMRIFSISHSRKRKWKNSTFVIKDRDLLLCMGN

SEQ ID NO: 797116 - protein, 113 aa, Homo sapiens
MLMPLDKYLPGDPLLRSRMLGWAHVLTLQIGEPQENLASLRKTTQVLTFEFPGETSGPLPCPQFTYHWRTGRTLFALTGPLVSECPPLSLSHTLTQTHTHMTSNQLSNAPLDS

SEQ ID NO: 797117 - protein, 67 aa, Homo sapiens
SLETAWKDWVPAAERRARRPNAGCGCLQPILPPAPRVIFRNASLIVESTFLTPFSALLFVTPLLYKR

SEQ ID NO: 797118 - protein, 367 aa, Homo sapiens
MDDAAVLKRRGYLLGINLGEGSYAKVKSAYSERLKFNVAIKIIDRKKAPADFLEKFLPREIEILAMLNHCSIIKTYEIFETSHGKVYIVMELAVQGDLLELIKTRGALHEDEARKKFHQLSLAIKYCHDLDVVHRDLKCDNLLLDKDFNIKLSDFSFSKRCLRDDSGRMALSKTFCGSPAYAAPEVLQGIPYQPKVYDIWSLGVILYIMVCGSMPYDDSNIKKMLRIQKEHRVNFPRSKHLTGECKDLIYHMLQPDVNRRLHIDEILSHCWMQPKARGSPSVAINKEGESSRGTEPLWTPEPGSDKKSATKLEPEGEAQPQAQPETKPEGTAMQMSRQSEILGFPSKPSTMETEEGPPQQPPETRAQ

SEQ ID NO: 797119 - protein, 95 aa, Homo sapiens
GRGMSESGQNTTGKVQIHPLRARGTGAACSPPGALFPVGTGREALSLGPGAARTDGGAVLEGSAVTVAHHGISVSLLHAAPTPAARARRQRRGSR

SEQ ID NO: 797120 - protein, 95 aa, Homo sapiens; identical to SEQ ID NO: 797119

SEQ ID NO: 797121 - protein, 68 aa, Homo sapiens
RTLTNNIIPQPPQELTATLTKRKSDTTVTLIAFDNTQYFIGPSAAELEHVVLQIQYFPPNSHHSTFLL

SEQ ID NO: 797122 - protein, 145 aa, Homo sapiens
PESSTKVYTAISAIYCCVTNYSKTQWLKTTHLLSHSFCGLGIRRWAPCFRVSHGLLSRCKLGLISRLNWGRIHFQVHPHDYWQDSFPMNCCQKPLSDPCHVGLSEGQLTTQQLDLSEQAGNEAEQGPLLGTCSTPTLKHRNKEKS

SEQ ID NO: 797123 - protein, 100 aa, Homo sapiens
ITHSASTCFLKKLHHHPPAMRPSPAPRCLPRRIKSKFSCGKKTLHTLVPACLQPSPLCFLSCLILRHPYLPITLTFRAFLKVLRELMSLHLNKIQTLHSR

SEQ ID NO: 797124 - protein, 115 aa, Homo sapiens
DNCLCSPITWYVTEVGAFYLHSTYGSVFMVPLTCHVTIASLQFCTHYSLSLEHFSPPYERNNSYFSRLSSDFTSAAQVFLPSAASLAPRIRGSPLCAPRGLLTHSRSLLCLLHCK

SEQ ID NO: 797125 - protein, 115 aa, Homo sapiens
MRLLARVHAPVLRQVGAHDESLAALGALEGPLTSVRALVLQELRALAESLSALGAGEGLLAAVRAPVLPQPRHTHEGLAAVGTGVWPCARVDLQVLGQVGALAEGLATVPAGVRP

SEQ ID NO: 797126 - protein, 102 aa, Homo sapiens
SHSYLPLSSPLSIPCSQTHSFPSLSPVPAPLLRLNPNPPSLPTPFSSLPVYLSPSLMSSESTAPKSSILNLSHSPVSIPTKNRIGPTYPDTCDSPPHCLLFR

SEQ ID NO: 797127 - protein, 73 aa, Homo sapiens
MLRPLWESRAHGQVPAQDWNGTGLSAALCCRAREHPQDPGLVPSSAGQVVLPGIRAKVEDATGGFHSYFPNLA

SEQ ID NO: 797128 - protein, 97 aa, Homo sapiens
WFSAGTTLASLRTGTLTEHWCQAHARAQKQRKLPCVEGVQTARKKPVLLPGQHGWAAGDRVMRWHRKGKSYLGPGCDTGLGTNEVMSTMGFLNLLPL

SEQ ID NO: 797129 - protein, 79 aa, Homo sapiens
GGDDDDDDDDGDGDDDKDNNELSQTQRLLDVHPGTTWEAFLHSELRGDEHSTAQRSVGFILGAAWGRDKKTTWVPNLGP

SEQ ID NO: 797130 - protein, 220 aa, Homo sapiens
QRSGKHGPGGGGRLVGARAVVVGLRAGAAGRDAVPKREAVAGAEEAGPPLELPRRLLRQTVPWLLGVVVSALLRESGSTMDIPVPSSFNDVGQDWRLRHFVDQMWYEREVTFLEQWTQDLHTRVVLRIVSAHSYAIVWVNGVDALEHEGSTSPLTPTSVACSRWGPCPPASASLSPSATCSSPPPCHQGASSTWPTPPRGYHPASTADTHLPVPPRGALH

SEQ ID NO: 797131 - protein, 220 aa, Homo sapiens; identical to SEQ ID NO: 797130

SEQ ID NO: 797132 - protein, 220 aa, Homo sapiens; identical to SEQ ID NO: 797130

SEQ ID NO: 797133 - protein, 182 aa, Homo sapiens
KNLKAPPPESWNTVSGKKMKKPSTSGQNFHSDVDYRGPKNPSKPIKAPSALPPRLQHPSGVRQHAFSSHSSGSQSQKFSSEHKNLSRTPSQIIRKPDRERVEDFDHTSRESNYFGLSPEERREKQAIEESRLLYEIQNRDEQAFPALSSSSVNQSASQSSNPCVQRKSSHVGDRKGSRRRMD

SEQ ID NO: 797134 - protein, 177 aa, Homo sapiens
KNLKAPPPESWNTVSGKKMKKPSTSGQNFHSDVDYRGPKNPSKPIKAPSALPPRLQHPSGVRQHAFSSHSSGSQSQKFSSEHKNLSRTPSQIIRKPDRERVEDFDHTSRESNYFGLSPEERREKQAIEESRLLYEIQNRDEQAFPALSSSSVNQSASQSSNPCVQRTLCIQSSGCKV

SEQ ID NO: 797135 - protein, 141 aa, Homo sapiens [sequence omitted]

SEQ ID NO: 797136 - protein, 99 aa, Homo sapiens
ALMVPLTAPRREELVLLVGPPSGLGSTMLKPRVRSPPPEASVSIPPLCLPLRVPEYLYKIQASSQPPSASRAAGFVHKYYNHSEFIIITVNDKIPQCQN

SEQ ID NO: 797137 - protein, 78 aa, Homo sapiens
ITRDQYGNHHHHAVGKGLCGGKKKAMWEQEGKCLHLSQVTPGSCTESHPCMYVTSPARSLPQPQLAVAISDPLSVNTS

SEQ ID NO: 797138 - protein, 103 aa, Homo sapiens
SGSTFSLHTLHLFRAQPSSCPSGLHLRPLTSGRDQEEGPEALPAERRPSPCQRPVWLLISLDRSSWRLGQKGRKEQKPTMGRNVLQLQPIGAATANRCNFRDI

SEQ ID NO: 797139 - protein, 108 aa, Homo sapiens [sequence omitted]

SEQ ID NO: 797140 - protein, 61 aa, Homo sapiens
MPQDQPDTWMATGVEGTAKLGCCHQGPDLLSPVQGEPGPHQQHRTGPPSTSGPGQHSPPSS

SEQ ID NO: 797141 - protein, 566 aa, Homo sapiens
MPRGFLVKRTKRTGGLYRVRLAERVFPLLGPQGAPPFLEEAPSASLPGAERATPPTREEPGKGLTAEAAREQSGSPCRAAGVSPGTGGREGAEWRAGGREGPGPSPSPSPSPAKPAGAELRRAFLERCLSSPVSAESFPGGAAAVAAFSCSVAPAAAPTPGEQFLLPLRAPFPEPALQPDPAPLSAALQSLKRAAGGERRGKAPTGCASGPAAAGIKKPKAMRKLSFADEVTTSPVLGLKIKEEEPGAPSRGLGGSRTPLGEFICQLCKEQYADPFALAQHRCSRIVRVEYRCPECDKVFSCPANLASHRRWHKPRPAAANAATVSSADGKPPSSSSSSSRDSGAIASFLAEGKENSRIERTADQHPQARDSSGADQHPDSAPRQGLQVVTHPEPPLPQGPYTEGVLGRRVPVPGSTSGGRGSEIFVCPYCHKKFRRQAYLRKHLSTHEAGSARALAPGFGSERGAPLAFACPLCGAHFPTADIREKHRLWHAVREELLLPALAGAPPETSGPSGPSDGSAQQIFSCKHCPSTFFSSPGLTRHINKCHPSESRQVLLLQMPLRPGC

SEQ ID NO: 797142 - protein, 740 aa, Homo sapiens
LKDSLESDSESLTQEIMCHSEFDDRIRGNGMEPDSLDEEESPRWGSLHEMEEEASGKAAQMAREQNHHTWDQGANNRQQPIEDKYSDLRYDPNWKSKKEEGQLLSVEALPESTDSSLENLPLAPLYPSQETSMELSGGKGEQKESPQSAASLLGSEFLSPNYEHGARRSKPFSELSDSDLEEKSSSLSPYVKSSSSHNEVFLPGSRGPRRRKSKQHFVEKNKLTLGLPTPKTDSYLQLHNKKRGESHPEQISYPVRATDKTSIQNAKEMENAAIDPEDKWHQRAQQLKNYQEHWSQYESTKSSNVPRGQPSDMVNDHQPSRRPAKLKIRKQCKHQNGLKSSTTEEVTASQGNQNNPPRQQQNQNKPLDTSTKPESIVIMHASNNDVQASRALRSHNLKETSNTFAPPKQAFDKVLSKNSTGCDSGLNVNKERGHKDQEEKRFSYQQLHTLSDMDLNNLNELSKRHVLLSQKGSQFVYHINTHGSTKNKKQLKQPYTETKYRNLEMLWKFHSSSDSQTVRASPDSWLTQIMEQHQQALVQLTDVQPSEGALSSVTLPPILSRVESESQLSSERSQRNQVKISRSNSEGYLFQLEKGKKHKKRSSSKNTKLKGYQKRDVKLGGLGPDFESIRDKTQKLIQQKEYAKQVKEYNMKTLSILSKPQTEKTQKKSAIPRQKALEYAKTIPKPKPSNLTHQASKEQKNPTYAGKEESLPEISLLEILQNRHEREKQAVAAFKVLHIV

SEQ ID NO: 797143 - protein, 740 aa, Homo sapiens; identical to SEQ ID NO: 797142

SEQ ID NO: 797144 - protein, 740 aa, Homo sapiens; identical to SEQ ID NO: 797142

SEQ ID NO: 797145 - protein, 50 aa, Homo sapiens
SGVKAEYWGLFWKSEEPNCLIRLQAWATWRDPLSTKIQKLARRCGTHLYS

SEQ ID NO: 797146 - protein, 83 aa, Homo sapiens
RVEVRLGPLRGSVLELRLRQRARGPRTLHKAPEKMTGPGLGAVAHACNPGALGGLGGRIAGVQEFEISLGNKARHHPPPPVAT

SEQ ID NO: 797147 - protein, 147 aa, Homo sapiens
  misc_feature (17)..(17): Xaa can be any naturally occurring amino acid
MLTYILRRNNNTTRNPXHRHHIYEGIFQEPQKQDYFMSQLVVTSPAPASEKGGASKSSTICQAKYQSLSPLGVYGPISPKMCELVVPPPVDSPAAEQLRVTATQRLEAPLGCEMKKAFFAPDAARASPEAPEASISQLLKSRHISCL

SEQ ID NO: 797148 - protein, 226 aa, Homo sapiens
DGKIVLPGNFLYCTFYGRPYKLQVLRVKGADGMILGGPQSDSDTDAQRMAFEQSSMETSSLELSLQLSQLDLEDTQIPTSRSTPYKPIDDRITNKASDVLLDVTQSPGDGSGLMLEEVTGLKCNFESAREGNEQLTEEERLLKFSIGAKCNTDTFYFISSTTRVNFTEIDKNSKEQDNQFKVTYDMIGGLSSQLKAIREIIELPLKQPELFKSYGMMSSVYCTQKC

SEQ ID NO: 797149 - protein, 316 aa, Homo sapiens
DGKIVLPGNFLYCTFYGRPYKLQVLRVKGADGMILGGPQSDSDTDAQRMAFEQSSMETSSLELSLQLSQLDLEDTQIPTSRSTPYKPIDDRITNKASDVLLDVTQSPGDGSGLMLEEVTGLKCNFESAREGNEQLTEEERLLKFSIGAKCNTDTFYFISSTTRVNFTEIDKNSKEQDNQFKVTYDMIGGLSSQLKAIREIIELPLKQPELFKSYGIPAPRGVLLYGPPGTGKTMIARAVANEVGAYVSVINGPEIISKFYGETEAKLRQIFAEATLRHPSIIFIDELDALCPKREGAQNEVEKRVVASLLTLMDGI

SEQ ID NO: 797150 - protein, 104 aa, Homo sapiens
SHSPCCKQGPKQTGPLPEPCTLHCSVKFQFPISTYHVCVHMCVQMCPHYICAQLCTTNVTFLWDPLMTHNSLSTFCKFFSSLLIYQDCATAVRSPAWATERDSV

SEQ ID NO: 797151 - protein, 117 aa, Homo sapiens
CPWPVSMKLPGEKSLSFPLHPEAPAWAKNVQECGIWRNYTSELPGYIQTAKNRSWPNWDASVEQQICTLLAVMQARWSTSDTQGWLEQCSLGKIHGQGSRNRRKTTHPNVLHTATTL

SEQ ID NO: 797152 - protein, 98 aa, Homo sapiens
RGYRMSNTRALTQWKALTQAQARPLAIKVTHLLATIALLAGSLQWCLRANHHILLSTTFTISGAIYELTPSTSQLSVQTPRKAGQRSDSREKGNSSLS

SEQ ID NO: 797153 - protein, 59 aa, Homo sapiens
MMLGAHGDSQEALAWPIWSLLCEMRLVTPTSRVVGDMDLWPPPQGVPHAPGPDWESGPQ

SEQ ID NO: 797154 - protein, 214 aa, Homo sapiens [sequence omitted]

SEQ ID NO: 797155 - protein, 214 aa, Homo sapiens [sequence omitted]

SEQ ID NO: 797156 - protein, 139 aa, Homo sapiens
MCLSSLRFPFVLTLDLSLPLLLPTLRVRACACLFRHLCDYLPTYHFITLFLVQSSPVSETVHLWPCRCSNLGDFPSLHVVKHFAESPVFKQTSPGHCVGIWHTTSLIVYPVVLFYKRVSLSQGMRVTCLQELLPRFQEM

SEQ ID NO: 797157 - protein, 171 aa, Homo sapiens
MEHSTFLSGLVLATLLSQVSPFKIPIEELEDRVFVNCNTSITWVEGTVGTLLSDITRLDLGKRILDPRGIYRCNGTDIYKDKESTVQVHYRMCQSCVELDPATVAGIIVTDVIATLLLALGVFCFAGHETGRLSGAADTQALLRNDQVYQPLRDRDDAQYSHLGGNWARNK

SEQ ID NO: 797158 - protein, 127 aa, Homo sapiens
MEHSTFLSGLVLATLLSQVSPFKIPIEELEDRVFVNCNTSITWVEGTVGTLLSDITRLDLGKRILDPRGIYRCNGTDIYKDKESTVQVHYRTADTQALLRNDQVYQPLRDRDDAQYSHLGGNWARNK

SEQ ID NO: 797159 - protein, 132 aa, Homo sapiens
IFECFTGPCSPYSSSVVWIHFQEVSPFKIPIEELEDRVFVNCNTSITWVEGTVGTLLSDITRLDLGKRILDPRGIYRCNGTDIYKDKESTVQVHYRTADTQALLRNDQVYQPLRDRDDAQYSHLGGNWARNK

SEQ ID NO: 797160 - protein, 140 aa, Homo sapiens
  misc_feature (12)..(13): Xaa can be any naturally occurring amino acid
RGAARVEKLYLXXFGVSRFAPSTLMVWFFPGVSPFKIPIEELEDRVFVNCNTSITWVEGTVGTLLSDITRLDLGKRILDPRGIYRCNGTDIYKDKESTVQVHYRTADTQALLRNDQVYQPLRDRDDAQYSHLGGNWARNK

SEQ ID NO: 797161 - protein, 171 aa, Homo sapiens; identical to SEQ ID NO: 797157

SEQ ID NO: 797162 - protein, 171 aa, Homo sapiens; identical to SEQ ID NO: 797157

SEQ ID NO: 797163 - protein, 153 aa, Homo sapiens [sequence omitted]

SEQ ID NO: 797164 - protein, 171 aa, Homo sapiens; identical to SEQ ID NO: 797157

SEQ ID NO: 797165 - protein, 127 aa, Homo sapiens; identical to SEQ ID NO: 797158

SEQ ID NO: 797166 - protein, 133 aa, Homo sapiens
AGGGAASPVDCSRDSWCLFWVPVDKLAATSSSLRSIKALGSARAGQRMARGQRGQRGGGMTSCREEYSLLIAGDNGMAGCREELPSPLRAAETTCQQREATLSRASSPLRTEHWTDDLPTERSYPLWASSELF

SEQ ID NO: 797167 - protein, 134 aa, Homo sapiens
MGQHTHPVSVPWSFLGKFQTRKQWGSGHITPKYDCRRPEYATPKYDYRRPEYVTPKYDCRRPEYATPKYDCRRPEYATPKYDCRRPEYATPKYDCRRLEYVTPKYDCRRPEYVTPKYDCRRPEYVTPKYAMLTC

SEQ ID NO: 797168 - protein, 140 aa, Homo sapiens [sequence omitted]

SEQ ID NO: 797169 - protein, 105 aa, Homo sapiens
QGLRDAPGEGQQQAAARARQRRSAPSRSSRRPTVAAAPGHFFLKLSKLPPSSPTPPAAKEKQKKKRKEARKETQICHHNEKKKGKRKRRESRATVGLDGGRQSVG

SEQ ID NO: 797170 - protein, 218 aa, Homo sapiens
MCLVTVLGNLIIILDVSPDSHLPTPMYFFLSNLSLPDIGFTSTTVPKMIVDIQSHSRVIFYAGRLTQMSLFAIFGGMEEDTLLSVMAYDRFVAICHPLCHSASMNPCFCGFLVLLSFFFLSLLDTQLHNLIALQMTCFKDVEILNFFCDPSQLPHLACCDTFTNNIIMYFPAAIFGFLQISGTLFSYYKIVSSILRVSSSGGNYKAFSTCGSHLSVVC

SEQ ID NO: 797171 - protein, 117 aa, Homo sapiens
GALTFSMPGARHLSPLPPQGQPGLGHLAWRQTVDSPVPKFGAFEALVLPFSSPPRVKWELAHRQLLCLSKKPAEEFLVSRSSPSGPGFSGPTASTVGRSNKRPGIPRNILLPSSSAY

SEQ ID NO: 797172 - protein, 124 aa, Homo sapiens [sequence omitted]

SEQ ID NO: 797173 - protein, 184 aa, Homo sapiens
TPSSETSSSSCKKQAASMAVVIPDAVLKEGLSGDALSSPSAPEPVVGIPDNKLDADYIKRYLGDLTPLQESCLIRLHGWLQETHKGEIPKDEHILQFLCAWDFNIDKAREIICQSLAWRKQHQVDYILATWAVPQVLQNYYTGGWHHHDKDGWPLCMLRLGQMDTNGLVRALGEEALLRYVLSI

SEQ ID NO: 797174 - protein, 88 aa, Homo sapiens
GGGAEALAPRLCGVRAILSQSLECIPEPDLITPPRTLVFWGIDLLQPVMDLKHMRKPIHSFTLGLQNHPSCTGAVLYISSESSPAPLC

SEQ ID NO: 797175 - protein, 134 aa, Homo sapiens
PQTIRFQPTVEERPLKTGIWSELGLRAYVYPVNPPPPSPEAPSHKNGGEGAVPEAEAAQYQPVPAPTLGPAVIPEFSRHRSSGRIVYDARDMRRRLRELTREVEALSGCYPLASGSSTAEETSKNWVYRSLTGR

SEQ ID NO: 797176 - protein, 34 aa, Homo sapiens
QEGLERWPGDSAHRFGTVEELYTHRLNWRVCKLK

SEQ ID NO: 797177 - protein, 73 aa, Homo sapiens
LRALRPPTPPGKEPHSPTRRQQTPHPWLSEQQALILENPLLKFSLTTWTREGGNILYWALTTCQTHLILRKLL

SEQ ID NO: 797178 - protein, 84 aa, Homo sapiens
SDVTARWDSRSPDARWDSVQSSSTVARPTAPFTSVPPFPHLGRARTSEALGGRKLREGGACLETWTPTEWICWHLDLREGGTED

SEQ ID NO: 797179 - protein, 67 aa, Homo sapiens
ALPKRQQKLKNVIACALGSPGTANIKRLTVASADKDGEQLELSSTAGGHAKWDSHFRKQLVVSYKLK

SEQ ID NO: 797180 - protein, 71 aa, Homo sapiens
GSLCWAQGGGHICCLKGLPRSIPGGAVSAPPALQAPHSVPALLPGGCSPALGARASRSFGGSAGGAQTCGS

SEQ ID NO: 797181 - protein, 598 aa, Homo sapiens [sequence omitted]

SEQ ID NO: 797182 - protein, 753 aa, Homo sapiens [sequence omitted]

SEQ ID NO: 797183 - protein, 753 aa, Homo sapiens
MGSGTSTQHHFAFQNAERAFKAAALIQRWYRRYVARLEMRRRCTWSIFQSIEYAGQQDQVKLHDFFSYLMDHFIPSSHNDRDFLTRIFTEDRFAQDSEMKKCSDYESIEVPDSYTGPSLSFPLLPDHATALVEAFRLKQSLALSSRLEYSGAISAHCNIRFLGSSDSPASASCQLHARYVLNLLYETKKHLVQLPNINRVSTCYSEEITVCGDLHGQLDDLIFIFYKNGLPSPERSYVFNGDFVDRGKDSVEILMILFAFMLVYPKEFHLNRGNHEDHMVNLRYGFTKEVMNKYKVHGKEILRTLQDVFCWLPLATLIDEKVLILHGGVSDITDLELLDKIERSKIVSTMRCKTRQKSEKQMEEKRRANQKSSAQGPIPWFLPESRSLPSSPLRLGSYKAQKTSRSSSIPCSGSLDGRELSRQVRSSVELELERCRQQAGLLVTGEKEEPSRSASEADSEAGELRKPTQEEWRQVVDILWSDPMAQEGCKANTIRGGGCYFGPDVTQQLLQKYNLQFLIRSHECKPEGYEFCHNRKVLTIFSASNYYEVGSNRGAYVKLGPALTPHIVQYQANKVTHTLTMRQRISRVEESALRALREKLFAHSSDLLSEFKKHDADKVGLITLSDWAAAVESVLHLGLPWRMLRPQLVNSSADNMLEYKSWLKNLAKEQLSRENIQSSLLETLYRNRSNLETIFRIIDSDHSGKGTHYSITFEALQVFYLKPLISFLIHPHSSPLRHLESKVRRLVLINDRN

SEQ ID NO: 797184 - protein, 106 aa, Homo sapiens
PSNGESDCFNLFETGFYHSELNPMNMCSEESERPAKRLKMGIAVPESFMNEVSVNNLGVDFENHTHHITSAKMAVSVADFGSLSANETNGFISAHALHQHAALHSE

SEQ ID NO: 797185 - protein, 238 aa, Homo sapiens
LVILEVKVLGPEYPILALVGEEVEFPCHLWPQLDAQQMEIRWFRSQTFNVVHLYQEQQELPGRQMPAFRNRTKLVKDDIAYGSVVLQLHSIIPSDKGTYGCRFHSDNFSGEALWELEVAGLGSDPHLSLEGFKEGGIQLRLRSSGWYPKPKVQWRDHQGQCLPPEFEAIVWDAQDLFSLETSVVVRAGALSNVSVSIQNLLLSQKKELVVQIAGQWLLAHTHLPSPHVYIHIGPKGSL

SEQ ID NO: 797186 - protein, 103 aa, Homo sapiens
RGLCLLIFSIGYCFLSFLMRKNDKSKINKLATTYENPQEIPFPEFSLTNLANITNGNRPHVSATIAVSCRGKRLGGNLHFSSATATNRNERARGFCKISTPEN

SEQ ID NO: 797187 - protein, 103 aa, Homo sapiens; identical to SEQ ID NO: 797186

SEQ ID NO: 797188 - protein, 75 aa, Homo sapiens
KDFLSSSDRGSEQEDLEDSGSMDCSAPSVIQGDSSKRADKDEIPTISSYVDKNTKDRFPVFSHRIWNLPYYHPSS

SEQ ID NO: 797189 - protein, 104 aa, Homo sapiens
SRTMKEPISVGEGSPSVVPCPGSPRNLTSGPSASLASLCLPLFFSSESNTLSVRQPGGKGFSEKLQPACSLGMYTGVEPQKFTVFAAGRSLATPLPGWNLEFIL

SEQ ID NO: 797190 - protein, 99 aa, Homo sapiens
VSGRNRIVELEESWGGGAQAGDVALSMAAEQVHGQAGLEPKLPALTCTQSASRIRAPGRQVGIWRCTEMKCPSLLPGPPPSGTPLETTSAPTLPASPLG

SEQ ID NO: 797191 - protein, 96 aa, Homo sapiens
AGSSCLALGNIFPLQPRASTRLPRWIRPQRCVPASFLILSLKRSRDFSAAPQNTTQNFLVNGRIRKWMAWLTELRNSSWKFSANVLLVQHLQWWPT

SEQ ID NO: 797192 - protein, 121 aa, Homo sapiens
AELFFTERTPWFHQFPQIPVAPDLSSRGTRRKDFLSTRRILGAAKVPVVSFYHSRGVLLKASERASGGSKAVQPGRKVRNIVGKKRHQNHRIERKIIEEMYLPVRVKLAFRGRRGLAFFDI

SEQ ID NO: 797193 - protein, 109 aa, Homo sapiens
TAASRMAGFSFTCFISVIHPLSPQPSSKNRNGYSRLGMAPRRLPSPTRRAAGSPRVSWGLRPARPSFQAFPGSPVRPALILDYLHFKNPPNFFLWPITLSSYIRASFVK

SEQ ID NO: 797194 - protein, 110 aa, Homo sapiens
HHHHHHHNHLQIDAQVILEEISRTGALLQLCNPWASLCTAPHVLISMLIKPPHLIPCLLQGEVPQAGVCPVYRLNMHFAQWLEMCWWWNVLVIVSGWRATAPQCSAMTDS

SEQ ID NO: 797195 - protein, 113 aa, Homo sapiens
SRSARMRLLRTGYKIENKILATEPALNWVNTQAILTILTKLGQADNCWLMLSIFFTEYKYNITKVLTENCNLLEEFKTQGYTDCIEHEQLIKIKGNKEFCKERLDTALLHQSH

SEQ ID NO: 797196 - protein, 142 aa, Homo sapiens
MDTVLKAKCWKLSMMLRCLYKNMSHCTQLLEIYLYSSLGIGGSIKVVDSRAWWLTPVIPALWEAEAGGSPDIGVRDQPGQHGETPSLPKNTKISQVWWQMPIIPATQEAEAGESLEPRRRLQWTEIMPLHSSLGYRARLRLK

SEQ ID NO: 797197 - protein, 142 aa, Homo sapiens [sequence omitted]

SEQ ID NO: 797198 - protein, 74 aa, Homo sapiens
QRDSALCSRTHRCMRRRRPASSKEESQGTEHREAALPPASSQTADALRPRSSARTPPGPISSPPSKPHFSRVQP

SEQ ID NO: 797199 - protein, 109 aa, Homo sapiens
MTTAGKTNQKLEWAFSLYDVDGNGTISKNEVLEIVMAIFKMITPEDVKLLPDDENTPEKRAEKIWKYFGKNDDDKLTEKEFIEGTLANKEILRLIQFEPQKVKEKMKNA

SEQ ID NO: 797200 - protein, 109 aa, Homo sapiens; identical to SEQ ID NO: 797199

SEQ ID NO: 797201 - protein, 77 aa, Homo sapiens
MTLNKGLPRPEPQCLYLTSDSKDTDVSCTFPALNGLCATHLLHLLQIHSFSSFNTCIYSVPSALPGTKNKALNKIDT

SEQ ID NO: 797202 - protein, 115 aa, Homo sapiens
TQPAWCCTTGLTPQIKTTGAQPQPTDEGMQGVQDAGQREKRGMSHGCAPRSEPDGALNGFSCPGSSHHILNAVFLPLQGNLLLTSGTLQPRTYQHSDSFLVLTHYPFNIALDSIY

SEQ ID NO: 797203 - protein, 134 aa, Homo sapiens
FFLLRQCFTLVTQAGVQWRDLSSPQPPPPGFKQFSYLSLPSSWNYRHVPPRPANFVFLVETGFLHVGQAGLELPTSGDPPASASQNTGITGVSHRAWLFTHFLKPCLSIHLTSVKFSMTPVLQHVERKLHESSN

SEQ ID NO: 797204 - protein, 146 aa, Homo sapiens
KKRKKKSSYTEARSAKQIAASRPTPWQQLRPGLSGDGVCKRIPAQESGLLFLMKAADATLCALCRTVPGTWTDLASPCASEGRTALCLRSPAGGRTGVLLSSFAHRVEHLQLLGPSCLSAGPRYLLPLVFHCDVHHFLELQLVFIC

SEQ ID NO: 797205 - protein, 138 aa, Homo sapiens [sequence omitted]

SEQ ID NO: 797206 - protein, 86 aa, Homo sapiens
STGKQGPSLPRSVPGGSGHCLHLGGGQHMCVGTCWKEGMTLLAMERWSSVSHGLRRCLPNVQVTIASELRHAASGMHSPFTAKHSA

SEQ ID NO: 797207 - protein, 156 aa, Homo sapiens
SLGLAPARPQVALLRPSLPQAQSSLCESPGCEPDFEPSVTMPLLSTRWPQILATSLGARLLLEKGTQRKGWEARLLLALSPDRTYRLSRGDLCAPVAFSGFLGWEGGLLPPRIPPMRSSSFVPGWVGTVVFFPQTVSLGGGGRAYRYIGTASAPKS

SEQ ID NO: 797208 - protein, 109 aa, Homo sapiens
MKCSELYPCNLCTRSHSFPYSKSDSATFSSPLQHHSHPLYWVIPTTSLVEATISPLPDSCSSLLPGLLLAPAPFHFIFIAIARMIPLKSTLAQNPPEASHSLSIKVKIS

SEQ ID NO: 797209 - protein, 135 aa, Homo sapiens
TERSASLSGMPTGATTKVSRTEALSLGRTSTPGPAQSTISPEISTETITRISTPLTTTGSAEMTITPKTGHSGASSQGTFTLDTSSRASWPGTHSAATHRSPHSGMTTPMSRGPEDVSWPSRPSVEKTSPPSSLV

SEQ ID NO: 797210 - protein, 76 aa, Homo sapiens
VSYHVMLFQCKPGAYRVLNWNKPAEYIYHLISTIYYLLFDISKHSSSNAYSLREETLTYMYHQSKQHNVGQYTYLL

SEQ ID NO: 797211 - protein, 91 aa, Homo sapiens
VRLPQHPRLHALKPGWPTHTSLPPSLKLHLFRVTHRFEAVMKTGNPLSMSVIICTQNSACNVVGSMPPEDHQWSHPHYTSSLSPDYEAHER

SEQ ID NO: 797212 - protein, 80 aa, Homo sapiens
YEKFTLPLLYQRYGKRQTLTRPTKPPATEITKSILLDETTSASAEVFPRPCPQTALSGSSPARASGCPCGNLSDTAASPW

SEQ ID NO: 797213 - protein, 107 aa, Homo sapiens
SLLRTGYKIENKILATEPALNWVNTQAILTILTKLGQADNCWLMLSIFFTEYKYNITKVLTENCNLLEEFKTQGYTDCIEHEQLIKIKGNKEFCKERLDTALLHQSH

SEQ ID NO: 797214 - protein, 125 aa, Homo sapiens
KAPDFVFYAPRLRINKRILQLCMGNHELYMRRRKPDTIEVQQMNAQAREEKHQKQLERQQLETEKTRNGETDLEKGQSWNIFWAQVDPDTGGPEKASLKQRGTGHFGGGNWATKQPYGEANVERN

SEQ ID NO: 797215 - protein, 68 aa, Homo sapiens
QSVGKNLQRVNRVLMGPRSIQERHFKKVGKHSTRKEQDAQAFVDNAAKGKRLEGPAPRELEQPHSPAF

SEQ ID NO: 797216 - protein, 38 aa, Homo sapiens
MTAQHGPSKPQSHREASPPGPCVAVLEPVVSCEERSGR

SEQ ID NO: 797217 - protein, 111 aa, Homo sapiens
FLEVTCIPCHMTPSILKASDRDLLACQTSSYIRSLSNFLFCYQPEKTLCFYFYLFFYLLRQSLTLSPRMECNGAISAHYNLRLPGSSDSPASATRKAEAGEWHEPGRRSLH

SEQ ID NO: 797218 - protein, 106 aa, Homo sapiens
MASMYRRHKTSRVGRVKSWRARGYPGEHAGQTAPSACPHDPLLQSEGQDTMRPLRHRVHPRHDPDERQECVPCFCPRSSLKGTHLCKPTALPAASTASESSGAPYP

SEQ ID NO: 797219 - protein, 69 aa, Homo sapiens
GRTHLSHQLPLPALPGPGACLTYTPFAGPRNRLPPAGLGGASETARPSSDCRASDQEIARSLRSSFVES

SEQ ID NO: 797220 - protein, 94 aa, Homo sapiens
VLFLSARETFQGAVAASPIQGDAAPWGHRCFLGSPEHFSVLLASHPIGQALESGHCLELTRRCFTVVLGLSLRGLGPLCCEAGLQLWWQVTRCH

SEQ ID NO: 797221 - protein, 104 aa, Homo sapiens
LFLPLSLLFSLSLLLICSILYMGLVPSTANKENDHLETQKAHHIPAEPPQLKETQLLSPASTHQSRPELHLTLVRHASTPRWTTEAREFSIMMGTSGVMGLPCS

SEQ ID NO: 797222 - protein, 108 aa, Homo sapiens
QIQTVAKLHLKRSPGRGPVLAPEESTQHHPPEVAGPGVLQAAPFGRFCFPRKWGKYFKPGEGRKLTLKYVLFLKIKCKCMEAGCPFSGFGTGVLESNRVGVQALSDSG

SEQ ID NO: 797223 - protein, 180 aa, Homo sapiens
ENLRWLRLGDRYTACRPRGSLHPPSRGGVRWKVMQPSWTPAPVQRTACNITAWGGEFGKEGEGRCEQVALSSGPPEGALHASREGPQPPGAENLRPSTGETFVQSGRWDGGWRGAMKGRRHRQASTPPTRPESIFVPTAQDGAQMVCKAHTRTTQYTEQDSVVTARGLLDAKRVGVAGGS

SEQ ID NO: 797224 - protein, 83 aa, Homo sapiens
VPEPELDPGPQPEPKPEPESAAGEPGAHEPQTQRCPGEVGRREGRPLLPAASRDGGPHHPWNCWPLCVARDFSRGFASRGYFS

SEQ ID NO: 797225 - protein, 143 aa, Homo sapiens
VPEPELDPGPQPEPKPEPESAAGEPGAHEPQTQRCPGGVRDAGLGAQGLRGGGAQGGGGRVLRSLLLACVGPPGGAGQRKARKVRSLRGSARSSFLRPGHSHSRRHRVLPHPTGGINPLLWLRAPQEGSSLGGTGHGPAKGTT

SEQ ID NO: 797226 - protein, 76 aa, Homo sapiens
WVGAQHPTPPAAPRDNRRCFLEELRGRGMRDGSWVSGRDPTLHVMPCKVCGDPKKKRPGSVIYFPGKPIEKQLDSK

SEQ ID NO: 797227 - protein, 111 aa, Homo sapiens
MGAEEGTGIGFWMHFGGSMKESGVKGSSEALAASLIHLHPFCQGHLSFLLGTVSRPPRCCPPDQQWPFQAFHLLPSSLSLRSQVPFPTHLFLKCVALLWVQDCSSDQGSSR

SEQ ID NO: 797228 - protein, 115 aa, Homo sapiens [sequence omitted]

SEQ ID NO: 797229 - protein, 115 aa, Homo sapiens
ARLVEGSAELLTRACGGPRPALAPVVAAAGWLPGRLPPAAAVGAICSSPHPESWTPRTAPWRACVKCSSGAVRRLPEKLGAESGSFWSRERLGKLRNVDLQGLEELSAWAVPVGH

SEQ ID NO: 797230 - protein, 157 aa, Homo sapiens
TQQGGDAARRHPLHKVPARAAELGPRRLDAPRFPRPPGHRALPRAARHPPSRPPWRRRGPGALLPGAGVIRVLLLLPVAFLGVGGILALIGPVAAPGLEDDPPAPSHFREQREAVGSPAMRRRTVTVGGPRRSRVCDTLPPPPAWGGSAGQRVRWAR

SEQ ID NO: 797231 - protein, 132 aa, Homo sapiens
AVLCMVRLLAASPNSTHCMPAALPIPQVMTVCLQTVPNFPRGQNLQLGTITLEKCKEARDCSSFFFFNNKPCRTICLFHLCACHTFIKIRTKEREREAHESLIMNSSVGKALLKNNRPGTVTHAYNPISLGD

SEQ ID NO: 797232 - protein, 78 aa, Homo sapiens
YGGAHGGGGARGGGGARGGGGARGGGGARGGGGARGGGGARGGGALSMEVLMVVEVLVVVEVPVVVEVLVVWRCPWWW

SEQ ID NO: 797233 - protein, 343 aa, Homo sapiens
MGKQQSKLKHSTYKYGPDEIIEERIQTKAFQEYSPAHMDTVSVVAALNSDLCVSGGKDKTVVAYNWKTGNVVKRFKGHEHEITKVACIPKSSQFFSASRDRMVMMWDLHGSSQPRQQLCGHAMVVTGLAVSPDSSQLCTGSRDNTLLLWDVVTGQSVERASVSRNVVTHLCWVPREPYILQTSEDKTLRLWDSRGLQVAHMFPAKQHIQTYCEVSVDGHKCISCSNGFGGEGCEATLWDLRQTRNRICEYKGHFQTVASCVFLPRALALMPLIATSSHDCKVKIWNQDTGACLFTLSLDGSGPLTSLAVGDAISLLCASFNRGIHLLRMDHSQGLELQEVAAF

SEQ ID NO: 797234 - protein, 318 aa, Homo sapiens
MGKQQSKLKHSTYKYGPDEIIEERIQTKAFQEYSPAHMDTVSVVAALNSDLCVSGGKDKVACIPKSSQFFSASRDRMVMMWDLHGSSQPRQQLCGHAMVVTGLAVSPDSSQLCTGSRDNTLLLWDVVTGQSVERASVSRNVVTHLCWVPREPYILQTSEDKTLRLWDSRGLQVAHMFPAKQHIQTYCEVSVDGHKCISCSNGFGGEGCEATLWDLRQTRNRICEYKGHFQTVASCVFLPRALALMPLIATSSHDCKVKIWNQDTGACLFTLSLDGSGPLTSLAVGDAISLLCASFNRGIHLLRMDHSQGLELQEVAAF

SEQ ID NO: 797235 - protein, 343 aa, Homo sapiens; identical to SEQ ID NO: 797233

SEQ ID NO: 797236 - protein, 343 aa, Homo sapiens; identical to SEQ ID NO: 797233

SEQ ID NO: 797237 - protein, 343 aa, Homo sapiens; identical to SEQ ID NO: 797233

SEQ ID NO: 797238 - protein, 77 aa, Homo sapiens
QERQDSGLGPPHLSTLTSSEISSFLRSHHIQHHPYVGSSQFPPARSSLPVLGRIYPITYLAFPPGSSVDSSNMVGPK

SEQ ID NO: 797239 - protein, 206 aa, Homo sapiens
MLQSMLISGQSIPDELVIKLMLEKLNSPEVCHFGYIITEIPSLSQDAMTTLQQIELIKNLNLKPDVIINIKCPDYDLCQRISGQRQHNNTGYIYSRDQWDPEVIENHRKKKKEAQKDGKGEEEEEEEEQEEEEAFIAEMQMVAEILHHLVQRPEDYLENVENIVKLYKETILQTLEEVMAEHNPQYLIELNGNKPAEELFMIVWID

SEQ ID NO: 797240 - protein, 336 aa, Homo sapiens
LEAVASLRRVRLRPVFCVMTSQEKTEEYPFADIFDEDETERNFLLSKPVCFVVFGKPGVGKTTLARYITQAWKCIRVEALPILEEQIAAETESGVMLQSMLISGQSIPDELVIKLMLEKLNSPEVCHFGYIITEIPSLSQDAMTTLQQIELIKNLNLKPDVIINIKCPDYDLCQRISGQRQHNNTGYIYSRDQWDPEVIENHRKKKKEAQKDGKGEEEEEEEEQEEEEAFIAEMQMVAEILHHLVQRPEDYLENVENIVKLYKETILQTLEEVMAEHNPQYLIELNGNKPAEELFMVSAVLSRNTSQHGKFKSIDSIVLLLINRSIFIFEHHLSLN

SEQ ID NO: 797241 - protein, 318 aa, Homo sapiens
MTSQEKTEEYPFADIFDEDETERNFLLSKPVCFVVFGKPGVGKTTLARYITQAWKCIRVEALPILEEQIAAETESGVMLQSMLISGQSIPDELVIKLMLEKLNSPEVCHFGYIITEIPSLSQDAMTTLQQIELIKNLNLKPDVIINIKCPDYDLCQRISGQRQHNNTGYIYSRDQWDPEVIENHRKKKKEAQKDGKGEEEEEEEEQEEEEAFIAEMQMVAEILHHLVQRPEDYLENVENIVKLYKETILQTLEEVMAEHNPQYLIELNGNKPAEELFMVSAVLSRNTSQHGKFKSIDSIVLLLINRSIFIFEHHLSLN

SEQ ID NO: 797242 - protein, 103 aa, Homo sapiens
HGLWVGVVHSLLLLLAVGEGFFGSVLILGAPSPTPFVSSPGSSHLPNQSQCRNLDTSVQGAEFTVLFIQGKTAASHWASWPAHFTSLFVKSTPLQEYPLLNFA

SEQ ID NO: 797243 - protein, 117 aa, Homo sapiens
SPKPVDPLKESGNLCPSHPASLPTSTLDEAQNPCQGSRYQRVTLRLLGLEANTGKDSIAFLLKWRQAALSLGPPISISEAHHGCCTHILSAQTQTKISQQQRNKVFSLCSHYLPGRN

SEQ ID NO: 797244 - protein, 254 aa, Homo sapiens
HIPVSDQGKQGTALGRMDKHGVKTPLWKKETEELRAEDAEQEEGKEGSEDEDEDNQRPLEDSATEGEEPPRVAEEGEGRERRSVSYCPLRQESSTQQVALLRRADSGFWGWLGPLALLGGLTAPTDRKRSLPEEPCVLEIRRRPPRRGGCACCELLFCKKCRSLHSHPAYVAHCVLDHPDLGKGGGPLGTPERPRSQPLCPPSFPGPRPPTDLLSWSAEPSSTHSAGPPLLSCCPERPHPSRRPTVGAWFPSVT

SEQ ID NO: 797245 - protein, 193 aa, Homo sapiens
LTSQSLIRESRAQPWEEWISMQDCPDLLPARRCEDPLVEEGNGRAPGRGRGARGREGGVGGRGRGQPEAAGGQRDGGRGAAAGSGGGRRPRAALSVLLPAAPGVQHPAGGAAAARGQRLLGLARPLSAAGRPNSSHRQEAEPPGGAVRAGDPATTAAPRGLCLLRAPLLQEMQESAQPPSLCGALRSGSPGSG

SEQ ID NO: 797246 - protein, 81 aa, Homo sapiens
QSLQAFRAPEDERSPMLRKVTVVTACPMGLRWPKGDNRRGPDSGGKGLMTANHAFSSQCPSQQPPSGSTKQATVRVFTPWE

SEQ ID NO: 797247 - protein, 66 aa, Homo sapiens
VPGSIQGLKHPRRKELVPQSFASVRPHLVRKRPRTPRSEASPLSSPALGVSLTVVSTDPRFLLKAC

SEQ ID NO: 797248 - protein, 148 aa, Homo sapiens
TPLLLAPFSPASLVSLMFLKCDKLTPAPGSLHHWFSCLQYFLQMAPRLASSFFQSSAQYQRLHNTFLDCPVINGNPMSPELPMPLSCILKFHSMYPHLIFYIRLFVYCPSHRLEPEFHESENCMPSSPLQLGRGPAKGMNETLLNKYL

SEQ ID NO: 797249 - protein, 154 aa, Homo sapiens
KTHVQMSEEMLLVSRIPQWGCRGLSTLPQGREKLSVPRMWNHTQPYRDWGAQSICPLWVQSPPVGLQAALHHASFALVLHPPRSACQLPLFFCIPQSTHCRVGETACDQENLTVWCVNRIPWSGKPNILFKSERVTIKAICQLPIFKRQRNTHC

SEQ ID NO: 797250 - protein, 35 aa, Homo sapiens
MHDRGARAPSAAGPQDRGLAAQRATGQPGRAHAPC

SEQ ID NO: 797251 - protein, 66 aa, Homo sapiens
ILDKKLRTIQESWSKDTVSSTMDLSTSTPREAEEEPLVPEMSHDTIRLQLNRKLNIFWREKRSGNR

SEQ ID NO: 797252 - protein, 80 aa, Homo sapiens
DAAASPSAVKMLGASRTGISNMRALENDFFNSPPRKTVQFGGTVTEVLLKYKTGETNDFELLKNQLLDPDIKVINFVFDH

SEQ ID NO: 797253 - protein, 244 aa, Homo sapiens
DAAASPSAVKMLGASRTGISNMRALENDFFNSPPRKTVQFGGTVTEVLLKYKTGETNDFELLKNQLLDPDMKGDDQIINWLLEFRSSIMYLTKDFEQLISIILRLPWLNRSQTVVEEYLAFLGNLVSAQTVFLRPCLSMIASHFVPPRVIIKEGDVDVSDSDDEDDNLPANFDTCHRALQIIARYVPLTPWFLMPILVEKFPFVRKSERTLECYVHNLLRISVYFPTLRHEILELIIEKLLKLD

SEQ ID NO: 797254 - protein, 132 aa, Homo sapiens
RKERKRQEVKETEKETERGRNRESKRKRQREGVREKEGQTQKVRESEREEETKKKSKRKRDGSSKEKTVYPIPLKARVNFCLPSQGMFFLGGTSTYICLPTNWTGTCTLVFLSPNINIAPGNQTLSVPLKAQ

SEQ ID NO: 797255 - protein, 99 aa, Homo sapiens
LLPPSQILPAHLGGEEKTPMGPQQMGTGWEQRERRRGEEVKKKNKNKQQRPSESREAGNMQSPETQPVQLTSQIECCQKPASQEGRRSEGHMAVSFQTV

SEQ ID NO: 797256 - protein, 137 aa, Homo sapiens
MVSPVSKDATEDLRKATGPLEAQALVKQDLLPADQAQVLNEMAKYQVPQRSGDIVMIQSEHTGAIDVLSADLESADLLGDHRKVSPPLMAPPCIWTFAKVKEFKSKLGKEKNSRLVVKRGEVVTIRVPTHPEGKRVC

SEQ ID NO: 797257 - protein, 110 aa, Homo sapiens
MDGRGAFWTVAIPRARQEGLGRLGLPFPVKRTPPAPQNPGGSTQAPQRVVGKSHSGIRMPAKSRNLRLESKLNRKVVKYKWGKQGSGAGRELVPAFPTNAGLGRRDRCRP

SEQ ID NO: 797258 - protein, 255 aa, Homo sapiens
MHPEPSEPATGGAAELDCAQEPGVEESAGDHGSAGRGGCKEEINDPKEICVGSSDTSYHSQQKQSGDNGSGGHFAHPREDREDRGPRMTKSSLQKLCKQHKLYITPALNDTLYLHFKGFDRIENLEEYTGLRCLWLQSNGIQKIENLEAQTELRCLFLQMNLLRKIENLEPLQKLDALNLSNNYIKTIENLSCLPVLNTLQMAHNHLETVEDIQHLQECLRLCVLDLSHNKLSDPIWPQYVPPVFPSVREGYRFH

SEQ ID NO: 797259 - protein, 168 aa, Homo sapiens
MTKSSLQKLCKQHKLYITPALNDTLYLHFKGFDRIENLEEYTGLRCLWLQSNGIQKIENLEAQTELRCLFLQMNLLRKIENLEPLQKLDALNLSNNYIKTIENLSCLPVLNTLQMAHNHLETVEDIQHLQECLRLCVLDLSHNKLSDPIWPQYVPPVFPSVREGYRFH

SEQ ID NO: 797260 - protein, 243 aa, Homo sapiens
MHPEPSEPATGGAAELDCAQEPGVEESAGDHGSAGRGGCKEEINDPKEICVGSSDTSYHSQQKQSGDNGSGGHFAHPREDREDRGPRMTKSSLQKLCKQHKLYITPALNDTLYLHFKGFDRIENLEEYTGLRCLWLQSNGIQKIENLEAQTELRCLFLQMNLLRKIENLEPLQKLDALNLSNNYIKTIENLSCLPVLNTLQMAHNHLETVEDIQHLQECLRLCVLDLSHNKLSDPARRPGLTS

SEQ ID NO: 797261 - protein, 41 aa, Homo sapiens
MMWELASRGPGMLKRLCTVQSVVPEQVKGAAKDSYCYFDVQ

SEQ ID NO: 797262 - protein, 142 aa, Homo sapiens
MSILRYGLNETDLERVSEKEIFMACPLAPDLTAPGQGINSTLQMSVLYFEALRHFMRPLYSGIHCLTTADIHNAMKNGEPLLIYLLIMIPLTSSPLFPSSSLFPQPNKKLKQIHIFVLFFAYLVLLSYSLMCAPVVSATLEV

SEQ ID NO: 797263 - protein, 237 aa, Homo sapiens
MPARLETCISDLDCASSSGSDLSGFLTDEEDCARLQQAASASGPPAPARRGAPNISRASEVPGAQDDEQERRRRRGRTRVRSEALLHSLRRSRRVKANDRERNRMHNLNAALDALRSVLPSFPDDTKLTKIETLRFAYNYIWALAETLRLADQGLPGGGARERLLPPQCVPCLPGPPSPASDAESWGSGAAAASPLSDPSSPAASEDFTYRPGDPVFSFPSLPKDLLHTTPCFIPYH

SEQ ID NO: 797264 - protein, 107 aa, Homo sapiens
CGPDGAVPLRVASWDCPHGSAAPPFSHATGQGRVSDASVQCDGVKRAQEGSEACAGQRLGTMGSGAAGCGYSPRTLPKTRWSTYANFPTVTFPCIRCGNKPFYSYPK

SEQ ID NO: 797265 - protein, 105 aa, Homo sapiens
MSTAPGLHISKIEVLIFSSGPAPPASSPSQLTSVASFRCSGRNPQHRSLFSSHILHQEILLALRPSNCAQNVAPPQHLQCYHRDGPRCHHLSPALLQVSLFPAQP

SEQ ID NO: 797266 - protein, 130 aa, Homo sapiens
MVKVVNFMLCDFTSEISPKVLGFQLMSTAPGLHISKIEVLIFSSGPAPPASSPSQLTSVASFRCSGRNPQHRSLFSSHILHQEILLALRPSNCAQNVAPPQHLQCYHRDGPRCHHLSPALLQVSLFPAQP

SEQ ID NO: 797267 - protein, 105 aa, Homo sapiens; identical to SEQ ID NO: 797265

SEQ ID NO: 797268 - protein, 81 aa, Homo sapiens
MTKESCCTSMPLGSRSVVIKTLLEPERYSLMTTSRSFWSISPCMAETVKSWACIFWVSQSSFLQVLMKMTAWVMVRVSFKS

SEQ ID NO: 797269 - protein, 135 aa, Homo sapiens
LSLHIRYHYIYSITAYTLSLHIPYHCIYPITTYTLSLHILYHYIYTITTYTLSLHILYHCIYSITAYTLSLHILYIYAITTYTLSLHILYHCIHSTYMLSLHILYHCIHSITAYTLSLHTLYHYIYAITAYTLSL

SEQ ID NO: 797270 - protein, 118 aa, Homo sapiens
WGQGLGHGACRGKDEDEEWMPVTKLGYLVKDMKIKSLEEIQPFSLTIEESEIIDFFLGASLKDEVLKTTPVQKQTCADQHTRFKKPVFAFQMSLNLLRKSLPTSLGGQEDEQENFSKL

SEQ ID NO: 797271 - protein, 111 aa, Homo sapiens
WGQGLGHGACRGKDEDEEWMPVTKLGYLVKDMKIKSLEEIQPFSLTIEESEIIDFFLGASLKDEVLKTTPVQKQTCADQHTRFKMSLNLLRKSLPTSLGGQEDEQENFSKL

SEQ ID NO: 797272 - protein, 4349 aa, Homo sapiens
MTIALLGFAIFLLHCATCEKPLEGILSSSAWHFTHSHYNATIYENSSPKTYVESFEKMGIYLAEPQWAVRYRIISGDVANVFKTEEYVVGNFCFLRIRTKSSNTALLNREVRDSYTLIIQATEKTLELEALTRVVVHILDQNDLKPLFSPPSYRVTISEDMPLKSPICKVTATDADLGQNAEFYYAFNTRSEMFAIHPTSGVVTVAGKLNVTWRGKHELQVLAVDRMRKISEGNGFGSLAALVVHVEPALRKPPAIASVVVTPPDSNDGTTYATVLVDANSSGAEVESVEVVGGDPGKHFKAIKSYARSNEFSLVSVKDINWMEYLHGFNLSLQARSGSGPYFYSQIRGFHLPPSKLSSLKFEKAVYRVQLSEFSPPGSRVVMVRVTPAFPNLQYVLKPSSENVGFKLNARTGLITTTKLMDFHDRAHYQLHIRTSPGQASTVVVIDIVDCNNHAPLFNRSSYDGTLDENIPPGTSVLAVTATDRDHGENGYVTYSIAGPKALPFSIDPYLGIISTSKPMDYELMKRIYTFRVRASDWGSPFRREKEVSIFLQLRNLNDNQPMFEEVNCTGSIRQDWPVGKSIMTMSAIDVDELQNLKYEIVSGNELEYFDLNHFSGVISLKRPFINLTAGQPTSYSLKITASDGKNYASPTTLNITVVKDPHFEVPVTCDKTGVLTQFTKTILHFIGLQNQESSDEEFTSLSTYQINHYTPQFEDHFPQSIDVLESVPINTPLARLAATDPDAGFNGKLVYVIADGNEEGCFDIELETGLLTVAAPLDYEATNFYILNVTVYDLGTPQKSSWKLLTVNVKDWNDNAPRFPPGGYQLTISEDTEVGTTIAELTTKDADSEDNGRVRYTLLSPTEKFSLHPLTGELVVTGHLDRESEPRYILKVEARDQPSKGHQLFSVTDLIITLEDVNDNSPQCITEHNRLKVPEDLPPGTVLTFLDASDPDLGPAGEVRYVLMDGAHGTFRVDLMTGALILERELDFERRAGYNLSLWASDGGRPLARRTLCHVEVIVLDVNENLHPPHFASFVHQGQVQENSPSGTQVIVVAAQDDDSGLDGELQYFLRAGTGLAAFSINQDTGMIQTLAPLDREFASYYWLTVLAVDRGSVPLSSVTEVYIEVTDANDNPPQMSQAVFYPSIQEDAPVGTSVLQLDAWDPDSSSKGKLTFNITSGNYMGFFMIHPVTGLLSTAQQLDRENKDEHILEVTVLDNGEPSLKSTSRVVVGILDVNDNPPIFSHKLFNVRLPERLSPVSPGPVYRLVASDLDEGLNGRVTYSIEDSDEEAFSIDLVTGVVSSSSTFTAGEYNILTIKATDSGQPPLSASVRLHIEWIPWPRPSSIPLAFDETYYSFTVMETDPVNHMVGVISVEGRPGLFWFNISGGDKDMDFDIEKTTGSIVIARPLDTRRRSNYNLTVEVTDGSRTIATQVHIFMIANINHHRPQFLETRYEVRVPQDTVPGVELLRVQAIDQDKGKSLIYTIHGSQDPGSASLFQLDPSSGVLVTVGKLDLGSGPSQHTLTVMVRDQEIPIKRNFVWVTIHVEDGNLHPPRFTQLHYEASVPDTIAPGTELLQVRAMDADRGVNAEVHYSLLKGNSEGFFNINALLGIITLAQKLDQANHAPHTLTVKAEDQGSPQWHDLATVIIHVYPSDRSAPIFSKSEYFVEIPESIPVGSPILLVSAMSPSEVTYELREGNKDGVFSMNSYSGLISTQKKLDHEKISSYQLKIRGSNMAGAFTDVMVVVDIIDENDNAPMFLKSTFVGQISEAAPLYSMIMDKNNNPFVIHASDSDKEANSLLVYKILEPEALKFFKIDPSMGTLTIVSEMDYESMPSFQFCVYVHDQGSPVLFAPRPAQVIIHVRDVNDSPPRFSEQIYEVAIVGPIHPGMELLMVRASDEDSEVNYSIKTGNADEAVTIHPVTGSISVLNPAFLGLSRKLTIRASDGLYQDTALVKISLTQVLDKSLQFDQDVYWAAVKENLQDRKALVILGAQGNHLNDTLSYFLLNGTDMFHMVQSAGVLQTRGVAFDREQQDTHELAVEVRDNRTPQRVAQGLVRVSIEDVNDNPPKFKHLPYYTIIQDGTEPGDVLFQVSATDEDLGTNGAVTYEFAEDYTYFRIDPYLGDISLKKPFDYQALNKYHLKVIARDGGTPSLQSEEEVLVTVRNKSNPLFQSPYYKVRVPENITLYTPILHTQARSPEGLRLIYNIVEEEPLMLFTTDFKTGVLTVTGPLDYESKTKHVFTVRATDTALGSFSEATVEVLVEDVNDNPPTFSQLVYTTSISEGLPAQTPVIQLLASDQDSGRNRDVSYQIVEDGSDVSKFFQINGSTGEMSTVQELDYEAQQHFHVKVRAMDKGDPPLTGETLVVVNVSDINDNPPEFRQPQYEANVSELATCGHLVLKVQAIDPDSRDTSRLEYLILSGNQDRHFFINSSSGIISMFNLCKKHLDSSYNLRVGASDGVFRATVPVYINTTNANKYSPEFQQHLYEAELAENAMVGTKVIDLLAIDKDSGPYGTIDYTIINKLASEKFSINPNGQIATLQKLDRENSTERVIAIKVMARDGGGRVAFCTVKIILTDENDNPPQFKASEYTVSIQSNVSKDSPVIQVLAYDADEGQNADVTYSVNPEDLVKDVIEINPVTGVVKVKDSLVGLENQTLDFFIKAQDGGPPHWNSLVPVRLQVVPKKVSLPKFSEPLYTFSAPEDLPEGSEIGIVKAVAAQDPVIYSLVRGTTPESNKDGVFSLDPDTGVIKVRKPMDHESTKLYQIDVMAHCLQNTDVVSLVSVNIQVGDVNDNRPVFEADPYKAVLTENMPVGTSVIQVTAIDKDTGRDGQVSYRLSADPGSNVHELFAIDSESGWITTLQELDCETCQTYHFHVVAYDHGQTIQLSSQALVQVSITDENDNAPRFASEEYRGSVVENSEPGELVATLKTLDADISEQNRQVTCYITEGDPLGQFGISQVGDEWRISSRKTLDREHTAKYLLRVTASDGKFQASVTVEIFVLDVNDNSPQCSQLLYTGKVHEDVFPGHFILKVSATDLDTDTNAQITYSLHGPGAHEFKLDPHTGELTTLTALDRERKDVFNLVAKATDGGGRSCQADITLHVEDVNDNAPRFFPSHCAVAVFDNTTVKTPVAVVFARDPDQGANAQVVYSLPDSAEGHFSIDATTGVIRLEKPLQVRPQAPLELTVRASDLGTPIPLSTLGTVTVSVVGLEDYLPVFLNTEHSVQVPEDAPPGTEVLQLATLTRPGAEKTGYRVVSGNEQGRFRLDARTGILYVNASLDFETSPKYFLSIECSRKSSSSLSDVTTVMVNITDVNEHRPQFPQDPYSTRVLENALVGDVILTVSATDEDGPLNSDITYSLIGGNQLGHFTIHPKKGELQVAKALDREQASSYSLKLRATDSGQPPLHEDTDIAIQVADVNDNPPRFFQLNYSTTVQENSPIGSKVLQLILSDPDSPENGPPYSFRITKGNNGSAFRVTPDGWLVTAEGLSRRAQEWYQLQIQASDSGIPPLSSLTSVRVHVTEQSHYAPSALPLEIFITVGEDEFQGGMVGKIHATDRDPQDTLTYSLAEEETLGRHFSVGAPDGKIIAAQGLPRGHYSFNVTVSDGTFTTTAGVHVYVWHVGQEALQQAMWMGFYQLTPEELVSDHWRNLQRFLSHKLDIKRANIHLASLQPAEAVAGVDVLLVFEGHSGTFYEFQELASIITHSAKEMEHSVGVQMRSAMPMVPCQGPTCQGQICHNTVHLDPKVGPTYSTARLSILTPRHHLQRSCSCNGTATRFSGQSYVRYRAPAARNWHIHFYLKTLQPQAILLFTNETASVSLKLASGVPQLEYHCLGGFYGNLSSQRHVNDHEWHSILVEEMDASIRLMVDSMGNTSLVVPENCRGLRPERHLLLGGLILLHSSSNVSQGFEGCLDAVVVNEEALDLLAPGKTVAGLLETQALTQCCLHSDYCSQNTCLNGGKCSWTHGAGYVCKCPPQFSGKHCEQGRENCTFAPCLEGGTCILSPKGASCNCPHPYTGDRCEMEARGCSEGHCLVTPEIQRGDWGQQELLIITVAVAFIIISTVGLLFYCRRCKSHKPVAMEDPDLLARSVGVDTQAMPAIELNPLSASSCNNLNQPEPSKASVPNELVTFGPNSKQRPVVCSVPPRLPPAAVPSHSDNEPVIKRTWSSEEMVYPGGAMVWPPTYSRNERWEYPHSEVTQGPLPPSAHRHSTPVVMPEPNGLYGGFPFPLEMENKRAPLPPRYSNQNLEDLMPSRPPSPRERLVAPCLNEYTAISYYHSQFRQGGGGPCLADGGYKGVGMRLSRAGPSYAVCEVEGAPLAGQGQPRVPPNYEGSDMVESDYGSCEEVMF

SEQ ID NO: 797273 - protein, 66 aa, Homo sapiens
MGSQEPGMVAAIPPGQEPTKSFLVEDPWAIKDPNSAHDGIWGSAGAMEGKGAPSGLTAMMSLSVRP

SEQ ID NO: 797274 - protein, 72 aa, Homo sapiens
DDRGESVTSAKAQREEKEMQMEHTLKVGSESGKSVVRMSEGISTREDAFKITKSKHHRCSVVTRITETMLEL

SEQ ID NO: 797275 - protein, 44 aa, Homo sapiens
MTERPQIVFQWESENKESEGLLAEAVLSSHLGPGGDYGGPGSGW

SEQ ID NO: 797276 - protein, 132 aa, Homo sapiens
GLNSQSSDDHLNKRSRSSSMSSLTGAYTSGIPSSSRNAITSSYSSTRGISQLWKRNGPSSSPFSSPASSRSQTPERPAKKIREEEMCHHSSSSTPLAADKESQGEKGRLLSQEEGLLLVVEVFVEDVEINTY

SEQ ID NO: 797277 - protein, 137 aa, Homo sapiens
LVHCWWKYRLVQSLWTIVRRFLKKLKLELPKTQQSLLWMYPKEIKSSPHKDICTAIFIAALFTVAKIWKPPRYVLVHEWIKETVVYVYTMEYYSALKKEKTLSFATTCMDLEDIKLWEISPTHIHTQNCIISLICGI

SEQ ID NO: 797278 - protein, 119 aa, Homo sapiens
WCDCILSCQVCRRSFPSCLRRKGWGGGGGICSLLRGSTSGLCTLILSFADGTLFPPTYNGSKGPESEANRAGHGQGQVCVVRQKGNSCQQAKGVGAVGDEAPQGEAVSSHSTPPHKPLI

SEQ ID NO: 797279 - protein, 33 aa, Homo sapiens
MNNVPGFTRAAAGKWPFKFVFKKEVLRLGVVAL

SEQ ID NO: 797280 - protein, 1324 aa, Homo sapiens
MSRRKQAKPQHFQSDPEVASLPRRDGDTEKGQPSRPTKSKDAHVCGRCCAEFFELSDLLLHKKNCTKNQLVLIVNENPGSPPETFSPSPPPDNPDEQMNDTVNKTDQVDCSDLSEHNGLDREESMEVEAPVANKSGSGTSSGSHSSTAPSSSSSSSSSSGGGGSSSTGTSAITTSLPQLGDLTTLGNFSVINSNVIIENLQSTKVAVAQFSQEARCGGASGGKLAVPALMEQLLALQQQQIHQLQLIEQIRHQILLLASQNADLPTSSSPSQGTLRTSANPLSTLSSHLSQQLAAAAGLAQSLASQSASISGVKQLPPIQLPQSSSGNTIIPSNSGSSPNMNILAAAVTTPSSEKVASSAGASHVSNPAVSSSSSPAFAISSLLSPASNPLLPQQASANSVFPSPLPNIGTTAEDLNSLSALAQQRKSKPPNVTAFEAKSTSDEAFFKHKCRFCAKVFGSDSALQIHLRSHTGERPFKCNICGNRFSTKGNLKVHFQRHKEKYPHIQMNPYPVPEHLDNIPTSTGIPYGMSIPPEKPVTSWLDTKPVLPTLTTSVGLPLPPSLPSLIPFIKTEEPAPIPISHSATSPPGSVKSDSGGPESATRNLGGLPEEAEGSTLPPSGGKSEESGMVTNSVPTASSSVLSSPAADCGPAGSATTFTNPLLPLMSEQFKAKFPFGGLLDSAQASETSKLQQLVENIDKKATDPNECIICHRVLSCQSALKMHYRTHTGERPFKCKICGRAFTTKGNLKTHYSVHRAMPPLRVQHSCPICQKKFTNAVVLQQHIRMHMGGQIPNTPVPDSYSESMESDTGSFDEKNFDDLDNFSDENMEDCPEGSIPDTPKSADASQDSLSSSPLPLEMSSIAALENQMKMINAGLAEQLQASLKSVENGSIEGDVLTNDSSSVGGDMESQSAGSPAISESTSSMQALSPSNSTQEFHKSPSIEEKPQRAVPSEFANGLSPTPVNGGALDLTSSHAEKIIKEDSLGILFPFRDRGKFKNTACDICGKTFACQSALDIHYRSHTKERPFICTVCNRGFSTKGNLKQHMLTHQMRDLPSQLFEPSSNLGPNQNSAVIPANSLSSLIKTEVNGFVHVSPQDSKDTPTSHVPSGPLSSSATSPVLLPALPRRTPKQHYCNTCGKTFSSSSALQIHERTHTGEKPFACTICGRAFTTKGNLKVHMGTHMWNSTPARRGRRLSVDGPMTFLGGNPVKFPEMFQKDLAARSGSGDPSSFWNQYAAALSNGLAMKANEISVIQNGGIPPIPGSLGSGNSSPISGLTGNLERLQNSEPNAPLAGLEKMASSENGTNFRFTRFVEDSKEIVTS

SEQ ID NO: 797281 - protein, 176 aa, Homo sapiens
MFEPACRGGSKRSLNISNPTPKWPRSPGEMVHMGTHMWNSTPARRGRRLSVDGPMTFLGGNPVKFPEMFQKDLAARSGSGDPSSFWNQYAAALSNGLAMKANEISVIQNGGIPPIPGSLGSGNSSPISGLTGNLERLQNSEPNAPLAGLEKMASSENGTNFRFTRFVEDSKEIVTS

SEQ ID NO: 797282 - protein, 121 aa, Homo sapiens
CQVKGRDSDTHRLQESKAVDLTFFIIEQFLPNQLRFQCLPSQKNETRFCKLMFVIRILGELFNTVQLMKQFSDTSSKIIATLSSSNLIIKTYLLVTRLLILIILTPCCQIVLIRNPHAESI

SEQ ID NO: 797283 - protein, 74 aa, Homo sapiens
CLSKACTGPASASQRTLHAQLALASLRPPQSTAPAFRPLRQVQLLPASGLFRPSSFLTTAFPGPVFPFWQPLGL

SEQ ID NO: 797284 - protein, 148 aa, Homo sapiens
MALPFLPRSFPCQTSGPYLGICHHPPPPRHTHSHASCKTVTEDLKKTTRAGDSRTCRLRGKPGVHTKELDLLGTQAGGQVRRELGSSKPSETQGTVDSVTSRMVINSCIIPLPSQATIPEPWPHGACIFRIQTPWVPAPYCLHFPLTP

SEQ ID NO: 797285 - protein, 155 aa, Homo sapiens
MGSAGRRPACSDQWALSCQTHNCQMLLKSKTGTLKVEIMLGQIYSHMCTHNLHIHMCAHTQHTYTPYTQLTHIHVHTQHTYTLIHKLTHTHVRTHTYTHTHLTHTHVHTHTLIHNLHMCTHAQHTYTPIHTTYTYTCAHIHNIHMHSYTTYTCTC

SEQ ID NO: 797286 - protein, 98 aa, Homo sapiens
MSGLGPSLSHTPTLAHSLASAIHSPPPHPNSPASSILILSRHQAVWGTGMHTCAPAHTRGRALGPRGHFSQAPIVTHGDGRHGSMSPGPPLSPGISPV

SEQ ID NO: 797287 - protein, 279 aa, Homo sapiens
CCSCSMGNGELHCPSIEPIANTSTSEPVIPSFEKNNHCVSRCNSQSCILAQEEEQYLQSGDQQLTRHVLLCLLLIIGLFANLSSCLWWLFNQEPGRLYVELQFFCAVFNFGQGFISFGIFGLDKHLIILPFKRRLEFLWNNKDTAENRDSPVSEEIKMTCQQFIHYHRDLCIRNIVKERRCGAKTSAGTFCGCDLVSWLIEVGLASDRGEAVIYGDRLVQGGVIQHITNEYEFRDEYLFYRFLQKSPEQSPPAINANTLQQERYKEIEHSSPPSHSPKT

SEQ ID NO: 797288 - protein, 216 aa, Homo sapiens
KFHFVDLAGSERVLKTGSTGERLKESIQINSSLLALGNVISALGDPQRRGSHIPYRDSKITLVSCPLAPMWPGGRGGGECPAHQWGWKPRSPEVSSPREPRQEPVPGLARWPWAWSVGAPESLPLRALRILKDSLGGNAKTVMIACVSPSSSDFDETLNTLNYASRAQNIRNRATVNWRPEAERPPEETASGARGPPRHRSETRIIHRGRRAPGPA

SEQ ID NO: 797289 - protein, 181 aa, Homo sapiens
MKKHSARVAPLSACNSPVLTLTKVEGEERPRDSPGPAEAQAPAGVEAGGRASRRCWTCSRAQLKKIFWGVAVVLCVCSSWAGSTQLAKLTFRKFDAPFTLTWFATNWNFLFFPLYYVGHVCKSTEKQSVKQRYRECCRFFGDNGLTLKVFFTKAAPFGVLWTLTNYLYLHAIKKINTTDVS

SEQ ID NO: 797290 - protein, 118 aa, Homo sapiens
SYTNLQLLDSQKRDPPGTQEATHGQQDHSRPSRPMVGTLLTICGDVAFLQKLCHINVKLVLDVIEGFGIILLRHKSDGQVFSAKATCTGHWVEVGVRVFRHAIVKTMLNHSIPTMVRK

SEQ ID NO: 797291 - protein, 74 aa, Homo sapiens
PAHFGPRVAAGACTQMQPPMAMAPGVRQSREESWKEETQGQEGMGLKLQEGVLLMGPAFWPLLAYPWADPPGKN

SEQ ID NO: 797292 - protein, 88 aa, Homo sapiens
VKHQVPNPAQSRRAKRDIQHVLPLHEMWPSEPALANGLCMGVTHAASRLVSKTSHVSSACSSHLQGARQLWKTQISDGRTIDGRNLGP

SEQ ID NO: 797293 - protein, 77 aa, Homo sapiens
MVDGEGSAKIQYAWVDSEGSAKTQYAWVDGEGSAKIQYAWVDGEGSAKIQYAWVDGEGSAKTQYAWVDGEGSAEIQY

SEQ ID NO: 797294 - protein, 195 aa, Homo sapiens
  misc_feature (13)..(13): Xaa can be any naturally occurring amino acid
DRVSVTQAGVQWXISAHCNFHLLGLSDSPASASRVAWTTGAHHHARPTFFVFLVETGFHMLARLVRTDITYPAGFMDVISIDKMGENFCLICDTKGHFAVHRITPEEAKYKLCKVRKIFVRTKGIPHLVTHDARTICYPDPLIKVNDTIQIDLETGKITDFIRFDTGNLCMVTGGANLGRIGVITNRERHPGSLD

SEQ ID NO: 797295 - protein, 346 aa, Homo sapiens
MPRGQKSTLHAREKRQQTRGQTQDHQGAQITATNKKKVSFSSPLILGATIQKKSAGRSRSALKKPQRALSTTTSVDVSYKKSYKGANSKIEKKQSFSQGLSSTVQSRTDPLIMKTNMLVQFLMEMYKMKKPIMKADMLKIVQKSHKNCFPEILKKASFNMEVVFGVDLKKVDSTKDSYVLVSKMDLPNNGTVTRGRGFPKTGLLLNLLGVIFMKGNCATEEKIWEFLNKMRIYDGKKHFIFGEPRKLITQDLVKLKYLEYRQVPNSNPARYEFLWGPRAHAETSKMKVLEFWAKVNKTVPSAFQFWYEEALRDEEERVQAAAMLNDGSSAMGRKCSKAKASSSSHA

SEQ ID NO: 797296 - protein, 534 aa, Homo sapiens
MLQQLLITLPTEASTWVKLRHPKAATERVALWEDVTKMFKAEALLSQDADETQGESLESRVTLGSLTAESQELLTFKDVSVDFTQEEWGQLAPAHRNLYREVMLENYGNLVSVGCQLSKPGVISQLEKGEEPWLMERDISGVPSSDLKSKTKTKESALQNDISWEELHCGLMMERFTKGSSMYSTLGRISKCNKLESQQENQRMGKGQIPLMCKKTFTQERGQESNRFEKRINVKSEVMPGPIGLPRKRDRKYDTPGKRSRYNIDLVNHSRSYTKMKTFECNICEKIFKQLIHLTEHMRIHTGEKPFRCKECGKAFSQSSSLIPHQRIHTGEKPYECKECGKTFRHPSSLTQHVRIHTGEKPYECRVCEKAFSQSIGLIQHLRTHVREKPFTCKDCGKAFFQIRHLRQHEIIHTGVKPYICNVCSKTFSHSTYLTQHQRTHTGERPYKCKECGKAFSQRIHLSIHQRVHTGVKPYECSHCGKAFRHDSSFAKHQRIHTGEKPYDCNECGKAFSCSSSLIRHCKTHLRNTFSNVV

SEQ ID NO: 797297 - protein, 432 aa, Homo sapiens
MLENYGNLVSVGCQLSKPGVISQLEKGEEPWLMERDISGVPSSDLKSKTKTKESALQNDISWEELHCGLMMERFTKGSSMYSTLGRISKCNKLESQQENQRMGKGQIPLMCKKTFTQERGQESNRFEKRINVKSEVMPGPIGLPRKRDRKYDTPGKRSRYNIDLVNHSRSYTKMKTFECNICEKIFKQLIHLTEHMRIHTGEKPFRCKECGKAFSQSSSLIPHQRIHTGEKPYECKECGKTFRHPSSLTQHVRIHTGEKPYECRVCEKAFSQSIGLIQHLRTHVREKPFTCKDCGKAFFQIRHLRQHEIIHTGVKPYICNVCSKTFSHSTYLTQHQRTHTGERPYKCKECGKAFSQRIHLSIHQRVHTGVKPYECSHCGKAFRHDSSFAKHQRIHTGEKPYDCNECGKAFSCSSSLIRHCKTHLRNTFSNVV

SEQ ID NO: 797298 - protein, 353 aa, Homo sapiens
  misc_feature (7)..(7): Xaa can be any naturally occurring amino acid
FDGDSRXISKCNKLESQQENQRMGKGQIPLMCKKTFTQERGQESNRFEKRINVKSEVMPGPIGLPRKRDRKYDTPGKRSRYNIDLVNHSRSYTKMKTFECNICEKIFKQLIHLTEHMRIHTGEKPFRCKECGKAFSQSSSLIPHQRIHTGEKPYECKECGKTFRHPSSLTQHVRIHTGEKPYECRVCEKAFSQSIGLIQHLRTHVREKPFTCKDCGKAFFQIRHLRQHEIIHTGVKPYICNVCSKTFSHSTYLTQHQRTHTGERPYKCKECGKAFSQRIHLSIHQRVHTGVKPYECSHCGKAFRHDSSFAKHQRIHTGEKPYDCNECGKAFSCSSSLIRHCKTHLRNTFSNVV

SEQ ID NO: 797299 - protein, 57 aa, Homo sapiens
  misc_feature (6)..(6): Xaa can be any naturally occurring amino acid
MRKRKXKLMPSLTIPLSWMQKSWTEPLTLHRPASTHQVLTKDSRTRCWCPVHFIDKE

SEQ ID NO: 797300 - protein, 213 aa, Homo sapiens
MSETDHIASTSSDKNVGKTPELKEDSCNLFSGNESSKLENESKLLSLNTDKTLCQPNEHNNRIEAQENYIPDHGGGEDSCAKTDTGSENSEQIANFPSGNFAKHISKTNETEQKVTQILVELRSSTFPESANEKTYSESPYDTDCTKKFISKIKSVSASEDLLEEIESELLSTEFAEHRVPNGMNKGEHALVLFEKCVQDKYLQQEHIIKKLS

SEQ ID NO: 797301 - protein, 213 aa, Homo sapiens; identical to SEQ ID NO: 797300

SEQ ID NO: 797302 - protein, 121 aa, Homo sapiens
PQGQRGFAGAGAGRGCIPAPGCGESWPCRVHVTDAPSPGPEASARGTDCLAARGPLQILRLCRSSPLPAHRLAPALRERRGQSAGVRPWASKPECRGFKYWVICATLGRLPKQDRILKFVC

SEQ ID NO: 797303 - protein, 90 aa, Homo sapiens
WRVQWQGPQGCRQSHVPIGPAAVRMGRKVTAHPLEPSDGQGTLNSLPHTAGGWGPRYGALACGLKQSAPGKNKLRDTSSGLLAGCNLNVV

SEQ ID NO: 797304 - protein, 39 aa, Homo sapiens
GILLCMEPAHFLGIRQVLFPTPTTSRICNHGPPNSLPVA

SEQ ID NO: 797305 - protein, 343 aa, Homo sapiens
MSPLCFMVWSCCVFVFPDCMLTRALSQSCALSLSPSLPLSPVPRRHKPHDKATRPPAQQKARPPPEDRTQEHPENASAAQKKQKTEHDRTSQPPQERETKTHDTQADEKDTHTAQRKPHNHTDRPQKTRGDRQQERASAGTAQRQRGTAATDKHEHAGQSNAHTHPHGRSTSSPRASSPTHRTPEGHTHAHNRHAENAAQRARPGAAQGPQRARATRTTRRRRHRRPRKDSSEGRAPAPQAGGGQHASGHRPDARGDENKNRRKPREKTTQAANKKHKDKKQKRPTRKTDRRRETGPEKGTTTVREQTQTQKESRERGEGRRQKKEAKATQENNKNSHRDKGR

SEQ ID NO: 797306 - protein, 684 aa, Homo sapiens
NCYQVREESDIISLSQEPDEHPGDIFFKQTPTKDILTELYKLTTERERLLTNLLSSDHILGITMGNQEGKLQELSVSLAPEDDCFQSAGDWQGELPVGPLNKRSTHGNKKPRRSSGRRESFGALPQKRTKRKGRGGRESAPLMGKDKICSSHSLPLSRTRPNLWVLEEKGNLLPNGALACSLQRRESCPPDIPKTPDTDLGFGSFETAFKDTGLGREVLPPDCSSTEAGGDGIRRPPSGLEHQQTGLSESHQDPEKHPEAEKDEMEKPAKRTCKQKPVSKVVAKVQDLSSQVQRVVKTHSKGKETIAIRPAAHAEFVPKADLLTLPGAEAGAHGSRRQGKERQGDRSSQSPAGETASISSVSASAEGAVNKVPLKVIESEKLDEAPEGKRLGFPVHTSVPHTRPETRNKRRAGLPLGGHKSLFLDLPHKVGPDSSQPRGDKKKPSPPAPAALGKVFNNSASQSSTHKQTSPVPSPLSPRLPSPQQHHRILRLPALPGEREAALNDSPCRKSRVFSGCVSADTLEPPSSAKVTETKGASPAFLRAGQPRLVPGETLEKSLGPGKTTAEPQHQSPPGISSEGFPWDGFNEQTPKDLPNRDGGAWVLGYRAGPACPFLLHEEREKSNRSELYLDLHPDHSLTEQDDRTPGRLQAVWPPPKTKDTEEKVGLKYTEAEYQAAILHLKRE

SEQ ID NO: 797307 - protein, 397 aa, Homo sapiens
MGSYKSAGHREGNHMVDIGDIIFTLNELQEQYEDVSITEGSPLNEITSDRKLSSVAGCYLKYKKKNSLSSKLPEPSISKKLNKKSNQYYSKIMENDDLESKRPKNTWQIRKFLGGVGSSNVGVQEPYSKNGINFKKHSEKGEIHDSKSKPQSLKSSTSLSKSLDKSDISSIPKLQKPAVRKHSSLQKQVSSTEKTAISTLENFCEAISKLQENYIAAEELQSILPSTGINLLDEEFQKIVTDTSRNENGMVELDDFVNALAKERSFPECNALPGVIKAIDKIKDKNVDYEDLNTCLQNFGIYLSKPEFKKITELTEAGETKKVNFKEFIDTMMSNTECFSEKLVLPDAIETLDDLRKETMSVSDLWNTLSSLNSNLKKDEFLAALELVTVDGECYKY

SEQ ID NO: 797308 - protein, 417 aa, Homo sapiens
MGSYKSAGHREGNHMVDIGDIIFTLNELQEQYEDVSITEGSPLNEITSDRKLSSVAGCYLKYKKKNSLSSKLPEPSISKKLNKKSNQYYSKIMENDDLESKRPKNTWQIRKFLGGVGSSNVGVQEPYSKNGINFKKHSEKGEIHDSKSKPQSLKSSTSLSKSLDKSDISSIPKLQKPAVRKHSSLQKQVSSTEKTAISTLENFCEAISKLQENYIAAEELQSILPSTGINLLDEEFQKIVTDTSRNENGMVELDDFVNALAKERSFPECNALPGVIKAIDKIKDKNVDYEDLNTCLQNFGIYLSKPEFKKITELTEAGETKKVNFKEFIDTMMSNTECFSEKLVLPDAIETLDDLRKETMSVSDLWNTLSSLNSNLKKDEFLAALELVTVDDNMEVDLKDFLMKMKESPHFQKSKGK

SEQ ID NO: 797309 - protein, 116 aa, Homo sapiens
DFIAIESGSQREGESWKMGMEWERILPLKYCHQAVPLKSSCCSPTQTAVSDVQLLLLFSALCQWSLGFLWVQDTGWGRPGVVLEKAIFEQDPALFLCTISVPPVPLSLYRMSQKSP

SEQ ID NO: 797310 - protein, 101 aa, Homo sapiens
DFIAIESGSQREGESWKMGMEWERILPLKYCHQAVPLKSSCCSPTQTAVSDVQLLLLFSALCQWSLGFLWVQDTGWGRPGVVLEKAIFEQENRNVKFSLWA

SEQ ID NO: 797311 - protein, 79 aa, Homo sapiens
MSQRQLGQGGQSGPALRPPGGAGAVPDRSGPQGVAGSGDTERGSAEGLGWKVRVPHPASPAPAAAPPEGEGGQPEGGGR

SEQ ID NO: 797312 - protein, 95 aa, Homo sapiens
LRPRPLSSRALCTLAPPVSRASRRDPVHPLLEERPVSRSPSPSSISQKVSDAAVSRERQQVLIMVQGSLPASKSHPIHEKRWPRFPATSSTAPSL

SEQ ID NO: 797313 - protein, 177 aa, Homo sapiens
CRGEPSARDLTHCLDSVAVRELPLTGSGCSTEEPDGNAARPPAPVTHARRVGTAAGGVGSDTLLLAALRNSTGQRVLPRRRAAQVKEPSRVSEIQANSKQSVRDGWPGRATRPEVTPDDLRPLQAGWGLGLLRGPERCRVCPRGQGWDWSLPRRTGRTRGPGDRGAEGGDGARPPAG

SEQ ID NO: 797314 - protein, 332 aa, Homo sapiens
MTWTSGQLQREKQARPGSGAVLAFPDDMDLRVYGPAESQSAVFGDVCPLLTSLLDGYNVCVMAYGQTGSGKSYTMLGRHSDDGPVLPLDPQSDLGIIPRVAEELFRLILENTSRSPKVEVSIVEVYNNDIFDLLAKDSIAAVSGVKREVVTAKDGRTEVALLASEAVGSASKLMELVHGGLQLRAKHPTLVHADSSRSHLIITVTLTTASCSDSTADQACSATLPREQTEAGRAGRSRRASQGALAPQLVPGNPAGHAEQVQARLQLVDSAGSECVGGDAKLLVILCISPSQRHLAQTLQGLGFGIRARQVQRGPARKKPPSSQTEGKRRPD

SEQ ID NO: 797315 - protein, 384 aa, Homo sapiens
MTWTSGQLQREKQARPGSGAVLAFPDDMDLRVYGPAESQSAVFGDVCPLLTSLLDGYNVCVMAYGQTGSGKSYTMLGRHSDDGPVLPLDPQSDLGIIPRVAEELFRLILENTSRSPKVEVSIVEVYNNDIFDLLAKDSIAAVSGVKREVVTAKDGRTEVALLASEAVGSASKLMELVHGGLQLRAKHPTLVHADSSRSHLIITVTLTTASCSDSTADQACSATLPREQTEAGRAGRSRRASQGALAPQLVPGNPAGHAEQVQARLQLVDSAGSECVGVSGVTGLALREMACISRSLAALAGVLGALLEHRGHAPYRNSRLTHLLQDCLGGDAKLLVILCISPSQRHLAQTLQGLGFGIRARQVQRGPARKKPPSSQTEGKRRPD

SEQ ID NO: 797316 - protein, 90 aa, Homo sapiens
QEVSERWFRYNPRLTCIYCAKSFNQKGSLDRHMRLHMGITPFVCRMWARSIPGKISWSIISASTQATSPFTVMSVAKVSPSRLKHPGGGG

SEQ ID NO: 797317 - protein, 30 aa, Homo sapiens
MTVPPSQDHAPTAHTPFWFEAKSRAMGGAR

SEQ ID NO: 797318 - protein, 34 aa, Homo sapiens
MGADGDMAFWKTPWIWLNDTLTIMTTVDNHHANG

SEQ ID NO: 797319 - protein, 188 aa, Homo sapiens
GINTNFSLSSKKIGGNISQHILSSQHCPKISQENKTTGQYPLHPSPHSTRSTSGGLETKAGHVGPAVSLWPTPNQISGSRGSGELPWMSTLHRDSHTSSMGKHSLGCPHDPNGRGQPEAHTRVGLHLKNQKTKKKKNKKQNKNPKNQTNPNQPKANRRTPGPSIGGSCALPHTPLPRADFNLYSSTVI

SEQ ID NO: 797320 - protein, 51 aa, Homo sapiens
PLWASYPYTTNPGVGKTYTWWSLQVMGLSLTLHIPFWAQGKWFHGLRVWPF

SEQ ID NO: 797321 - protein, 117 aa, Homo sapiens
LRRDRLWSRSPSRPLTLSLGCSWRFRAVKAASAQGLFLSAPGPAARRCHGVVRCFSTCRALTARCTGRVPWEACLYSSEPPLTETVARSVSWTCELALTCYAPRALSGAPVLCRHDV

SEQ ID NO: 797322 - protein, 151 aa, Homo sapiens [sequence omitted]

SEQ ID NO: 797323 - protein, 147 aa, Homo sapiens
CSKVCPGPGLVLREERDHLVSTLLPDSSYQQPPSSAGRRAGTYNCPHMWGRQWKAPWIQSQETQCLPWLDLNPPCGQPQTPHIPSLGSFRSWEAVSAVGNQHQAWASDDYALTPSQFLADCVTPGQHLASLGLNLLLCEQQDRVWAP

SEQ ID NO: 797324 - protein, 128 aa, Homo sapiens
PSCTRKERCERSKEPRRFASEMKQCVRLTVHPNNISVSQYNVLLVLETYNVPELSAGVNCTFEDLSEMDGLVVGNQIQCYSPAAKEVPRIITENGDHHVVQLQLKSKETGMTFASTSFVFYNCSVHNS

SEQ ID NO: 797325 - protein, 72 aa, Homo sapiens
GTLIATPSPIYIFCAKDRAISFYQISLGYYVCLRNILCVCLIVIISQKLRKMFQHSEDLTSALRTAEFICAI

SEQ ID NO: 797326 - protein, 109 aa, Homo sapiens
WKSTGVFWERYSSLIRNRCREICTHYLSLAPAFLLWTSLCDDVLLLQLSCNHKEMAANNQGWQSEKMVRAWTYDDITKPLNYLVTDLLSLGPPTSRDFVKRDKSNVQIA

SEQ ID NO: 797327 - protein, 67 aa, Homo sapiens
QNFQITEPQSYGNLLPREKDSGISAFLICRNYKTDPIDMDIASSAKQHSRIFFPEGLDASCLVSSSD

SEQ ID NO: 797328 - protein, 78 aa, Homo sapiens [sequence omitted]

SEQ ID NO: 797329 - protein, 72 aa, Homo sapiens
DEEGGAQSRDCDLALGYVAAGHAELAWTQEAPVSSGPLLSPVPKLCRIKASKALKKKIRRFQPTALKVMTMV

SEQ ID NO: 797330 - protein, 88 aa, Homo sapiens
QPIHSFHKHQSTHCRPNVYSRSGMSPDRQDQAAESRKSPVTPAGDYASDGWLTLMAWSLRNGTPCFVAGCAHAHTSGPFSEHLHYFHF

SEQ ID NO: 797331 - protein, 115 aa, Homo sapiens
DSDKVPDEHFSMLLPTMEGMGEDWGWDREQEGVAQSVSAGRGRGAGKALQALCLGPLSTRTGLCTRGLKGQRRGPRFPTWHSLGRAPEAGDTLPYFVRVFLYALSSIWLCVHLAQ

SEQ ID NO: 797332 - protein, 84 aa, Homo sapiens
APVRPKTSPGSPKTVFPFSYQESPPRSPRRMSFSGIFRSSSKESSPNSNPATSPGGIRFFSRSRKKDLCWELFEIRMSLSEKFI

SEQ ID NO: 797333 - protein, 110 aa, Homo sapiens
LKEGLFPVITENNGSSLFARGSRPFLLPQHTWWIRHTVTGNSCSLLVMLNGGVGMMVDRLCLINMGSLETGKSPTVALFLPIPPLLHGELLCCRLRIFFKWMRSYIYPWK

SEQ ID NO: 797334 - protein, 109 aa, Homo sapiens
GALPRAGRGARRFGGRGSARHCGGPLDFHGTQVARLLGPEPVDPSGCHQRRRAASPGGSGGWARLRQSVRSEMAEQPRRGPWPRKQGSRAAPGRGGARGQRGRRPVLRV

SEQ ID NO: 797335 - protein, 109 aa, Homo sapiens; identical to SEQ ID NO: 797334

SEQ ID NO: 797336 - protein, 41 aa, Homo sapiens
GGRCQDNPQTSEQHGLPTKCGQRWGPGAMCSAKINRLCLKL

SEQ ID NO: 797337 - protein, 501 aa, Homo sapiens
FKMGEIGPRSSFSAPSRISAWFGPPASTPASTMSIRVTQKSYKVSTSGPRAFSSRSYTSGPGSRISSSSFSRVGSSNFRGGLGGGYGGASGMGGITAVTVNQSLLSPLVLEVDPNIQAVRTQEKEQIKTLNNKFASFIDKVRFLEQQNKMLETKWSLLQQQKTARSNMDNMFESYINNLRRQLETLGQEKLKLEAELGNMQGLVEDFKNKYEDEINKRTEMENEFVLIKKDVDEAYMNKVELESRLEGLTDEINFLRQLYEEEIRELQSQISDTSVVLSMDNSRSLDMDSIIAEVKAQYEDIANRSRAEAESMYQIKYEELQSLAGKHGDDLRRTKTEISEMNRNISRLQAEIEGLKGQRASLEAAIADAEQRGELAIKDANAKLSELEAALQRAKQDMARQLREYQELMNVKLALDIEIATYRKLLEGEESRLESGMQNMSIHTKNTSGYAGGLSSAYGGLTSPGLSYSLGSSFGSGAGSSSLSRTSSSRAVVVKKIETC

SEQ ID NO: 797338 - protein, 302 aa, Homo sapiens
MQGLVEDFKNKYEDEINKRTEMENEFVLIKKDVDEAYMNKVELESRLEGLTDEINFLRQLYEEEIRELQSQISDTSVVLSMDNSRSLDMDSIIAEVKAQYEDIANRSRAEAESMYQIKYEELQSLAGKHGDDLRRTKTEISEMNRNISRLQAEIEGLKGQRASLEAAIADAEQRGELAIKDANAKLSELEAALQRAKQDMARQLREYQELMNVKLALDIEIATYRKLLEGEESRLESGMQNMSIHTKNTSGYAGGLSSAYGGLTSPGLSYSLGSSFGSGAGSSSLSRTSSSRAVVVKKIETC

SEQ ID NO: 797339 - protein, 485 aa, Homo sapiens
FKMGEIGPRSSFSAPSRISAWFGPPASTPASTMSIRVTQKSYKVSTSGPRAFSSRSYTSGPGSRISSSSFSRVGSSNFRGGLGGGYGGASGMGGITAVTVNQSLLSPLVLEVDPNIQAVRTQEKEQIKTLNNKFASFIDKVRFLEQQNKMLETKWSLLQQQKTARSNMDNMFESYINNLRRQLETLGQEKLKLEAELGNMQGLVEDFKNKYEDEINKRTEMENEFVLIKKDVDEAYMNKVELESRLEGLTDEINFLRQLYEEEIRELQSQISDSIIAEVKAQYEDIANRSRAEAESMYQIKYEELQSLAGKHGDDLRRTKTEISEMNRNISRLQAEIEGLKGQRASLEAAIADAEQRGELAIKDANAKLSELEAALQRAKQDMARQLREYQELMNVKLALDIEIATYRKLLEGEESRLESGMQNMSIHTKNTSGYAGGLSSAYGGLTSPGLSYSLGSSFGSGAGSSSLSRTSSSRAVVVKKIETC

SEQ ID NO: 797340 - protein, 132 aa, Homo sapiens
MYHIFCIHSSVEGHLGSFQLLAIINKAAMNIVEHVSFLPVGASSGYMPRRGIAGSSGSTMSNFLRNRQTDFQSGCTSLQSHQQWRSVPLSPHPRQHLLSPEFLILDILTGVRWNLRVVLICISLMIKDVEHF

SEQ ID NO: 797341 - protein, 114 aa, Homo sapiens
LIPSYLSEIEMLLAIEIFMVSNASSIQSPGTSTQILQIVLKRCEDNQSRSNDDYQAAVERLIMAARISDPKLFVKHMTVNVNKEQVYSLEHCSALKWLKENMKWAGKVWLFSNH

SEQ ID NO: 797342 - protein, 147 aa, Homo sapiens
FFFETGSHSVTQAGVQWHDQGSLQPQPPRLKQSSCLSLSSSWDYSHVPPCLANLLIFFVETGSHFVVQAGLKHLGSNHPPTLASSSAGITGVNHCILPLFLKTITNTRLSPFSKCLTFGDPGCHCQLQVRVGTYGSQVIRGVSNRVY

SEQ ID NO: 797343 - protein, 127 aa, Homo sapiens [sequence omitted]

SEQ ID NO: 797344 - protein, 96 aa, Homo sapiens
RDTGCEREEMRSQHIQPPPPNTPGKRENPGGQPSGRVAHNKSTYILWDSGTSQTQDQGIQVLTFELSTALGGTCPSTSPNWKSGGTTSVHTCIPAR

SEQ ID NO: 797345 - protein, 151 aa, Homo sapiens
MPVIPAPWEAEAGGSRGQEFKTSLAKMVRPGSVALPYLIHEEERNRDVGTVCVCTGPVNLMVSEKLKGRESWRWKPREGGRWVGELETDGHMELHEAVGLCDQRINKKIWPEVQTEGKFIAAETDVGVVKSVALCEEDVKSSRPSSGALWY

SEQ ID NO: 797346 - protein, 143 aa, Homo sapiens
MVRIQRRKLLASCLCVTATVFLLVTLQVMVELGKFERKEFKSSSLQDGHTKMEEAPTHLNSFLKKEGLTFNRKRKWELDSYPIMLWWSPLTGETGRLGQCGADACFFTINRTYLHHHMTKAFLFYGKQDFRLSPLFAVVFLQS

SEQ ID NO: 797347 - protein, 521 aa, Homo sapiens
MVRIQRRKLLASCLCVTATVFLLVTLQALDTVENLMKVTGPPQGVTDSMQCFNDQRPLSNTRSSEHIKEVMVELGKFERKEFKSSSLQDGHTKMEEAPTHLNSFLKKEGLTFNRKRKWELDSYPIMLWWSPLTGETGRLGQCGADACFFTINRTYLHHHMTKAFLFYGTDFNIDSLPLPRKAHHDWAVFHEESPKNNYKLFHKPVITLFNYTATFSRHSHLPLTTQYLESIEVLKSLRYLVPLQSKNKLRKRLAPLVYVQSDCDPPSDRDSYVRELMTYIEVDSYGECLRNKDLPQQLKNPASMDADGFYRIIAQYKFILAFENAVCDDYITEKFWRPLKLGVVPVYYGSPSITDWLPSNKSAILVSEFSHPRELASYIRRLDSDDRLYEAYVEWKLKGEISNQRLLTALRERKWGVQDVNQDNYIDAFECMVCTKVWANIRLQEKGLPPKRWEAEDTHLSCPEPTVFAFSPLRTPPLSSLREMWISSFEQSKKEAQALRWLVDRNQNFSSQEFWGLVFKD

SEQ ID NO: 797348 - protein, 355 aa, Homo sapiens
MGTDFNIDSLPLPRKAHHDWAVFHEESPKNNYKLFHKPVITLFNYTATFSRHSHLPLTTQYLESIEVLKSLRYLVPLQSKNKLRKRLAPLVYVQSDCDPPSDRDSYVRELMTYIEVDSYGECLRNKDLPQQLKNPASMDADGFYRIIAQYKFILAFENAVCDDYITEKFWRPLKLGVVPVYYGSPSITDWLPSNKSAILVSEFSHPRELASYIRRLDSDDRLYEAYVEWKLKGEISNQRLLTALRERKWGVQDVNQDNYIDAFECMVCTKVWANIRLQEKGLPPKRWEAEDTHLSCPEPTVFAFSPLRTPPLSSLREMWISSFEQSKKEAQALRWLVDRNQNFSSQEFWGLVFKD

SEQ ID NO: 797349 - protein, 521 aa, Homo sapiens; identical to SEQ ID NO: 797347

SEQ ID NO: 797350 - protein, 523 aa, Homo sapiens
MVRIQRRKLLASCLCVTATVFLLVTLQALDTVENLMKVTGPPQGVTDSMQCFNDQRPLSNTRSSEHIKEVMVELGKFERKEFKSSSLQDGHTKMEEAPTHLNSFLKKEGLTFNRKRKWELDSYPIMLWWSPLTGETGRLGQCGADACFFTINRTYLHHHMTKAFLFYGTDFNIDSLPLPRKAHHDWAVFHEESPKNNYKLFHKPVITLFNYTATFSRHSHLPLTTQYLESIEVLKSLRYLVPLQSKNKLRKRLAPLVYVQSDCDPPSDRDSYVRELMTYIEVDSYGECLRNKDLPQQLKNPASMDADGFYRIIAQYKFILAFENAVCDDYITEKFWRPLKLGVVPVYYGSPSITDWLPSNKSAILVSEFSHPRELASYIRRLDSDDRLYEAYVEWKLKGEISNQRLLTALRERKWGVQDVNQDNYIDAFECMVCTKVWANIRLQEKGLPPKRWEAEDTHLSCPEPTVFAFSPLRTPPLSSLREMWISSFEQSKKEAQALSLLVFGKPGILQPSMNMKYIRTWQ

SEQ ID NO: 797351 - protein, 355 aa, Homo sapiens; identical to SEQ ID NO: 797348

SEQ ID NO: 797352 - protein, 491 aa, Homo sapiens
MVRIQRRKLLASCLCVTATVFLLVTLQVMVELGKFERKEFKSSSLQDGHTKMEEAPTHLNSFLKKEGLTFNRKRKWELDSYPIMLWWSPLTGETGRLGQCGADACFFTINRTYLHHHMTKAFLFYGPRRITTFGENDGTDFNIDSLPLPRKAHHDWAVFHEESPKNNYKLFHKPVITLFNYTATFSRHSHLPLTTQYLESIEVLKSLRYLVPLQSKNKLRKRLAPLVYVQSDCDPPSDRDSYVRELMTYIEVDSYGECLRNKDLPQQLKNPASMDADGFYRIIAQYKFILAFENAVCDDYITEKFWRPLKLGVVPVYYGSPSITDWLPSNKSAILVSEFSHPRELASYIRRLDSDDRLYEAYVEWKLKGEISNQRLLTALRERKWGVQDVNQDNYIDAFECMVCTKVWANIRLQEKGLPPKRWEAEDTHLSCPEPTVFAFSPLRTPPLSSLREMWISSFEQSKKEAQALRWLVDRNQNFSSQEFWGLVFKD

SEQ ID NO: 797353 - protein, 185 aa, Homo sapiens
MVRIQRRKLLASCLCVTATVFLLVTLQALDTVENLMKVTGPPQGVTDSMQCFNDQRPLSNTRSSEHIKEVMVELGKFERKEFKSSSLQDGHTKMEEAPTHLNSFLKKEGLTFNRKRKWELDSYPIMLWWSPLTGETGRLGQCGADACFFTINRTYLHHHMTKAFLFYGKQDFRLSPLFAVVFLQS

SEQ ID NO: 797354 - protein, 77 aa, Homo sapiens
AGPPDPGTMGWGGLSLGGRSGFLGPPHALGQSSFTGGPERQLTDSCPGPSCATEPPDLGASEPRAQEMNQDLSEGTK

SEQ ID NO: 797355 - protein, 92 aa, Homo sapiens
AGPPDPGTMGWGGLSLGGRSGFLGPPHALGQSSFTGGPERQLTDSCPGPSCATEPPDLGASEPRAQESGRGSHQAFPSDPLQMNQDLSEGTK

SEQ ID NO: 797356 - protein, 126 aa, Homo sapiens
VLKHLFTSHSTGIGRKGCQLTTEDLEAYIYVFSQPGALSGPINHYRNIFSCLPLKHHMVTTPTLLLWGENDAFMEVEMAEVTKIYVKNYFRLTILSEASHWLQQDQPDIVNKLIWTFLKEETRKKD

SEQ ID NO: 797357 - protein, 91 aa, Homo sapiens
IAGPAEPTPTGNSRWPASAERSPGSRLRLSLHTSLQAEGAGSGLGQPRKGLLQCSCGLRGSSSAARVGAKAEEAPRASQGCEGCQQAVTSQ

SEQ ID NO: 797358 - protein, 79 aa, Homo sapiens
ALPAFGQAAQHVRFVRQWSVFGKTLCRALPELLGVTLGLVVLGVAYAQLAILVGAVWPTRTQGPLPSSLGKDTAVLDGF

SEQ ID NO: 797359 - protein, 90 aa, Homo sapiens
ALPAFGQAAQHVRFVRQWSVFGKTLCRALPELLGVTLGLVVLGVAYAQLAILVGLVSSCVDSLWSVAQALLVLCPGTGLSTLCPAESWDL

SEQ ID NO: 797360 - protein, 113 aa, Homo sapiens
TLGGEVCGCATLQRDLCLSSTPTPAMLMFIGFGHLCIPIVVTVSYEWSKSCSEVQIMMEQAALEMSGQCRINETKRLHLPHLTPSIPASFTVCHQPHVKGIPTSSFTTYYYTM

SEQ ID NO: 797361 - protein, 115 aa, Homo sapiens
GGRGLCLPPFPTRLPWRAGNGTKHPWDRLAPAQKVRMSLKLSLRRLNPSLSCRGHCGDPAVHTSGDPSTQASFSLFRGADTLGLSSGVSHHLEERWARRKLPSAAAVAGLPVPSL

SEQ ID NO: 797362 - protein, 182 aa, Homo sapiens
MGENEASLPNTSLQGKKMAYQKVHADQRAPGHSQYLDNDDLQATALDLEWDMEKELEESGFDQFQLDGAENQNLGHSETIDLNLDSIQPATSPKGRFQRLQEESDYITHYTRSAPKSNRCNFCHVLKILCTATILFIFGILIGYYVHTNCPSDAPSSGTVDPQLYQEILKTIQAEDIKKSFR

SEQ ID NO: 797363 - protein, 118 aa, Homo sapiens
GWEIIQQKACHVLVTGAHFSGQKIFPTASVLLVNVCVCVGCRRKPGKTSWVLDEKMGDFVIGWSKENHKKAQWHLTPNGKPKMTLPLGYSFVLEEQGEKKKDRGKLYQTCPSPARISN

SEQ ID NO: 797364 - protein, 242 aa, Homo sapiens
MFLLLLGGAWAACGSLDLLTKLYAENLPCVHLNPQWPSQPSHCPRGWRSNPLPPAAGHSRAQEDKVLGGHECQPHSQPWQAALFQGQQLLCGGVLVGGNWVLTAAHCKKPKYTVRLGDHSLQNKDGPEQEIPVVQSIPHPCYNSSDVEDHNHDLMLLQLRDQASLGSKVKPISLADHCTQPGQKCTVSGWGTVTSPRENFPDTLNCAEVKIFPQKKCEDAYPGQITDGMVCAGSSKGADTCQ

SEQ ID NO: 797365 - protein, 56 aa, Homo sapiens
HTPSAPSTAPTRTLVTASTCGCDHSPSAPPQVAATPSLLHSQLHHRDPAGACHVVS

SEQ ID NO: 797366 - protein, 80 aa, Homo sapiens
NPGCAQDSLSTHHEELQVAATLCSASHSGCDILSVYLHSVETLETAHVNHDSAVFPYHENSRAMGFSIFRVNALAINVIP

SEQ ID NO: 797367 - protein, 111 aa, Homo sapiens
MLRTTPEGLAISPMFQMRKWRLGEVMCPGTQLGLGTQSQLGPKLDRDTPPLPGPLPCLSCPELRFLWRATGWAEGELSSAKTALAYFTANPRPIRSLLINKSAVFLRTFKT

SEQ ID NO: 797368 - protein, 127 aa, Homo sapiens
QLSIHRRSHTGDRPFQCDLCRKRFLQPSDLRVHQRVHTGERPYMCDVCQKRFAHESTLQGHKRIHTGERPFKCKYCSKVFSHKGNLNVHQRTHSGEKPYKCPTCQKAFRQLGTFKRHLKTHRETTSQ

SEQ ID NO: 797369 - protein, 35 aa, Homo sapiens
MSKVDSSWYTWLREKTVRVFFLAAPACRSAPPSRG

SEQ ID NO: 797370 - protein, 147 aa, Homo sapiens
LSLKNKPQLSPLLTTSLSCYFPQGFPLPRLSQAAVPYLRTPGWLPSAASWGLAETTTPAHGLSALIGLAPASLHHSGGLPLSITVVAFQEARHGHKHLSLHMVAAKANHRPAQLQARDEDKPPTRPAPNAKPCCDPCVQCAVTAPQG

SEQ ID NO: 797371 - protein, 108 aa, Homo sapiens
VSRNFHSFFPPRTWKRSKGRDRSSQSCLQERPETRFTELGRGARDPGQEGLADAQKVRRKQLQFPECARLPGASERLQVWPPCLKHPHPPAGLATSQSALSSYLFLPH

SEQ ID NO: 797372 - protein, 98 aa, Homo sapiens
QADNASLSTNGLGSSPGSAGHMNGLSHSPGNPSTIPMKDHDAIKLFIGQIPRNLDEKDLKPLFEEFGKIYELTVLKDRFTGMHKDARRLVLSSSSFYR

SEQ ID NO: 797373 - protein, 87 aa, Homo sapiens
YRTLELQQNCSSLGLQLHDLHTRTRPLLPGSPASGPSNYNNIAPPWFGSSTTLKLEQDLSSLGLQLPDPRITTKLLLHGSAAPRPSN

SEQ ID NO: 797374 - protein, 103 aa, Homo sapiens
TPECQYPPGPLPPHHTHRQMHKQTHWLQAGSTFMAKHGSALGAQESRALTKATGGTQEEGQADNMETPRAECAFSSLARGGKWRFGERGLLSPDEGVRSGREE

SEQ ID NO: 797375 - protein, 78 aa, Homo sapiens
FMEDPSLPSAGSTLELCKAPTYHCLPNPGDQTFPTHPISCPTICRELLTFNLPHSMRVSHILGTQIKLSGSLLEASLT

SEQ ID NO: 797376 - protein, 272 aa, Homo sapiens
PTQLGAPLLSSPSPVCLPPAAPTMTTTIRQFTSSSSIKGSSGLGGGSSRTSCRLSGGLGAGSCRLGSAGGLGSTLGGSSYSSCYSFGSGGGYGSSFGGVDGLLAGGEKATMQNLNDRLASYLDKVRALEEANTELEVKIRDWYQRQAPGPARDYSQYYRTIEELQNKILTATVDNANILLQIDNARLAADDFRTKFETEQGLRLSVEADINGLRQGAGEEWPWQKRDREMRNGRTQGEPATEENPGGDETLKPGGGDTAGWPPQGGGANQIG

SEQ ID NO: 797377 - protein, 177 aa, Homo sapiens
QTLLSGSQWDAMERSLHRVSLGSRRAHPDLSFYLTTFGQLRLSIDAQDRVLLLHIIEGKGLISKQPGTCDPYVKISLIPEDSRLRHQKTQTVPDCRDPAFHEHFFFPVQEEDDQKRLLVTVWNRASQSRQSGLIGCMSFGVKSLLTPDKEISGWYYLLGEHLGRTKHLKVARRRLRP

SEQ ID NO: 797378 - protein, 162 aa, Homo sapiens
TPDVVGGAEPCGFLRSLPARDLCQLRLSIDAQDRVLLLHIIEGKGLISKQPGTCDPYVKISLIPEDSRLRHQKTQTVPDCRDPAFHEHFFFPVQEEDDQKRLLVTVWNRASQSRQSGLIGCMSFGVKSLLTPDKEISGWYYLLGEHLGRTKHLKVARRRLRP

SEQ ID NO: 797379 - protein, 128 aa, Homo sapiens
LKVLKIAASLGPSYSGSLLLFDALRGHFCCIRLRSCRLDCAACGKWPTVTHLLDYEAFCGSSATDKCRSLQLLGPEDRVSVTDYKRLLDSGAPHLLLDIRPKMEVMKRRWLSANLGAGSNQTLHLPVP

SEQ ID NO: 797380 - protein, 120 aa, Homo sapiens
PLKSQISISVEEWEDTKDSKEQGHHRSNHRNSTSSDQSDHPLLRRKSMQWARRLSRKGPKHSGKTAEKITQQRLNLYRRSERQELAELVKNRMKHLGLSTVGYGMLFKNYCIYGLVISCH

SEQ ID NO: 797381 - protein, 94 aa, Homo sapiens
APRTPTTTCLDSACLCCSNPHLPQHPKTDTSGPAWVGDIYWQSSCTSLTLEGSFGLRLKPRTEQKEMELRKWDHPVSILGFWAFLSINSPKEET

SEQ ID NO: 797382 - protein, 116 aa, Homo sapiens
MVSVGGTGSGSVSIADSRNTSSVTFGLASSGGSRSDSLCVSSIGASKSLKNSPISLDVSDFTSWCIPGSVSLGTSLLDSLAIPSWDVPPGFSCTFLALSGSPSLKSSSSVSGCGSW

SEQ ID NO: 797383 - protein, 106 aa, Homo sapiens
GIFLLNPLQASGRFPRACLYLAAEEVEGQRGGSHAPEAVWLLRRPEESLRRPGSSSCVSAQSLQNFVSVATGSENLFWPGRLEPGLVVGRRPAQCSSQPCQTERGN

SEQ ID NO: 797384 - protein, 91 aa, Homo sapiens
WMPAIAAAPKVEATRTGWMRMAQRLWSCWPQSKSDTMGSLHESCPWIDNLNHTSSSMDPGQHTKSRQVKTEEISPGLQLPPERSLLLMAEA

SEQ ID NO: 797385 - protein, 595 aa, Homo sapiens
MTSPLCRAASANALPPQDQASTPSSRVKGREASGKPSHLRGKGTAQAWTPGRSKGGSFHRGAGKPSVHSQVAELHKKIQLLEGDRKAFFESSQWNIKKNQETISQLRKETKALELKLLDLLKGDEKVVQAVIREWKWEKPYLKNRTGQALEHLDHRLREKVKQQNALRHQVVLRQRRLEELQLQHSLRLLEMAEAQNRHTEVAKTMRNLENRLEKAQMKAQEAEHITSVYLQLKAYLMDESLNLENRLDSMEAEVVRTKHELEALHVVNQEALNARDIAKNQLQYLEETLVRERKKRERYISECKKRAEEKKLENERMERKTHREHLLLQSDDTIQDSLHAKEEELRQRWSMYQMEVIFGKVKDATGTDETHSLVRRFLAQGDTFAQLETLKSENEQTLVRLKQEKQQLQRELEDLKYSGEATLVSQQKLQAEAQERLKKEERRHAEAKDQLERALRAMQVAKDSLEHLASKLIHITVEDGRFAGKELDPQADNYVPNLLGLVEEKLLKLQAQLQGHDVQEMLCHIANREFLASLEGRLPEYNTRIALPLATSKDKFFDEESEEEDNEVVTRASLKIRSQKLIESHKKHRRSRRS

SEQ ID NO: 797386 - protein, 543 aa, Homo sapiens
MANKGLSSGDVAPMHPPSNCVSVHLTCLPEGDRKAFFESSQWNIKKNQETISQLRKETKALELKLLDLLKGDEKVVQAVIREWKWEKPYLKNRTGQALEHLDHRLREKVKQQNALRHQVVLRQRRLEELQLQHSLRLLEMAEAQNRHTEVAKTMRNLENRLEKAQMKAQEAEHITSVYLQLKAYLMDESLNLENRLDSMEAEVVRTKHELEALHVVNQEALNARDIAKNQLQYLEETLVRERKKRERYISECKKRAEEKKLENERMERKTHREHLLLQSDDTIQDSLHAKEEELRQRWSMYQMEVIFGKVKDATGTDETHSLVRRFLAQGDTFAQLETLKSENEQTLVRLKQEKQQLQRELEDLKYSGEATLVSQQKLQAEAQERLKKEERRHAEAKDQLERALRAMQVAKDSLEHLASKLIHITVEDGRFAGKELDPQADNYVPNLLGLVEEKLLKLQAQLQGHDVQEMLCHIANREFLASLEGRLPEYNTRIALPLATSKDKFFDEESEEEDNEVVTRASLKIRSQKLIESHKKHRRSRRS

SEQ ID NO: 797387 - protein, 180 aa, Homo sapiens
MTSPLCRAASANALPPQDQASTPSSRVKGREASGKPSHLRGKGTAQAWTPGRSKGGSFHRGAGKPSVHSQVAELHKKIQLLEGDRKAFFESSQWNIKKNQETISQLRKETKALELKLLDLLKGDEKVVQAVIREWKWEKPYLKNRTGQVCPPSPHLLLHFQPGSPHHWTPGSPSPILPAH

SEQ ID NO: 797388 - protein, 276 aa, Homo sapiens
VISQQNRFIICIACRIKPILESSESWAVSSVVSEGQGTGHCSHHLLPGSLHLRGEFFAEMDCQNGHQHISQELEVLRIHMQLVTVQFTQLGKGALEIIQVLCGISQGSQHLLAMCLDFGVAHDGRGRGQVAKAVKEPLGPWVDNQEPSQGFSSSIFHIHLAPQACDSSLVLLCEMTHGVWTRSLLITSDVPEASVTQILLCAMWTLPSHATNKGAHSVGLMWWMLAREVLRMRGTISREHPWEVMPDLYFYRDPEEIEKEEQAAAEKGSDQGGISG

SEQ ID NO: 797389 - protein, 81 aa, Homo sapiens
FTATQPEVADWSEGVQVPSVPIQQFPTEDWSAQPATEDWSAAPTAQATEWVGATTDWVLRGYGNLLSGSTNAALFWIPVVT

SEQ ID NO: 797390 - protein, 116 aa, Homo sapiens
MPCPPSCWPCPVLAHGRSCLICTSTEILKRLKKKSRLLLRKAVTKEEFQGEWTAPAPEFTATQPEVADWSEGVQVPSVPIQQFPTEDWSAQPATEDWSAAPTAQATEWVGATTDWS

SEQ ID NO: 797391 - protein, 83 aa, Homo sapiens
MSGALDVLQMKEEDVLKFLAAGTHLGGTNLDFQMEQYIYKRKSDGIYIINLKRTWEKLLLASSCRFTLLVRDIRTSGVSLDSL

SEQ ID NO: 797392 - protein, 72 aa, Homo sapiens
MSGALDVLQMKEEDVLKFLAAGTHLGGTNLDFQMEQYIYKRKSDGIAYLYHISKEALERGFSCTAAHIFHIK

SEQ ID NO: 797393 - protein, 92 aa, Homo sapiens
SILIKSSSNRPYMSYHLRELNSAIRRNNLEPHSTHVQWWMLAREVLRMRGTISREHPWEVMPDLYFYRDPEEIEKEEQAAAEKGSDQGGISG

SEQ ID NO: 797394 - protein, 118 aa, Homo sapiens
LPPFLWFINPPFNVCMCRFETVYLNTTMCKDVWKCCAMFSINSRAEFMNPPLLMYQTLSMPYLYPQMSVASFKVATLGSGGIIPQMQAWVGLPRIFIFHLIGLRWATKLCSTFWTSIF

SEQ ID NO: 797395 - protein, 105 aa, Homo sapiens
APVVAEATMLPKHQIKVAKACESCQYQNGVTYVKTLTKWSQEALKKFSPHMPIIYLITRNSCRSHMPHFCTHPATELITGIFQACSISDKLPAPGQLLSNSHLHQ

SEQ ID NO: 797396 - protein, 346 aa, Homo sapiens
MGEFMAMEAGLSEVKSELQSRDDLLRIIEMERLQLHRELLKIGECQNAQGNKTRLESSYLPSIKEPERKIKELFSVMQDQPNHEKELNKIRSQLQQVEEYHNSEQERMRNEISDLTEELHQKEITIATVTKKAALLEKQLKMELEIKEKMLAKQKVSDMKYKAVRTENTHLKGMMGDLDPGEYMSMDFTNREQSRHTSINKLQYENERLRNDLAKLHVNGKSTWTNQNTYEETGRYAYQSQIKVEQNEERLSHDCEPNRSTMPPLPPSTFQAKEMTSPLVSDDDVFPLSPPDMSFPASLAAQHFLLEEEKRAKELEKLLNTHIDELQRHTEFTLNKYSKLKQNRHI

SEQ ID NO: 797397 - protein, 147 aa, Homo sapiens
MLFYTMKPSETSFQTLEEVPDYVKKATPFFISLMLLELVVSWILKGKPPGRLDDALTSISAGVLSRLPSLFFRSIELTSYIYIWENYRLFNLPWDSPWTWYSAFLGVDFGYYWFHRMAHEFPTLPWPSSYPLQYMLFIFNSIFFTNL

SEQ ID NO: 797398 - protein, 36 aa, Homo sapiens
RCHPDRVIDATLVARSPGRGWEHSNATHNRLSGPAP

SEQ ID NO: 797399 - protein, 30 aa, Homo sapiens
MYRLQVPRREGGIRHATQVTAKTLTWEPDW

SEQ ID NO: 797400 - protein, 79 aa, Homo sapiens
MLAPPSKCTQDGTASPYSHVSHPAPGHLQLALKDHGRIQLVSLLLPSPLQSISLLCSPLGSGHCSQAQEKPKSWPGAVA

SEQ ID NO: 797401 - protein, 90 aa, Homo sapiens [sequence omitted]

SEQ ID NO: 797402 - protein, 40 aa, Homo sapiens
SSCPRTSSPGPKLPQVSLSSPNCCLLVAYEGPKSPQVDLS

SEQ ID NO: 797403 - protein, 208 aa, Homo sapiens
SGAFLPLKKGPKEPIPEEQELDFQGLEEEEEPSEGLEEEGPEAGGKELTPLPPQEEKSSSPSPLPTLGPLWGTNGDGDETAEKEPPAAEDDIRGIQLSPGVGSSAGPPGDLEDDEGLKHLQQEAEKLVASLQDSSLEEEQFTAAMQTQGLRHSAAATALPLSHGAARKWFYKDPQGEIQGPFTTQEMAEWFQAGYFSMSLLVKRGCDE

SEQ ID NO: 797404 - protein, 122 aa, Homo sapiens
CVQCSVVSSHARAWGVNQKDPNAGRAQRPRAPSADYQTPLPEKGPSSPLIAQLRTLSGAITVLPTHVSRRAQWEGVCSLLLLWAKTPRSETPTRPSHYPETAPPAQLRAGPLTLWLSGHICY

SEQ ID NO: 797405 - protein, 90 aa, Homo sapiens
MCQLKAIFLGSAHVSLSECHKCILFYIYLKTAKKLGEMEMPAQIVKIEMDTDQKCWWLYKGCFLKNLKRGEGRTWLGKQMTVYSTSLCGL

SEQ ID NO: 797406 - protein, 73 aa, Homo sapiens
MAHNTIPQPVKGLPSSGSNLPLQHNWVSSPIWNLLQAYRYSPNLQAHQKFLPNLIMFVLDPLAQWLPNITRAG

SEQ ID NO: 797407 - protein, 151 aa, Homo sapiens
NSATDSSLTFSLGPSTACARGVPWNAVVMQVVKDHISRRHDEEVGAAVLRAGSGEGSRRGLQLTPPPRRVHGALQRFGGGRNLKSNWMSTTRTPRRSGASGPKMVADQTSGISRPPTAGIGTSRLCLGDRQVVPLWFFRRCLPGGILTLSL

SEQ ID NO: 797408 - protein, 107 aa, Homo sapiens
MGVYVIHSSYIDGVSLLLPKLDCSGASLAHCKLCLPVSSDSPASASGVAGTTGTHHAQRKTDLQQFFDGNKQFQVETTHQLHAFLQLEVNWAWVESGSVLLLFHFVF

SEQ ID NO: 797409 - protein, 80 aa, Homo sapiens
MQLSSFLRVLAAVWVAFAKMTGIGHASSLRRASTMVPAWVSQRAPMAKTQRLQLCGSLLLMIMIKLFDAINIQHSGFVIK

SEQ ID NO: 797410 - protein, 211 aa, Homo sapiens
GNQLLRLKKVDTATLRSELSRIDSQWTDLLTNIPAVQEKLHQLQMDKLPSRHAISEVMSWISLMENVIQKDEDNIKNSIGYKAIHEYLQKYKGFKIDINCKQLTVDFVNQSVLQISSQDVESKRSDKTDFAEQLGAMNKSWQILQGLVTEKIQLLEGLLESWSEYENNVQCLKTWFETQEKRLKQQHRIGDQASVQNALKDCQDLEDLIKA

SEQ ID NO: 797411 - protein, 214 aa, Homo sapiens
MFNFKLSERLQMDKLPSRHAISEVMSWISLMENVIQKDEDNIKNSIGYKAIHEYLQKYKGFKIDINCKQLTVDFVNQSVLQISSQDVESKRSDKTDFAEQLGAMNKSWQILQGLVTEKIQLLEGLLESWSEYENNVQCLKTWFETQEKRLKQQHRIGDQASVQNALKDCQDLEDFDYSKKKTQQQIKKIFWARLGPSKKFLNHFFVGAGPPLVC

SEQ ID NO: 797412 - protein, 62 aa, Homo sapiens
MISQGSLPGQGPNTIAKGLIVNQTSKGPRQQRAWKEMVQIKVGEGSKIRKFKNTSYGIMLTP

SEQ ID NO: 797413 - protein, 113 aa, Homo sapiens
MLWLRFSATCSEPSILSPFLSTGSQKIRVEHQGFSTVSSSSPACCDRRFLMPVALWNEGHGQYYPHSHSKSVGFVTCCERMAIAVPARDMDSDACAHRCTFQKVRSARAPTAM

SEQ ID NO: 797414 - protein, 67 aa, Homo sapiens
HAHGWPSPTRSSLGSPSSRLLAASEPSLSQPTAPAPVDFHHLTCRHASRSSEATALADDTLEAHTPP

SEQ ID NO: 797415 - protein, 1516 aa, Homo sapiens [sequence omitted]

SEQ ID NO: 797416 - protein, 372 aa, Homo sapiens [sequence omitted]

SEQ ID NO: 797417 - protein, 372 aa, Homo sapiens
MAPAKATNVVRLLLGSTALWLSQLGSGTVAASKSVTAHLAAKWPETPLLLEASEFMAEESNEKFWQFLETVQELAIYKQTESDYSYYNLILKKAGQFLDNLHINLLKFAFSIRAYSPAIQMFQQIAADEPPPDGCNAFVVIHKKHTCKINEIKKLLKKAASRTRPYLFKGDHKFPTNKENLPVVILYAEMGTRTFSAFHKVLSEKAQNEEILYVLRHYIQKPSSRKMYLSGYGVELAIKSTEYKALDDTQVKTVTNTTVEDETETNEVQGFLFGKLKEIYSDLRDNLTAFQKYLIESNKQMMPLKVWELQDLSFQAASQIMSAPVYDAIKLMKDISQNFPIKARSLTRIAVNQHMREEIKENQKYIPEFLPR

SEQ ID NO: 797418 - protein, 35 aa, Homo sapiens
PTTSNAPPRSTACPSFELALCDEGTPSKWPRPMGI

SEQ ID NO: 797419 - protein, 111 aa, Homo sapiens
AADPEAAAGRPAGLDRCLRVRGEPHTFRGAGATPAEPCHRLEAPGPAGPLPAPQSGRLPALLGQRPSGPSKEARRPALPRMPSGRASPLHMAPLCTILARSCREGWRWGLS

SEQ ID NO: 797420 - protein, 262 aa, Homo sapiens
MVGYCAARSEGLLPSFHTISPTLFNASSNDMKLKPELFLTQQFLSGHLPKYEQVHILPVGRIEEPFWQNFKHLQEEVFQKIKTLAQLSKDVQDVMFYSILAMLRDRGALQDLMNMLELDSSGHLDGPGGAILKKLQQDSNHAWFNPKDPILYLLEAIMVLSDFQHDLLACSMEKRILLQQQELVRSILEPNFRYPWSIPFTLKPELLAPLQSEGLAITYGLLEECGLRMELDNPRSTWDVEAKMPLSALYGTLSLLQQLAEA

SEQ ID NO: 797421 - protein, 508 aa, Homo sapiens
MPSMLERISKNLVKEIGSKDLTPVKYLLSATKLRQFVILRKKKDSRSSFWEQSDYVPVEFSLNDILEPSSSVLETVVTGPFHFSDIMIQKHKADMGVNVGIEVSVSGEASVDHGCSLEFQIVTIPSPNLEDFQKRKLLDPEPSFLKECRRRGDNLYVVTEAVELINNTVLYDSSSVNILGKIALWITYGKGQGQGESLRVKKKALTLQKGMVMAYKRKQLVIKEKAILISDDDEQRTFQDEYEISEMVGYCAARSEGLLPSFHTISPTLFNASSNDMKLKPELFLTQQFLSGHLPKYEQVHILPVGRIEEPFWQNFKHLQEEVFQKIKTLAQLSKDVQDVMFYSILAMLRDRGALQDLMNMLELDSSGHLDGPGGAILKKLQQDSNHAWFNPKDPILYLLEAIMVLSDFQHDLLACSMEKRILLQQQELVRSILEPNFRYPWSIPFTLKPELLAPLQSEGLAITYGLLEECGLRMELDNPRSTWDVEAKMPLSALYGTLSLLQQLAEA

SEQ ID NO: 797422 - protein, 408 aa, Homo sapiens
MWAFSELPMPLLINLIVSLLGFVATVTLIPAFRGHFIAARLCGQDLNKTSRQQIPESQGVISGAVFLIILFCFIPFPFLNCFVKEQCKAFPHHEFVALIGALLAICCMIFLGFADDVLNLRWRHKLLLPTAASLPLLMVYFTNFGNTTIVVPKPFRPILGLHLDLGILYYVYMGLLAVFCTNAINILAGINGLEAGQSLVISASIIVFNLVELEGDCRDDHVFSLYFMIPFFFTTLGLLYHNWYPSRVFVGDTFCYFAGMTFAVVGILGHFSKTMLLFFMPQVFNFLYSLPQLLHIIPCPRHRIPRLNIKTGKLEMSYSKFKTKSLSFLGTFILKVAESLQLVTVHQSETEDGEFTECNNMTLINLLLKVLGPIHERNLTLLLLLLQILGSAITFSIRYQLVRLFYDV

SEQ ID NO: 797423 - protein, 408 aa, Homo sapiens; identical to SEQ ID NO: 797422

SEQ ID NO: 797424 - protein, 408 aa, Homo sapiens; identical to SEQ ID NO: 797422

SEQ ID NO: 797425 - protein, 408 aa, Homo sapiens; identical to SEQ ID NO: 797422

SEQ ID NO: 797426 - protein, 408 aa, Homo sapiens; identical to SEQ ID NO: 797422

SEQ ID NO: 797427 - protein, 264 aa, Homo sapiens
IPYSFTITKPFRPILGLHLDLGILYYVYMGLLAVFCTNAINILAGINGLEAGQSLVISASIIVFNLVELEGDCRDDHVFSLYFMIPFFFTTLGLLYHNWYPSRVFVGDTFCYFAGMTFAVVGILGHFSKTMLLFFMPQVFNFLYSLPQLLHIIPCPRHRIPRLNIKTGKLEMSYSKFKTKSLSFLGTFILKVAESLQLVTVHQSETEDGEFTECNNMTLINLLLKVLGPIHERNLTLLLLLLQILGSAITFSIRYQLVRLFYDV

SEQ ID NO: 797428 - protein, 149 aa, Homo sapiens [sequence omitted]

SEQ ID NO: 797429 - protein, 408 aa, Homo sapiens; identical to SEQ ID NO: 797422

SEQ ID NO: 797430 - protein, 408 aa, Homo sapiens; identical to SEQ ID NO: 797422

SEQ ID NO: 797431 - protein, 417 aa, Homo sapiens
  misc_feature (403)..(403): Xaa can be any naturally occurring amino acid
MWAFSELPMPLLINLIVSLLGFVATVTLIPAFRGHFIAARLCGQDLNKTSRQQIPESQGVISGAVFLIILFCFIPFPFLNCFVKEQCKAFPHHEFVALIGALLAICCMIFLGFADDVLNLRWRHKLLLPTAASLPLLMVYFTNFGNTTIVVPKPFRPILGLHLDLGILYYVYMGLLAVFCTNAINILAGINGLEAGQSLVISASIIVFNLVELEGDCRDDHVFSLYFMIPFFFTTLGLLYHNWYPSRVFVGDTFCYFAGMTFAVVGILGHFSKTMLLFFMPQVFNFLYSLPQLLHIIPCPRHRIPRLNIKTGKLEMSYSKFKTKSLSFLGTFILKVAESLQLVTVHQSETEDGEFTECNNMTLINLLLKVLGPIHERNLTLLLLLLQNLGSAVTITKRYQHDXHNKDDRDPRTMTKT

SEQ ID NO: 797432 - protein, 338 aa, Homo sapiens
MWAFSELPMPLLINLIVSLLGFVATVTLIPAFRGHFIAARLCGQDLNKTSRQQIPESQGVISGAVFLIILFCFIPFPFLNCFVKEQCKAFPHHEFVALIGALLAICCMIFLGFADDVLNLRWRHKLLLPTAASLPLLMVYFTNFGNTTIVVPKPFRPILGLHLDLGILYYVYMGLLAVFCTNAINILAGINGLEAGQSLVISASIIVFNLVELEGDCRDDHVFSLYFMIPFFFTTLGLLYHNWYPSRVFVGDTFCYFAGMTFAVVGILGHFSKTMLLFFMPQVFNFLYSLPQLLHIIPCPRHRIPRLNIKTGKLEMSYSKFKTKSLSFLGTFILKVTG

SEQ ID NO: 797433 - protein, 153 aa, Homo sapiens
MWAFSELPMPLLINLIVSLLGFVATVTLIPAFRGHFIAARLCGQDLNKTSRQQIPESQGVISGAVFLIILFCFIPFPFLNCFVKEQCKAFPHHEFVALIGALLAICCMIFLGFADDVLNLRWRHKLLLPTAASLPLLMVYFTNFGPAYFGDPL

SEQ ID NO: 797434 - protein, 224 aa, Homo sapiens
MWAFSELPMPLLINLIVSLLGFVATVTLIPAFRGHFIAARLCGQDLNKTSRQQIPESQGVISGAVFLIILFCFIPFPFLNCFVKEQCKAFPHHEFVALIGALLAICCMIFLGFADDVLNLRWRHKLLLPTAASLPLLMVYFTNFGNTTIVVPKPFRPILGLHLDLGILYYVYMGLLAVFCTNAINILAGINGLEAGQSLVISASIIVFNLVELEGVRETGFPYQ

SEQ ID NO: 797435 - protein, 301 aa, Homo sapiens
MIFLGFADDVLNLRWRHKLLLPTAASLPLLMVYFTNFGNTTIVVPKPFRPILGLHLDLGILYYVYMGLLAVFCTNAINILAGINGLEAGQSLVISASIIVFNLVELEGDCRDDHVFSLYFMIPFFFTTLGLLYHNWYPSRVFVGDTFCYFAGMTFAVVGILGHFSKTMLLFFMPQVFNFLYSLPQLLHIIPCPRHRIPRLNIKTGKLEMSYSKFKTKSLSFLGTFILKVAESLQLVTVHQSETEDGEFTECNNMTLINLLLKVLGPIHERNLTLLLLLLQILGSAITFSIRYQLVRLFYDV

SEQ ID NO: 797436 - protein, 93 aa, Homo sapiens
TAPRTFPLPLDVHPGPVWFQNRRAKSRRQSGKSFQPLARPEIILNHCAPGTETKCLKPQLPLETLVQSWTHGRNTSFLPLVTFEDSGRIRDKL

SEQ ID NO: 797437 - protein, 232 aa, Homo sapiens
MATAESRALQFAEGAAFPAYRAPHAGGALLPPPSPAAALLPAPPAGPGPATFAGFLGRDPGPAPPPPASLGSPAPPKGAAAPSASQRRKRTSFSAEQLQLLELVFRRTRYPDIHLRERLAALTLLPESRIQVWFQNRRAKSRRQSGKSFQPLARPEIILNHCAPGTETKCLKPQLPLEVDVNCLPEPNGVGGGISDSSSQGQNFETCSPLSEDIGSKLDSWEEHIFSAFGNF

SEQ ID NO: 797438 - protein, 147 aa, Homo sapiens
GWYWSGILGSEQLQLLELVFRRTRYPDIHLRERLAALTLLPESRIQVWFQNRRAKSRRQSGKSFQPLARPEIILNHCAPGTETKCLKPQLPLEVDVNCLPEPNGVGGGISDSSSQGQNFETCSPLSEDIGSKLDSWEEHIFSAFGNF

SEQ ID NO: 797439 - protein, 163 aa, Homo sapiens
FQKRYVAYFAQVKHLYNWNLPPRRILFIKHFIIYSIPRYVRDLKIQIEMEKKVVFSTISLGKCSVLDNITTDKILIDVFDGPPLYDDVKVQFFYSNLPTYYDNCSFYFWLHTSFIENNRLYLPKNELDNLHKQKARRIYPSDFAVEILFGEKMTSSDVVAGSD

SEQ ID NO: 797440 - protein, 132 aa, Homo sapiens
FQKRYVAYFAQVKHLYNWNLPPRRILFIKHFIIYSIPRYVRDLKIQIEMEKKVVFSTISLGKCSNLPTYYDNCSFYFWLHTSFIENNRLYLPKNELDNLHKQKARRIYPSDFAVEILFGEKMTSSDVVAGSD

SEQ ID NO: 797441 - protein, 58 aa, Homo sapiens
MIFLGFADDVLNLRWRHKLLLPTAASLPLLMVYFTNLGNTTIVVPKPFRPILGLHLDL

SEQ ID NO: 797442 - protein, 165 aa, Homo sapiens
MWAFSELPMPLLINLIVSLLGFVATVTLIPAFRGHFIAARLCGQDLNKTSRQQIPESQGVISGAVFLIILFCFIPFPFLNCFVKEQCKAFPHHEFVALIGALLAICCMIFLGFADDVLNLRWRHKLLLPTAASLPLLMVYFTNLGNTTIVVPKPFRPILGLHLDL

SEQ ID NO: 797443 - protein, 58 aa, Homo sapiens; identical to SEQ ID NO: 797441

SEQ ID NO: 797444 - protein, 53 aa, Homo sapiens
PEGSEGTQEGDEGTPEGDEGAPEGSEGTPQSNEWTPQGSKGTPDGGEGTPGGS

SEQ ID NO: 797445 - protein, 83 aa, Homo sapiens
PKRCLSLGRGASSLEAAEHLSCCPQADGLSRSPQWASAPPRQLLSCPSAGPRGPLQLARSPGSRRGPWVPPQGPPHQHSALTI

SEQ ID NO: 797446 - protein, 68 aa, Homo sapiens
TLPLIILCLLEMTTYYSECMSSLIITKDALISILGFVGFLVGTFWALHELIQPQDLSSFQNSTGTLKQ

SEQ ID NO: 797447 - protein, 112 aa, Homo sapiens [sequence omitted]

SEQ ID NO: 797448 - protein, 1516 aa, Homo sapiens
MAPAKATNVVRLLLGSTALWLSQLGSGTVAASKSVTAHLAAKWPETPLLLEASEFMAEESNEKFWQFLETVQELAIYKQTESDYSYYNLILKKAGQFLDNLHINLLKFAFSIRAYSPAIQMFQQIAADEPPPDGCNAFVVIHKKHTCKINEIKKLLKKAASRTRPYLFKGDHKFPTNKENLPVVILYAEMGTRTFSAFHKVLSEKAQNEEILYVLRHYIQKPSSRKMYLSGYGVELAIKSTEYKALDDTQVKTVTNTTVEDETETNEVQGFLFGKLKEIYSDLRDNLTAFQKYLIESNKQMMPLKVWELQDLSFQAASQIMSAPVYDSIKLMKDISQNFPIKARSLTRIAVNQHMREEIKENQKDLQVRFKIQPGDARLFINGLRVDMDVYDAFSILDMLKLEGKMMNGLRNLGINGEDMSKFLKLNSHIWEYTYVLDIRHSSIMWINDLENDDLYITWPTSCQKLLKPVFPGSVPSIRRNFHNLVLFIDPAQEYTLDFIKLADVFYSHEVPLRIGFVFILNTDDEVDGANDAGVALWRAFNYIAEEFDISEAFISIVHMYQKVKKDQNILTVDNVKSVLQNTFPHANIWDILGIHSKYDEERKAGASFYKMTGLGPLPQALYNGEPFKHEEMNIKELKMAVLQRMMDASVYLQREVFLGTLNDRTNAIDFLMDRNNVVPRINTLILRTNQQYLNLISTSVTADVEDFSTFFFLDSQDKSAVIAKNMYYLTQDDESIISAVTLWIIADFDKPSGRKLLFNALKHMKTSVHSRLGIIYNPTSKINEENTAISRGILAAFLTQKNMFLRSFLGQLAKEEIATAIYSGDKIKTFLIEGMDKNAFEKKYNTVGVNIFRTHQLFCQDVLKLRPGEMGIVSNGRFLGPLDEDFYAEDFYLLEKITFSNLGEKIKGIVENMGINANNMSDFIMKVDALMSSVPKRASRYDVTFLRENHSVIKTNPQENDMFFNVIAIVDPLTREAQKMAQLLVVLGKIINMKIKLFMNCRGRLSEAPLESFYRFVLEPELMSGANDVSSLGPVAKFLDIPESPLLILNMITPEGWLVETVHSNCDLDNIHLKDTEKTVTAEYELEYLLLEGQCFDKVTEQPPRGLQFTLGTKNKPAVVDTIVMAHHGYFQLKANPGAWILRLHQGKSEDIYQIVGHEGTDSQADLEDIIVVLNSFKSKILKVKVKKETDKIKEDILTDEDEKTKGLWDSIKSFTVSLHKENKKEKDVLNIFSVASGHLYERFLRIMMLSVLRNTKTPVKFWLLKNYLSPTFKEVIPHMAKEYGFRYELVQYRWPRWLRQQTERQRIIWGYKILFLDVLFPLAVDKIIFVDADQIVRHDLKELRDFDLDGAPYGYTPFCDSRREMDGYRFWKTGYWASHLLRRKYHISALYVVDLKKFRRIGAGDRLRSQYQALSQDPNSLSNLDQDLPNNMIYQVAIKSLPQDWLWCETWCDDESKQRAKTIDLCNNPKTKESKLKAAARIVPEWVEYDAEIRQLLDHLENKKQDTILTHDEL

SEQ ID NO: 797449 - protein, 1133 aa, Homo sapiens
MAPAKATNVVRLLLGSTALWLSQLGSGTVAASKSVTAHLAAKWPETPLLLEASEFMAEESNEKFWQFLETVQELAIYKQTESDYSYYNLILKKAGQFLDNLHINLLKFAFSIRAYSPAIQMFQQIAADEPPPDGCNAFVVIHKKHTCKINEIKKLLKKAASRTRPYLFKGDHKFPTNKENLPVVILYAEMGTRTFSAFHKVLSEKAQNEEILYVLRHYIQKPSSRKMYLSGYGVELAIKSTEYKALDDTQVKTVTNTTVEDETETNEVQGFLFGKLKEIYSDLRDNLTAFQKYLIESNKQMMPLKVWELQDLSFQAASQIMSAPVYDSIKLMKDISQNFPIKARSLTRIAVNQHMREEIKENQKDLQVRFKIQPGDARLFINGLRVDMDVYDAFSILDMLKLEGKMMNGLRNLGINGEDMSKFLKLNSHIWEYTYVLDIRHSSIMWINDLENDDLYITWPTSCQKLLKPVFPGSVPSIRRNFHNLVLFIDPAQEYTLDFIKLADVFYSHEVPLRIGFVFILNTDDEVDGANDAGVALWRAFNYIAEEFDISEAFISIVHMYQKVKKDQNILTVDNVKSVLQNTFPHANIWDILGIHSKYDEERKAGASFYKMTGLGPLPQALYNGEPFKHEEMNIKELKMAVLQRMMDASVYLQREVFLGTLNDRTNAIDFLMDRNNVVPRINTLILRTNQQYLNLISTSVTADVEDFSTFFFLDSQDKSAVIAKNMYYLTQDDESIISAVTLWIIADFDKPSGRKLLFNALKHMKTSVHSRLGIIYNPTSKINEENTAISRGILAAFLTQKNMFLRSFLGQLAKEEIATAIYSGDKIKTFLIEGMDKNAFEKKYNTVGVNIFRTHQLFCQDVLKLRPGEMGIVSNGRFLGPLDEDFYAEDFYLLEKITFSNLGEKIKGIVENMGINANNMSDFIMKVDALMSSVPKRASRYDVTFLRENHSVIKTNPQENDMFFNVIAIVDPLTREAQKMAQLLVVLGKIINMKIKLFMNCRGRLSEAPLESFYRFVLEPELMSGANDVSSLGPVAKFLDIPESPLLILNMITPEGWLVETVHSNCDLDNIHLKDTEKTVTAEYELEYLLLEGQCFDKVTEQPPRGLQFTLGTKNKPAVVDTIVMAHHVSII

SEQ ID NO: 797450 - protein, 404 aa, Homo sapiens
MAPAKATNVVRLLLGSTALWLSQLGSGTVAASKSVTAHLAAKWPETPLLLEASEFMAEESNEKFWQFLETVQELAIYKQTESDYSYYNLILKKAGQFLDNLHINLLKFAFSIRAYSPAIQMFQQIAADEPPPDGCNAFVVIHKKHTCKINEIKKLLKKAASRTRPYLFKGDHKFPTNKENLPVVILYAEMGTRTFSAFHKVLSEKAQNEEILYVLRHYIQKPSSRKMYLSGYGVELAIKSTEYKALDDTQVKMEMDGYRFWKTGYWASHLLRRKYHISALYVVDLKKFRRIGAGDRLRSQYQALSQDPNSLSNLDQDLPNNMIYQVAIKSLPQDWLWCETWCDDESKQRAKTIDLCNNPKTKESKLKAAARIVPEWVEYDAEIRQLLDHLENKKQDTILTHDEL

SEQ ID NO: 797451 - protein, 1563 aa, Homo sapiens
MAPAKATNVVRLLLGSTALWLSQLGSGTVAASKSVTAHLAAKWPETPLLLEASEFMAEESNEKFWQFLETVQELAIYKQTESDYSYYNLILKKAGQFLDNLHINLLKFAFSIRAYSPAIQMFQQIAADEPPPDGCNAFVVIHKKHTCKINEIKKLLKKAASRTRPYLFKGDHKFPTNKENLPVVILYAEMGTRTFSAFHKVLSEKAQNEEILYVLRHYIQKPSSRKMYLSGYGVELAIKSTEYKALDDTQVKTVTNTTVEDETETNEVQGFLFGKLKEIYSDLRDNLTAFQKYLIESNKQMMPLKVWELQDLSFQAASQIMSAPVYDSIKLMKDISQNFPIKARSLTRIAVNQHMREEIKENQKDLQVRFKIQPGDARLFINGLRVDMDVYDAFSILDMLKLEGKMMNGLRNLGINGEDMSKFLKLNSHIWEYTYVLDIRHSSIMWINDLENDDLYITWPTSCQKLLKPVFPGSVPSIRRNFHNLVLFIDPAQEYTLDFIKLADVFYSHEVPLRIGFVFILNTDDEVDGANDAGVALWRAFNYIAEEFDISEAFISIVHMYQKVKKDQNILTVDNVKSVLQNTFPHANIWDILGIHSKYDEERKAGASFYKMTGLGPLPQALYNGEPFKHEEMNIKELKMAVLQRMMDASVYLQREVFLGTLNDRTNAIDFLMDRNNVVPRINTLILRTNQQYLNLISTSVTADVEDFSTFFFLDSQDKSAVIAKNMYYLTQDDESIISAVTLWIIADFDKPSGRKLLFNALKHMKTSVHSRLGIIYNPTSKINEENTAISRGILAAFLTQKNMFLRSFLGQLAKEEIATAIYSGDKIKTFLIEGMDKNAFEKKYNTVGVNIFRTHQLFCQDVLKLRPGEMGIVSNGRFLGPLDEDFYAEDFYLLEKITFSNLGEKIKGIVENMGINANNMSDFIMKVDALMSSVPKRASRYDVTFLRENHSVIKTNPQENDMFFNVIAIVDPLTREAQKMAQLLVVLGKIINMKIKLFMNCRGRLSEAPLESFYRFVLEPELMSGANDVSSLGPVAKFLDIPESPLLILNMITPEGWLVETVHSNCDLDNIHLKDTEKTVTAEYELEYLLLEGQCFDKVTEQPPRGLQFTLGTKNKPAVVDTIVMAHHGYFQLKANPGAWILRLHQGKSEDIYQIVGHEGTDSQADLEDIIVVLNSFKSKILKVKVKKETDKIKEDILTDEDEKTKGLWDSIKSFTVSLHKENKKEKDVLNIFSVASGHLYERFLRIMMLSVLRNTKTPVKFWLLKNYLSPTFKEVIPHMAKEYGFRYELVQYRWPRWLRQQTERQRIIWGYKILFLDVLFPLAVDKIIFVDADQIVRHDLKELRDFDLDGAPYGYTPFCDSRREMDGYRFWKTGYWASHLLRRKYHISALYVVDLKKFRRIGAGDRLRSQYQALSQDPNSLSNLDQDLPNNMIYQVAIKSLPQDWLWCETWCDDESKQRAKTIDLCNNPKTKESKLKAAARIVPEWVEYDAEIRQLLDHLENKKQDTSSTRSMAASASGEASRSFYSWWKAKQEQVSYIGGTGPRERRGRCHTLLNNQISH

SEQ ID NO: 797452 - protein, 1563 aa, Homo sapiens; identical to SEQ ID NO: 797451

SEQ ID NO: 797453 - protein, 254 aa, Homo sapiens
MAPAKATNVVRLLLGSTALWLSQLGSGTVAASKSVTAHLAAKWPETPLLLEASEFMAEESNEKFWQFLETVQELAIYKQTESDYSYYNLILKKAGQFLDNLHINLLKFAFSIRAYSPAIQMFQQIAADEPPPDGCNAFVVIHKKHTCKINEIKKLLKKAASRTRPYLFKGDHKFPTNKENLPVVILYAEMGTRTFSAFHKVLSEKAQNEEILYVLRHYIQKPSSRKMYLSGYGVELAIKSTEYKALDDTQVNNL

SEQ ID NO: 797454 - protein, 641 aa, Homo sapiens
MAPAKATNVVRLLLGSTALWLSQLGSGTVAASKSVTAHLAAKWPETPLLLEASEFMAEESNEKFWQFLETVQELAIYKQTESDYSYYNLILKKAGQFLDNLHINLLKFAFSIRAYSPAIQMFQQIAADEPPPDGCNAFVVIHKKHTCKINEIKKLLKKAASRTRPYLFKGDHKFPTNKENLPVVILYAEMGTRTFSAFHKVLSEKAQNEEILYVLRHYIQKPSSRKMYLSGYGVELAIKSTEYKALDDTQVKTVTNTTVEDETETNEVQGFLFGKLKEIYSDLRDNLTAFQKYLIESNKQMMPLKVWELQDLSFQAASQIMSAPVYDSIKLMKDISQNFPIKARSLTRIAVNQHMREEIKENQKDLQVRFKIQPGDARLFINGLRVDMDVYDAFSILDMLKLEGKMMNGLRNLGINGEDMSKFLKLNSHIWEYTYVLDIRHSSIMWINDLENDDLYITWPTSCQKLLKPVFPGSVPSIRRNFHNLVLFIDPAQEYTLDFIKLADVFYSHEVPLRIGFVFILNTDDEVDGANDAGVALWRAFNYIAEEFDISEAFISIVHMYQKVKKDQNILTVDNVKSVLQNTFPHANIWDILGIHSKYDEERKVSWDIMLSGVGQAQKDKHHMISTHVESLKKVRLTETE

SEQ ID NO: 797455 - protein, 1534 aa, Homo sapiens
MAPAKATNVVRLLLGSTALWLSQLGSGTVAASKSVTAHLAAKWPETPLLLEASEFMAEESNEKFWQFLETVQELAIYKQTESDYSYYNLILKKAGQFLDNLHINLLKFAFSIRAYSPAIQMFQQIAADEPPPDGCNAFVVIHKKHTCKINEIKKLLKKAASRTRPYLFKGDHKFPTNKENLPVVILYAEMGTRTFSAFHKVLSEKAQNEEILYVLRHYIQKPSSRKMYLSGYGVELAIKSTEYKALDDTQVKTVTNTTVEDETETNEVQGFLFGKLKEIYSDLRDNLTAFQKYLIESNKQMMPLKVWELQDLSFQAASQIMSAPVYDSIKLMKDISQNFPIKARSLTRIAVNQHMREEIKENQKDLQVRFKIQPGDARLFINGLRVDMDVYDAFSILDMLKLEGKMMNGLRNLGINGEDMSKFLKLNSHIWEYTYVLDIRHSSIMWINDLENDDLYITWPTSCQKLLKPVFPGSVPSIRRNFHNLVLFIDPAQEYTLDFIKLADVFYSHEVPLRIGFVFILNTDDEVDGANDAGVALWRAFNYIAEEFDISEAFISIVHMYQKVKKDQNILTVDNVKSVLQNTFPHANIWDILGIHSKYDEERKAGASFYKMTGLGPLPQALYNGEPFKHEEMNIKELKMAVLQRMMDASVYLQREVFLGTLNDRTNAIDFLMDRNNVVPRINTLILRTNQQYLNLISTSVTADVEDFSTFFFLDSQDKSAVIAKNMYYLTQDDESIISAVTLWIIADFDKPSGRKLLFNALKHMKTSVHSRLGIIYNPTSKINEENTAISRGILAAFLTQKNMFLRSFLGQLAKEEIATAIYSGDKIKTFLIEGMDKNAFEKKYNTVGVNIFRTHQLFCQDVLKLRPGEMGIVSNGRFLGPLDEDFYAEDFYLLEKITFSNLGEKIKGIVENMGINANNMSDFIMKVDALMSSVPKRASRYDVTFLRENHSVIKTNPQENDMFFNVIAIVDPLTREAQKMAQLLVVLGKIINMKIKLFMNCRGRLSEAPLERGDKNIPFLFFVDQNHCHSLSAILIDGNIQFSFMCALGRKQVAKFLDIPESPLLILNMITPEGWLVETVHSNCDLDNIHLKDTEKTVTAEYELEYLLLEGQCFDKVTEQPPRGLQFTLGTKNKPAVVDTIVMAHHGYFQLKANPGAWILRLHQGKSEDIYQIVGHEGTDSQADLEDIIVVLNSFKSKILKVKVKKETDKIKEDILTDEDEKTKGLWDSIKSFTVSLHKENKKEKDVLNIFSVASGHLYERFLRIMMLSVLRNTKTPVKFWLLKNYLSPTFKEVIPHMAKEYGFRYELVQYRWPRWLRQQTERQRIIWGYKILFLDVLFPLAVDKIIFVDADQIVRHDLKELRDFDLDGAPYGYTPFCDSRREMDGYRFWKTGYWASHLLRRKYHISALYVVDLKKFRRIGAGDRLRSQYQALSQDPNSLSNLDQDLPNNMIYQVAIKSLPQDWLWCETWCDDESKQRAKTIDLCNNPKTKESKLKAAARIVPEWVEYDAEIRQLLDHLENKKQDTILTHDEL

SEQ ID NO: 797456 - protein, 1395 aa, Homo sapiens
MAPAKATNVVRLLLGSTALWLSQLGSGTVAASKSVTAHLAAKWPETPLLLEASEFMAEESNEKFWQFLETVQELAIYKQTESDYSYYNLILKKAGQFLDNLHINLLKFAFSIRAYSPAIQMFQQIAADEPPPDGCNAFVVIHKKHTCKINEIKKLLKKAASRTRPYLFKGDHKFPTNKENLPVVILYAEMGTRTFSAFHKVLSEKAQNEEILYVLRHYIQKPSSRKMYLSGYGVELAIKSTEYKALDDTQVKTVTNTTVEDETETNEVQGFLFGKLKEIYSDLRDNLTAFQKYLIESNKQMMPLKVWELQDLSFQAASQIMSAPVYDSIKLMKDISQNFPIKARSLTRIAVNQHMREEIKENQKDLQVRFKIQPGDARLFINGLRVDMDVYDAFSILDMLKLEGKMMNGLRNLGINGEDMSKFLKLNSHIWEYTYVLDIRHSSIMWINDLENDDLYITWPTSCQKLLKPVFPGSVPSIRRNFHNLVLFIDPAQEYTLDFIKLADVFYSHEVPLRIGFVFILNTDDEVDGANDAGVALWRAFNYIAEEFDISEAFISIVHMYQKVKKDQNILTVDNVKSVLQNTFPHANIWDILGIHSKYDEERKAGASFYKMTGLGPLPQALYNGEPFKHEEMNIKELKMAVLQRMMDASVYLQREVFLGTLNDRTNAIDFLMDRNNVVPRINTLILRTNQQYLNLISTSVTADVEDFSTFFFLDSQDKSAVIAKNMYYLTQDDESIISAVTLWIIADFDKPSGRKLLFNALKHMKTSVHSRLGIIYNPTSKINEENTAISRGILAAFLTQKNMFLRSFLGQLAKEEIATAIYSGDKIKTFLIEGMDKNAFEKKYNTVGVNIFRTHQLFCQDVLKLRPGEMGIVSNGRFLGPLDEDFYAEDFYLLEKITFSNLGEKIKGIVENMGINANNMSDFIMKVDALMSSVPKRASRYDVTFLRENHSVIKTNPQENDMFFNVIAIVDPLTREAQKMAQLLVVLGKIINMKIKLFMNCRGRLSEAPLESFYRFVLEPELMSGANDVSSLGPVAKFLDIPESPLLILNMITPEGWLVETVHSNCDLDNIHLKDTEKTVTAEYELEYLLLEGQCFDKVTEQPPRGLQFTLGTKNKPAVVDTIVMAHHGYFQLKANPGAWILRLHQGKSEDIYQIVGHEGTDSQADLEDIIVVLNSFKSKILKVKVKKETDKIKEDILTDEDEKTKGLWDSIKSFTVSLHKENKKEKDVLNIFSVASGHLYERFLRIMMLSVLRNTKTPVKFWLLKNYLSPTFKEVIPHMAKEYGFRYELVQYRWPRWLRQQTERQRIIWGYKILFLDVLFPLAVDKIIFVDADQIVRHDLKELRDFDLDGAPYGYTPFCDSRREMDGYRFWKTGYWASHLLRRKYHIRISPII

SEQ ID NO: 797457 - protein, 1133 aa, Homo sapiens; identical to SEQ ID NO: 797449

SEQ ID NO: 797458 - protein, 130 aa, Homo sapiens
MIYQVAIKSLPQDWLWCETWCDDESKQRAKTIDLCNNPKTKESKLKAAARIVPEWVEYDAEIRQLLDHLENKKQDTSSTRSMAASASGEASRSFYSWWKAKQEQVSYIGGTGPRERRGRCHTLLNNQISH

SEQ ID NO: 797459 - protein, 157 aa, Homo sapiens
NIENPNQVAQTTKKVTQLYLDGPKELSRREREEIEKQKAKERYMKMHLAGKTEQAKADLARWPSSGNSGRRLPGRRKRKGKQKMMPHCQENECSRSPCISNRDPWEEMPGTWAALPGPLLCLAHPVPWRRRNSPSWPGAPHGLGPPLHYGLSLVSPV

SEQ ID NO: 797460 - protein, 124 aa, Homo sapiens
KEELVPFLLKLFQSIEKEGILPNSFYEASIILIPKPGRDLCPSCQPYSGVSIATTTQMQSQFIPSHTQLHTSSSRTDSRLLDIQANVLLSMSSLGTNSVGWGISPTLMAILFLFLKFFSNFIKV

SEQ ID NO: 797461 - protein, 214 aa, Homo sapiens [sequence omitted]

SEQ ID NO: 797462 - protein, 214 aa, Homo sapiens [sequence omitted]

SEQ ID NO: 797463 - protein, 149 aa, Homo sapiens
MARVASAQGLCDITKGLAPGAQSSSCEGKQTRHEQLPSPSLLTMWTLKSSLVLLLCLTCSYAFMFSSLRQKTSEPQGKVPCGEHFRIRQNLPEHTQGWLGSKWLWLLFAVVPFVILKCQRDSEKNKVRMAPFFLHHIDSISGVSGKRMF

SEQ ID NO: 797464 - protein, 73 aa, Homo sapiens
ALPAQPPPRRPPRAGASQAAFRTWGLLLLSPTGALAVNPSRRQEMTIRYQGRQYRLRMAFLQKVSKLRPGPGD

SEQ ID NO: 797465 - protein, 126 aa, Homo sapiens
MGVLDLHSYIAVIDQGQEAAACFPPHLCSTEWPVTKHSSCITLPAMPLQPSKTATPSFIFYDSGKKGGNWNLFQGLGARQSLVLGLELRLPFFVCFVVFFFFETESHSVTQAGVQWRDLGSLQPPP

SEQ ID NO: 797466 - protein, 134 aa, Homo sapiens
PCPAAPAAAGPGPCLRALRPGACPASADLKHSDGTRTCAKLYDKSDPYYENCCGGAELSLESGADLPYLPSNWANTASSLVVAPRCELTVWSRQGKAGKTHKFSAGTYPRLEEYRRGILGDWSNAISALYCRCS

SEQ ID NO: 797467 - protein, 134 aa, Homo sapiens; identical to SEQ ID NO: 797466

SEQ ID NO: 797468 - protein, 426 aa, Homo sapiens
PTRPLRNRRSLAALAPSNPDMLLLLLLLPLLWGTKGMEGDRQYGDGYLLQVQELVTVQEGLCVHVPCSFSYPQDGWTDSDPVHGYWFRAGDRPYQDAPVATNNPDREVQAETQGRFQLLGDIWSNDCSLSIRDARKRDKGSYFFRLERGSMKWSYKSQLNYKTKQLSVFVTDPPWNLTMTVFQGDATASTALGNGSSLSVLEGQSLRLVCAVNSNPPARLSWTRGSLTLCPSRSSNPGLLELPRVHVRDEGEFTCRAQNAQGSQHISLSLSLQNEGTGTSRPVSQVTLAAVGGAGATALAFLSFCIIFIIVRSCRKKSARPAAGVGDTGMEDAKAIRGSASQGPLTESWKDGNPLKKPPPAVAPSSGEEGELHYATLSFHKVKPQDPQGQEATDSEYSEIKIHKRETAETQACLRNHNPSSKEVRG

SEQ ID NO: 797469 - protein, 451 aa, Homo sapiens
PTRPLRNRRSLAALAPSNPDMLLLLLLLPLLWGTKGMEGDRQYGDGYLLQVQELVTVQEGLCVHVPCSFSYPQDGWTDSDPVHGYWFRAGDRPYQDAPVATNNPDREVQAETQGRFQLLGDIWSNDCSLSIRDARKRDKGSYFFRLERGSMKWSYKSQLNYKTKQLSVFVTALTHRPDILILGTLESGHSRNLTCSVPWACKQGTPPMISWIGASVSSPGPTTARSSVLTLTPKPQDHGTSLTCQVTLPGTGVTTTSTVRLDVSYPPWNLTMTVFQGDATASTALGNGSSLSVLEGQSLRLVCAVNSNPPARLSWTRGSLTLCPSRSSNPGLLELPRVHVRDEGEFTCRAQNAQGSQHISLSLSLQNEGTGTSRPVSQVTLAAVGGAGATALAFLSFCIIFIIVRSCRKKSARPAAGVGDTGMEDAKAIRGSASQVSDVGFSTPSIQPGHL

SEQ ID NO: 797470 - protein, 398 aa, Homo sapiens
IRNTVPASSLSSLQSVHKRKRERERERDRESRDQVKEWGCCSHSDLRSWKIAKDAEGNEDDQRRGCAFRLGCEKTPSFPHCLQPVASRGKAPQRHPFPEALRGPFSQFRYEPPPGDLDGFPGVFEGAGSRKRKSMPTKMPYNHPAEEVTLALHSEENKNHGLPNLPLLFPQPPRPKYDSQMIDLCNVGFQFYRSLEHFGGKPVKQEPIKPSAVWPQPTPTPFLPTPYPYYPKVHPGLMFPFFVPSSSPFPFSRHTFLPKQPPEPLLPRKAEPQESEETKQKVERVDVNVQIDDSYYVDVGGSQKRWQCPTCEKSYTSKYNLVTHILGHSGIKPHACTHCGKLFKQLSHLHTHMLTHQGTRPHKCQVCHKAFTQTSHLKRHMMQHSEVKPHNCRVCGRG

SEQ ID NO: 797471 - protein, 81 aa, Homo sapiens
PPHLYGPGTWCSNETLQENPNSAKGSHPPQATSHPEQLSKEALGDPPLLASLSPQGSSYPNHPTLLDLGTVHTRLTVFRRC

SEQ ID NO: 797472 - protein, 70 aa, Homo sapiens
PFPIQNLCPCIPQPLHCLCPLPEDPGDEEGGSSEQQEMADLLRGSGEHALNLAEKGLGPRNDQNAYFCPG

SEQ ID NO: 797473 - protein, 70 aa, Homo sapiens; identical to SEQ ID NO: 797472

SEQ ID NO: 797474 - protein, 79 aa, Homo sapiens
DPTPVLLGPVGTHRAVLAGLTHIPESQGFLCHQRTNSPTVSHSAQCLYLKLGTFSKSAVWNCVSCCPSPGPSTEPGTVP

SEQ ID NO: 797475 - protein, 99 aa, Homo sapiens
KLKSFCTAKETTIRVNRQPTEWEKIFATYSSDKGLISRIYNELKQIYKKKTNNPIKKWAKDMNRHFSYCSVLHFPKQCMKVPVVSHPPQYLVYVISFVI

SEQ ID NO: 797476 - protein, 245 aa, Homo sapiens
MDGTRTSLDIEEYSDTEVQKNQVLTLEEWQDKWVNGKTAFHQEQGHQLLKKHLDTFLKGKSGLRVFFPLCGKAVEMKWFADRGHSVVGVEISELGIQEFFTEQNLSYSEEPITEIPGTKVFKSSSGNISLYCCSIFDLPRTNIGKFDMIWDRGALVAINPGDRKCYADTMFSLLGKKFQYLLCVLSYDPTKHPGPPFYVPHAEIERLFGKICNIRCLEKVDAFEERHKSWGIDCLFEKLYLLTEK

SEQ ID NO: 797477 - protein, 245 aa, Homo sapiens; identical to SEQ ID NO: 797476

SEQ ID NO: 797478 - protein, 245 aa, Homo sapiens; identical to SEQ ID NO: 797476

SEQ ID NO: 797479 - protein, 245 aa, Homo sapiens; identical to SEQ ID NO: 797476

SEQ ID NO: 797480 - protein, 245 aa, Homo sapiens; identical to SEQ ID NO: 797476

SEQ ID NO: 797481 - protein, 228 aa, Homo sapiens
MDGTRTSLDIEEYSDTEVQKNQVLTLEEWQDKWVNGKTAFHQEQGHQLLKKHLDTFLKGKSGLRVFFPLCGKAVEMKWFADRGHSVVGVEISELGIQEFFTEQNLSYSEEPITEIPGTKVFKSSSGNISLYCCSIFDLPRTNIGKFDIYADTMFSLLGKKFQYLLCVLSYDPTKHPGPPFYVPHAEIERLFGKICNIRCLEKVDAFEERHKSWGIDCLFEKLYLLTEK

SEQ ID NO: 797482 - protein, 227 aa, Homo sapiens
MDGTRTSLDIEEYSDTEVQKNQVLTLEEWQDKWVNGKTAFHQEQGHQLLKKHLDTFLKGKSGLRVFFPLCGEISELGIQEFFTEQNLSYSEEPITEIPGTKVFKSSSGNISLYCCSIFDLPRTNIGKFDMIWDRGALVAINPGDRKCYADTMFSLLGKKFQYLLCVLSYDPTKHPGPPFYVPHAEIERLFGKICNIRCLEKVDAFEERHKSWGIDCLFEKLYLLTEK

SEQ ID NO: 797483 - protein, 173 aa, Homo sapiens
MDGTRTSLDIEEYSDTEVQKNQVLTLEEWQDKWVNGKTAFHQEQGHQLLKKHLDTFLKGKSGLRVFFPLCGKAVEMKWFADRGHSVVGVEISELGIQEFFTEQNLSYSEEPITEIPGTKVFKSSSGNISLYCCSIFDLPRTNIGKFDMIWDRGALVAINPGDRKWSTILCSTC

SEQ ID NO: 797484 - protein, 95 aa, Homo sapiens
MDGTRTSLDIEEYSDTEVQKNQVLTLEEWQDKWVNGKTAFHQEQGHQLLKKHLDTFLKGKSGLRVFFPLCGKAVEMKWFADLGTRVEMTRDLLES

SEQ ID NO: 797485 - protein, 88 aa, Homo sapiens
MDGTRTSLDIEEYSDTEVQKNQVLTLEEWQDKWVNGKTAFHQEQGHQLLKKHLDTFLKGKSGLRVFFPLCGELRSCHCTQAWATEQDS

SEQ ID NO: 797486 - protein, 245 aa, Homo sapiens; identical to SEQ ID NO: 797476

SEQ ID NO: 797487 - protein, 245 aa, Homo sapiens; identical to SEQ ID NO: 797476

SEQ ID NO: 797488 - protein, 245 aa, Homo sapiens; identical to SEQ ID NO: 797476

SEQ ID NO: 797489 - protein, 173 aa, Homo sapiens; identical to SEQ ID NO: 797483

SEQ ID NO: 797490 - protein, 236 aa, Homo sapiens
MDGTRTSLDIEEYSDTEVQKNQVLTLEEWQDKWVNGKTAFHQEQGHQLLKKHLDTFLKGKSGLRVFFPLCGKAVEMKWFADRGHSVVGVEISELGIQEFFTEQNLSYSEEPITEIPGTKVFKSSSGNISLYCCSIFDLPRTNIGKFDMIWDRGALVAINPGDRKCYADTMFSLLGKKFQYLLCVLSYDPTKHPAPFMFHSVHLEVVGQLPSWLEGGALRNTNWEARVGRFSPRVAP

SEQ ID NO: 797491 - protein, 71 aa, Homo sapiens
  misc_feature (1)..(1): Xaa can be any naturally occurring amino acid
  misc_feature (15)..(15): Xaa can be any naturally occurring amino acid
XTPCSKSCGNPTEPXCNCVIGGGGNGRQPAVSEARKTYACETKVSLKLWMVQELHLTLKSTRILRYRKTKY

SEQ ID NO: 797492 - protein, 148 aa, Homo sapiens
TELRCIVQSLKINLDSMRNLKASLENSLREVEARYALQREQLNGILLHLESELAQTRAEGQCQAQEYKALLNIKVKLEAESTAYCCLLEDGKDFNLGDALDSSNSMQTIQKTTTRRIVDGKVVSDQRHQSSETLSQQKQGTLWGAGGQ

SEQ ID NO: 797493 - protein, 111 aa, Homo sapiens
SQSAGITDVSHRPWPELHSSLRLSSVSLYGWALACQCTHPWMRIRVYPPLGSCEHNAVCTLRVCLNPCSRGMYLAWSFGDCGNPMLSLVRSGGTLSLFVIIFKFFSKLSSL

SEQ ID NO: 797494 - protein, 94 aa, Homo sapiens
LWAWDLGLGSQRKRGFEERKGSELGEGTLGRGATGLGRGLGVWGDRVWLQSGKWPPEGDSGLAQQPPGPGSRLAPRRWAPGPRTWLSLKPHSQA

SEQ ID NO: 797495 - protein, 130 aa, Homo sapiens
GYYRKVFCLAVWLTFSFPGPLARDIRLVLDFLCLYPLAFCASTFSSSSTVWDIRGNKETQGIHCYVILWVLRFLVVCILLSTFIYKVHDFQLYFAEGIGKCTSPFFSKQMSLMYIQPIYLEVSLILPLRC

SEQ ID NO: 797496 - protein, 105 aa, Homo sapiens
ASARARCAHPLTCAHCLALPSEMNPVPQMEMQKSPVFCVAHAGSCRPELFLFGHLGSSPRVLESEKSRIGVLAYSVPGKGCLPGLQLNYFLLCLHKPALPSLLCL

SEQ ID NO: 797497 - protein, 67 aa, Homo sapiens
RMALREPETPTLQVQGAPAKGLRPREALLEQELHDSSENSSCWSFAPKEFQRWHRLGVPTHWAERPH

SEQ ID NO: 797498 - protein, 123 aa, Homo sapiens
FLDSVAVLPRLECSGTISAHCNVCLLGSSDCRASAPQVAGITGAHHHAWLTVFLAEMGFHHVGQPALKLLASSNPPASASHSAGITGLSHCTKPQLQIVSFRARLDRIQTQNCEISAAQAVNQ

SEQ ID NO: 797499 - protein, 101 aa, Homo sapiens
QPKPNTGCHTAMVLKLECTSESSGGLAKTKKVLPAPSASPPPVYDAVGLGWRFCLSHTFPGDTDAAGLGTTLLRTTPRWGHSSRVARWSLKSQARNSRLLD

SEQ ID NO: 797500 - protein, 87 aa, Homo sapiens
AGKEHTTATAQGKSARRPQRRERAHDGHSAGKERTTATARGKSARRPQRGERAHDGHTAGKERMTVTAQTKSARWPHCRERAHDGHS

SEQ ID NO: 797501 - protein, 118 aa, Homo sapiens
MPSKTAENATFYYISSLLSSRSPVFNQSPKVKAGHMLEASQISAKNSADFFHPTPSCSELDFTLHPELADSLGAKHNYKATCLMRFLPLQRHTRSWFSLILWCIQRDDYLIGLFSCFS

SEQ ID NO: 797502 - protein, 99 aa, Homo sapiens
TPPTTPPTPPPLPPPTTPTDPIPSLNAATPTAPWRLGCKLPRTRNKIQSKHTLWDVRAHTPNPTATMTNGLVAKEGVRLGMVAHTCNPSTLGGQGGRIA

SEQ ID NO: 797503 - protein, 217 aa, Homo sapiens
MASTGLELLGMTLAVLGWLGTLVSCALPLWKVTAFIGNSIVVAQVVWEGLWMSCVVQSTGQMQCKVYDSLLALPQDLQAARALCVIALLLALLGLLVAITGAQCTTCVEDEGAKARIVLTAGVILLLAGILVLIPVCWTAHAIIQDFYNPLVAEALKRELGASLYLGWAAAALLMLGGGLLCCTCPPPQVERPRGPRLGYSIPSRSGASGLDKRDYV

SEQ ID NO: 797504 - protein, 75 aa, Homo sapiens
MQESMTGMSQPCAIWEGPGSIRFHLSSLIVLLSSDPNVSLPAADHMGNAGSREGTLVSEQGRSAGFYSQAPPLPQ

SEQ ID NO: 797505 - protein, 84 aa, Homo sapiens
SLTLGAVDRSCSYSAILAPPPWFGLFQVYWRSAPGPPHITSTLYPRSWSQHWSKRAQENSLEVEGLAHLMRAKHDRYQQAGFLG

SEQ ID NO: 797506 - protein, 216 aa, Homo sapiens
CLNCGKLGLPRHQVSFSPCLYGPLFILLADPEIRQENKAQWEGLGARQSHQDGLGLINVSEPLRTRIQTSNSPSRLLVRCPDRPPQTNSIRTFGGACKISRGDSGTKAKDSDARSPPACSGQRGSLLGNGMQAPGLLLEYPSVTDGQLTNAQWVRPRQGAAEQRARPLSAWERGATARRGVSAGLRLRRSSQLLDSTARAPYRSCEGAAAAAGGHR

SEQ ID NO: 797507 - protein, 417 aa, Homo sapiens
MLLPPGSLSRPRTFSSQPLQTKLMTHNGLFRPIPYLTAVSADEPTASQQPPQAQLHHYNGLFRPSSCLPAFSPGPELSEVDLTRPSSCFFAASPGPAPASWWPLQAQPLPPVGLYSPNICLKQILEAQHLPHCGPPKPSSQPFSSFYTPSSCHPVASLAKLMLHKGLSRPNFRLMATFPGQIPACLPAAKTGPGLASHWPLYIQLMPHGDLSRHSSCPRTSSPGPKLTRVSLSSPNCCLLVAYEGPKSPQVDLSRPSSCLLSASTGPTSASWGLLRAQLFLLAESTGTTAASQQPFLAQFLSSSWRPMRPKTSSGHTLQAHLLLPGGMNRPSFDLRTASAGPALASQGLFQAQLLPHGSCPRPNFFLPASSLNRHSSSLTVAHLGPTHDCRAISRPSACLLADSFLKPKTSSNQPFA

SEQ ID NO: 797508 - protein, 230 aa, Homo sapiens [sequence omitted]

SEQ ID NO: 797509 - protein, 70 aa, Homo sapiens
APPASQWLLSAQPSSWLSAAFPGPAFDFWRPLQAQNLTSSRPLQARPPASQRPARARPRPRPHSGLSTPS

SEQ ID NO: 797510 - protein, 199 aa, Homo sapiens
TGPASTSQWALQAHLFLTVASWGNAPPSREPLRAQLLPPSGLCRPSPCLRAAFPGLAFAALHPLQALDFLQSASPGPALPLGGLCRARLSSSRPVQGQLLPPGGLCRPKSFSSRLPQAQLRPLGGLSGCKSSSSQPLQAQLLLPPSGLFRPSPAHASRRPSQAPLLTFGGLCRPRQGPASCLQKACTGPASASQRTLHA

SEQ ID NO: 797511 - protein, 117 aa, Homo sapiens
SVCPLTAHAWLLPGQGLSWGSCWGQGSYAHRVAGTAPRKAGWWIAGLRGWAGQSCSGSSSRRHGPWALPALYGPRCACCSADCLLRIPDPGIPLGTLLLKRGSADRVDKNNLTQDVV

SEQ ID NO: 797512 - protein, 105 aa, Homo sapiens
EKLFVSFPHHIHMNCILFVLTSLCSNSIISIICRFISINFSSGYGSFSLLRMPGHCEFYIAEHWICCIPLKTVRLYLVTQISNVWISLILVKLTFKVFVASNSGL

SEQ ID NO: 797513 - protein, 150 aa, Homo sapiens
PNLNQSLVINENHSQLPICKLPLKLPKHKKLINRPQSTKRVSKDPVEALWDNLLHWLAEELSEENAESLSSTLPLRRSTIQLIKLKNPDDLTEQIHEFLCFWKKSLPTFTDKLRLLARHLRKIGRSDLAEELKFKWENKVFTEPQQCFDV

SEQ ID NO: 797514 - protein, 80 aa, Homo sapiens
RSSLVPALPPLHFLHQHCFPMCVATLLLGAVFFLPCCCSDRSSLLITKVCTCSWSAGATRSGSCDFSRGSLAPSDGAWAG

SEQ ID NO: 797515 - protein, 56 aa, Homo sapiens
MPGGSLHPERSPGRPFISQQLSSQWALLTSVAPSEAIAVDSDAQMVSDLPSKNPRS

SEQ ID NO: 797516 - protein, 122 aa, Homo sapiens
MSTWRTETFTPAVCTSCELWLLRQPARPRTAWGGPSDSHMGQLWSWSKRTSWLFVILSRSLAAAWLCFSCDRDHTCVLDPGCIWLTFLQWFLGTTSRDHFNAHFHMYRLLRSYCRHREERTE

SEQ ID NO: 797517 - protein, 199 aa, Homo sapiens
QHTYIPVLPASMIDIVCSPTPFLIGILSCSLPQLQDLPIEEVLIVDLCADKFLQEVSDEDEILPPKLQAALMQILEERNEILTQEQNFSQDVTLNSLVSEAFVRFFVELVGHYSLNMTVTERGERVFQREPFRKSHTSRSVRHFLDLFMETQMFAGFIQDRELRKSGVKGLFEIRAIQYLETIPESEPSGMNRILRSLG

SEQ ID NO: 797518 - protein, 208 aa, Homo sapiens
QHTYIPVLPASMIDIVCSPTPFLIGILSCSLPQLQDLPIEEVLIVDLCADKFLQEVSDEDEILPPKLQAALMQILEERNEILTQEQNFSQDVTLNSLVSEAFVRFFVELVGHYSLNMTVTERGERVFQREPFRKSHTSRSVRHFLDLFMETQMFAGFIQDRELRKSGVKGLFEIRAIQYLETIPESEPSGMNRILRSLGSKMKFLQKK

SEQ ID NO: 797519 - protein, 120 aa, Homo sapiens
HQESLRIKFTEGGRTERQKKSGPMPMSLNCLINQPWNCPTSGLIIFKDRIPVQSPDCVEIPLLPERQWMYLKGDFTDIPKETCILSPALSALAVYWTSQVTHFITVSQYMVFLGGCSMCT

SEQ ID NO: 797520 - protein, 545 aa, Homo sapiens
GLCSLAADGLWNQKILFEEQDLRKHGLDGEDVSAFLNMNIFQKDINCERYYSFIHLSFQEFFAAMYYILDEGEGGAGPDQDVTRLLTEYAFSERSFLALTSRFLFGLLNEETRSHLEKSLCWKVSPHIKMDLLQWIQSKAQSDGSTLQQGSLEFFSCLYEIQEEEFIQQALSHFQVIVVSNIASKMEHMVSSFCLKRCRSAQVLHLYGATYSADGEDRARCSAGAHTLLVQLPERTVLLDAYSEHLAAALCTNPNLIELSLYRNALGSRGVKLLCQGLRHPNCKLQNLRLKRCRISSSACEDLSAALIANKNLTRMDLSGNGVGFPGMMLLCEGLRHPQCRLQMIQLRKCQLESGACQEMASVLGTNPHLVELDLTGNALEDLGLRLLCQGLRHPVCRLRTLWLKICRLTAAACDELASTLSVNQSLRELDLSLNELGDLGVLLLCEGLRHPTCKLQTLRLDSCGLTAKACENLYFTLGINQTLTDLYLTNNALGDTGVRLLCKRLSHPGCKLRVLWLFGMDLNKMTHSRLAALRVTKPYLDIGC

SEQ ID NO: 797521 - protein, 287 aa, Homo sapiens
MSQAWWHTSVSPATQEAKAGGLLQPRRQRLWLKRCRISSSACEDLSAALIANKNLTRMDLSGNGVGFPGMMLLCEGLRHPQCRLQMIQLRKCQLESGACQEMASVLGTNPHLVELDLTGNALEDLGLRLLCQGLRHPVCRLRTLWLKICRLTAAACDELASTLSVNQSLRELDLSLNELGDLGVLLLCEGLRHPTCKLQTLRLDSCGLTAKACENLYFTLGINQTLTDLYLTNNALGDTGVRLLCKRLSHPGCKLRVLWLFGMDLNKMTHSRLAALRVTKPYLDIGC

SEQ ID NO: 797522 - protein, 122 aa, Homo sapiens [sequence omitted]

SEQ ID NO: 797523 - protein, 74 aa, Homo sapiens
CNGNGMMKPSWEQGCTENRRRFCGIPARKPQPEPNHEETSGQPKLRDNLHIKRLGISESDKVMKIKERLRSFPD

SEQ ID NO: 797524 - protein, 107 aa, Homo sapiens
RGGSTGRNQPGRGEVAFQTRPWAEQRPQMEEEEERTGQCGEGLRLLGAERSPITPAPSLGGLLTFLEGAAPPSCSPHLPAACTCLSRSLTPSQAHTWVYVGLCHQLQ

SEQ ID NO: 797525 - protein, 101 aa, Homo sapiens
KPGTLWSCTSPYTPQQKLASNQLLETMLVGTTRVPGHAQSLALKRRFNQNKCMLSRPGWPYVPARQLSGGDICYIQMWTQAPTKANTCHLKGHLNMAACFQ

SEQ ID NO: 797526 - protein, 199 aa, Homo sapiens
RGPPRKFSQPEPSAVLKRHPQPEFFGDLPRKPPLPSSASESSLPAAVAGFSSRHPLSPGFGAAGTPRWRSGGLVHSGGARPGLRPSHPPRRRPLPPASSLGHPPAKPPLPPGPVDMQSFRRPSAASIDLRRTRSAAGLHFQDRQPEDIPQVPDEIYELYDDVEPRDDSSPSPKGRGLLVACPSPCKTFGARPFSAMLLV

SEQ ID NO: 797527 - protein, 320 aa, Homo sapiens
RGPPRKFSQPEPSAVLKRHPQPEFFGDLPRKPPLPSSASESSLPAAVAGFSSRHPLSPGFGAAGTPRWRSGGLVHSGGARPGLRPSHPPRRRPLPPASSLGHPPAKPPLPPGPVDMQSFRRPSAASIDLRRTRSAAGLHFQDRQPEDIPQVPDEIYELYDDVEPRDDSSPSPKGRDEAPSVQQAARRPPQDPALRKEKDPQPQQLPPMDPKLLKQLRKAEKAEREFRKKFKFEGEIVVHTKMMIDPNAKTRRGGGKHLGIRRGEILEVIEFTSNEEMLCRDPKGKYGYVPRTALLPLETEVYDDVDFCDPLENQPLPLGR

SEQ ID NO: 797528 - protein, 67 aa, Homo sapiens
DTLSKCFCQQKDIGGFTVAQVRERKLCTVSALSLLQTSWCHSSSHSLSSSVTSKTFALSEWILLRQP

SEQ ID NO: 797529 - protein, 177 aa, Homo sapiens
KAKGKKVAPAPAVMKKQEAKKVVNPLFEKRPKNFGIGQDIQPKRDLAHLVKRPCYIRLQRQRAILCKRLKVPPAIDQFAQALDCQTATQLLKLAHKYRLKTKQEKGQRLLAPAEKKAAGKGDVPTKRPPVLPAGVNTVTTLVENMKAQLVVIAHDVDPIELVTFLPALCRKMGVPYC

SEQ ID NO: 797530 - protein, 67 aa, Homo sapiens
TWKKRTTLGDFPVSAFYPMAGPRQGSKTLLGNLQSYWPEEPEARVRDKQPLESEEENPEKESPKFVA

SEQ ID NO: 797531 - protein, 135 aa, Homo sapiens
TVEQKGSSSMSWGRCRERRQGEEGVRFARGTPTRTGSDGASPSEDLTFMQKHQTTRRAPSIPEPPTRNPQSICMCDPEVQTDAGRLRWVLTLAGQTKPSRGQFSPPQRSVQLKGAPELSAAQGFRLFLTFKHEER

SEQ ID NO: 797532 - protein, 125 aa, Homo sapiens
GDLEDPSASFHQYKECFITNFISGRKLIHVNCSNLPQMGITNFEDMKAISRHTQELLEIEEPLFKRSISLPYRDIIGLYLEQKGHTGIKSDSLTLSEFVKAAGLQDYAPEITAPEENEELPCTEP

SEQ ID NO: 797533 - protein, 78 aa, Homo sapiens
DCRVPTSILGTSLAPIITAAPGGGSTGGSGFCTGKSKGLYPSPTSKHAFYNCVDEHTYEEACQEGLVFDTSCSCCNWA

SEQ ID NO: 797534 - protein, 76 aa, Homo sapiens
VFKPTRSIEQKKTEEGPSGPLPVLVNKALLKPGAHLLAHSSRVTLRQASRHVMRTLKQHHGEVRWRGTEDPPADSQ

SEQ ID NO: 797535 - protein, 46 aa, Homo sapiens
TDEINFLMQLYEEEIRELQSQISDTSVVLSMDNSCSLDMDSIIAEV

SEQ ID NO: 797536 - protein, 103 aa, Homo sapiens
MDPAPESPTVRASPCGEHVTPEAPYPGGGPCPCLLQLRSPCGAPPIHSLIPRAWLPGREAESNRGGKLHPCHYQKLRLRGHRPPRDLPGLSQAVHPAHCGATT

SEQ ID NO: 797537 - protein, 124 aa, Homo sapiens
ASNFPQLLGASTSVASLGPFPTPTLLKNMGNFWACYVEPLKYEYFVSLVRKHWGPDGEKMFCHKKISWSGPCLGLAQGCSGSVRTRQEGGAGRKGRTHFFIHSAQQVGDRGCPGVGGAGSSDCF

SEQ ID NO: 797538 - protein, 157 aa, Homo sapiens
MRPLLPGGEAQPGDTGPILPNGDTSGSGSQVPRKTFLATGDTRTSGTDGGRMCSCSLFSRRPENGRSRVGADGRQGLRPKAGAPPMPDLLGHRICTDIGKGWRMDGGRTCSCSSFCRCPERGARRSSPDAPGLALDFPLLLDLLWHLCSWTSQPLEL

SEQ ID NO: 797539 - protein, 176 aa, Homo sapiens
GPGQGGPGATASTCDQRCWGDLGMRPLLPGGESLETQAPSFPMGTLQGAALRSRERPSWPQETHGHRERTEEGCAVAAFSADALRTGGQELEQTVDRASDLRQEHPLCQTSWVTGYARTLGRDGGWTEEGRAVAALSADALREEQEGPRQMLLDLLWTFPCSWTCSGTCALGLHSL

SEQ ID NO: 797540 - protein, 152 aa, Homo sapiens
MRPLLPGGEAQPGDTGPILPNGDTSGSGSQVPRKTFLATGDTRTSGTDGGRMCSCSLFSRRPENGRSRVGADGDRASDLRQEHPLCQTSWVTGYARTLGRDGGWTEEGRAVAALSADALREEVGAPLLWFECFSPPKLMLKFHCHCNSMKSD

SEQ ID NO: 797541 - protein, 70 aa, Homo sapiens
MELGQAGQGNRLTGRFPPKKPRDRVSHKPRARASGSNTAHAIPPRVATVTHEHTQRKINDPPTRRQPWQG

SEQ ID NO: 797542 - protein, 103 aa, Homo sapiens
MNKVAGLSKMLKLWPHFVCAHVCVYMSYWCDGSLRGYSLPVTCFHISHKTGMKRKEELNHSLRQVDLWQTKSPQLGLHGGQSDFLPSEASRATFSSSPSSNLA

SEQ ID NO: 797543 - protein, 105 aa, Homo sapiens
  misc_feature (41)..(41): Xaa can be any naturally occurring amino acid
KCSPLWQRELHFCSIHLPSCSAVPPFGGCCSSPLPRLGHPXCRTWEPKPPSHVSLVPRCTAAPLLPSRQRSLSSQLLFRTFPPYRFWHCALLLTCIFFSMIQEGG

SEQ ID NO: 797544 - protein, 144 aa, Homo sapiens
  misc_feature (1)..(2): Xaa can be any naturally occurring amino acid
XXWERKVFALHNTFMSSTHPLPEVAHVKHLSASQKALKEKEKASWSSLSMDEKVELYRIKFKESFAEMNRGSNEWKTVVGGAMFFIGFTALVIMWQKHYVYGPLPQSFDKEWVAKQTKRMLDMKVNPIQGLASKWDYEKNEWKK

SEQ ID NO: 797545 - protein, 105 aa, Homo sapiens
MASWQSPCPVDYKNFVIGEPSWRESFAEMNRGSNEWKTVVGGAMFFIGFTALVIMWQKHYVYGPLPQSFDKEWVAKQTKRMLDMKVNPIQGLASKWDYEKNEWKK

SEQ ID NO: 797546 - protein, 149 aa, Homo sapiens
VQHERIHTGEKPYECKECGKAFSRGYHLTQHQKIHTGEKPFKCKECGKAFSWGSSLVKHERVHTNEKSYECKDCGKAFGSGYQLSVHQRFHTGEKLYQRKEFGKTFTRGSKLVHERTHSNDKPYKYNECGEAFLWTTYSNEKIDTDETL

SEQ ID NO: 797547 - protein, 85 aa, Homo sapiens
LISLVLNSEFEFTFPNGNKIKGWMRGQECRNSRIGTEGILRATQKWLKSSGMIMTQNGKQLFSVFYVLGTISNVLQELSLLFSQF

SEQ ID NO: 797548 - protein, 219 aa, Homo sapiens
AVVSTQRAYYGRGSTDSLFFGKMAEYDLTTRIAHFLDRHLVFPLLEFLSVKEIYNEKELLQGKLDLLSDTNMVDFAMDVYKNLYSDDIPHALREKRTTVVAQLKQLQAETEPIVKMFEDPETTRQMQSTRDGRMLFDYLADKHGFRQEYLDTLYRYAKFQYECGNYSGAAEYLYFFRVLVPATDRNALSSLWGKLASEILMQNWDAAMERPYTVKRDHR

SEQ ID NO: 797549 - protein, 209 aa, Homo sapiens
LGAAGCKSAEAELAEYDLTTRIAHFLDRHLVFPLLEFLSVKEIYNEKELLQGKLDLLSDTNMVDFAMDVYKNLYSDDIPHALREKRTTVVAQLKQLQAETEPIVKMFEDPETTRQMQSTRDGRMLFDYLADKHGFRQEYLDTLYRYAKFQYECGNYSGAAEYLYFFRVLVPATDRNALSSLWGKLASEILMQNWDAAMERPYTVKRDHR

SEQ ID NO: 797550 - protein, 219 aa, Homo sapiens; identical to SEQ ID NO: 797548

SEQ ID NO: 797551 - protein, 112 aa, Homo sapiens
SSGINAEGPLRPGEHRLPFLWQEDGRMLFDYLADKHGFRQEYLDTLYRYAKFQYECGNYSGAAEYLYFFRVLVPATDRNALSSLWGKLASEILMQNWDAAMERPYTVKRDHR

SEQ ID NO: 797552 - protein, 131 aa, Homo sapiens
QIASSGLTMEVDAPKSQDLAKIMADIRDQYDELARKNREDLDKYWSQQIEESTTVVTTQSVEVAAAEMMLMELRRTVQSLETDLDSMRNLKASLENSLRDLEARYTLQMEQLNGILLHLESELAQTQAERQ

SEQ ID NO: 797553 - protein, 91 aa, Homo sapiens
KGAHLAKVCPRGRLGCCDDGYTGPCTRLSSRSCKRRHKNHSSFQEVPAASSTQQHCHHCKQPLTADLRMNMRAREEAAQPAASAAQFGRAC

SEQ ID NO: 797554 - protein, 141 aa, Homo sapiens
AYLSGVRDQGAGPTPLPLRRSPEPARSRKRGPGGRQVSGGGDGDGRGGGPGPGGPCGPAESPVGPRGQAQAEAAAGAYAGRSPDPSRAGGGRERGGKPGRERGRSRRLPWLPQPGPGASAGAGRDDAGCRARGLGSRRGRV

SEQ ID NO: 797555 - protein, 98 aa, Homo sapiens
DRPFITLLPATTLMSLTDSKQGKNRSGVRMFKDVDFLAPASGELWDRLRLTCSRPFTRHQSFGLAFLRVCSSLDSLDDSVVGPSALLSSVLNKVGEMF

SEQ ID NO: 797556 - protein, 70 aa, Homo sapiens
RTRSDPFPYLPTLSAGTSLLGCVSHLENIFSISLPEHHSLVLCSLRLSTGTSGAYCLKNAVIQAYTKSSS

SEQ ID NO: 797557 - protein, 119 aa, Homo sapiens
YFSDYGPRVMVIVTKKVDYWDKDVRQKLENCTKIFEKNVYVDKNLTEFWLDAYVQYLKGNSQDPNEKNTFMNNIPDFLSNFPNFQHDINISSSNEIISSRGFIQTTDVSSSAKKKILLF

SEQ ID NO: 797558 - protein, 113 aa, Homo sapiens
VPGRQTDGPGRRVMQCADSRMITSAESHPEFHSGIPPDFPSWIFDRLLTFVMGNAELMVFLFKSMLSSVFPVSILVIKQSPPFSYVHTSSPSASPVSSASRVYFKFVHFSSFP

SEQ ID NO: 797559 - protein, 105 aa, Homo sapiens [sequence omitted]

SEQ ID NO: 797560 - protein, 108 aa, Homo sapiens
MADLANEEKPAIAPPVFVFQKDKGQKSPAEQKNLSDSGEEPRGEAEAPHHGTGHPESAGEHALEPPAPAGASASTPPPPAPEAQLPPFPRELAGEEEKTLPLNPEGIP

SEQ ID NO: 797561 - protein, 58 aa, Homo sapiens
MSVSRNSQGTPLQTDNAACSPTDPLAGFTVTSLNRSPSAQVTCLGPLATVGWVLLEAT

SEQ ID NO: 797562 - protein, 114 aa, Homo sapiens
EGLSGLEVYFQGESLTYLARFCQVLAVVSSSPLRPLHRLLECPHDTTVGLLQSEQLKREQGRSYQIFMFEVMHHLFHEYPVDYFDQLVQSGRELHKGMNTPLARIIGGHLGSCV

SEQ ID NO: 797563 - protein, 282 aa, Homo sapiens
RSGQLLDAVHAAVLAGASAGLCAFQPEKDELLASLEKTIRPDVDQLLRQRARVAGRLRTDIRGPLESCLRREVDPQLPRVVQTLLRTVEASLEAVRTLLAQGMDRLSHRLRQSPSGTRLRREVYSFGEMPWDLALMQTCYREAERSRGRLGQLAAPFGFLGMQSLVFGAQDLAQQLMADAVATFLQLADQCLTTALNCDQAAQRLERVRGRVLKVCSVGTGWHGVAVGLGAQMVAGRTAGCVVQKFKSDSGLAQRRFIRGWGLCIFLPFVLSQLEPGCKKVS

SEQ ID NO: 797564 - protein, 263 aa, Homo sapiens
MGRRGRSASLLASPSRGPLHIPICEAPCGGDSRPVSSIPADIRGPLESCLRREVDPQLPRVVQTLLRTVEASLEAVRTLLAQGMDRLSHRLRQSPSGTRLRREVYSFGEMPWDLALMQTCYREAERSRGRLGQLAAPFGFLGMQSLVFGAQDLAQQLMADAVATFLQLADQCLTTALNCDQAAQRLERVRGRVLKVCSVGTGWHGVAVGLGAQMVAGRTAGCVVQKFKSDSGLAQRRFIRGWGLCIFLPFVLSQLEPGCKKVS

SEQ ID NO: 797565 - protein, 120 aa, Homo sapiens
EIIMGYKIKMPQANILVSPLVYLYPDIPKEEAFGKYCRPESQEHPEADPGSAAPYLKTKFICVTPTTCSNTIDLPMSPRTLDSLMQFGNNGEGAEPSAGGQFESLTFDMELTSECATSPM

SEQ ID NO: 797566 - protein, 72 aa, Homo sapiens
EIIMGYKIMDAQANILVSPLVYLYPDIPKEEAFGKYCRPESQEHPEADPGSAAPYLKTKFICVTPFIDAVWK

SEQ ID NO: 797567 - protein, 66 aa, Homo sapiens
GALPFLVSVAISSGSCSDNNAAVPTVLEGATTVISAAAVLRDPHDGAREIILEAMTISAVAIAAEM

SEQ ID NO: 797568 - protein, 77 aa, Homo sapiens
KCVITVGGSPGPFSTLFLESFHETLVHFPQKLRSQGLDIWISPKPQWFYVARTKNPWWHKQFEKAGNDLLGPYRKSS

SEQ ID NO: 797569 - protein, 126 aa, Homo sapiens
SPPHLLQTRVRDQTRPEGPSALWLGWCFLLSLSLMGHSWRHLLCSDHFFFFFFFETESRFIARLEYNDTISAHCKLRLLGSHHSPASASRVAGTTATRHHARLIFVFFVETGFHHVSQDGLDLLTS

SEQ ID NO: 797570 - protein, 68 aa, Homo sapiens
MVNGCNWENFTEALGHLKNTLLYQKPLNCVNLKWISCTLCKLYLNKALVKTLLLTPLCTSFTTLCFLE

SEQ ID NO: 797571 - protein, 323 aa, Homo sapiens
MASIWVGHRGTVRDYPDFSPSVDAEAIQKAIRGIGTDEKMLISILTERSNAQRQLIVKEYQAAYGKELKDDLKGDLSGHFEHLMVALVTPPAVFDAKQLKKSMKGAGTNEDALIEILTTRTSRQMKDISQAYYTVYKKSLGDDISSETSGDFRKALLTLADGRRDESLKVDEHLAKQDAQILYKAGENRWGTDEDKFTEILCLRSFPQLKLTFDEYRNISQKDIVDSIKGELSGHFEDLLLAIVNCVRNTPAFLAERLHRALKGIGTDEFTLNRIMVSRSEIDLLDIRTEFKKHYGYSLYSAIKSDTSGDYEITLLKICGGDD

SEQ ID NO: 797572 - protein, 165 aa, Homo sapiens
MASIWVGHRGTVRDYPDFSPSVDAEAIQKAIRGIGTDEKMLISILTERSNAQRQLIVKEYQAAYGKELKDDLKGDLSGHFEHLMVALVTPPAVFDAKQLKKSMKGAGTNEDALIEILTTRTSRQMKDISQAYYTVYKKSLGDDISSETSGDFRKALLTLADGRKK

SEQ ID NO: 797573 - protein, 95 aa, Homo sapiens
LNIICFLLQFNCVRNTPAFLAERLHRALKGIGTDEFTLNRIMVSRSEIDLLDIRTEFKKHYGYSLYSAIKSILLETMKSHSVKSVVYSNPGSTCS

SEQ ID NO: 797574 - protein, 323 aa, Homo sapiens; identical to SEQ ID NO: 797571

SEQ ID NO: 797575 - protein, 330 aa, Homo sapiens [sequence omitted]

SEQ ID NO: 797576 - protein, 317 aa, Homo sapiens
MASIWVGHRGTVRDYPDFSPSVDAEAIQKAIRGIGTDEKMLISILTERSNAQRQLIVKEYQAAYGKELKDDLKGDLSGHFEHLMVALVTPPAVFDAKQLKKSMKGAGTNEDALIEILTTRTSRQMKDISQAYYTVYKKSLGDDISSETSGDFRKALLTLADGRRDESLKVDEHLAKQDAQILYKAGENRWGTDEDKFTEILCLRSFPQLKLTFDEYRNISQKDIVDSIKGELSGHFEDLLLAIVNCVRNTPAFLAERLHRALKGIGTDEFTLNRIMVSRSEIDLLDIRTEFKKHYGYSLYSAIKSDTSGDPGQTTFV

SEQ ID NO: 797577 - protein, 437 aa, Homo sapiens
QSGGVERPEEGQEEGVRSRSGPGASAEHLRPRLTPSLAVCSQFTRTPVSPTALWISVISAQGKGGISWHLSGYTVSLCHLDYSAVTQSQLTAALTFCAQVVLPPQPPKSWDHTCTPPHLVGHRGTVRDYPDFSPSVDAEAIQKAIRGIGTDEKMLISILTERSNAQRQLIVKEYQAAYGKELKDDLKGDLSGHFEHLMVALVTPPAVFDAKQLKKSMKGAGTNEDALIEILTTRTSRQMKDISQAYYTVYKKSLGDDISSETSGDFRKALLTLADGRRDESLKVDEHLAKQDAQILYKAGENRWGTDEDKFTEILCLRSFPQLKLTFDEYRNISQKDIVDSIKGELSGHFEDLLLAIVNCVRNTPAFLAERLHRALKGIGTDEFTLNRIMVSRSEIDLLDIRTEFKKHYGYSLYSAIKSDTSGDYEITLLKICGGDD

SEQ ID NO: 797578 - protein, 305 aa, Homo sapiens
MASIWVGHRGTVRDYPDFSPSVDAEAIQKAIRGIGTDEVKEYQAAYGKELKDDLKGDLSGHFEHLMVALVTPPAVFDAKQLKKSMKGAGTNEDALIEILTTRTSRQMKDISQAYYTVYKKSLGDDISSETSGDFRKALLTLADGRRDESLKVDEHLAKQDAQILYKAGENRWGTDEDKFTEILCLRSFPQLKLTFDEYRNISQKDIVDSIKGELSGHFEDLLLAIVNCVRNTPAFLAERLHRALKGIGTDEFTLNRIMVSRSEIDLLDIRTEFKKHYGYSLYSAIKSDTSGDYEITLLKICGGDD

SEQ ID NO: 797579 - protein, 142 aa, Homo sapiens
MGTCPIGQTFNLMGEDLRTSLMQSTLKKSMKGAGTNEDALIEILTTRTSRQMKDISQAYYTVYKKSLGDDISSETSGDFRKALLTLADGRRLAIFSHQVGIYATNLFDCVFPLFLILFWPSNILLIDDYHTLISILPDGRKP

SEQ ID NO: 797580 - protein, 323 aa, Homo sapiens; identical to SEQ ID NO: 797571

SEQ ID NO: 797581 - protein, 351 aa, Homo sapiens
MASIWVGHRGTVRDYPDFSPSVDAEAIQKAIRGIGTDEKMLISILTERSNAQRQLIVKEYQAAYGKELKDDLKGDLSGHFEHLMVALVTPPAVFDAKQLKKSMKGAGTNEDALIEILTTRTSRQMKDISQAYYTVYKKSLGDDISSETSGDFRKALLTLADGRRDESLKVDEHLAKQDAQILYKAGENRWGTDEDKFTEILCLRSFPQLKLTFDEYRNISQKDIVDSIKGELSGHFEDLLLAIVNCVRNTPAFLAERLHRALKGIGTDEFTLNRIMVSRSEIDLLDIRTEFKKHYGYSLYSAIKSDTSGDYEITLLMGFSNSSTLLLLILFKRTSKYKQQLVFLTGIFIVL

SEQ ID NO: 797582 - protein, 323 aa, Homo sapiens; identical to SEQ ID NO: 797571

SEQ ID NO: 797583 - protein, 284 aa, Homo sapiens
MLISILTERSNAQRQLIVKEYQAAYGKELKDDLKGDLSGHFEHLMVALVTPPAVFDAKQLKKSMKGAGTNEDALIEILTTRTSRQMKDISQAYYTVYKKSLGDDISSETSGDFRKALLTLADGRRDESLKVDEHLAKQDAQILYKAGENRWGTDEDKFTEILCLRSFPQLKLTFDEYRNISQKDIVDSIKGELSGHFEDLLLAIVNCVRNTPAFLAERLHRALKGIGTDEFTLNRIMVSRSEIDLLDIRTEFKKHYGYSLYSAIKSDTSGDYEITLLKICGGDD

SEQ ID NO: 797584 - protein, 186 aa, Homo sapiens
WRGCGEIGTLLYCWWDCKLVQPLWKSVGRFLRDLELEIPFDPAIPLLGIYPKDYKSCCYKDTCTRMFIAALFTIAFTVFLSLYPIYYSIFCLPVSLPTSLPKLFRQNSPRNSLANCQILWPLSVPIFCHLSVEHSEYFLNFLPQLSIHCSHHSCCLFTSSFAAHLFLLVCHRAPSGMPGLPFLFPP

SEQ ID NO: 797585 - protein, 274 aa, Homo sapiens
MGTDSRAAKALLARARTLHLQTGNLLNWGRLRKKCPSTHSEELHDCIQKTLNEWSSQINPDLVREFPDVLECTVSHAVEKINPDEREEMKVSAKLFIVESNSSSSTRSAVDMACSVLGVAQLDSVIIASPPIEDGVNLSLEHLQPYWEELENLVQSKKIVAIGTSDLDKTQLEQLYQWAQVKPNSNQVNLASCCVMPPDLTAFAKQFDIQLLTHNDPKELLSEASFQEALQESIPDIQAHEWVPLWLLRYSVIVKSRGIIKSKGYILQAKRRGS

SEQ ID NO: 797586 - protein, 274 aa, Homo sapiens; identical to SEQ ID NO: 797585

SEQ ID NO: 797587 - protein, 274 aa, Homo sapiens; identical to SEQ ID NO: 797585

SEQ ID NO: 797588 - protein, 216 aa, Homo sapiens
MGTDSRAAKALLARARTLHLQTGNLLNWGRLRKKCPSTHSEELHDCIQKTLNEWSSQINPDLVREFPDVLECTVSHAVEKINPDEREEMKVSAKLFIVESNSSSSTRSAVDMACSVLGVAQLDSVIIASPPIEDGVNLSLEHLQPYWEELENLVQSKKIVAIGTSDLDKTQLEQLYQWAQAWGVKMMHLIALEVPVGCLVSGLERSELTSHRGSCL

SEQ ID NO: 797589 - protein, 117 aa, Homo sapiens
MRGLPLLSLLFSACPLVSRRKTSLFILLSWPCARSTLGQGEAWENGRRGALPTASLSAGPIHTKTLQLWALLEQPEAAETFQGLPILSPRREIVPSPHLGDSGRSVTFCIDSSWSLH

SEQ ID NO: 797590 - protein, 355 aa, Homo sapiens
MPALSTGSGSDTGLYELLAALPAQLQPHVDSQEDLTFLWDMFGEKSLHSLVKIHEKLHYYEKQSPVPILHGAAALADDLAEELQNKPLNSEIRELLKLLSKPNVKALLSVHDTVAQKNYDPVLPPMPEDIDDEEDSVKIIRLVKNREPLGATIKKDEQTGAIIVARIMRGGAADRSGLIHVGDELREVNGIPVEDKRPEEIIQILAQSQGAITFKIIPGSKEETPSKEGKMFIKALFDYNPNEDKAIPCKEAGLSFKKGDILQIMSQDDATWWQAKHEADANPRAGLIPSKHFQERRLALRRPEILVQPLKVSNRKSSGFRKSFRLSRKDKKTNKSMYECKKSDQYDTADVPTYE

SEQ ID NO: 797591 - protein, 355 aa, Homo sapiens; identical to SEQ ID NO: 797590

SEQ ID NO: 797592 - protein, 110 aa, Homo sapiens
MLKHGRAGVPMEVMGLMLGEFVDDYTVRVIDVFAMPQSGTGVSVEAVDPVFQAKMLDMLKQTGRPEMVVVGITVTLALVVGFLVWISTLSRALKPCRRELWQWLWIPFRV

SEQ ID NO: 797593 - protein, 139 aa, Homo sapiens
MLWGRGPPTDAPAVDTAEQVYISSLALLKMLKHGRAGVPMEVMGLMLGEFVDDYTVRVIDVFAMPQSGTGVSVEAVDPVFQAKMLDMLKQTGRPEMVVVGITVTLALVVGFLVWISTLSRALKPCRRELWQWLWIPFRV

SEQ ID NO: 797594 - protein, 109 aa, Homo sapiens
MMVLGHEPRQTTSNLGHLNKPSIQALIHGLNRHYYSITINYRKNELEQKMLLNLHKKSWMEGLTLQDYSEHCKHNESVVKEMLELAKNYNKAVEEEDQMTPEQLAIKEC

SEQ ID NO: 797595 - protein, 266 aa, Homo sapiens
MVRYSLDPENPTKSCKSRGSNLRVHFKNTRETAQAIKGMHIRKATKYLKDVTLQKQCVPFRRYNGGVGRCAQGKPMGLDTQVGGPKRVLNYCCIMLKNAESNAELKGLDVDSLVIEHIQVNKGAKMRRRTYRAHGRINPYMSSPWQIEMILTEKEQIVPKPEEEVAQKKRSSLKELAETRPVAGSKSDYTPLFSDDKATKNLLGHPPERSKRTGGDTQRTAMPPTNRATGRYQNRGQADQVRPAPSPHIPRRRHEPGQQRNKTAQH

SEQ ID NO: 797596 - protein, 266 aa, Homo sapiens; identical to SEQ ID NO: 797595

SEQ ID NO: 797597 - protein, 117 aa, Homo sapiens
SGSGKAAQFREGSRRAAARRHPAAPSPQAPGTRLPRRHPARAFPAARMPKRKVSSAEGAAKEEPKRRSARLSAKPPAKVEAKPKKAAAKDKSSDKKAQTKGKRGAKGKQAEVANQET

SEQ ID NO: 797598 - protein, 89 aa, Homo sapiens
  misc_feature (74)..(74): Xaa can be any naturally occurring amino acid
SGSGKAAQFREGSRRAAARRHPARAFPAARMPKRKVSSAEGAAKEEPKRRSARLSAKPPAKVEAKPKKAAAKFXVRSLSTHSSYRRGQD

SEQ ID NO: 797599 - protein, 127 aa, Homo sapiens [sequence omitted]

SEQ ID NO: 797600 - protein, 70 aa, Homo sapiens
ALRSSSGFAGGGDGDSDCDHEDKKMTTMMMVPMVIVVVIMVMVVMMKTMIRMVRMMMVIMMKMMMMVMWW

SEQ ID NO: 797601 - protein, 117 aa, Homo sapiens
  misc_feature (23)..(23): Xaa can be any naturally occurring amino acid
PHPQPTPYQTCRISRGCGEGPHXTPRQMCSVPRTAVQAVAHLRSLPASQLQPLTPPTQGRGSLVLRFIPKPMLRRPPARQSPRPWLPPSPLLHKEWWTRKGFSKVETLPKPLWRTLP

SEQ ID NO: 797602 - protein, 72 aa, Homo sapiens
NRIPGENLTKAIYTKVWAASRKTNRNDTPYTHNLKNHWEEDSQVIHHGHGSLTTSKTFMERGTCEEEVRPSV

SEQ ID NO: 797603 - protein, 54 aa, Homo sapiens
SPSSKLHLEVSSRDENITAEAGTWGRQGNHDTSSGRPLLSGLDTEPRHFSPRST

SEQ ID NO: 797604 - protein, 114 aa, Homo sapiens
IIPTSSDARTTAPMLQVERAVIAEACGRDSRRSSAEVLRKGQRVKLSTQEQSCRAEVGVEARPWPHGLRQVPEAQFAQDSLDLYQVRVLVQMVHSLVSKLAESLDVFLDAVGSR

SEQ ID NO: 797605 - protein, 731 aa, Homo sapiens
MSDTFTDNWTDGSHYDNTGFVAEETTAENANSNPLLSSKSRSTSSHGRRPLIRQDRIVGVPLELEQSTHRHTPETEVPPSNPWQNWTRTPSPFEDRTAFPSKLETTPTTSPLPERKEHIKESTEIPSPFSPGVPWEYHDSNPNRSLSNVFSQIHCRPESSKGVISISKSTERLSPLMKDIKSNKFKKSQSIDEIDIGTYKVYNIPLENYASGSDHLGSHERPDKMLGPEHGMSSMSRSQSVPMLDDEMLTYGSSKGPQQQKASMTKKVYQFDQSFNPQGSVEVKAEKRIPPPFQHNPEYVQQASKNIAKDLISPRAYRGYPPMEQMFSFSQPSVNEDAVVNAQFASQGARAGFLRRADSLVSATEMAMFRRVNEPHELPPTDRYGRPPYRGGLDRQSSVTVTESQFLKRNGRYEDEHPSYQEVKAQAGSFPVKNLTQRRPLSARSYSTESYGASQTRPVSARPTMAALLEKIPSDYNLGNYGDKPSDNSDLKTRPTPVKGEESCGKMPADWRQQLLRHIEARRLDRTPSQQSNILDNGQEDVSPSGQWNPYPLGRRDVPPDTITKKAGSHIQTLMGSQSLQHRSREQQPYEGNINKVTIQQFQSPLPIQIPSSQATRGPQPGRCLIQTKGQRSMDGYPEQFCVRIEKNPGLGFSISGGISGQGNPFKPSDKGIFVTRVQPDGPASNLLQPGDKILQANGHSFVHMEHEKAVLLLKSFQNTVDLVIQRELTV

SEQ ID NO: 797606 - protein, 159 aa, Homo sapiens
QSSVTVTESQFLKRNGRYEDEHPSYQEVKAQAGSFPVKNLTQRRPLSARSYSTESYGASQTRPVSARPTMAALLEKIPSDYNLGNYGDKPSDNSDLKTRPTPVKGEESCGKMPADWRQQLLRHIEARRLDRVCLVFLCKNIPPAFSVTLLAFLSTCSEA

SEQ ID NO: 797607 - protein, 850 aa, Homo sapiens
ELHPSLAETPLYPPKLVLLGKDKKESTDESEVDKTHCLNNSVSSGTYSDYSPSQASSGSSNTRVKVGSLQTTAKDAVHNSLWGNRIAPSFPQPLDSKPLLSQREAVPPGNIPQRPDRLPMSDTFTDNWTDGSHYDNTGFVAEETTAENANSNPLLSSKSRSTSSHGRRPLIRQDRIVGVPLELEQSTHRHTPETEVPPSNPWQNWTRTPSPFEDRTAFPSKLETTPTTSPLPERKEHIKESTEIPSPFSPGVPWEYHDSNPNRSLSNVFSQIHCRPESSKGVISISKSTERLSPLMKDIKSNKFKKSQSIDEIDIGTYKVYNIPLENYASGSDHLGSHERPDKMLGPEHGMSSMSRSQSVPMLDDEMLTYGSSKGPQQQKASMTKKVYQFDQSFNPQGSVEVKAEKRIPPPFQHNPEYVQQASKNIAKDLISPRAYRGYPPMEQMFSFSQPSVNEDAVVNAQFASQGARAGFLRRADSLVSATEMAMFRRVNEPHELPPTDRYGRPPYRGGLDRQSSVTVTESQFLKRNGRYEDEHPSYQEVKAQAGSFPVKNLTQRRPLSARSYSTESYGASQTRPVSARPTMAALLEKIPSDYNLGNYGDKPSDNSDLKTRPTPVKGEESCGKMPADWRQQLLRHIEARRLDRTPSQQSNILDNGQEDVSPSGQWNPYPLGRRDVPPDTITKKAGSHIQTLMGSQSLQHRSREQQPYEGNINKVTIQQFQSPLPIQIPSSQATRGPQPGRCLIQTKGQRSMDGYPEQFCVRIEKNPGLGFSISGGISGQGNPFKPSDKGIFVTRVQPDGPASNLLQPGDKILQANGHSFVHMEHEKAVLLLKSFQNTVDLVIQRELTV

SEQ ID NO: 797608 - protein, 47 aa, Homo sapiens
MGPWALPNHLLHDSAGSLAWAGIKEYGRGAISFHRKRTVVQEQGFLS

SEQ ID NO: 797609 - protein, 709 aa, Homo sapiens
MGKARRSPPGHHRHCEGCFNRHCHIPVEPNTSCLVISCHLLCGATFHMCKEAEHQLLCPLEQVPCLNSEYGCPLSMSRHKLAKHLQVCPASVVCCSMEWNRWPNVDSETTLHENIMKETPSEECLDTALALQDQKVLFRSLKMVELFPETREATEEEPTMNGETSVEEMGGAVGGVDIGLVPHGLSATNGEMAELSQEEREVLAKTKEGMDLVKFGQWENIFSKEHAASALTNSSASCESKNKNDSEKEQISSGHNMVEGEGAPKKKEPQENQKQQDVRTAMETTGLAPWQDGVLERLKTAVDAKDYNMYLVHNGRMLIHFGQMPACTPKERDFVYGKLEAQEVKTVYTFKVPVSYCGKRARLGDAMLSCKPSEHKAVDTSDLGITVEDLPKSDLIKTTLQCALERELKGHVISESRSIDGLFMDFATQTYNFEPEQFSSGTVLADLTAATPGGLHVELHSECVTRRHNKSSSAFTFTCNKFFRRDEFPLHFKNVHTDIQSCLNGWFQHRCPLAYLGCTFVQNHFRPPGQKAKVIYSQELKTFAIKPEVAPELSEGRKNNHLLGHGGKSQNSLTSLPLEILKYIAGFLDSVSLAQLSQVSVLMRNICATLLQERGMVLLQWKKKRYSHGGTSWRVHREIWQFSSLFSKIKSWEFNEVTSMSEHLKSCPFNIVEHKTDPILLTSMCQPREQARESLVSTFRIRPRGRYVS

SEQ ID NO: 797610 - protein, 108 aa, Homo sapiens
GSKLQCLLPGFLEVFLLASIGQVGSDIIALFLQPHEDAGGVQATTVGQNQGAFAGHSVWDWRREFPVSGICLHGAVNHSGPSSGGRRQSRSQLGCHFLKEAFPDFSSA

SEQ ID NO: 797611 - protein, 103 aa, Homo sapiens
CTHPPSAVPDRFPPQNLRNRTKPPLPAQVRFYKRDYTSSRLHGNDRASSLSTLPPWTFPNELLIYFLGKGRAQWLTPIIPALWEAKAGGSPEVRSSRPAWPTW

SEQ ID NO: 797612 - protein, 146 aa, Homo sapiens
MGFLRRLIYRRRPMIYVESSEESSDEQPDEVESPTQSQDSTPAEEREDEGASAAQGQEPEADSQELVQPKTGCELGDGPDTKRVCLRNEEQMKLPAEGPEPEADSQEQVHPKTGCERGDGPDVQELGLPNPEEVKTPEEDEGQSQP

SEQ ID NO: 797613 - protein, 281 aa, Homo sapiens
TQESFTPTEEHVLVVRLLLKHLHAFANSLKPEQASPSAHSHATSPLEEFKRAAVPRFIQQKLYLFLEHCFGHWPLDASFRAVLEMWLSYLQPWRYAPDKQASGSDSQPRCVSEKWAPFVQENLLMYTKLVVGFLNRALRTDLVSPKHALLVFRVAKVFAQPNLAEMIQKGEQLFLEPELVIPHRQHRLFTAPTFTGSFLSPWPPAVTDASFKVKSHVYSLEGQDCKYTPMFGPEARTLVLRLAQLITEAKHTAKSISDQCAESPAGHSFLSWLGFSSMDTS

SEQ ID NO: 797614 - protein, 273 aa, Homo sapiens
MGRGCVINRPRRALHAFANSLKPEQASPSAHSHATSPLEEFKRAAVPRFIQQKLYLFLEHCFGHWPLDASFRAVLEMWLSYLQPWRYAPDKQASGSDSQPRCVSEKWAPFVQENLLMYTKLVVGFLNRALRTDLVSPKHALLVFCVAKVFAQPNLAEMIQKGEQLFLEPELVIPHRQHRLFTAPTFTGSFLSPWPPAVTDASFKVKSHVYSLEGQDCKYTPMFGPEARTLVLRLAQLITEAKHTAKSISDQCAESPAGHSFLSWLGFSSMDTS

SEQ ID NO: 797615 - protein, 187 aa, Homo sapiens
RQAPVPKGTACATRCGFAAVQKQAWEALCRCVCLSEASPGVGCVGAGPSTSIPQAGHSSDQAVQGTSAGCQAQWCPMGWPHSRPGSCLLWGSRATGSVRDVVRPGGRVLWVPRSFPGPHPSFSTQESFTPTEEHVLVVRLLLKHLHAFANSLKPEQASPSAHSHATSPLEEFKRWVALAASHHCRLP

SEQ ID NO: 797616 - protein, 123 aa, Homo sapiens
LAGAWVPGTTRKAGPSMLRAWGTRRRRDLPLSLPLCIYKRVPLYLYLTVGARECDCAVCVCSACVCAWGRPVRARRLCAQEATGGVVCVVTSYLSSPSLYFTEGWHFGGVGNKVDIKGHFSCS

SEQ ID NO: 797617 - protein, 443 aa, Homo sapiens
  misc_feature (288)..(288): Xaa can be any naturally occurring amino acid
  misc_feature (290)..(290): Xaa can be any naturally occurring amino acid
  misc_feature (312)..(312): Xaa can be any naturally occurring amino acid
  misc_feature (318)..(318): Xaa can be any naturally occurring amino acid
  misc_feature (344)..(344): Xaa can be any naturally occurring amino acid
GVQRSRVSPALFELALCAGAEEIRELCSAGPFCEEGSTFGLPYLASLGIQSLVQQRAFAGKTANKLMDALKDSDLLHWKHSLSELIDISIAQKTAIWRLYGRSTMALQQAQMLLSMNSLEAVNAGVQQNNTESFAVALCHLAELHAEQGCFAAASEVLKHLKERFPPNSQHAQLWMLCDQKIQFDRAMNDGKYHLADSLVTGITALNSIEGVYRKAVVLQAQNQMSEAHKLLQKLLVHCQKLKNTEMVTQCPTVRGRTVLAIFLPYHRAAMLLQGELGTGPPSRSTVXRXKTIGAPSRELPVTLFGPLKPLXKLGFGXPHPWNPKTGLNSPPMAIEPILADGAXLDKGRAMFLVAKCQVGFSSFLRSAERKAEALEAAIENFNEAKNYFAKVDCKERIRDVVYFQARLYHTLGKTQERNRCAMLFRQLHQELPSHGVPLINHL

SEQ ID NO: 797618 - protein, 430 aa, Homo sapiens
  misc_feature (275)..(275): Xaa can be any naturally occurring amino acid
  misc_feature (277)..(277): Xaa can be any naturally occurring amino acid
  misc_feature (299)..(299): Xaa can be any naturally occurring amino acid
  misc_feature (305)..(305): Xaa can be any naturally occurring amino acid
  misc_feature (331)..(331): Xaa can be any naturally occurring amino acid
GVQRSRVSPALFELALCAGAEEIRELCSAGPFCEEGSTFGLPRAFAGKTANKLMDALKDSDLLHWKHSLSELIDISIAQKTAIWRLYGRSTMALQQAQMLLSMNSLEAVNAGVQQNNTESFAVALCHLAELHAEQGCFAAASEVLKHLKERFPPNSQHAQLWMLCDQKIQFDRAMNDGKYHLADSLVTGITALNSIEGVYRKAVVLQAQNQMSEAHKLLQKLLVHCQKLKNTEMVTQCPTVRGRTVLAIFLPYHRAAMLLQGELGTGPPSRSTVXRXKTIGAPSRELPVTLFGPLKPLXKLGFGXPHPWNPKTGLNSPPMAIEPILADGAXLDKGRAMFLVAKCQVGFSSFLRSAERKAEALEAAIENFNEAKNYFAKVDCKERIRDVVYFQARLYHTLGKTQERNRCAMLFRQLHQELPSHGVPLINHL

SEQ ID NO: 797619 - protein, 361 aa, Homo sapiens
  misc_feature (206)..(206): Xaa can be any naturally occurring amino acid
  misc_feature (208)..(208): Xaa can be any naturally occurring amino acid
  misc_feature (230)..(230): Xaa can be any naturally occurring amino acid
  misc_feature (236)..(236): Xaa can be any naturally occurring amino acid
  misc_feature (262)..(262): Xaa can be any naturally occurring amino acid
MAKAQPGLLLKGNPVPFSPPSTMALQQAQMLLSMNSLEAVNAGVQQNNTESFAVALCHLAELHAEQGCFAAASEVLKHLKERFPPNSQHAQLWMLCDQKIQFDRAMNDGKYHLADSLVTGITALNSIEGVYRKAVVLQAQNQMSEAHKLLQKLLVHCQKLKNTEMVTQCPTVRGRTVLAIFLPYHRAAMLLQGELGTGPPSRSTVXRXKTIGAPSRELPVTLFGPLKPLXKLGFGXPHPWNPKTGLNSPPMAIEPILADGAXLDKGRAMFLVAKCQVGFSSFLRSAERKAEALEAAIENFNEAKNYFAKVDCKERIRDVVYFQARLYHTLGKTQERNRCAMLFRQLHQELPSHGVPLINHL

SEQ ID NO: 797620 - protein, 123 aa, Homo sapiens
SRPGLYSHLLDQLYELNVLPPTARRSRLGVLFCPRPDGTADMHIIINGEDMGPSARGLPAAQPLYAVVDVFASTKSVRLVQLEYGLPSLQTLCRLVIQRSMVHRLAIDGLHLPKELKDFCKYE

SEQ ID NO: 797621 - protein, 107 aa, Homo sapiens
IHNSIARVLTVINQTHTKKTSGNSTRARGTSPWTCGLRKHAPAPLAQQARGEPEDQAAAAEGAAVPAAEVHSERLNVTLSIKESWPKRTKEKCVFNMQFCIHSTNIY

SEQ ID NO: 797622 - protein, 125 aa, Homo sapiens
SVPAPGVQQALESAKAEGEVGVLGAGQGVLRPHSPAAWPPPTPRWSRAPHFLSSPVVSPSTQCCPEMGFCLVLLRNSTLAAGKSGDPRSCAAATLRLLLPSCSGAGSAAFSSRGARSASPSGRSY

SEQ ID NO: 797623 - protein, 111 aa, Homo sapiens
RPAETRGEEAGGDGIRGLTGLGRGSGERPRRTGVKWDRGTGGVESEGWGGKEAETRLTWVHRKGAGVQCGGPRSKRGRCGHEEPEAGSWGAGEPRGQNWGAGGGVAEPRAW

SEQ ID NO: 797624 - protein, 38 aa, Homo sapiens
KHCENPCPVLFRSVLITSACSPQSCTPCLLNQSRPSHV

SEQ ID NO: 797625 - protein, 756 aa, Homo sapiens
MPSVSKAAAAALSGSPPQTEKPTHYRYLKEFRTEQCPLFSQHKCAQHRPFTCFHWHFLNQRRRRPLRRRDGTFNYSPDVYCSKYNEATGVCPDGDESLLGVLYPLWAPPPVPAPVGAPTVHPFLARWFSHVPWEPAGSADPRASSTPAGGTTWATGLLGDFDACGSQSRECVKGVWWTLLGFRCPYLHRTTGDTERKYHLRYYKTGTCIHETDARGHCVKNGLHCAFAHGPLDLRPPVCDVRELQAQEALQNGQLGGGEGVPDLQPGVLASQAMIEKILSEDPRWQALLPVALLRHRVAHFSDANFVLGSYKTEQCPKPPRLCRQGYACPHYHNSRDRRRNPRRFQYRSTPCPSVKHGDEWGEPSRCDGGDGCQYCHSRTEQQFHPEGPVGSPVSGAFSVFSHAGLVADPSLWYPAEWSWHHVGHSRTINPEGDKPSRLGPAPENIKRGNDFACDGRADAAGMAPHVCVFPIYKSTKCNDMRQTGYCPRGPFCAFAHVEKSLGMVNEWGCHDLHLTSPSSTGSGQPGNAKRRDSPAEGGPRGSEQDSKQGVRAHGVYVFEQNHLAVFAAVHPPAPSVSSSVASSLASSAGSGSSSPTALPAPPARALPLGPASSTVEAVLALEPTPSSPTSSAVQGVAGELGMGSGGQGCWSHVVGALAAVPAWTHSGDLEWDPSTIRTRVNVGGGPAARPAMTLAREPQLLVVGGCPTRNCSGPAASPQQLLDDAGQGGRGERDSSQRPLRPQTTHRQDTRPVPS

SEQ ID NO: 797626 - protein, 315 aa, Homo sapiens
MPSVSKAAAAALSGSPPQTEKPTHYRYLKEFRTEQCPLFSQHKCAQHRPFTCFHWHFLNQRRRRPLRRRDGTFNYSPDVYCSKYNEATGVCPDGDECPYLHRTTGDTERKYHLRYYKTGTCIHETDARGHCVKNGLHCAFAHGPLDLRPPVCDVRELQAQEALQNGQLGGGEGVPDLQPGVLASQAMIEKILSEDPRWQDANFVLGSYKTEQCPKPPRLCRQGYACPHYHNSRDRRRNPRRFQYRSTPCPSVKHGDEWGEPSRCDGGDGCQYCHSRTEQQFHPEVRPSNPPGVGVAGRSQRSCGVHSVVITQKEQ

SEQ ID NO: 797627 - protein, 319 aa, Homo sapiens
ISGGGGAGAAHARCIVLTENAVGFESGGSGAERVPPADGEADPLQHKCAQHRPFTCFHWHFLNQRRRRPLRRRDGTFNYSPDVYCSKYNEATGVCPDGDECPYLHRTTGDTERKYHLRYYKTGTCIHETDARGHCVKNGLHCAFAHGPLDLRPPVCDVRELQAQEALQNGQLGGGEGVPDLQPGVLASQAMIEKILSEDPRWQDANFVLGSYKTEQCPKPPRLCRQGYACPHYHNSRDRRRNPRRFQYRSTPCPSVKHGDEWGEPSRCDGGDGCQYCHSRTEQQFHPEVRPSNPPGVGVAGRSQRSCGVHSVVITQKEQ

SEQ ID NO: 797628 - protein, 294 aa, Homo sapiens
MAPHVCVFPIYKSTKCNDMRQTGYCPRGPFCAFAHVEKSLGMVNEWGCHDLHLTSPSSTGSGQPGNAKRRDSPAEGGPRGSEQDSKQGVRAHGVYVFEQNHLAVFAAVHPPAPSVSSSVASSLASSAGSGSSSPTALPAPPARALPLGPASSTVEAVLALEPTPSSPTSSAVQGVAGELGMGSGGQGCWSHVVGALAAVPAWTHSGDLEWDPSTIRTRVNVGGGPAARPAMTLAREPQLLVVGGCPTRNCSGPAASPQQLLDDAGQGGRGERDSSQRPLRPQTTHRQDTRPVPS

SEQ ID NO: 797629 - protein, 277 aa, Homo sapiens
MPSVSKAAAAALSGSPPQTEKPTHYRYLKEFRTEQCPLFSQHKCAQHRPFTCFHWHFLNQRRRRPLRRRDGTFNYSPDVYCSKYNEATGVCPDGDECPYLHRTTGDTERKYHLRYYKTGTCIHETDARGHCVKNGLHCAFAHGPLDLRPPVCDVRELQAQEALQNGQLGGGEGVPDLQPGVLASQAMIEKILSEDPRWQDANFVLGSYKTEQCPKPPRLCRQGYACPHYHNSRDRRRNPRRFQYSWQLGRRVLRLSPRANNPRVALPRVHTGPSSTA

SEQ ID NO: 797630 - protein, 175 aa, Homo sapiens
TTVSSACRELQAQEALQNGQLGGGEGVPDLQPGVLASQAMIEKILSEDPRWQDANFVLGSYKTEQCPKPPRLCRQGYACPHYHNSRDRRRNPRRFQYSEPAGPCSEDSGWWASFPARGSRCPPRGSNGRAALVAPSSPGGEGISKHSGCGRCHGGPRVCPGDGPPHLRSVSPMQS

SEQ ID NO: 797631 - protein, 244 aa, Homo sapiens
VVRQVQNSCLDGSGVCLAGSPLCILCPYLHRTTGDTERKYHLRYYKTGTCIHETDARGHCVKNGLHCAFAHGPLDLRPPVCDVRELQAQEALQNGQLGGGEGVPDLQPGVLASQAMIEKILSEDPRWQDANFVLGSYKTEQCPKPPRLCRQGYACPHYHNSRDRRRNPRRFQYRSTPCPSVKHGDEWGEPSRCDGGDGCQYCHSRTEQQFHPEVRPSNPPGVGVAGRSQRSCGVHSVVITQKEQ

SEQ ID NO: 797632 - protein, 713 aa, Homo sapiens
MAYKMRLYWAPNTFNLIFKFLFNNIDMESPYVAHAGSNSWPQGCSCLSLPKCWDYRHEPLHQALTHLINCKEEEQWTAVRYGLQGKRRTSSKMMIFRPVIPELWEPRRVDHLSPGVQDQPRKHSETTSLPKNTKISHACSPSYVIRGRLRWEDGLSPGGGGYSEPLYPNLGDRVRPHLKTKKDDLYYVGHLKKCSQSKSVDEHNPDHMLLLKMSTGLHKMDIHGHEMDINDFTYVEEENFRLETLGRSVDRIPYALQIRILSEGTFLSSQTQKSEYSFQPMVMLTYVFFFFFFFFGDGVLLCRPGWSAVTRSRLTASSASQIHAILLPQPPEELGLQTPTTTPGSFFVFLVETGFHRVSQDGLDLLTCDPFASASQSAGITGVSHRARPTYVFRKIFKMLKDDRYISRPYEVAQLVPGLVYYVYISHYFTESSHINPHNLKGLKDGFCATETYAQNDNSRDTFFILFFFFLRWSLTLSPWLECSGVISAHCSLHLPDSSDSHASASRVSWDYRCTPPAWVIFVFLVEMGFQHVGQADLGTPDLKDPPTSASQSAEITGVSHHAWPVMLLYNLKLPVLCSVSHEGHSPKGTLEITNMLKISNKVRDVGRHSYSYREQTIPSYRLCTEERAEGMRLLELESWLDEARKLTRCGGSYIGKKTLLWFLFFQIAKVNVSDCFKHDSLTSLHSKLFLCFQNDLLSNHFYFVLKQFWLFR

SEQ ID NO: 797633 - protein, 75 aa, Homo sapiens
AHASLRHAGREPVATPNTPLLLTPGLRPTLHGSTQKAARTTHTEAGISLTTRVCRGGAVDGPAPSVPIFLPKHIL

SEQ ID NO: 797634 - protein, 60 aa, Homo sapiens
RSIQADGLVWGSSKLVPVGYGIKKLQIQCVVEDDKVGTDMLEEQITAFEDYVQSMDVAAF

SEQ ID NO: 797635 - protein, 191 aa, Homo sapiens
MLVTLGLLTSFFSFLYMVAPSIRKFFAGGVCRTNVQLPGKVVVITGANTGIGKETARELASRGARVYIACRDVLKGESAASEIRVDTKNSQVLVRKLDLSDTKSIRAFAEGFLAEEKQLHILINNAGVMMCPYSKTADGFETHLGVNHLGHFLLTYLLLERLKVSAPARVVNVSSVAHHIGKIPFHDLQSE

SEQ ID NO: 797636 - protein, 109 aa, Homo sapiens [sequence omitted]

SEQ ID NO: 797637 - protein, 137 aa, Homo sapiens
  misc_feature (68)..(68): Xaa can be any naturally occurring amino acid
  misc_feature (127)..(127): Xaa can be any naturally occurring amino acid
TAKDLVTRLMEVEQDQRITAEEAISHEWISGNAASDKNIKDGVCAQIERGDARAKWKKAVRVTTLMKXAPGTRAVQHGCSPVGLSHKTLATPGGWQTVSAHPSHKMGSCHPSHLMAVSPQPPMEAFXPATDGECHPS

SEQ ID NO: 797638 - protein, 285 aa, Homo sapiens
PAGPAAWGPGRPRQQRAGDAGGSGAPPAQGTRGTLQGDPPASHRTVGGCKYCDRSFSISSNLQRHVRNIHNKEKPFKCHLCNRCFGQQTNLDRHLKKHEHENAPVSQHPGVLTNHLGTSASSPTSESDNHALLDEKEDSYFSEIRNFIANSEMNQASTRTEKRADMQIVDGSAQCPGLASEKQEDVEEEDDDDLEEDDEDSLAGKSQDDTVSPAPEPQAAYEDEEDEEPAASLAVGFDHTRSICNDAVLSEGNSSSKPLQGVSSWNAMRLRRSLGSPGTGSLGTY

SEQ ID NO: 797639 - protein, 219 aa, Homo sapiens
EDSVWLLLDSRRRREIPRADTMRSKARARKLAKSDGDVVNNMYEPNRDLLASHSAEDEAEDSAMSPIPVGSPPPFPTSEDFTPKEGSPYEAPVYIPEDIPIPADFELRESSIPGAGLGVWAKRKMEAGERLGPCVVVPRAAAKETDFGWEQILTDVEVSPQEGCITKISEDLGSEKFCVDANQAGAGSWLKYIRVACSCDDQNLTMCQISEQVMKVKLE

SEQ ID NO: 797640 - protein, 1297 aa, Homo sapiens
EDSVWLLLDSRRRREIPRADTMRSKARARKLAKSDGDVVNNMYEPNRDLLASHSAEDEAEDSAMSPIPVGSPPPFPTSEDFTPKEGSPYEAPVYIPEDIPIPADFELRESSIPGAGLGVWAKRKMEAGERLGPCVVVPRAAAKETDFGWEQILTDVEVSPQEGCITKISEDLGSEKFCVDANQAGAGSWLKYIRVACSCDDQNLTMCQISEQVIYYKVIKDIEPGEELLVHVKEGVYPLGTVPPGLDEEPTFRCDECDELFQSKLDLRRHKKYTCGSVGAALYEGLAEELKPEGLGGGSGQAHECKDCERMFPNKYSLEQHMVIHTEEREYKCDQCPKAFNWKSNFIRHQMSHDSGKRFECENCVKVFTDPSNLQRHIRSQHVGARAHACPDCGKTFATSSGLKQHKHIHSTVKPFICEVCHKSYTQFSNLCRHKRMHADCRTQIKCKDCGQMFSTTSSLNKHRRFCEGKNHYTPGGIFAPGLPLTPSPMMDKAKPSPSLNHASLGFNEYFPYRPHPGSLPFSTAPPTFPALTPGFPGIFPPSLYPRPPLLPPTPLLKSPLNHTQDAKLPSPLGNPALPLVSAVSNSSQGTTAAAGPEEKFESRLEDSCVEKLKTRSSDMSDGSDFEDVNTTTGTDLDTTTGTGSDLDSDVDSDLDKDKGKGKSAEGQPKFGGGLAPPGAPNSVAEVPVFYSQHSFFPPPDEQLLTATGAAGDSIKAIASIAEKYFGPGFMGMQEKKLGSLPYHSAFPFQFLPNFPHSLYPFTDRALAHNLLVKAEPKSPRDALKVGGPSAECPFDLTTKPKDVKPILPMPKGPSAPASGEEQPLDLSIGSRARASQNGGGREPRKNHVYGERKLGAGEGLPQVCPARMPQQPPLHYAKPSPFFMDPIYRVEKRKVTDPVGALKEKYLRPSPLLFHPQMSAIETMTEKLESFAAMKADSGSSLQPLPHHPFNFRSPPPTLSDPILRKGKERYTCRYCGKIFPRSANLTRHLRTHTGEQPYRCKYCDRSFSISSNLQRHVRNIHNKEKPFKCHLCNRCFGQQTNLDRHLKKHEHENAPVSQHPGVLTNHLGTSASSPTSESDNHALLDEKEDSYFSEIRNFIANSEMNQASTRTEKRADMQIVDGSAQCPGLASEKQEDVEEEDDDDLEEDDEDSLAGKSQDDTVSPAPEPQAAYEDEEDEEPAASLAVGFDHTRRCAEDHEGGLLALEPMPTFGKGLDLRRAAEEAFEVKDVLNSTLDSEALKHTLCRQAKNQAYAMMLSLSEDTPLHTPSQGSLDAWLKVTGATSESGAFHPINHL

SEQ ID NO: 797641 - protein, 1198 aa, Homo sapiens
EDSVWLLLDSRRRREIPRADTMRSKARARKLAKSDGDVVNNMYEPNRDLLASHSAEDEAEDSAMSPIPVGSPPPFPTSEDFTPKEGSPYEAPVYIPEDIPIPADFELRESSIPGAGLGVWAKRKMEAGERLGPCVVVPRAAAKETDFGWEQILTDVEVSPQEGCITKISEDLGSEKFCVDANQAGAGSWLKYIRVACSCDDQNLTMCQISEQVIYYKVIKDIEPGEELLVHVKEGVYPLGTVPPGLDEEPTFRCDECDELFQSKLDLRRHKKYTCGSVGAALYEGLAEELKPEGLGGGSGQAHECKDCERMFPNKYSLEQHMVIHTEEREYKCDQCPKAFNWKSNFIRHQMSHDSGKRFECENCVKVFTDPSNLQRHIRSQHVGARAHACPDCGKTFATSSGLKQHKHIHSTVKPFICEVCHKSYTQFSNLCRHKRMHADCRTQIKCKDCGQMFSTTSSLNKHRRFCEGKNHYTPGGIFAPGLPLTPSPMMDKAKPSPSLNHASLGFNEYFPYRPHPGSLPFSTAPPTFPALTPGFPGIFPPSLYPRPPLLPPTPLLKSPLNHTQDAKLPSPLGNPALPLVSAVSNSSQGTTAAAGPEEKFESRLEDSCVEKLKTRSSDMSDGSDFEDVNTTTGTDLDTTTGTGSDLDSDVDSDLDKDKGKGKSAEGQPKFGGGLAPPGAPNSVAEVPVFYSQHSFFPPPDEQLLTATGAAGDSIKAIASIAEKYFGPGFMGMQEKKLGSLPYHSAFPFQFLPNFPHSLYPFTDRALAHNLLVKAEPKSPRDALKVGGPSAECPFDLTTKPKDVKPILPMPKGPSAPASGEEQPLDLSIGSRARASQNGGGREPRKNHVYGERKLGAGEGLPQVCPARMPQQPPLHYAKPSPFFMDPIYRVEKRKVTDPVGALKEKYLRPSPLLFHPQMSAIETMTEKLESFAAMKADSGSSLQPLPHHPFNFRSPPPTLSDPILRKGKERYTCRYCGKIFPRSANLTRHLRTHTGEQPYRCKYCDRSFSISSNLQRHVRNIHNKEKPFKCHLCNRCFGQQTNLDRHLKKHEHENAPVSQHPGVLTNHLGTSASSPTSESDNHALLDEKEDSYFSEIRNFIANSEMNQASTRTEKRADMQIVDGSAQCPGLASEKQEDVEEEDDDDLEEDDEDSLAGKSQDDTVSPAPEPQAAYEDEEDEEPAASLAVGFDHTRRHMQ

SEQ ID NO: 797642 - protein, 223 aa, Homo sapiens
MRDEIATTVFFVTRLVKKHDKLSKQQIEDFAEKLMTILFETYRSHWHSDCPSKGQAFRCIRINNNQNKDPILERACVESNVDFSHLGLPKEMTIWVDPFEVCCRYGEKNHPFTVASFKGRWEEWELYQQISYAVSRASSDVSSGTSCDEESCSKEPRVIPKVSNPKSIYQVENLKQPFQSWLQIPRKKNVVDGRVGLLGNTYHGSQKHPKCYRPAMHRLDRIL

SEQ ID NO: 797643 - protein, 116 aa, Homo sapiens
ERFSDVRGCYCSRCGAAAAFVEASTGLYPADTPRRVMVPSHSPRQVPSPSWSSLVWGARGPDLRLSEGQGFPPYSALCILGQVTYLSEPHIPCSAQCSWLQGVFEAEMNGEGKAWR

SEQ ID NO: 797644 - protein, 106 aa, Homo sapiens
EEVGDTGADWRKVAKSLGEKSTDLKEASDESVHRSLSPKLSSQAALSFTTPRVPLSFKIHTQLSRPIALGACDSQVGFYTCLAAQLGGICFWGVSGRVQGPGCGFG

SEQ ID NO: 797645 - protein, 142 aa, Homo sapiens
MSDLFVFSSKLEGTPNLFVSRVPDGVVLGVEEPEGKAQGRVRGELCPGALARIHMGHSCTRLSAEGIAMLLGTAGPSRLPAAPDASQAPLRSPWALSVAAALCSPVSCHPCGRHVVTFGHCPAQGPWGLGTFGHSFFGCLCK

SEQ ID NO: 797646 - protein, 143 aa, Homo sapiens
MLRKTCGGQQEDSRGMGPHLPRVPDGVVLGVEEPEGKAQGRVRGELCPGALARIHMGHSCTRLSAEGIAMLLGTAGPSRLPAAPDASQAPLRSPWALSVAAALCSPVSCHPCGRHVVTFGHCPAQGPWGLGTFGHSFFGCLCK

SEQ ID NO: 797647 - protein, 128 aa, Homo sapiens
CFVLFFNKGATSSVKADKPGPAWSGREQAMGSPPGPGKACFTSGEIWRYQHPFPKATGISGLSPQSWALGPPATSSAEARSPQGSSVESEVSPSQRMDASAPGSLGRRRAAAVKNPAGWQGANTRCAH

SEQ ID NO: 797648 - protein, 121 aa, Homo sapiens [sequence omitted]

SEQ ID NO: 797649 - protein, 79 aa, Homo sapiens
DAHTSHCVAMAAGIQVSMNPAATILIKCFGQHHPLKCNDQQIGNTSVPPAQQVPNLKGPESKARVLVPAPQELQDTVHE

SEQ ID NO: 797650 - protein, 444 aa, Homo sapiens
MEPPGPVRGPLQDSSWYEPSAELVQTRMAVSLTAAETLALQGTQGQEKMMMMGPKEEEQSCEYETRLPGNHSTSQEIFRQRFRHLRYQETPGPREALSQLRVLCCEWLRPEKHTKEQILEFLVLEQFLTILPEELQSWVRGHHPKSGEEAVTVLEDLEKGLEPEPQVPGPAHGPAQEEPWEKKESLGAAQEALSIQLQPKETQPFPKSEQVYLHFLSVVTEDGPEPKDKGSLPQPPITEVESQVFSEKLATDTSTFEATSEGTLELQQRNPKAERLRWSPAQEESFRQMVVIHKEIPTGKKDHECSECGKTFIYNSHLVVHQRVHSGEKPYKCSDCGKTFKQSSNLGQHQRIHTGEKPFECNECGKAFRWGAHLVQHQRIHSGEKPYECNECGKAFSQSSYLSQHRRIHSGEKPFICKECGKAYGWCSELIRHRRVHARKEPSH

SEQ ID NO: 797651 - protein, 389 aa, Homo sapiens
MAVSLTAAETLALQGTQGQEKMMMMGPKEEEQSCEYETRLPGNHSTSQEIFRQRFRHLRYQETPGPREALSQLRVLCCEWLRPEKHTKEQILEFLVLEQFLTILPEELQSWVPGPAHGPAQEEPWEKKESLGAAQEALSIQLQPKETQPFPKSEQVYLHFLSVVTEDGPEPKDKGSLPQPPITEVESQVFSEKLATDTSTFEATSEGTLELQQRNPKAERLRWSPAQEESFRQMVVIHKEIPTGKKDHECSECGKTFIYNSHLVVHQRVHSGEKPYKCSDCGKTFKQSSNLGQHQRIHTGEKPFECNECGKAFRWGAHLVQHQRIHSGEKPYECNECGKAFSQSSYLSQHRRIHSGEKPFICKECGKAYGWCSELIRHRRVHARKEPSH

SEQ ID NO: 797652 - protein, 396 aa, Homo sapiens
MMMMGPKEEEQSCEYETRLPGNHSTSQEIFRQRFRHLRYQETPGPREALSQLRVLCCEWLRPEKHTKEQILEFLVLEQFLTILPEELQSWVRGHHPKSGEEAVTVLEDLEKGLEPEPQVPGPAHGPAQEEPWEKKESLGAAQEALSIQLQPKETQPFPKSEQVYLHFLSVVTEDGPEPKDKGSLPQPPITEVESQVFSEKLATDTSTFEATSEGTLELQQRNPKAERLRWSPAQEESFRQMVVIHKEIPTGKKDHECSECGKTFIYNSHLVVHQRVHSGEKPYKCSDCGKTFKQSSNLGQHQRIHTGEKPFECNECGKAFRWGAHLVQHQRIHSGEKPYECNECGKAFSQSSYLSQHRRIHSGEKPFICKECGKAYGWCSELIRHRRVHARKEPSH

SEQ ID NO: 797653 - protein, 156 aa, Homo sapiens
MVVIHKEIPTGKKDHECSECGKTFIYNSHLVVHQRVHSGEKPYKCSDCGKTFKQSSNLGQHQRIHTGEKPFECNECGKAFRWGAHLVQHQRIHSGEKPYECNECGKAFSQSSYLSQHRRIHSGEKPFICKECGKAYGWCSELIRHRRVHARKEPSH

SEQ ID NO: 797654 - protein, 156 aa, Homo sapiens; identical to SEQ ID NO: 797653

SEQ ID NO: 797655 - protein, 444 aa, Homo sapiens; identical to SEQ ID NO: 797650

SEQ ID NO: 797656 - protein, 156 aa, Homo sapiens; identical to SEQ ID NO: 797653

SEQ ID NO: 797657 - protein, 228 aa, Homo sapiens
MEPPGPVRGPLQDSSWYEPSAELVQTRMAVSLTAAETLALQGTQGQEKMMMMGPKEEEQSCEYETRLPGNHSTSQEIFRQRFRHLRYQETPGPREALSQLRVLCCEWLRPEKHTKEQILEFLVLEQFLTILPEELQSWVRGHHPKSGEEAVTVLEDLEKGLEPEPQVPGPAHGPAQEEPWEKKESLGAAQEALSIQLQPKETQPFPKSVVPEDGQSQDKGPAQHHYEG

SEQ ID NO: 797658 - protein, 370 aa, Homo sapiens
MKVTGITILFWPLSMILLSDKIQSSKREVQCNFTEKNYTLIPADIKKDVTILDLSYNQITLNGTDTRVLQTYFLLTELYLIENKVTILHNNGFGNLSSLEILNICRNSIYVIQQGAFLGLNKLKQLYLCQNKIEQLNADVFVPLRSLKLLNLQGNLISYLDVPPLFHLELITLYGNLWNCSCSLFNLQNWLNTSNVTLENENITMCSYPNSLQSYNIKTVPHKAECHSKFPSSVTEDLYIHFQPISNSIFNSSSNNLTRNSEHEPLGKSWAFLVGVVVTVLTTSLLIFIAIKCPIWYNILLSYNHHRLEEHEAETYEDGFTGNPSSLSQIPETNSEETTVIFEQLHSFVVDDDGFIEDKYIDIHELCEEN

SEQ ID NO: 797659 - protein, 370 aa, Homo sapiens; identical to SEQ ID NO: 797658

SEQ ID NO: 797660 - protein, 370 aa, Homo sapiens; identical to SEQ ID NO: 797658

SEQ ID NO: 797661 - protein, 615 aa, Homo sapiens
TFPFSRPTWLERGGGEPAARPQTPQPTAPESRGPSGASALRCRGPTARSLPAASMLGAPDESSVRVAVRIRPQLAKEKIEGCHICTSVTPGEPQVFLGKDKAFTFDYVFDIDSQQEQIYIQCIEKLIEGCFEGYNATVFAYGQTGAGKTYTMGTGFDVNIVEEELGIISRAVKHLFKSIEEKKHIAIKNGLPAPDFKVNAQFLELYNEEVLDLFDTTRDIDAKSKKSNIRIHEDSTGGIYTVGVTTRTVNTESEMMQCLKLGALSRTTASTQMNVQSSRSHAIFTIHVCQTRVCPQIDADNATDNKIISESAQMNEFETLTAKFHFVDLAGSERLKRTGATGERAKEGISINCGLLALGNVISALGDKSKRATHVPYRDSKLTRLLQDSLGGNSQTIMIACVSPSDRDFMETLNTLKYANRARNIKNKVMVNQDRASQQINALRSEITRLQMELMEYKTGKRIIDEEGVESINDMFHENAMLQTENNNLRVRIKAMQETVDALRSRITQLVSDQANHVLARAGEGNEEISNMIHSYIKEIEDLRAKLLESEAVNENLRKNLTRATARAPYFSGSSTFSPTILSSDKETIEIIDLAKKDLEKLKKKRKEEEKKCGW

SEQ ID NO: 797662 - protein, 1722 aa, Homo sapiens
TFPFSRPTWLERGGGEPAARPQTPQPTAPESRGPSGASALRCRGPTARSLPAASMLGAPDESSVRVAVRIRPQLAKEKIEGCHICTSVTPGEPQVFLGKDKAFTFDYVFDIDSQQEQIYIQCIEKLIEGCFEGYNATVFAYGQTGAGKTYTMGTGFDVNIVEEELGIISRAVKHLFKSIEEKKHIAIKNGLPAPDFKVNAQFLELYNEEVLDLFDTTRDIDAKSKKSNIRIHEDSTGGIYTVGVTTRTVNTESESLFLPLFQMMQCLKLGALSRTTASTQMNVQSSRSHAIFTIHVCQTRVCPQIDADNATDNKIISESAQMNEFETLTAKFHFVDLAGSERLKRTGATGERAKEGISINCGLLALGNVISALGDKSKRATHVPYRDSKLTRLLQDSLGGNSQTIMIACVSPSDRDFMETLNTLKYANRARNIKNKVMVNQDRASQQINALRSEITRLQMELMEYKTGKRIIDEEGVESINDMFHENAMLQTENNNLRVRIKAMQETVDALRSRITQLVSDQANHVLARAGEGNEEISNMIHSYIKEIEDLRAKLLESEAVNENLRKNLTRATARAPYFSGSSTFSPTILSSDKETIEIIDLAKKDLEKLKRKEKRKKKSVAGKEDNTDTDQEKKEEKGVSERENNELEVEESQEVSDHEDEEEEEEEEEDDIDGGESSDESDSESDEKANYQADLANITCEIAIKQKLIDELENSQKRLQTLKKQYEEKLMMLQHKIRDTQLERDQVLQNLGSVESYSEEKAKKVRSEYEKKLQAMNKELQRLQAAQKEHARLLKNQSQYEKQLKKLQQDVMEMKKTKVRLMKQMKEEQEKARLTESRRNREIAQLKKDQRKRDHQLRLLEAQKRNQEVVLRRKTEEVTALRRQVRPMSDKVAGKVTRKLSSSDAPAQDTGSSAAAVETDASRTGAQQKMRIPVARVQALPTPATNGNRKKYQRKGLTGRVFISKTARMKWQLLERRVTDIIMQKMTISNMEADMNRLLKQREELTKRREKLSKRREKIVKENGEGDKNVANINEEMESLTANIDYINDSISDCQANIMQMEEAKEEGETLDVTAVINACTLTEARYLLDHFLSMGINKGLQAAQKEAQIKVLEGRLKQTEITSATQNQLLFHMLKEKAELNPELDALLGHALQDLDSVPLENVEDSTDEDAPLNSPGSEGSTLSSDLMKLCGEVKPKNKARRRTTTQMELLYADSSELASDTSTGDASLPGPLTPVAEGQEIGMNTETSGTSAREKELSPPPGLPSKIGSISRQSSLSEKKIPEPSPVTRRKAYEKAEKSKAKEQKHSDSGTSEASLSPPSSPPSRPRNELNVFNRLTVSQGNTSVQQDKSDESDSSLSEVHRYFRGIINPFPASKGIRAFPLQCIHIAEGHTKAVLCVDSTDDLLFTGSKDRTCKVWNLVTGQEIMSLGGHPNNVVSVKYCNYTSLVFTVSTSYIKVWDIRDSAKCIRTLTSSGQVTLGDACSASTSRTVAIPSGENQINQIALNPTGTFLYAASGNAVRMWDLKRFQSTGKLTGHLGPVMCLTVDQISSGQDLIITGSKDHYIKMFDVTEGALGTVSPTHNFEPPHYDGIEALTIQGDNLFSGSRDNGIKKWDLTQKDLLQQVPNAHKDWVCALGVVPDHPVLLSGCRGGILKVWNMDTFMPVGEMKGHDSPINAICVNSTHIFTAADDRTVRIWKARNLQDGQISDTGDLGEDIASN

SEQ ID NO: 797663 - protein, 1442 aa, Homo sapiens
MNVQSSRSHAIFTIHVCQTRVCPQIDADNATDNKIISESAQMNEFETLTAKFHFVDLAGSERLKRTGATGERAKEGISINCGLLALGNVISALGDKSKRATHVPYRDSKLTRLLQDSLGGNSQTIMIACVSPSDRDFMETLNTLKYANRARNIKNKVMVNQDRASQQINALRSEITRLQMELMEYKTGKRIIDEEGVESINDMFHENAMLQTENNNLRVRIKAMQETVDALRSRITQLVSDQANHVLARAGEGNEEISNMIHSYIKEIEDLRAKLLESEAVNENLRKNLTRATARAPYFSGSSTFSPTILSSDKETIEIIDLAKKDLEKLKRKEKRKKKSVAGKEDNTDTDQEKKEEKGVSERENNELEVEESQEVSDHEDEEEEEEEEEDDIDGGESSDESDSESDEKANYQADLANITCEIAIKQKLIDELENSQKRLQTLKKQYEEKLMMLQHKIRDTQLERDQVLQNLGSVESYSEEKAKKVRSEYEKKLQAMNKELQRLQAAQKEHARLLKNQSQYEKQLKKLQQDVMEMKKTKVRLMKQMKEEQEKARLTESRRNREIAQLKKDQRKRDHQLRLLEAQKRNQEVVLRRKTEEVTALRRQVRPMSDKVAGKVTRKLSSSDAPAQDTGSSAAAVETDASRTGAQQKMRIPVARVQALPTPATNGNRKKYQRKGLTGRVFISKTARMKWQLLERRVTDIIMQKMTISNMEADMNRLLKQREELTKRREKLSKRREKIVKENGEGDKNVANINEEMESLTANIDYINDSISDCQANIMQMEEAKEEGETLDVTAVINACTLTEARYLLDHFLSMGINKGLQAAQKEAQIKVLEGRLKQTEITSATQNQLLFHMLKEKAELNPELDALLGHALQDLDSVPLENVEDSTDEDAPLNSPGSEGSTLSSDLMKLCGEVKPKNKARRRTTTQMELLYADSSELASDTSTGDASLPGPLTPVAEGQEIGMNTETSGTSAREKELSPPPGLPSKIGSISRQSSLSEKKIPEPSPVTRRKAYEKAEKSKAKEQKHSDSGTSEASLSPPSSPPSRPRNELNVFNRLTVSQGNTSVQQDKSDESDSSLSEVHRYFRGIINPFPASKGIRAFPLQCIHIAEGHTKAVLCVDSTDDLLFTGSKDRTCKVWNLVTGQEIMSLGGHPNNVVSVKYCNYTSLVFTVSTSYIKVWDIRDSAKCIRTLTSSGQVTLGDACSASTSRTVAIPSGENQINQIALNPTGTFLYAASGNAVRMWDLKRFQSTGKLTGHLGPVMCLTVDQISSGQDLIITGSKDHYIKMFDVTEGALGTVSPTHNFEPPHYDGIEALTIQGDNLFSGSRDNGIKKWDLTQKDLLQQVPNAHKDWVCALGVVPDHPVLLSGCRGGILKVWNMDTFMPVGEMKGHDSPINAICVNSTHIFTAADDRTVRIWKARNLQDGQISDTGDLGEDIASN

SEQ ID NO: 797664 - protein, 1655 aa, Homo sapiens
TFPFSRPTWLERGGGEPAARPQTPQPTAPESRGPSGASALRCRGPTARSLPAASMLGAPDESSVRVAVRIRPQLAKEKIEGCHICTSVTPGEPQVFLGKDKAFTFDYVFDIDSQQEQIYIQCIEKLIEGCFEGYNATVFAYGQTGAGKTYTMGTGFDVNIVEEELGIISRAVKHLFKSIEEKKHIAIKNGLPAPDFKVNAQFLELYNEEVLDLFDTTRDIDAKSKKSNIRIHEDSTGGIYTVGVTTRTVNTESEMMQCLKLGALSRTTASTQMNVQSSRSHAIFTIHVCQTRVCPQIDADNATDNKIISESAQMNEFETLTAKFHFVDLAGSERLKRTGATGERAKEGISINCGLLALGNVISALGDKSKRATHVPYRDSKLTRLLQDSLGGNSQTIMIACVSPSDRDFMETLNTLKYANRARNIKNKVMVNQDRASQQINALRSEITRLQMELMEYKTGKRIIDEEGVESINDMFHENAMLQTENNNLRVRIKAMQETVDALRSRITQLVSDQANHVLARAGEGNEEISNMIHSYIKEIEDLRAKLLESEAVNENLRKNLTRATARAPYFSGSSTFSPTILSSDKETIEIIDLAKKDLEKLKRKEKRKKKSVAGKEDNTDTDQEKKEEKGVSERENNELEVEESQEVSDHEDEEEEEEEEEDDIDGGESSDESDSESDEKANYQADLANITCEIAIKQKLIDELENSQKRLQTLKKQYEEKLMMLQHKIRDTQLERDQVLQNLGSVESYSEEKAKKVRSEYEKKLQAMNKELQRLQAAQKEHARLLKNQSQYEKQLKKLQQDVMEMKKTKVRLMKQMKEEQEKARLTESRRNREIAQLKKDQRKRDHQLRLLEAQKRNQEVVLRRKTEEVTALRRQVRPMSDKVAGKVTRKLSSSDAPAQDTGSSAAAVETDASRTGAQQKMRIPVARVQALPTPATNGNRKKYQRKGLTGRVFISKTARMKWQLLERRVTDIIMQKMTISNMEADMNRLLKQREELTKRREKLSKRREKIVKENGEGDKNVANINEEMESLTANIDYINDSISDCQANIMQMEEAKEEGETLDVTAVINACTLTEARYLLDHFLSMGINKGLQAAQKEAQIKVLEGRLKQTEITSATQNQLLFHMLKEKAELNPELDALLGHALQDLDSVPLENVEDSTDEDAPLNSPGSEGSTLSSDLMKLCGEVKPKNKARRRTTTQMELLYADSSELASDTSTGDASLPGPLTPVAEGQEIGMNTETSGTSAREKELSPPPGLPSKIGSISRQSSLSEKKIPEPSPVTRRKAYEKAEKSKAKEQKQGIINPFPASKGIRAFPLQCIHIAEGHTKAVLCVDSTDDLLFTGSKDRTCKVWNLVTGQEIMSLGGHPNNVVSVKYCNYTSLVFTVSTSYIKVWDIRDSAKCIRTLTSSGQVTLGDACSASTSRTVAIPSGENQINQIALNPTGTFLYAASGNAVRMWDLKRFQSTGKLTGHLGPVMCLTVDQISSGQDLIITGSKDHYIKMFDVTEGALGTVSPTHNFEPPHYDGIEALTIQGDNLFSGSRDNGIKKWDLTQKDLLQQVPNAHKDWVCALGVVPDHPVLLSGCRGGILKVWNMDTFMPVGEMKGHDSPINAICVNSTHIFTAADDRTVRIWKARNLQDGQISDTGDLGEDIASN

SEQ ID NO: 797665 - protein, 1698 aa, Homo sapiens
TFPFSRPTWLERGGGEPAARPQTPQPTAPESRGPSGASALRCRGPTARSLPAASMLGAPDESSVRVAVRIRPQLAKEKIEGCHICTSVTPGEPQVFLGKDKAFTFDYVFDIDSQQEQIYIQCIEKLIEGCFEGYNATVFAYGQTGAGKTYTMGTGFDVNIVEEELGIISRAVKHLFKSIEEKKHIAIKNGLPAPDFKVNAQFLELYNEEVLDLFDTTRDIDAKSKKSNIRIHEDSTGGIYTVGVTTRTVNTESEMMQCLKLGALSRTTASTQMNVQSSRSHAIFTIHVCQTRVCPQIDADNATDNKIISESAQMNEFETLTAKFHFVDLAGSERLKRTGATGERAKEGISINCGLLALGNVISALGDKSKRATHVPYRDSKLTRLLQDSLGGNSQTIMIACVSPSDRDFMETLNTLKYANRARNIKNKVMVNQDRASQQINALRSEITRLQMELMEYKTGKRIIDEEGVESINDMFHENAMLQTENNNLRVRIKAMQETVDALRSRITQLVSDQANHVLARAGEGNEEISNMIHSYIKEIEDLRAKLLESEAVNENLRKNLTRATARAPYFSGSSTFSPTILSSDKETIEIIDLAKKDLEKLKRKEKRKKKSVAGKEDNTDTDQEKKEEKGVSERENNELEVEESQEVSDHEDEEEEEEEEEDDIDGGESSDESDSESDEKANYQADLANITCEIAIKQKLIDELENSQKRLQTLKKQYEEKLMMLQHKIRDTQLERDQVLQNLGSVESYSEEKAKKVRSEYEKKLQAMNKELQRLQAAQKEHARLLKNQSQYEKQLKKLQQDVMEMKKTKVRLMKQMKEEQEKARLTESRRNREIAQLKKDQRKRDHQLRLLEAQKRNQEVVLRRKTEEVTALRRQVRPMSDKVAGKVTRKLSSSDAPAQDTGSSAAAVETDASRTGAQQKMRIPVARVQALPTPATNGNRKKYQRKGLTGRVFISKTARMKWQLLERRVTDIIMQKMTISNMEADMNRLLKQREELTKRREKLSKRREKIVKENGEGDKNVANINEEMESLTANIDYINDSISDCQANIMQMEEAKEEGETLDVTAVINACTLTEARYLLDHFLSMGINKGLQAAQKEAQIKVLEGRLKQTEITSATQNQLLFHMLKEKAELNPELDALLGHALQDLDSVPLENVEDSTDEDAPLNSPGSEGSTLSSDLMKLCGEVKPKNKARRRTTTQMELLYADSSELASDTSTGDASLPGPLTPVAEGQEIGMNTETSGTSAREKELSPPPGLPSKIGSISRQSSLSEKKIPEPSPVTRRKAYEKAEKSKAKEQKHSDSGTSEASLSPPSSPPSRPRNELNVFNRLTVSQGNTSVQQDKGIINPFPASKGIRAFPLQCIHIAEGHTKAVLCVDSTDDLLFTGSKDRTCKVWNLVTGQEIMSLGGHPNNVVSVKYCNYTSLVFTVSTSYIKVWDIRDSAKCIRTLTSSGQVTLGDACSASTSRTVAIPSGENQINQIALNPTGTFLYAASGNAVRMWDLKRFQSTGKLTGHLGPVMCLTVDQISSGQDLIITGSKDHYIKMFDVTEGALGTVSPTHNFEPPHYDGIEALTIQGDNLFSGSRDNGIKKWDLTQKDLLQQVPNAHKDWVCALGVVPDHPVLLSGCRGGILKVWNMDTFMPVGEMKGHDSPINAICVNSTHIFTAADDRTVRIWKARNLQDGQISDTGDLGEDIASN

SEQ ID NO: 797666 - protein, 1714 aa, Homo sapiens
TFPFSRPTWLERGGGEPAARPQTPQPTAPESRGPSGASALRCRGPTARSLPAASMLGAPDESSVRVAVRIRPQLAKEKIEGCHICTSVTPGEPQVFLGKDKAFTFDYVFDIDSQQEQIYIQCIEKLIEGCFEGYNATVFAYGQTGAGKTYTMGTGFDVNIVEEELGIISRAVKHLFKSIEEKKHIAIKNGLPAPDFKVNAQFLELYNEEVLDLFDTTRDIDAKSKKSNIRIHEDSTGGIYTVGVTTRTVNTESEMMQCLKLGALSRTTASTQMNVQSSRSHAIFTIHVCQTRVCPQIDADNATDNKIISESAQMNEFETLTAKFHFVDLAGSERLKRTGATGERAKEGISINCGLLALGNVISALGDKSKRATHVPYRDSKLTRLLQDSLGGNSQTIMIACVSPSDRDFMETLNTLKYANRARNIKNKVMVNQDRASQQINALRSEITRLQMELMEYKTGKRIIDEEGVESINDMFHENAMLQTENNNLRVRIKAMQETVDALRSRITQLVSDQANHVLARAGEGNEEISNMIHSYIKEIEDLRAKLLESEAVNENLRKNLTRATARAPYFSGSSTFSPTILSSDKETIEIIDLAKKDLEKLKRKEKRKKKSVAGKEDNTDTDQEKKEEKGVSERENNELEVEESQEVSDHEDEEEEEEEEEDDIDGGESSDESDSESDEKANYQADLANITCEIAIKQKLIDELENSQKRLQTLKKQYEEKLMMLQHKIRDTQLERDQVLQNLGSVESYSEEKAKKVRSEYEKKLQAMNKELQRLQAAQKEHARLLKNQSQYEKQLKKLQQDVMEMKKTKVRLMKQMKEEQEKARLTESRRNREIAQLKKDQRKRDHQLRLLEAQKRNQEVVLRRKTEEVTALRRQVRPMSDKVAGKVTRKLSSSDAPAQDTGSSAAAVETDASRTGAQQKMRIPVARVQALPTPATNGNRKKYQRKGLTGRVFISKTARMKWQLLERRVTDIIMQKMTISNMEADMNRLLKQREELTKRREKLSKRREKIVKENGEGDKNVANINEEMESLTANIDYINDSISDCQANIMQMEEAKEEGETLDVTAVINACTLTEARYLLDHFLSMGINKGLQAAQKEAQIKVLEGRLKQTEITSATQNQLLFHMLKEKAELNPELDALLGHALQDLDSVPLENVEDSTDEDAPLNSPGSEGSTLSSDLMKLCGEVKPKNKARRRTTTQMELLYADSSELASDTSTGDASLPGPLTPVAEGQEIGMNTETSGTSAREKELSPPPGLPSKIGSISRQSSLSEKKIPEPSPVTRRKAYEKAEKSKAKEQKHSDSGTSEASLSPPSSPPSRPRNELNVFNRLTVSQGNTSVQQDKSDESDSSLSEVHRYFRGIINPFPASKGIRAFPLQCIHIAEGHTKAVLCVDSTDDLLFTGSKDRTCKVWNLVTGQEIMSLGGHPNNVVSVKYCNYTSLVFTVSTSYIKVWDIRDSAKCIRTLTSSGQVTLGDACSASTSRTVAIPSGENQINQIALNPTGTFLYAASGNAVRMWDLKRFQSTGKLTGHLGPVMCLTVDQISSGQDLIITGSKDHYIKMFDVTEGALGTVSPTHNFEPPHYDGIEALTIQGDNLFSGSRDNGIKKWDLTQKDLLQQVPNAHKDWVCALGVVPDHPVLLSGCRGGILKVWNMDTFMPVGEMKGHDSPINAICVNSTHIFTAADDRTVRIWKARNLQDGQISDTGDLGEDIASN

SEQ ID NO: 797667 - protein, 1698 aa, Homo sapiens; identical to SEQ ID NO: 797665

SEQ ID NO: 797668 - protein, 1124 aa, Homo sapiens
EKKDRGRKKATELKESIEKKKSVAGKEDNTDTDQEKKEEKGVSERENNELEVEESQEVSDHEDEEEEEEEEEDDIDGGESSDESDSESDEKANYQADLANITCEIAIKQKLIDELENSQKRLQTLKKQYEEKLMMLQHKIRDTQLERDQVLQNLGSVESYSEEKAKKVRSEYEKKLQAMNKELQRLQAAQKEHARLLKNQSQYEKQLKKLQQDVMEMKKTKVRLMKQMKEEQEKARLTESRRNREIAQLKKDQRKRDHQLRLLEAQKRNQEVVLRRKTEEVTALRRQVRPMSDKVAGKVTRKLSSSDAPAQDTGSSAAAVETDASRTGAQQKMRIPVARVQALPTPATNGNRKKYQRKGLTGRVFISKTARMKWQLLERRVTDIIMQKMTISNMEADMNRLLKQREELTKRREKLSKRREKIVKENGEGDKNVANINEEMESLTANIDYINDSISDCQANIMQMEEAKEEGETLDVTAVINACTLTEARYLLDHFLSMGINKGLQAAQKEAQIKVLEGRLKQTEITSATQNQLLFHMLKEKAELNPELDALLGHALQDLDSVPLENVEDSTDEDAPLNSPGSEGSTLSSDLMKLCGEVKPKNKARRRTTTQMELLYADSSELASDTSTGDASLPGPLTPVAEGQEIGMNTETSGTSAREKELSPPPGLPSKIGSISRQSSLSEKKIPEPSPVTRRKAYEKAEKSKAKEQKHSDSGTSEASLSPPSSPPSRPRNELNVFNRLTVSQGNTSVQQDKSDESDSSLSEVHRYFRGIINPFPASKGIRAFPLQCIHIAEGHTKAVLCVDSTDDLLFTGSKDRTCKVWNLVTGQEIMSLGGHPNNVVSVKYCNYTSLVFTVSTSYIKVWDIRDSAKCIRTLTSSGQVTLGDACSASTSRTVAIPSGENQINQIALNPTGTFLYAASGNAVRMWDLKRFQSTGKLTGHLGPVMCLTVDQISSGQDLIITGSKDHYIKMFDVTEGALGTVSPTHNFEPPHYDGIEALTIQGDNLFSGSRDNGIKKWDLTQKDLLQQVPNAHKDWVCALGVVPDHPVLLSGCRGGILKVWNMDTFMPVGEMKGHDSPINAICVNSTHIFTAADDRTVRIWKARNLQDGQISDTGDLGEDIASN

SEQ ID NO: 797669 - protein, 585 aa, Homo sapiens
TFPFSRPTWLERGGGEPAARPQTPQPTAPESRGPSGASALRCRGPTARSLPAASMLGAPDESSVRVAVRIRPQLAKEKIEGCHICTSVTPGEPQVFLGKDKAFTFDYVFDIDSQQEQIYIQCIEKLIEGCFEGYNATVFAYGQTGAGKTYTMGTGFDVNIVEEELGIISRAVKHLFKSIEEKKHIAIKNGLPAPDFKVNAQFLELYNEEVLDLFDTTRDIDAKSKKSNIRIHEDSTGGIYTVGVTTRTVNTESEMMQCLKLGALSRTTASTQMNVQSSRSHAIFTIHVCQTRVCPQIDADNATDNKIISESAQMNEFETLTAKFHFVDLAGSERLKRTGATGERAKEGISINCGLLALGNVISALGDKSKRATHVPYRDSKLTRLLQDSLGGNSQTIMIACVSPSDRDFMETLNTLKYANRARNIKNKVMVNQDRASQQINALRSEITRLQMELMEYKTGKRIIDEEGVESINDMFHENAMLQTENNNLRVRIKAMQETVDALRSRITQLVSDQANHVLARAGEGNEEISNMIHSYIKEIEDLRYSSCSVTYNAHVCFGFCNVIIFLFVGLSVQQLSMVIFQPFG

SEQ ID NO: 797670 - protein, 287 aa, Homo sapiens
RSGIAERVEKEKAQAVEQQAKKRLEQQKLTVIATSTTSPTSSTTSTISPAQKVMVAPISGSVTTGTKMVLTTKVGSPATVTFQQNKNFHQTFATWVKQGQSNSGVVQVQQKVLGIIPSSTGTSQQTFTSFQPRTATVTIRPNTSGSGGTTSNSQVITGPQIRPGMTVIRTPLQQSTLGKAIIRTPVMVQPGAPQQVMIQIIRGQPVSTAVSAPNTVSSTPGQKSLTSATSTSNIQSLASQPPRPQQGQVKLTMAQLTQLTQGHGGNQGLTVVIQGQGQTTGQLQLIP

SEQ ID NO: 797671 - protein, 177 aa, Homo sapiens
MLFLRIPVRRCHADKETRNAQANLALVIIETWVAEEELELWEIRSFAERVEKEKAQAVEQQAKKRLEQQKLTVIATSTTSPTSSTTSTISPAQKVMVAPISGSVTTGTKMVLTTKVGSPATVTFQQNKNFHQTFATWVKQGQSNSDSCGICYNHCQHRSDVPNYRQSSHYGRKSNYQ

SEQ ID NO: 797672 - protein, 209 aa, Homo sapiens
SLPQKRRGEGATSGEARLWRSCGGRLSTTSNWSSAIAVCFRKHLNMVSSGKKYSRKSGKPSVEDQFTRAYDFETEDKKDLSGSEEDVIEGKTAVIEKRRKKRSSAGVVEDMGGEVQNMLEGVGVDINKALLAKRKRLEMYTKASLKTSNQKIEHVWKTQQDQRQKLNQEYSQQFLTLFQQWDLDMQKAEEQEEKILNMFRTATKNSSTI

SEQ ID NO: 797673 - protein, 209 aa, Homo sapiens; identical to SEQ ID NO: 797672

SEQ ID NO: 797674 - protein, 76 aa, Homo sapiens
KHLNMVSSGKKYSRKSGKPSVEDQFTRAYDFETEDKKDLSGSEEDVIEGAVHLMLGSDVLQFICFEPIETIVQLSL

SEQ ID NO: 797675 - protein, 209 aa, Homo sapiens; identical to SEQ ID NO: 797672

SEQ ID NO: 797676 - protein, 264 aa, Homo sapiens
  misc_feature (225)..(225): Xaa can be any naturally occurring amino acid
  misc_feature (260)..(260): Xaa can be any naturally occurring amino acid
MGYSQCMETEVIESLGIIIYKALDYGLKENEERELSPPLEQLIDHMANTVEADGSNDEGYEAAEEGLGDEDEKRKISAIRSYRDVMKLCAAHLPTESDAPNHYQAVCRALFAETMELHTFLTKIKSAKENLKKIQEMEKSDESSTDLEELKNADWARFWVQVMRDLRNGVKLKKVQERQYNPLPIEYQLTPYEMLMDDIRCKRYTLRKVMVNGDNSPLGLKKEVXHENHPPDFQSGFQTLLLNPVFSQKTLKPTSHHGPXRPPI

SEQ ID NO: 797677 - protein, 218 aa, Homo sapiens
MGYSQCMETEVIESLGIIIYKALDYGLKENEERELSPPLEQLIDHMANTVEADGSNDEGYEAAEEGLGDEDEKRKISAIRSYRDVMKLCAAHLPTESDAPNHYQAVCRALFAETMELHTFLTKIKSAKENLKKIQEMEKSDESSTDLEELKNADWARFWVQVMRDLRNGVKLKKVQERQYNPLPIEYQLTPYEMLMDDIRCKKKTPLPKKGRGKRGDF

SEQ ID NO: 797678 - protein, 258 aa, Homo sapiens
  misc_feature (219)..(219): Xaa can be any naturally occurring amino acid
  misc_feature (254)..(254): Xaa can be any naturally occurring amino acid
METEVIESLGIIIYKALDYGLKENEERELSPPLEQLIDHMANTVEADGSNDEGYEAAEEGLGDEDEKRKISAIRSYRDVMKLCAAHLPTESDAPNHYQAVCRALFAETMELHTFLTKIKSAKENLKKIQEMEKSDESSTDLEELKNADWARFWVQVMRDLRNGVKLKKVQERQYNPLPIEYQLTPYEMLMDDIRCKRYTLRKVMVNGDNSPLGLKKEVXHENHPPDFQSGFQTLLLNPVFSQKTLKPTSHHGPXRPPI

SEQ ID NO: 797679 - protein, 264 aa, Homo sapiens; identical to SEQ ID NO: 797676
  misc_feature (225)..(225): Xaa can be any naturally occurring amino acid
  misc_feature (260)..(260): Xaa can be any naturally occurring amino acid

SEQ ID NO: 797680 - protein, 230 aa, Homo sapiens
MGYSQCMETEVIESLGIIIYKALDYGLKENEERELSPPLEQLIDHMANTVEADGSNDEGYEAAEEGLGDEDEKRKISAIRSYRDVMKLCAAHLPTESDAPNHYQAVCRALFAETMELHTFLTKIKSAKENLKKIQEMEKSDESSTDLEELKNADWARFWVQVMRDLRNGVKLKKVQERQYNPLPIEYQLTPYEMLMDDIRCKRYTLRKVMVNGDIPRYKRVLMHHPRFHR

SEQ ID NO: 797681 - protein, 110 aa, Homo sapiens
FPTSPPGQRVQKGRPRDSKTFFKKLPPGTFFSIGNPGECRTKTNLPIHMFEKKKSPGGDVVKVILLLPAEKNRRQKVRPQSFEALQAPPDVTTVAVEETIPSFTGRSPNH

SEQ ID NO: 797682 - protein, 288 aa, Homo sapiens
MELMALHLQANHLGKAKRKDNTIGVTVNCKDQAREASKMALLPSLQSNKDLGLSNMISSLDSASEKMAQGQLKETLGEQKSGAWTGHVDPAFCNFPSDFYKQFGVYPGMVGSGASSSCPNKEPDGKAHSEEDVPILIPETTSKNTTDDLSDIASSEDMDSSKGENNDEEDVETEPEMMTKPLSALSKDSSSDGGDSLQPTGTSQPVQGLVSPLSQAPEKQWHSQGLLQAQDPLAGLPKPERGPQSLDKPMNMLSVLRAYSSDGLAAFNGLASSTANSGCIKRPDLCGK

SEQ ID NO: 797683 - protein, 297 aa, Homo sapiens
DKRLFFFLYQNLAGEKPYKCPHCDYAGTQSASLKYHLERHHRERQNGAGPLSGQPPNQDHKDEMSSKASLFIRPDILRGAFKGLPGIDFRGGPASQQWTSGVLSSGDHSGQATGMSSEVPSDALKGTDLPSKSTHFSEIGRAYQSIVSNGVNFQGSLQAFMDSFVLSSLKKEKDMKDKALADPPSMKVHGVDGGEEKPSGKSSQRKSEKSQYEPLDLSVRPDAASLPGSSVTVQDSIAWHGCLFCAFTTSSMELMALHLQANHLGKAKRKDNTIGVTVNCKDQAREASKMALLPSLQ

SEQ ID NO: 797684 - protein, 1300 aa, Homo sapiens
MEEASLCLGVSSAEPEAEPHLSGPVLNGQYAMSQKLHQITSQLSHAFPELHPRPNPEEKPPASLEEKAHVPMSGQPMGSQMALLANQLGREVDTSLNGRVDLQQFLNGQNLGIMSQMSDIEDDARKNRKYPCPLCGKRFRFNSILSLHMRTHTGEKPFKCPYCDHRAAQKGNLKIHLRTHKLGNLGKGRGRVREENRLLHELEERAILRDKQLKGSLLQPRPDLKPPPHAQQAPLAACTLALQANHSVPDVAHPVPSPKPASVQEDAVAPAAGFRCTFCKGKFKKREELDRHIRILHKPYKCTLCDFAASQEEELISHVEKAHITAESAQGQGPNGGGEQSANEFRCEVCGQVFSQAWFLKGHMRKHKDSFEHCCQICGRRFKEPWFLKNHMKVHLNKLSVKNKSPSDPEVPVPMGGMSQEAHANLYSRYLSCLQSGFMTPDKAGLSEPSQLYGKGELPMKEKEALGKLLSPISSMAHGVPEGDKHSLLGCLNLVPPLKSSCIERLQAAAKAAEMDPVNSYQAWQLMARGMAMEHGFLSKEHPLQRNHEDTLANAGVLFDKEKREYVLVGADGSKQKMPADLVHSTKVGSQRDLPSKLDPLESSRDFLSHGLNQTLEYNLQGPGNMKEKPTECPDCGRVFRTYHQVVVHSRVHKRDRKGEEDGLHVGLDERRGSGSDQESQSVSRSTTPGSSNVTEESGVGGGLSQTGSAQEDSPHPSSPSSSDIGEEAGRSAGVQQPALLRDRSLGSAMKDCPYCGKTFRTSHHLKVHLRIHTGEKPYKCPHCDYAGTQSASLKYHLERHHRERQNGAGPLSGQPPNQDHKDEMSSKASLFIRPDILRGAFKGLPGIDFRGGPASQQWTSGVLSSGDHSGQATGMSSEVPSDALKGTDLPSKSTHFSEIGRAYQSIVSNGVNFQGSLQAFMDSFVLSSLKKEKDMKDKALADPPSMKVHGVDGGEEKPSGKSSQRKSEKSQYEPLDLSVRPDAASLPGSSVTVQDSIAWHGCLFCAFTTSSMELMALHLQANHLGKAKRKDNTIGVTVNCKDQAREASKMALLPSLQSNKDLGLSNMISSLDSASEKMAQGQLKETLGEQKSGAWTGHVDPAFCNFPSDFYKQFGVYPGMVGSGASSSCPNKEPDGKAHSEEDVPILIPETTSKNTTDDLSDIASSEDMDSSKGENNDEEDVETEPEMMTKPLSALSKDSSSDGGDSLQPTGTSQPVQGLVSPLSQAPEKQWHSQGLLQAQDPLAGLPKPERGPQSLDKPMNMLSVLRAYSSDGLAAFNGLASSTANSGCIKRPDLCGK

SEQ ID NO: 797685 - protein, 288 aa, Homo sapiens; identical to SEQ ID NO: 797682

SEQ ID NO: 797686 - protein, 130 aa, Homo sapiens
RPPRGRCWAWGGQLEDDLGLQRPPGGRSWPWTGRLDDSLGLQRPPRGRAGPGEADWRKSRAWRGCKAANARPGKAALRHGLGQQRPLGGRSWAHRGSREGGALPQEATVRKRWAWRAHCEVEAGPVEAAD

SEQ ID NO: 797687 - protein, 107 aa, Homo sapiens
ENGTAAQNLRWKTQQWTGHMVSTKGDQLTLTQTHSRHQMLKEGTDTCYTFFSAHMLLMSQTKLSLNRKGTRAQSRGKNNGFSLSSAMKCLFPLDLTVFKGKPNITAY

SEQ ID NO: 797688 - protein, 225 aa, Homo sapiens [sequence omitted]

SEQ ID NO: 797689 - protein, 107 aa, Homo sapiens
MTSVAHMSTFRPHICHLSKTSPHPLVTRKRASSPHVVIVLTSGLKGKASLRLRPHLPVIFHPIPLPRLLGLSSCSIPPFADFKPLPFFPPRPTLFPLKPNVGQVLAF

SEQ ID NO: 797690 - protein, 84 aa, Homo sapiens
MGHCEGGAVPVEAAGRQAEIWPGAAAMRQELGLEKAPGRQEQGLQRLFSSQSWACSCHREAEGGPGEFDLRKFWAYIGRHELDR

SEQ ID NO: 797691 - protein, 84 aa, Homo sapiens; identical to SEQ ID NO: 797690

SEQ ID NO: 797692 - protein, 171 aa, Homo sapiens [sequence omitted]

SEQ ID NO: 797693 - protein, 114 aa, Homo sapiens
VFLRLSGALLRIHLGASAHSCTDGRCLCSQIWAIVNSAAVNVAAQTSLGQTEDAIRILPPSFPLPFLQALKLRLHARTRGLPFPRQLLPNVPSQKPVPARPRCATPKPTANPAQ

SEQ ID NO: 797694 - protein, 136 aa, Homo sapiens
YVGKPFTLPVHFKGMKEVTLERNPTNASNVGKPSLVPLRFNIMKGLTLERNPMGVSNVGKPSDLPSTFEYMEGLTLVRNPMNVSNVGKHFIVSAPFIDMKGLTLEKNLMNVSIVGKPSLVPYILEYMKEFTLERNL

SEQ ID NO: 797695 - protein, 286 aa, Homo sapiens
RTCPDLLLSDGKASISMPREGGSTCTARCPDPGEHSSTWGEFEGFRESSAKSGQFSQSLELLEGPTEPQPPRTTSAPKECSSHQPCQGGPWVTGTSAVPPSEPILSYENILKCAFQEITVQQAAEDVSTIDHFLEISSEEKPGVERVHKLCNESRKLWRALQSIHTTSTSQRLWSESRCQENFFLVLGIDAAQKNLSGGQGHIMEDCDLKEPEGLLTVSSFCLQHCKALIQTKLSGPPGSKQGRLMTCSRFLKTPSCGGGQHITIPRKRMFTPRKLKLTLFNSDVC

SEQ ID NO: 797696 - protein, 117 aa, Homo sapiens
RTCPDLLLSDGKASISMPREGGSTCTARCPDPGEHSSTWGEFEGFRESSAKSGQFSQSLELLEGPTEPQPPRTTSAPKECSSHQPLACESLWWARGFPQLSAKENCALRRAEPRSQP

SEQ ID NO: 797697 - protein, 151 aa, Homo sapiens
RTCPDLLLSDGKASISMPREGGSTCTARCPDPGEHSSTWGEFEGFRESSAKSGQFSQSLELLEGPTEPQPPRTTSAPKECSSHQPCQGGPWVTGTSAVPPSEPILSYENILKCAFQEITVQQAAEDVSTIDHFLEISSEEKPGVERVHKLW

SEQ ID NO: 797698 - protein, 259 aa, Homo sapiens
RTCPDLLLSDGKASISMPREGGSTCTARCPDPGEHSSTWGEFEGFRESSAKSGQFSQSLELLEGPTEPQPPRTTSAPKECSSHQPCQGGPWVTGTSAVPPSEPILSYENILKCAFQEITVQQAAEDVSTIDHFLEISSEEKPGVERVHKLCNESRKLWRALQSIHTTSTSQRLWSESRCQENFFLVLGIDAAQKNLSGGQGHIMEDCDLKEPEGLLTVSSFCLQHCKALIQTKHQSNRAAQAFLIQQQCYFLTQGRCMG

SEQ ID NO: 797699 - protein, 235 aa, Homo sapiens
RTCPDLLLSDGKASISMPREGGSTCTARCPDPGEHSSTWGEFEGFRESSAKSGQFSQSLELLEGPTEPQPPRTTSAPKECSSHQPCQGGPWVTGTSAVPPSEPILSYENILKCAFQEITVQQAAEDVSTIDHFLEISSEEKPGVERVHKLCNESRKLWRALQSIHTTSTSQRLWSESRCQENFFLVLGIDAAQKNLSGGQGHIMEDCDLKEPEGLLTVSSFCLQHCKALIQTKRP

SEQ ID NO: 797700 - protein, 155 aa, Homo sapiens
RTCPDLLLSDGKASISMPREGGSTCTARCPDPGEHSSTWGEFEGFRESSAKSGQFSQSLELLEGPTEPQPPRTTSAPKECSSHQPCQGGPWVTGTSAVPPSEPILSYENILKCAFQEITVQQAAEKRRGVYALKGSPEFSGFVTQFMYTFNARFF

SEQ ID NO: 797701 - protein, 157 aa, Homo sapiens
  misc_feature (25)..(25): Xaa can be any naturally occurring amino acid
MTGCRGPGGTHGPPAPCECCWHLSXSCAAANKGAARNAPPHRPHAHNPRGANRAPAAAPTKTAQAPPKRQEPPSTTRHPTPHHRAAHNHPSSHPAPKPTTAPAPPPTAPPSRAHGPTDPPPPAQHPHNTRPHHHPKRTRRPQRPAAPPGRPTHHPHP

SEQ ID NO: 797702 - protein, 370 aa, Homo sapiens
MLGAVEGPRWKQAEDIRDIYDFRDVLGTGAFSEVILAEDKRTQKLVAIKCIAKEALEGKEGSMENEIAVLHKIKHPNIVALDDIYESGGHLYLIMQLVSGGELFDRIVEKGFYTERDASRLIFQVLDAVKYLHDLGIVHRDLKPENLLYYSLDEDSKIMISDFGLSKMEDPGSVLSTACGTPGYVAPEVLAQKPYSKAVDCWSIGVIAYILLCGYPPFYDENDAKLFEQILKAEYEFDSPYWDDISDSAKDFIRHLMEKDPEKRFTCEQALQHPWIAGDTALDKNIHQSVSEQIKKNFAKSKWKQAFNATAVVRHMRKLQLGTSQEGQGQTASHGELLTPVAGGPAAGCCCRDCCVEPGTELSPTLPHQL

SEQ ID NO: 797703 - protein, 406 aa, Homo sapiens
MLGAVEGPRWKQAEDIRDIYDFRDVLGTGAFSEVILAEDKRTQKLVAIKCIAKEALEGKEGSMENEIAVLHKIKHPNIVALDDIYESGGHLYLIMQLVSGGELFDRIVEKGFYTERDASRLIFQVLDAVKYLHDLGIVHRDLKPENLLYYSLDEDSKIMISDFGLSKMEDPGSVLSTACGTPGYVAPEVLAQKPYSKAVDCWSIGVIAYILLCGYPPFYDENDAKLFEQILKAEYEFDSPYWDDISDSAKDFIRHLMEKDPEKRFTCEQALQHPWIAGDTALDKNIHQSVSEQIKKNFAKSKWKQAFNATAVVRHMRKLQLGTSQEGQGQTASHGELLTPVAGGVRSGLCRRAWVVHKGAPGLEWRACPAATSVLSSHAGPAAGCCCRDCCVEPGTELSPTLPHQL

SEQ ID NO: 797704 - protein, 431 aa, Homo sapiens
MPLHHLYTTAALCLERCKASVGRIWMRRCQHQRRTGTAGHTRLQQPRGQRRALAVVGGQWAMLGAVEGPRWKQAEDIRDIYDFRDVLGTGAFSEVILAEDKRTQKLVAIKCIAKEALEGKEGSMENEIAVLHKIKHPNIVALDDIYESGGHLYLIMQLVSGGELFDRIVEKGFYTERDASRLIFQVLDAVKYLHDLGIVHRDLKPENLLYYSLDEDSKIMISDFGLSKMEDPGSVLSTACGTPGYVAPEVLAQKPYSKAVDCWSIGVIAYILLCGYPPFYDENDAKLFEQILKAEYEFDSPYWDDISDSAKDFIRHLMEKDPEKRFTCEQALQHPWIAGDTALDKNIHQSVSEQIKKNFAKSKWKQAFNATAVVRHMRKLQLGTSQEGQGQTASHGELLTPVAGGPAAGCCCRDCCVEPGTELSPTLPHQL

SEQ ID NO: 797705 - protein, 328 aa, Homo sapiens
MLGAVEGPRWKQAEDIRDIYDFRDVLGTGAFSEVILAEDKRTQKLVAIKCIAKEALEGKEGSMENEIAVLHKIKHPNIVALDDIYESGGHLYLIMQLVSGGELFDRIVEKGFYTERDASRLIFQVLDAVKYLHDLGIVHRDLKPENLLYYSLDEDSKIMISDFGLSKMEDPGSVLSTACGTPGYVAPEVLAQKPYSKAVDCWSIGVIAYILLCGYPPFYDENDAKLFEQILKAEYEFDSPYWDDISDSAKDFIRHLMEKDPEKRFTCEQALQHPWIAGDTALDKNIHQSVSEQIKKNFAKSKWKSFLPSPFNAFNASKPSMPRLWCGT

SEQ ID NO: 797706 - protein, 420 aa, Homo sapiens
KTQTDRTKTRNRMRDQRSKDSAPTTVSLPDQSPASGAVARALAVVGGQWAMLGAVEGPRWKQAEDIRDIYDFRDVLGTGAFSEVILAEDKRTQKLVAIKCIAKEALEGKEGSMENEIAVLHKIKHPNIVALDDIYESGGHLYLIMQLVSGGELFDRIVEKGFYTERDASRLIFQVLDAVKYLHDLGIVHRDLKPENLLYYSLDEDSKIMISDFGLSKMEDPGSVLSTACGTPGYVAPEVLAQKPYSKAVDCWSIGVIAYILLCGYPPFYDENDAKLFEQILKAEYEFDSPYWDDISDSAKDFIRHLMEKDPEKRFTCEQALQHPWIAGDTALDKNIHQSVSEQIKKNFAKSKWKQAFNATAVVRHMRKLQLGTSQEGQGQTASHGELLTPVAGGPAAGCCCRDCCVEPGTELSPTLPHQL

SEQ ID NO: 797707 - protein, 326 aa, Homo sapiens
MLGAVEGPRWKQAEDIRDIYDFRDVLGTIKHPNIVALDDIYESGGHLYLIMQLVSGGELFDRIVEKGFYTERDASRLIFQVLDAVKYLHDLGIVHRDLKPENLLYYSLDEDSKIMISDFGLSKMEDPGSVLSTACGTPGYVAPEVLAQKPYSKAVDCWSIGVIAYILLCGYPPFYDENDAKLFEQILKAEYEFDSPYWDDISDSAKDFIRHLMEKDPEKRFTCEQALQHPWIAGDTALDKNIHQSVSEQIKKNFAKSKWKQAFNATAVVRHMRKLQLGTSQEGQGQTASHGELLTPVAGGPAAGCCCRDCCVEPGTELSPTLPHQL

SEQ ID NO: 797708 - protein, 275 aa, Homo sapiens
MLGAVEGPRWKQAEDIRDIYDFRDVLGTGAFSEVILAEDKRTQKLVAIKCIAKEALEGKEGSMENEIAVLHKIKHPNIVALDDIYESGGHLYLIMQLVSGGELFDRIVEKGFYTERDASRLIFQVLDAVKYLHDLGIVHRDLKPENLLYYSLDEDSKIMISDFGLSKMEDPGSVLSTACGTPGYVAPEVLAQKPYSKAVDCWSIGVIAYILLCGYPPFYDENDAKLFEQILKAEYEFDSPYWDDISDSAKDFIRHLMEKDPEKRFTCEQALQHPW

SEQ ID NO: 797709 - protein, 114 aa, Homo sapiens [sequence omitted]

SEQ ID NO: 797710 - protein, 144 aa, Homo sapiens [sequence omitted]

SEQ ID NO: 797711 - protein, 125 aa, Homo sapiens
MPLHHLYTTAALCLERCKAVSAESGCGGASTSVGRAQLGTRGSSSRGGSAEPWLWSGGSGPCWGQWKAPGGSRRRTLETSTTSEMFWARSPQVVAKMIAISSRLTSYQLNRRLILKVLVSWLAIT

SEQ ID NO: 797712 - protein, 370 aa, Homo sapiens; identical to SEQ ID NO: 797702

SEQ ID NO: 797713 - protein, 275 aa, Homo sapiens; identical to SEQ ID NO: 797708

SEQ ID NO: 797714 - protein, 370 aa, Homo sapiens; identical to SEQ ID NO: 797702

SEQ ID NO: 797715 - protein, 308 aa, Homo sapiens
MENEIAVLHKIKHPNIVALDDIYESGGHLYLIMQLVSGGELFDRIVEKGFYTERDASRLIFQVLDAVKYLHDLGIVHRDLKPENLLYYSLDEDSKIMISDFGLSKMEDPGSVLSTACGTPGYVAPEVLAQKPYSKAVDCWSIGVIAYILLCGYPPFYDENDAKLFEQILKAEYEFDSPYWDDISDSAKDFIRHLMEKDPEKRFTCEQALQHPWIAGDTALDKNIHQSVSEQIKKNFAKSKWKQAFNATAVVRHMRKLQLGTSQEGQGQTASHGELLTPVAGGPAAGCCCRDCCVEPGTELSPTLPHQL

SEQ ID NO: 797716 - protein, 95 aa, Homo sapiens
GGRREPPSRAEPQLQQERGRVAQARSGEDRGHSSAPTTAGLPASPAAGQPQEPWLWSGGSGPCWGQWKAPGGSRRRTLETSTTSEMFWARGPSRR

SEQ ID NO: 797717 - protein, 353 aa, Homo sapiens
MLGAVEGPRWKQAEDIRDIYDFRDVLGTGAFSEVILAEDKRTQKLVAIKCIAKEALEGKEGSMENEIAVLHKIKHPNIVALDDIYESGGHLYLIMQLVSGGELFDRIVEKGFYTERDASRLIFQVLDAVKYLHDLGIVHRDLKPENLLYYSLDEDSKIMISDFGLSKMEDPGSVLSTACGTPGYVAPEVLAQKPYSKAVDCWSIGVIAYILLCGYPPFYDENDAKLFEQILKAEYEFDSPYWDDISDSAKDFIRHLMEKDPEKRFTCEQALQHPWIAGDTALDKNIHQSVSEQIMISDFGLSKMEDPGSVLSTACGTLGGRQLAVAVETAAWSRAQNCPPHCPTSSRALDLGS

SEQ ID NO: 797718 - protein, 188 aa, Homo sapiens
MIELQDIHGLRMADEDMDCWSIGVIAYILLCGYPPFYDENDAKLFEQILKAEYEFDSPYWDDISDSAKDFIRHLMEKDPEKRFTCEQALQHPWIAGDTALDKNIHQSVSEQIKKNFAKSKWKQAFNATAVVRHMRKLQLGTSQEGQGQTASHGELLTPVAGGPAAGCCCRDCCVEPGTELSPTLPHQL

SEQ ID NO: 797719 - protein, 211 aa, Homo sapiens
MLGAVEGPRWKQAEDIRDIYDFRDVLGTGAFSEVILAEDKRTQKLVAIKCIAKEALEGKEGSMENEIAVLHKIKHPNIVALDDIYESGGHLYLIMQLVSGGELFDRIVEKGFYTERDASRLIFQVLDAVKYLHDLGIVHRDLKPENLLYYSLDEDSKIMISDFGLSKMEDPGSVLSTACGTPGYVAPEVLAQKPYSKAVDCWSIGVIAYIL

SEQ ID NO: 797720 - protein, 764 aa, Homo sapiens
MEESSSVAMLVPDIGEQEAILTAESIISPSLEIDEQRKTKPDPLIHVIQKLSKIVENEKSQKCLLIGKKRPRSSAATHSLETQELCEIPAKVIQSPAADTRRAEMSQTNFTPDTLAQNEGKAMSYQCSLCKFLSSSFSVLKDHIKQHGQQNEVILMCSECHITSRSQEELEAHVVNDHDNDANIHTQSKAQQCVSPSSSLCRKTTERNETIPDIPVSVDNLQTHTVQTASVAEMGRRKWYAYEQYGMYRCLFCSYTCGQQRMLKTHAWKHAGEVDCSYPIFENENEPLGLLDSSAAAAPGGVDAVVIAIGESELSIHNGPSVQVQICSSEQLSSSSPLEQSAERGVHLSQSVTLDPNEEEMLEVISDAEENLIPDSLLTSAQKIISSSPNKKGHVNVIVERLPSAEETLSQKRFLMNTEMEEGKDLSLTEAQIGREGMDDVYRADKCTVDIGGLIIGWSSSEKKDELMNKGLATDENAPPGRRRTNSESLRLHSLAAEALVTMPIRAAELTRANLGHYGDINLLDPDTSQRQVDSTLAAYSKMMSPLKNSSDGLTSLNQSNSTLVALPEGRQELSDGQVKTGISMSLLTVIEKLRERTDQNASDDDILKELQDNAQCQPNSDTSLSGNNVVEYIPNAERPYRCRLCHYTSGNKGYIKQHLRVHRQRQPYQCPICEHIADNSKDLESHMIHHCKTRIYQCKQCEESFHYKSQLRNHEREQHSLPDTLSIATSNEPRISSDTADGKCVQEGIYVFCYAGCSDLHMT

SEQ ID NO: 797721 - protein, 756 aa, Homo sapiens
MEESSSVAMLVPDIGEQEAILTAESIISPSLEIDEQRKTKPDPLIHVIQKLSKIVENEKSQKCLLIGKKRPRSSAATHSLETQELCEIPAKVIQSPAADTRRAEMSQTNFTPDTLAQNEGKAMSYQCSLCKFLSSSFSVLKDHIKQHGQQNEVILMCSECHITSRSQEELEAHVVNDHDNDANIHTQSKAQQCVSPSSSLCRKTTERNETIPDIPVSVDNLQTHTVQTASVAEMGRRKWYAYEQYGMYRCLFCSYTCGQQRMLKTHAWKHAGEVDCSYPIFENENEPLGLLDSSAAAAPGGVDAVVIAIGESELSIHNGPSVQVQICSSEQLSSSSPLEQSAERGVHLSQSVTLDPNEEEMLEVISDAEENLIPDSLLTSAQKIISSSPNKKGHVNVIVERLPSAEETLSQKRFLMNTEMEEGKDLSLTEAQIGREGMDDVYRADKCTVDIGGLIIGWSSSEKKDELMNKGLATDENAPPGRRRTNSESLRLHSLAAEALVTMPIRAAELTRANLGHYGDINLLDPDTSQRQVDSTLAAYSKMMSPLKNSSDGLTSLNQSNSTLVALPEGRQELSDGQVKTGISMSLLTVIEKLRERTDQNASDDDILKELQDNAQCQPNSDTSLSGNNVVEYIPNAERPYRCRLCHYTSGNKGYIKQHLRVHRQRQPYQCPICEHIADNSKDLESHMIHHCKTRIYQCKQCEESFHYKSQLRNHEREQHSLPDTLSIATSNEPRISSDTLYVNGSGRYKYLYAAE

SEQ ID NO: 797722 - protein, 786 aa, Homo sapiens
MEESSSVAMLVPDIGEQEAILTAESIISPSLEIDEQRKTKPDPLIHVIQKLSKIVENEKSQKCLLIGKKRPRSSAATHSLETQELCEIPAKVIQSPAADTRRAEMSQTNFTPDTLAQNEGKAMSYQCSLCKFLSSSFSVLKDHIKQHGQQNEVILMCSECHITSRSQEELEAHVVNDHDNDANIHTQSKAQQCVSPSSSLCRKTTERNETIPDIPVSVDNLQTHTVQTASVAEMGRRKWYAYEQYGMYRCLFCSYTCGQQRMLKTHAWKHAGEVDCSYPIFENENEPLGLLDSSAAAAPGGVDAVVIAIGESELSIHNGPSVQVQICSSEQLSSSSPLEQSAERGVHLSQSVTLDPNEEEMLEVISDAEENLIPDSLLTSAQKIISSSPNKKGHVNVIVERLPSAEETLSQKRFLMNTEMEEGKDLSLTEAQIGREGMDDVYRADKCTVDIGGLIIGWSSSEKKDELMNKGLATDENAPPGRRRTNSESLRLHSLAAEALVTMPIRAAELTRANLGHYGDINLLDPDTSQRQVDSTLAAYSKMMSPLKNSSDGLTSLNQSNSTLVALPEGRQELSDGQVKTGISMSLLTVIEKLRERTDQNASDDDILKELQDNAQCQPNSDTSLSGNNVVEYIPNAERPYRCRLCHYTSGNKGYIKQHLRVHRQRQPYQCPICEHIADNSKDLESHMIHHCKTRIYQCKQCEESFHYKSQLRNHEREQHSLPDTLSIATSNEPRISSDTADGKCVQEGNKSSVQKQYRCDVCDYTSTTYVGVRNHRRIHNSDKPY

SEQ ID NO: 797723 - protein, 156 aa, Homo sapiens [sequence omitted]

SEQ ID NO: 797724 - protein, 270 aa, Homo sapiens
GDIDYSTVLLGMLVTQDVQLGLFMAVMPTLIQAGASTSSSIVVEVLRILVLIGQILFSLAAVFLLCLVIKKYLIGPYYRKLHMESKGNKEILILGISAFIFLMLTVVTELLDVSMELGCFLAGALVSSQGPVVTEEIATSIEPIRDFLAIVFFASIGLHVFPTFVAYELTVLVFLTLSVVVMKFLLAALVLSLILPRSSQYIKWIVSAGLAQVSEFSFVLGSRARRAGVISREVYLLILSVTTLSLLLAPVLWRAAITRCVPRPERRSSL

SEQ ID NO: 797725 - protein, 127 aa, Homo sapiens
GDIDYSTVLLGMLVTQDVQLGLFMAVMPTLIQAGASTSSSIVVEVLRILVLIGQILFSLAAVFLLCLVIKKYLIGPYYRKLHMESKGNKEILILGISAFIFLMLTVSCNHEVCAQTGETVQPLMARR

SEQ ID NO: 797726 - protein, 176 aa, Homo sapiens
PVTCGRRRRARRPAAPPPSPARLGRRGGGGGGPGGGGGARLAASLLPREAQGPLSRAAAPRPVSSLWWGMAAQPPACPRKGHTSQLFCHESTPNKGDRVIYNLTRLPYCCVWFPLPGIGPEILYLSQLASNLELSKRDKSRGEQRKEAVTCGMLRKASGPRPGFPSAPLARRPSDF

SEQ ID NO: 797727 - protein, 176 aa, Homo sapiens; identical to SEQ ID NO: 797726

SEQ ID NO: 797728 - protein, 198 aa, Homo sapiens
MNLDSLSLALSQISYLVDNLTKKNYRASQQEIQHIVNRHGPEADRHLLRCLFSHVDFSGDGKSSGKDFHQTQFLIQECALLITKPNFISTLSYAIDNPLHYQKSLKPAPHLFAQLSKVLKLSKVQEVIFGLALLNSSSSDLRGFAAQFIKQKLPDLLRSYIDADVSGNQEGGFQDIAIEVLHLLLSHLLFGQKGAFGV

SEQ ID NO: 797729 - protein, 198 aa, Homo sapiens; identical to SEQ ID NO: 797728

SEQ ID NO: 797730 - protein, 198 aa, Homo sapiens; identical to SEQ ID NO: 797728

SEQ ID NO: 797731 - protein, 138 aa, Homo sapiens
GPFQWQLCQGAYESLLAFTWSARNQTLGTSHEADKPGRHSVRITRNTTRPVREERVESRECFPHSADKERPLSHLLLQLWRQSSPTCHIEHKDQSAEKEHPNLIQWTLGKNSPQLSVEKQGQHTHLCTDTSPIKKLKC

SEQ ID NO: 797732 - protein, 156 aa, Homo sapiens
MCSCPGIASTGGAGNSLKVPHLGLDLVQRSISEDTGRSHNGSEDPSDQRVHEFVGAVHSVPAAQGCQDKETSCLVPALLQHGACGAPVSPGVPAQSPNPVEESPVLGFGEVWPWINFTLMVSMGHRTTTASATLAHWPHRCPPCCSPVPGHPASGC

SEQ ID NO: 797733 - protein, 147 aa, Homo sapiens
MCSAFVHLQVPHLGLDLVQRSISEDTGRSHNGSEDPSDQRVHEFVGAVHSVPAAQGCQDKETSCLVPALLQHGACGAPVSPGVPAQSPNPVEESPVLGFGEVWPWINFTLMVSMGHRTTTASATLAHWPHRCPPCCSPVPGHPASGC

SEQ ID NO: 797734 - protein, 156 aa, Homo sapiens; identical to SEQ ID NO: 797732

SEQ ID NO: 797735 - protein, 213 aa, Homo sapiens
MIQGQAQSSCKNLKQMVSTKHFTKKYSSCSTIYLDDSTASQPHLTIIVKSNELERQFLQLIDYNVEVSGSVYAKYYFDLRSLAKDNSLHFPVYLLNKERAQNLEAISRMEDAKIFYSEGPSALIISLIFSALKPLTLEGRNEGLYHVNPSSKKFGKYYLSCSTTRKVSIFKRRKISKLRGLWATRIALHRKKMGSLQCNNSRTLFCLFKRKQV

SEQ ID NO: 797736 - protein, 152 aa, Homo sapiens
AESQLIIYARLCFWALYCITFYFLSCQYHIVFYCSFVLSFEIRKCESSNFVLFQDCFGYLGSLAIPYEVQDSPFFLFFFEAGSHSVTQAGVPWHKLSSLQLRPHGLKRPFHLSFLSSWDYRFVAPRPVKGFSICTKNTIKILIGIESVDNFG

SEQ ID NO: 797737 - protein, 709 aa, Homo sapiens [sequence omitted]

SEQ ID NO: 797738 - protein, 709 aa, Homo sapiens [sequence omitted]

SEQ ID NO: 797739 - protein, 262 aa, Homo sapiens
GCTPGVRDQQVLNVVNNIFHGQLLSQVTCLACDNKSNTIEPFWDLSLEFPERYQCSGKDIASQPCLVTEMLAKFTETEALEGKIYVCDQCNSKRRRFSSKPVVLTEAQKQLMICHLPQVLRLHLKRFRWSGRNNREKIGVHVGFEEILNMEPYCCRETLKSLRPECFIYDLSAVVMHHGKGFGSGHYTAYCYNSEGGFWVHCNDSKLSMCTMDEVCKAQAYILFYTQRVTENGHSKLLPPELLLGSQHPNEDADTSSNEILS

SEQ ID NO: 797740 - protein, 709 aa, Homo sapiens [sequence omitted]

SEQ ID NO: 797741 - protein, 709 aa, Homo sapiens [sequence omitted]

SEQ ID NO: 797742 - protein, 111 aa, Homo sapiens
MCTTPACVQTHCACSPPRRWQATHCACSPPRCWQATHCACSPPRCWQATAQVWTAYTKGRVRGEGTQDSGSMPAYKTVSQRSDCPVGDLSSRPLGLFQVYFTSFHSCSKTF

SEQ ID NO: 797743 - protein, 101 aa, Homo sapiens
LLRRLRQENHLSAGGGGCSEPRSRHCTLAWVTERDSVSKKKERKKKEVNEGTRVYLMVSINCNNIKNLMAENHSLTRKSKWLQKTLPMDLCFEKRNFQTCE

SEQ ID NO: 797744 - protein, 305 aa, Homo sapiens
MRGNLALVGVLISLAFLSLLPSGHPQPAGDDACSVQILVPGLKGDAGEKGDKGAPGRPGRVGPTGEKGDMGDKGQKGSVGRHGKIGPIGSKGEKGDSGDIGPPGPNGEPGLPCECSQLRKAIGEMDNQVSQLTSELKFIKNAVAGVRETESKIYLLVKEEKRYADAQLSCQGRGGTLSMPKDEAANGLMAAYLAQAGWPVSSSASTTWRRRAPSCTLTTPPCGPSTSGAAVSPTMPTTRRTAWRWWPRAAGTTWPATPPCTSCVSLTRRTCEPQAGAAHWGPHMSLQGWQGQSPDHGASQGAVPL

SEQ ID NO: 797745 - protein, 305 aa, Homo sapiens; identical to SEQ ID NO: 797744

SEQ ID NO: 797746 - protein, 281 aa, Homo sapiens
MRGNLALVGVLISLAFLSLLPSGHPQPAGDDACSVQILVPGLKGDMGDKGQKGSVGRHGKIGPIGSKGEKGDSGDIGPPGPNGEPGLPCECSQLRKAIGEMDNQVSQLTSELKFIKNAVAGVRETESKIYLLVKEEKRYADAQLSCQGRGGTLSMPKDEAANGLMAAYLAQAGWPVSSSASTTWRRRAPSCTLTTPPCGPSTSGAAVSPTMPTTRRTAWRWWPRAAGTTWPATPPCTSCVSLTRRTCEPQAGAAHWGPHMSLQGWQGQSPDHGASQGAVPL

SEQ ID NO: 797747 - protein, 279 aa, Homo sapiens
MWWVPPSPYGCLPCALPGDAGEKGDKGAPGRPGRVGPTGEKGDMGDKGQKGSVGRHGKIGPIGSKGEKGDSGDIGPPGPNGEPGLPCECSQLRKAIGEMDNQVSQLTSELKFIKNAVAGVRETESKIYLLVKEEKRYADAQLSCQGRGGTLSMPKDEAANGLMAAYLAQAGWPVSSSASTTWRRRAPSCTLTTPPCGPSTSGAAVSPTMPTTRRTAWRWWPRAAGTTWPATPPCTSCVSLTRRTCEPQAGAAHWGPHMSLQGWQGQSPDHGASQGAVPL

SEQ ID NO: 797748 - protein, 88 aa, Homo sapiens
VTGCPAVAVPITVYSFLCVGVGVLPALRMRGNLALVGVLISLAFLSLLPSGHPQPAGDDACSVQILVPGLKGNRSLDSGLLGSGLRAS

SEQ ID NO: 797749 - protein, 302 aa, Homo sapiens
MTPALCRSSSLASKGMRERRETKAPPDGLEESAPREKKQSQPVVTASDISKRKCTSSFVEMGSQGDMGDKGQKGSVGRHGKIGPIGSKGEKGDSGDIGPPGPNGEPGLPCECSQLRKAIGEMDNQVSQLTSELKFIKNAVAGVRETESKIYLLVKEEKRYADAQLSCQGRGGTLSMPKDEAANGLMAAYLAQAGWPVSSSASTTWRRRAPSCTLTTPPCGPSTSGAAVSPTMPTTRRTAWRWWPRAAGTTWPATPPCTSCVSLTRRTCEPQAGAAHWGPHMSLQGWQGQSPDHGASQGAVPL

SEQ ID NO: 797750 - protein, 305 aa, Homo sapiens; identical to SEQ ID NO: 797744

SEQ ID NO: 797751 - protein, 281 aa, Homo sapiens
MGEKVPEAAVSEASRAASSRDAGEKGDKGAPGRPGRVGPTGEKGDMGDKGQKGSVGRHGKIGPIGSKGEKGDSGDIGPPGPNGEPGLPCECSQLRKAIGEMDNQVSQLTSELKFIKNAVAGVRETESKIYLLVKEEKRYADAQLSCQGRGGTLSMPKDEAANGLMAAYLAQAGWPVSSSASTTWRRRAPSCTLTTPPCGPSTSGAAVSPTMPTTRRTAWRWWPRAAGTTWPATPPCTSCVSLTRRTCEPQAGAAHWGPHMSLQGWQGQSPDHGASQGAVPL

SEQ ID NO: 797752 - protein, 108 aa, Homo sapiens
KFNLDLTHPVEDGIFDSGNFEQFLREKVKVNGKTGNLGNVVHIERFKNKITVVSEKQFSKRYLKYLTKKYLKKNNLRDWLRVVASDKETYELRYFQISQDEDESESED

SEQ ID NO: 797753 - protein, 155 aa, Homo sapiens
MLIPKTMGKMSPGHVRDLHGSPSHHRPRGPGGKSGFVGWAQGLCAVCSLGTWCPVSQLLQPWLKGANIELGLWLQRVEAPSIGSFHVMLSLWVQRCQELRFGNLCLDFRIYMETPGCPGKSLLQGQSPHGEPLLGQCGREMWGRAPTQSPCWGTA

SEQ ID NO: 797754 - protein, 159 aa, Homo sapiens
CSHPPSLKSHMWKHASDQNYNYEQVNKAINDAISQSGRVLGKSPGKTQLKSSEESADPVTGSSENAVSSSELMSQTPSEVLGTNENEKLSPTSNTSYSLEKISSLAPPSMEYCVLLFCCCICGFESTSKENLLDHMKEHEGEIVNIILNKDHNTALNTN

SEQ ID NO: 797755 - protein, 601 aa, Homo sapiens [sequence omitted]

SEQ ID NO: 797756 - protein, 601 aa, Homo sapiens [sequence omitted]

SEQ ID NO: 797757 - protein, 574 aa, Homo sapiens
MKRYINQLTVAKKQCEKRIRILGGPAYDQQEDGALDEGEGPQSQKILQFEDILANTFYREHFGMYMERMDKRALISFWESVEHLKNANKNEIPQLVGEIYQNFFVESKEISVEKSLYKEIQQCLVGNKGIEVFYKIQEDVYETLKDRYYPSFIVSDLYEKLLIKEEEKHASQMISNKDEMGPRDEAGEEAVDDGTNQINEQASFAVNKLRELNEKLEYKRIVSKLKDEIILIEKERTDLQLHMARTDWWCENLGMWKASITSGEVTEENGEQLPCYFVMVSLQEVGGVETKNWTVPRRLSEFQNLHRKLSECVPSLKKVQLPSLSKLPFKSIDQKFMEKSKNQLNKFLQNLLSDERLCQSEALYAFLSPSPDYLKVIDVQGKKNSFSLSSFLERLPRDFFSHQEEETEEDSDLSDYGDDVDGRKDALAEPCFMLIGEIFELRGMFKWVRRTLIALVQVTFGRTINKQIRDTVSWIFSEQMLVYYINIFRDAFWPNGKLAPPTTIRSKEQSQETKQRAQQKLLENIPDMLQSLVGQQNARHGIIKIFNALQETRANKHLLYGTSTNTLLSPRDHD

SEQ ID NO: 797758 - protein, 586 aa, Homo sapiens
MKRYINQLTVAKKQCEKRIRILGGPAYDQQEDGALDEGEGPQSQKILQFEDILANTFYREHFGMYMERMDKRALISFWESVEHLKNANKNEIPQLVGEIYQNFFVESKEISVEKSLYKEIQQCLVGNKGIEVFYKIQEDVYETLKDRYYPSFIVSDLYEKLLIKEEEKHASQMISNKDEMGPRDEAGEEAVDDGTNQINEQASFAVNKLRELNEKLEYKRIVSKLKDEIILIEKERTDLQLHMARTDWWCENLGMWKASITSGEVTEENGEQLPCYFVMVSLQEVGGVETKNWTVPRRLSEFQNLHRKLSECVPSLKKVQLPSLSKLPFKSIDQKFMEKSKNQLNKFLQNLLSDERLCQSEALYAFLSPSPDYLKVIDVQGKKNSFSLSSFLERLPRDFFSHQEEETEEDSDLSDYGDDVDGRKDALAEPCFMLIGEIFELRGMFKWVRRTLIALVQVTFGRTINKQIRDTVSWIFSEQMLVYYINIFRDAFWPNGKLAPPTTIRSKEQSQETKQRAQQKLLENIPDMLQSLVGQQNARHGIIKIFNALQETRANKHLLYALMELLLIELCPELRVHLDQLKAGQV

SEQ ID NO: 797759 - protein, 1094 aa, Homo sapiens
VLFTYHGNSGLLATKSDETGWTTFFDYDSEGRLTNVTFPTGVVTNLHGDMDKAITVDIESSSREEDVSITSNLSSIDSFYTMVQDQLRNSYQIGYDGSLRIIYASGLDSHYQTEPHVLAGTANPTVAKRNMTLPGENGQNLVEWRFRKEQAQGKVNVFGRKLRVNGRNLLSVDFDRTTKTEKIYDDHRKFLLRIAYDTSGHPTLWLPSSKLMAVNVTYSSTGQIASIQRGTTSEKVDYDGQGRIVSRVFADGKTWSYTYLEKSMVLLLHSQRQYIFEYDMWDRLSAITMPSVARHTMQTIRSIGYYRNIYNPPESNASIITDYNEEGLLLQTAFLGTSRRVLFKYRRQTRLSEILYDSTRVSFTYDETAGVLKTVNLQSDGFICTIRYRQIGPLIDRQIFRFSEDGMVNARFDYSYDNSFRVTSMQGVINETPLPIDLYQFDDISGKVEQFGKFGVIYYDINQIISTAVMTYTKHFDAHGRIKEIQYEIFRSLMYWITIQYDNMGRVTKREIKIGPFANTTKYAYEYDVDGQLQTVYLNEKIMWRYNYDLNGNLHLLNPSNSARLTPLRYDLRDRITRLGDVQYRLDEDGFLRQRGTEIFEYSSKGLLTRVYSKGSGWTVIYRYDGLGRRVSSKTSLGQHLQFFYADLTYPTRITHVYNHSSSEITSLYYDLQGHLFAMEISSGDEFYIASDNTGTPLAVFSSNGLMLKQIQYTAYGEIYFDSNIDFQLVIGFHGGLYDPLTKLIHFGERDYDILAGRWTTPDIEIWKRIGKDPAPFNLYMFRNNNPASKIHDVKDYITDVNSWLVTFGFHLHNAIPGFPVPKFDLTEPSYELVKSQQWDDIPPIFGVQQQVARQAKAFLSLGKMAEVQVSRRRAGGAQSWLWFATVKSLIGKGVMLAVSQGRVQTNVLNIANEDCIKVAAVLNNAFYLENLHFTIEGKDTHYFIKTTTPESDLGTLRLTSGRKALENGINVTVSQSTTVVNGRTRRFADVEMQFGALALHVRYGMTLDEEKARILEQARQRALARAWAREQQRVRDGEEGARLWTEGEKRQLLSAGKVQGYDGYYVLSVEQYPELADSANNIQFLRQSEIGRR

SEQ ID NO: 797760 - protein, 221 aa, Homo sapiens
MEGSFHQKTPRHKQPTLLMVRASRRSGKTSAVLKAGRQSVSGRKNSTSKDLVTLGASSLREERGHPLHPRHRKAPPAHQGQDTWLGADAGPDVAEDSRAGRGAAAAAAAAAGGDAGHAPFPPPPAADGARAPRSPGQVTPRGLRLRLPRRESLLRGLCRPLRPLLGFRESDSAKPASLRLLQHTPSARRNYRIAGARLMRSNYPPPLSSAALRGAGPTRRN

SEQ ID NO: 797761 - protein, 359 aa, Homo sapiens
MAEHGAHFTAASVADDQPSIFEVVAQDSLMTAVRPALQHVVKVLAESNPTHYGFLWRWFDEIFTLLDLLLQQHYLSRTSASFSENFYGLKRIVMGDTHKSQRLASAGLPKQQLWKSIMFLVLLPYLKVKLEKLVSSLREEDEYSIHPPSSRWKRFYRAFLAAYPFVNMAWEGWFLVQQLRYILGKAQHHSPLLRLAGVQLGRLTVQDIQALEHKPAKASMMQQPARSVSEKINSALKKAVGGVALSLSTGLSVGVFFLQFLDWWYSSENQETIKSLTALPTPPPPVHLDYNSDSPLLPKMKTVCPLCRKTRVNDTVLATSGYVFCYRCVFHYVRSHQACPITGYPTEVQHLIKLYSPEN

SEQ ID NO: 797762 - protein, 359 aa, Homo sapiens; identical to SEQ ID NO: 797761

SEQ ID NO: 797763 - protein, 104 aa, Homo sapiens
TRRSSSSEEDDALRHHDDLPSNVASWVVCASPGVSEQGRARAGILKANSWSQPSCPGLTVARLNPQSRLAFELSRLGRRGRFWFAAPEDCVPSPIPVPHSHALP

SEQ ID NO: 797764 - protein, 100 aa, Homo sapiens
MPTGTMLGAGWALRVRLDPFLKEGRGVCSCTPWWVLTISPAHSLLGQPHSDPLSPRNGLDLPLGVFCLGPGFPNTGWCHPSLLQGQQICKPQVSPISLEK

SEQ ID NO: 797765 - protein, 917 aa, Homo sapiens
MFAVHLMAFYFSKLKEDQIKKVDRFLYHMRLSDDTLLDIMRRFRAEMEKGLAKGTNPTAAVKMLPTFVRAIPDGSENGEFLSLDLGGSKFRVLKVQVAEEGKRHVQMESQFYPTPNEIIRGNGTELFEYVADCLADFMKTKDLKHKKLPLGLTFSFPCRQTKLEEGVLLSWTKKFKARGVQDTDVVSRLTKAMRRHKDMDVDILALVNDTVGTMMTCAYDDPYCEVGVIIGTGTNACYMEDMSNIDLVEGDEGRMCINTEWGAFGDDGALEDIRTEFDRELDLGSLNPGKQLFEKMISGLYLGELVRLILLKMAKAGLLFGGEKSSALHTKGKIETRHVAAMEKYKEGLANTREILVDLGLEPSEADCIAVQHVCTIVSFRSANLCAAALAAILTRLRENKKVERLRTTVGMDGTLYKIHPQYPKRLHKVVRKLVPSCDVRFLLSESGSTKGAAMVTAVASRVQAQRKQIDRVLALFQLTREQLVDVQAKMRAELEYGLKKKSHGLATVRMLPTYVCGLPDGTEKGKFLALDLGGTNFRVLLVKIRSGRRSVRMYNKIFAIPLEIMQGTGEELFDHIVQCIADFLDYMGLKGASLPLGFTFSFPCRQMSIDKGTLIGWTKGFKATDCEGEDVVDMLREAIKRRNEFDLDIVAVVNDTVGTMMTCGYEDPNCEIGLIAGTGSNMCYMEDMRNIEMVEGGEGKMCINTEWGGFGDNGCIDDIRTRYDTEVDEGSLNPGKQRYEKMTSGMYLGEIVRQILIDLTKQGLLFRGQISERLRTRGIFETKFLSQIESDRLALLQVRRILQQLGLDSTCEDSIVVKEVCGAVSRRAAQLCGAGLAAIVEKRREDQGLEHLRITVGVDGTLYKLHPHFSRILQETVKELAPRCDVTFMLSEDGSGKGAALITAVAKRLQQAQKEN

SEQ ID NO: 797766 - protein, 724 aa, Homo sapiens
MFAVHLMAFYFSKLKEDQIKKVDRFLYHMRLSDDTLLDIMRRFRAEMEKGLAKGTNPTAAVKMLPTFVRAIPDGSENGEFLSLDLGGSKFRVLKVQVAEEGKRHVQMESQFYPTPNEIIRGNGTELFEYVADCLADFMKTKDLKHKKLPLGLTFSFPCRQTKLEEGVLLSWTKKFKARGVQDTDVVSRLTKAMRRHKDMDVDILALVNDTVGTMMTCAYDDPYCEVGVIIGTGTNACYMEDMSNIDLVEGDEGRMCINTEWGAFGDDGALEDIRTEFDRELDLGSLNPGKQLFEKMISGLYLGELVRLILLKMAKAGLLFGGEKSSALHTKGKIETRHVAAMEKYKEGLANTREILVDLGLEPSEADCIAVQHVCTIVSFRSANLCAAALAAILTRLRENKKVERLRTTVGMDGTLYKIHPQYPKRLHKVVRKLVPSCDVRFLLSESGSTKGAAMVTAVASRVQAQRKQIDRVLALFQLTREQLVDVQAKMRAELEYGLKKKSHGLATVRMLPTYVCGLPDGTEKGKFLALDLGGTNFRVLLVKIRSGRRSVRMYNKIFAIPLEIMQGTGEELFDHIVQCIADFLDYMGLKGASLPLGFTFSFPCRQMSIDKGTLIGWTKGFKATDCEGEDVVDMLREAIKRRNEFDLDIVAVVNDTVGTMMTCGYEDPNCEIGLIAGTGSNMCYMEDMRNIEMVEGGEEEDVHLFFILPVVCVAAVDSCFKDC

SEQ ID NO: 797767 - protein, 791 aa, Homo sapiens
MFAVHLMAFYFSKLKEDQIKKVDRFLYHMRLSDDTLLDIMRRFRAEMEKGLAKGTNPTAAVKMLPTFVRAIPDGSENGEFLSLDLGGSKFRVLKVQVAEEGKRHVQMESQFYPTPNEIIRGNGTELFEYVADCLADFMKTKDLKHKKLPLGLTFSFPCRQTKLEEGVLLSWTKKFKARGVQDTDVVSRLTKAMRRHKDMDVDILALVNDTVGTMMTCAYDDPYCEVGVIIGTGTNACYMEDMSNIDLVEGDEGRMCINTEWGAFGDDGALEDIRTEFDRELDLGSLNPGKQLFEKMISGLYLGELVRLILLKMAKAGLLFGGEKSSALHTKGKIETRHVAAMEKYKEGLANTREILVDLGLEPSEADCIAVQHVCTIVSFRSANLCAAALAAILTRLRENKKVERLRTTVGMDGTLYKIHPQYPKRLHKVVRKLVPSCDVRFLLSESGSTKGAAMVTAVASRVQAQRKQIDRVLALFQLTREQLVDVQAKMRAELEYGLKKKSHGLATVRMLPTYVCGLPDGTEKGKFLALDLGGTNFRVLLVKIRSGRRSVRMYNKIFAIPLEIMQGTGEELFDHIVQCIADFLDYMGLKGASLPLGFTFSFPCRQMSIDKGTLIGWTKGFKATDCEGEDVVDMLREAIKRRNEFDLDIVAVVNDTVGTMMTCGYEDPNCEIGLIAGTGSNMCYMEDMRNIEMVEGGEGKMCINTEWGGFGDNGCIDDIRTRYDTEVDEGSLNPGKQRYEKMTSGMYLGEIVRQILIDLTKQGLLFRGQISERLRTRGIFETKFLSQIER

SEQ ID NO: 797768 - protein, 204 aa, Homo sapiens
GPADSLSILGQELGFGRCPWSGDGSEICPRKRRPYLGEIVRQILIDLTKQGLLFRGQISERLRTRGIFETKFLSQIESDRLALLQVRRILQQLGLDSTCEDSIVVKEVCGAVSRRAAQLCGAGLAAIVEKRREDQGLEHLRITVGVDGTLYKLHPHFSRILQETVKELAPRCDVTFMLSEDGSGKGAALITAVAKRLQQAQKEN

SEQ ID NO: 797769 - protein, 551 aa, Homo sapiens
MFAVHLMAFYFSKLKEDQIKKVDRFLYHMRLSDDTLLDIMRRFRAEMEKGLAKGTNPTAAVKMLPTFVRAIPDGSENGEFLSLDLGGSKFRVLKVQVAEEGKRHVQMESQFYPTPNEIIRGNGTELFEYVADCLADFMKTKDLKHKKLPLGLTFSFPCRQTKLEEGVLLSWTKKFKARGVQDTDVVSRLTKAMRRHKDMDVDILALVNDTVGTMMTCAYDDPYCEVGVIIGTGTNACYMEDMSNIDLVEGDEGRMCINTEWGAFGDDGALEDIRTEFDRELDLGSLNPGKQLFEKMISGLYLGELVRLILLKMAKAGLLFGGEKSSALHTKGKIETRHVAAMEKYKEGLANTREILVDLGLEPSEADCIAVQHVCTIVSFRSANLCAAALAAILTRLRENKKVERLRTTVGMDGTLYKIHPQYPKRLHKVVRKLVPSCDVRFLLSESGSTKGAAMVTAVASRVQAQRKQIDRVLALFQLTREQLVDVQAKMRAELEYGLKKKSHGLATVRMLPTYVCGLPDGTGGPAQPPSLNSHPGLPSKLLKASEVLGF

SEQ ID NO: 797770 - protein, 67 aa, Homo sapiens
SALATGSARSGVGGKAAAGLIKDPIKRPAEGRDLVSSGVWRWSYYYVRYSAAERRNVMTTEQQVPWS

SEQ ID NO: 797771 - protein, 80 aa, Homo sapiens
SALATGSARSGVGGKAAAGLIKDPIKRPAEGRDLVSSGVWRWSYYYVRYSAVRSRPFYRKFKTFKMCISFLQSVTTGASP

SEQ ID NO: 797772 - protein, 91 aa, Homo sapiens
GYGKINKKRIALIHNTLIARSLGKYGIICLEDLIHEIYTVGKCFKEANNYLWPFKLSSPRGGMKKKTTHFVEGGDASNREDQINRLIRRMN

SEQ ID NO: 797773 - protein, 125 aa, Homo sapiens [sequence omitted]

SEQ ID NO: 797774 - protein, 107 aa, Homo sapiens
MECCWVAQAGLEFLGSSDPPVSENWWVLGLTDFKNEAADPRESVSTSYSSRFMRQGLPAHLAGPKHLFNLLPPSCLAALLSSSSRVSKSWKQKHIYTHAHMYMPTVT

SEQ ID NO: 797775 - protein, 413 aa, Homo sapiens
LFWAEALDERRNYSRVQGLAPGVGGCFRVALPETGSCPSSSPGGSCPRGGRSPRGREPRMDFILEDMDLAANEISIYDKLSETVDLVRQTGHQCGMSEKAIEKFIRQLLEKNEPQRPPPQYPLLIVVYKVLATLGLILLTAYFVIQPFSPLAPEPVLSGAHTWRSLIHHIRLMSLPIAKKYMSENKGVPLHGGDEDRPFPDFDPWWTNDCEQNESEPIPANCTGCAQKHLKVMLLEDAPRKFERLHPLVIKTGKPLLEEEIQHFLCQYPEATEGFSEGFFAKWWRCFPERWFPFPYPWRRPLNRSQMLRELFPVFTHLPFPKDASLNKCSFLHPEPVVGSKMHKMPDLFIIGSGEAMLQLIPPFQCRRHCQSVAMPIEPGDIGYVDTTHWKVYVIARGVQPLVICDGTAFSEL

SEQ ID NO: 797776 - protein, 347 aa, Homo sapiens
MDLAANEISIYDKLSETVDLVRQTGHQCGMSEKAIEKFIRQLLEKNEPQRPPPQYPLLIVVYKVLATLGLILLTAYFVIQPFSPLAPEPVLSGAHTWRSLIHHIRLMSLPIAKKYMSENKGVPLHGGDEDRPFPDFDPWWTNDCEQNESEPIPANCTGCAQKHLKVMLLEDAPRKFERLHPLVIKTGKPLLEEEIQHFLCQYPEATEGFSEGFFAKWWRCFPERWFPFPYPWRRPLNRSQMLRELFPVFTHLPFPKDASLNKCSFLHPEPVVGSKMHKMPDLFIIGSGEAMLQLIPPFQCRRHCQSVAMPIEPGDIGYVDTTHWKVYVIARGVQPLVICDGTAFSEL

SEQ ID NO: 797777 - protein, 394 aa, Homo sapiens [sequence omitted]

SEQ ID NO: 797778 - protein, 347 aa, Homo sapiens; identical to SEQ ID NO: 797776

SEQ ID NO: 797779 - protein, 370 aa, Homo sapiens
ILRIPWKPPMVDTSLVMDFILEDMDLAANEISIYDKLSETVDLVRQTGHQCGMSEKAIEKFIRQLLEKNEPQRPPPQYPLLIVVYKVLATLGLILLTAYFVIQPFSPLAPEPVLSGAHTWRSLIHHIRLMSLPIAKKYMSENKGVPLHGGDEDRPFPDFDPWWTNDCEQNESEPIPANCTGCAQKHLKVMLLEDAPRKFERLHPLVIKTGKPLLEEEIQHFLCQYPEATEGFSEGFFAKWWRCFPERWFPFPYPWRRPLNRSQMLRELFPVFTHLPFPKDASLNKCSFLHPEPVVGSKMHKMPDLFIIGSGEAMLQLIPPFQCRRHCQSVAMPIEPGDIGYVDTTHWKVYVIARGVQPLVICDGTAFSEL

SEQ ID NO: 797780 - protein, 413 aa, Homo sapiens; identical to SEQ ID NO: 797775

SEQ ID NO: 797781 - protein, 241 aa, Homo sapiens
MSLPIAKKYMSENKGVPLHGGDEDRPFPDFDPWWTNDCEQNESEPIPANCTGCAQKHLKVMLLEDAPRKFERLHPLVIKTGKPLLEEEIQHFLCQYPEATEGFSEGFFAKWWRCFPERWFPFPYPWRRPLNRSQMLRELFPVFTHLPFPKDASLNKCSFLHPEPVVGSKMHKMPDLFIIGSGEAMLQLIPPFQCRRHCQSVAMPIEPGDIGYVDTTHWKVYVIARGVQPLVICDGTAFSEL

SEQ ID NO: 797782 - protein, 291 aa, Homo sapiens
LFWAEALDERRNYSRVQGLAPGVGGCFRVALPETGSCPSSSPGGSCPRGGRSPRGREPRMDFILEDMDLAANEISIYDKLSETVDLVRQTGHQCGMSEKAIEKFIRQLLEKNEPQRPPPQYPLLIVVYKVLATLGLILLTAYFVIQPFSPLAPEPVLSGAHTWRSLIHHIRLMSLPIAKKYMSENKGVPLHGGDEDRPFPDFDPWWTNDCEQNESEPIPANCTGCAQKHLKVMLLEDAPRKFERLHPLVIKTGKPLLEEEIQHFLCQYPEATEGFSEGFFAKWWRCFLSEL

SEQ ID NO: 797783 - protein, 111 aa, Homo sapiens
HLGPVLSELFPVFTHLPFPKDASLNKCSFLHPEPVVGSKMHKMPDLFIIGSGEAMLQLIPPFQCRRHCQSVAMPIEPGDIGYVDTTHWKVYVIARGVQPLVICDGTAFSEL

SEQ ID NO: 797784 - protein, 384 aa, Homo sapiens
LFWAEALDERRNYSRVQGLAPGVGGCFRVALPETGSCPSSSPGGSCPRGGRSPRGREPRMDFILEDMDLAANEISIYDKLSETVDLVRQTGHQCGMSEKAIEKFIRQLLEKNEPQRPPPQYPLLIVVYKVLATLGLILLTAYFVIQPFSPLAPEPVLSGAHTWRSLIHHIRLMSLPIAKKYMSENKGVPLHGGDEDRPFPDFDPWWTNDCEQNESEPIPANCTGCAQKHLKVMLLEDAPRKFERLHPLVIKTGKPLLEEEIQHFLCQYPEATEGFSEGFFAKWWRCFPERWFPFPYPWRRPLNRSQMLRELFPVFTHLPFPKDASLNKCSFLHPEPVVGSKMHKMPDLFIIGSGEAMLQLIPPFQCRRHCQSVAMPIEPGDIGM

SEQ ID NO: 797785 - protein, 347 aa, Homo sapiens; identical to SEQ ID NO: 797776

SEQ ID NO: 797786 - protein, 347 aa, Homo sapiens; identical to SEQ ID NO: 797776

SEQ ID NO: 797787 - protein, 347 aa, Homo sapiens; identical to SEQ ID NO: 797776

SEQ ID NO: 797788 - protein, 347 aa, Homo sapiens; identical to SEQ ID NO: 797776

SEQ ID NO: 797789 - protein, 342 aa, Homo sapiens
LFWAEALDERRNYSRVQGLAPGVGGCFRVALPETGSCPSSSPGGSCPRGGRSPRGREPRMDFILEDMDLAANEISIYDKLSETVDLVRQTGHQCGMSEKAIEKFIRQLLEKNEPQRPPPQYPLLIVVYKVLATLGLILLTAYFVIQPFSPLAPEPVLSGAHTWRSLIHHIRLMSLPIAKKYMSENKGVPLHGGDEDRPFPDFDPWWTNDCEQNESEPIPANCTGCAQKHLKVMLLEDAPRKFERLHPLVIKTGKPLLEEEIQHFLCQYPEATEGFSEGFFAKWWRCFPERWFPFPYPWRRPLNRSQMLRELFPVFTHLPFPKDASLNKCSFLHPEPVVGSKR

SEQ ID NO: 797790 - protein, 413 aa, Homo sapiens; identical to SEQ ID NO: 797775

SEQ ID NO: 797791 - protein, 109 aa, Homo sapiens [sequence omitted]

SEQ ID NO: 797792 - protein, 107 aa, Homo sapiens
PVSLEKPCMSHLLFLLDTSSAKCSKCPHSLPASLPSFPLFSRRGGLCCLQMTVDLIDRQLFFIVCFLLLLTKVHSLFYSMLKLLNGNGFSLTKEAFSSPLPCLSFLR

SEQ ID NO: 797793 - protein, 121 aa, Homo sapiens
  misc_feature (26)..(26): Xaa can be any naturally occurring amino acid
MAAVAFKAEGQQSNAEVPAFVEPTSXPTGACLSFLDCSKVAYQHLPRSLGLPFKTGFDLTDSHVAILLKEGGMGIESVKSAPSLRTQDLPRNKRLTQTGGKAVKHERTQKMFKGSSGEREK

SEQ ID NO: 797794 - protein, 121 aa, Homo sapiens; identical to SEQ ID NO: 797793
  misc_feature (26)..(26): Xaa can be any naturally occurring amino acid

SEQ ID NO: 797795 - protein, 632 aa, Homo sapiens
CECGSLLDSSWDKQKNSCNAESLGTSMPSETGVSACVSFSPTSLCCDPSVYSLVTFPLQEGGPGVSPSHLVSSLLGSLLPQSTGGQLRRSYLKKGGVCQGAGWSLAIYLPSSGTLGTEMALMQELYSTPASRLDSFVAQWLQPHREWKEEVLDAVRTVEEFLRQEHFQGKRGLDQDVRVLKVVKVGSFGNGTVLRSTREVELVAFLSCFHSFQEAAKHHKDVLRLIWKTMWQSQDLLDLGLEDLRMEQRVPDALVFTIQTRGTAEPITVTIVPAYRALGPSLPNSQPPPEVYVSLIKACGGPGNFCPSFSELQRNFVKHRPTKLKSLLRLVKHWYQQYVKARSPRANLPPLYALELLTIYAWEMGTEEDENFMLDEGFTTVMDLLLEYEVICIYWTKYYTLHNAIIEDCVRKQLKKERPIILDPADPTLNVAEGYRWDIVAQRASQCLKQDCCYDNRENPISSWNVKRARDIHLTVEQRGYPDFNLIVNPYEPIRKVKEKIRRTRGYSGLQRLSFQVPGSERQLLSSRCSLAKYGIFSHTHIYLLETIPSEIQVFVKNPDGGSYAYAINPNSFILGLKQQIEDQQGLPKKQQQLEFQGQVLQDWLGLGIYGIQDSDTLILSKKKGEALFPAS

SEQ ID NO: 797796 - protein, 515 aa, Homo sapiens
CECGSLLDSSWDKQKNSCNAESLGTSMPSETGVSACVSFSPTSLCCDPSVYSLVTFPLQEGGPGVSPSHLVSSLLGSLLPQSTGGQLRRSYLKKGGVCQGAGWSLAIYLPSSGTLGTEMALMQELYSTPASRLDSFVAQWLQPHREWKEEVLDAVRTVEEFLRQEHFQGKRGLDQDVRVLKVVKVGSFGNGTVLRSTREVELVAFLSCFHSFQEAAKHHKDVLRLIWKTMWQSQDLLDLGLEDLRMEQRVPDALVFTIQTRGTAEPITVTIVPAYRALGPSLPNSQPPPEVYVSLIKACGGPGNFCPSFSELQRNFVKHRPTKLKSLLRLVKHWYQQYVKARSPRANLPPLYALELLTIYAWEMGTEEDENFMLDEGFTTVMDLLLEYEVICIYWTKYYTLHNAIIEDCVRKQLKKERPIILDPADPTLNVAEGTGWVWGSMASKTVTLSSSRRRKERLCFQPVSFLWETSLYISAMYSRTHPVNHSVPLSTGKVPGLHQFYNELSQARRGSSHL

SEQ ID NO: 797797 - protein, 113 aa, Homo sapiens
HTPPHLANFSIFNTGFHHVGQAGLKLLTSSDLPAWAFQSAGITGVNRHTWPQFPYELFHHQYLSGQQCLYLCMLSAMKNPLLKAGITGMSTRRHYLTFAMILYVGNMGSSVLP

SEQ ID NO: 797798 - protein, 189 aa, Homo sapiens
LLNDSLNLHRYSGDPGSPMMCQLQQFDLWVLRGVLNFGGETCPGLFLYTKVEDYSKWITSKAERAGPPLSSLHHWEKLISFSHHGPNATMTQKTYSDSELGHVGSYLQGQRRTITHSRLGNSSRDSLDVREKDVKESGRSPEASVQPLYYDYYGGEVGEGRIFAGQNRLYQPEEIILVSFVLVFFCSSI

SEQ ID NO: 797799 - protein, 394 aa, Homo sapiens
MVSAAGLSGDGKMRGVLLVLLGLLYSSTSCGVQKASVFYGPDPKEGLVSSMEFPWVVSLQDSQYTHLAFGCILSEFWVLSIASAIQNRKDIVVIVGISNMDPSKIAHTEYPVNTIIIHEDFDNNSMSNNIALLKTDTAMHFGNLVQSICFLGRMLHTPPVLQNCWVSGWNPIICRNHMTMGVLRKIFVKDLDMCPLYKLQKTECGSHTKEETKTACLGDPGSPMMCQLQQFDLWVLRGVLNFGGETCPGLFLYTKVEDYSKWITSKAERAGPPLSSLHHWEKLISFSHHGPNATMTQKTYSDSELGHVGSYLQGQRRTITHSRLGNSSRDSLDVREKDVKESGRSPEASVQPLYYDYYGGEVGEGRIFAGQNRLYQPEEIILVSFVLVFFCSSI

SEQ ID NO: 797800 - protein, 259 aa, Homo sapiens [sequence omitted]

SEQ ID NO: 797801 - protein, 76 aa, Homo sapiens
MEFPWVVSLQDSQYTHLAFGCILSEFWVLSIASAIQNRPVPLPLGPATSPGVRVGATLFPAQPGEALKGAFWGDRA

SEQ ID NO: 797802 - protein, 394 aa, Homo sapiens; identical to SEQ ID NO: 797799

SEQ ID NO: 797803 - protein, 226 aa, Homo sapiens
MESHICRNHMTMGVLRKIFVKDLDMCPLYKLQKTECGSHTKEETKTACLGDPGSPMMCQLQQFDLWVLRGVLNFGGETCPGLFLYTKVEDYSKWITSKAERAGPPLSSLHHWEKLISFSHHGPNATMTQKTYSDSELGHVGSYLQGQRRTITHSRLGNSSRDSLDVREKDVKESGRSPEASVQPLYYDYYGGEVGEGRIFAGQNRLYQPEEIILVSFVLVFFCSSI

SEQ ID NO: 797804 - protein, 115 aa, Homo sapiens
MRGVLLVLLGLLYSSTSCGVQKASVFYGPDPKEGLVSSMEFPWVVSLQDSQYTHLAFGCILSEFWVLSIASAIQNRKVGFLQVRTGCISPKKSSWFPSCLFSFAAVSSPGATPPN

SEQ ID NO: 797805 - protein, 166 aa, Homo sapiens
GSWYAPGSEQLLLASFILQVPAIQTVLELQKLRPDLWPGPPQGLLSYSHCFCIRYFQLQLPTGWGTHFRQKVLVPSTDPTPRAATAACGFRMKGETPVNSTMSIGQARKMVEQLKIEASLCRIKVSKAAADLMTYCDAHACEDPLITPVPTSENPFREKKFFCALL

SEQ ID NO: 797806 - protein, 166 aa, Homo sapiens; identical to SEQ ID NO: 797805

SEQ ID NO: 797807 - protein, 166 aa, Homo sapiens; identical to SEQ ID NO: 797805

SEQ ID NO: 797808 - protein, 223 aa, Homo sapiens
MELLTKQGWSSAYSIESVIMQISATLVKGKARVQFGANKSQYSLTRAQQSYKSLVQIHEKNGWYTPPKKTVNLSGVYSRQVDRPEYEADLGTLGEYPKGLKEVPLGCQHFRKAQGPTPPRSKLHWLAGGRAGGGEDTVPCVPAPVPPSLAPGRQYVHADPASQSTFMEMNRLGWPALAGHMLARSRLQPRVVAARHAVLMAAHVAVSMQHGDAPRSEMTQEPP

SEQ ID NO: 797809 - protein, 401 aa, Homo sapiens
ASCAGSPWEHAAPSHVRGERRRRGVARKHARHTQTRTEAPTGACLDELSCEFLLAGAGGAGAGAAPGPHLPPRGSVPGDPVRIHCNITESYPAVPPIWSVESDDPNLAAVLERLVDIKKGNTLLLQHLKRIISDLCKLYNLPQHPDVEMLDQPLPAEQCTQEDVSSEDEDEEMPEDTEDLDHYEMKEEEPAEGKKSEDDGIGKENLAILEKIKKNQRQDYLNGAVSGSVQATDRLMKELRDIYRSQSFKGGNYAVELVNDSLYDWNVKLLKVDQDSALHNDLQILKEKEGADFILLNFSFKDNFPFDPPFVRVVSPVLSGGYVLGGGAICMELLTKQGWSSAYSIESVIMQISATLVKGKARVQFGANKSQYSLTRAQQSYKSLVQIHEKNGWYTPPKEDG

SEQ ID NO: 797810 - protein, 474 aa, Homo sapiens
GGACPGGGGGAILAKGGSGSADRGGGGGGGGGGPERRPEVPARRPRSGGTRRMQQPQPQGQQQPGPGQQLGGQGAAPGAGGGPGGGPGPGPCLRRELKLLESIFHRGHERFRIASACLDELSCEFLLAGAGGAGAGAAPGPHLPPRGSVPGDPVRIHCNITESYPAVPPIWSVESDDPNLAAVLERLVDIKKGNTLLLQHLKRIISDLCKLYNLPQHPDVEMLDQPLPAEQCTQEDVSSEDEDEEMPEDTEDLDHYEMKEEEPAEGKKSEDDGIGKENLAILEKIKKNQRQDYLNGAVSGSVQATDRLMKELRDIYRSQSFKGGNYAVELVNDSLYDWNVKLLKVDQDSALHNDLQILKEKEGADFILLNFSFKDNFPFDPPFVRVVSPVLSGGYVLGGGAICMELLTKQGWSSAYSIESVIMQISATLVKGKARVQFGANKSQYSLTRAQQSYKSLVQIHEKNGWYTPPKEDG

SEQ ID NO: 797811 - protein, 337 aa, Homo sapiens
GGACPGGGGGAILAKGGSGSADRGGGGGGGGGGPERRPEVPARRPRSGGTRRMQQPQPQGQQQPGPGQQLGGQGAAPGAGGGPGGGPGPGPCLRRELKLLESIFHRGHERFRIASACLDELSCEFLLAGAGGAGAGAAPGPHLPPRGSVPGDPVRIHCNITESYPAVPPIWSVESDDPNLAAVLERLVDIKKGNTLLLQHLKRIISDLCKLYNLPQHPDVEMLDQPLPAEQCTQEDVSSEDEDEEMPEDTEDLDHYEMKEEEPAEGKKSEDDGIGKENLAILEKIKKNQRQDYLNGAVSGSVQATDRLMKELRDIYRSQSFKGGEFAPERGLHKSHP

SEQ ID NO: 797812 - protein, 351 aa, Homo sapiens
GGACPGGGGGAILAKGGSGSADRGGGGGGGGGGPERRPEVPARRPRSGGTRRMQQPQPQGQQQPGPGQQLGGQGAAPGAGGGPGGGPGPGPCLRRELKLLESIFHRGHERFRIASACLDELSCEFLLAGAGGAGAGAAPGPHLPPRGSVPGDPVRIHCNITESYPAVPPIWSVESDDPNLAAVLERLVDIKKGNTLLLQHLKRIISDLCKLYNLPQHPDVEMLDQPLPAEQCTQEDVSSEDEDEEMPEDTEDLDHYEMKEEEPAEGKKSEDDGIGKENLAILEKIKKNQRQDYLNGAVSGSVQATDRLMKELRDIYRSQSFKGGNYAVELVNDSLYDWNVKLLKAGAVPTP

SEQ ID NO: 797813 - protein, 105 aa, Homo sapiens [sequence omitted]

SEQ ID NO: 797814 - protein, 474 aa, Homo sapiens; identical to SEQ ID NO: 797810

SEQ ID NO: 797815 - protein, 474 aa, Homo sapiens; identical to SEQ ID NO: 797810

SEQ ID NO: 797816 - protein, 474 aa, Homo sapiens; identical to SEQ ID NO: 797810

SEQ ID NO: 797817 - protein, 626 aa, Homo sapiens
GGACPGGGGGAILAKGGSGSADRGGGGGGGGGGPERRPEVPARRPRSGGTRRMQQPQPQGQQQPGPGQQLGGQGAAPGAGGGPGGGPGPGPCLRRELKLLESIFHRGHERFRIASACLDELSCEFLLAGAGGAGAGAAPGPHLPPRGSVPGDPVRIHCNITESYPAVPPIWSVESDDPNLAAVLERLVDIKKGNTLLLQHLKRIISDLCKLYNLPQHPDVEMLDQPLPAEQCTQEDVSSEDEDEEMPEDTEDLDHYEMKEEEPAEGKKSEDDGIGKENLAILEKIKKNQRQDYLNGAVSGSVQATDRLMKELRDIYRSQSFKGGNYAVELVNDSLYDWNVKLLKVDQDSALHNDLQILKEKEGADFILLNFSFKDNFPFDPPFVRVVSPVLSGGYVLGGGAICMELLTKQGWSSAYSIESVIMQISATLVKGKARVQFGANKSQYSLTRAQQSYKSLVQIHEKNGWYTPPKKTVNLSGVYSRQVDRPEYEADLGTLGEYPKGLKEVPLGCQHFRKAQGPTPPRSKLHWLAGGRAGGGEDTVPCVPAPVPPSLAPGRQYVHADPASQSTFMEMNRLGWPALAGHMLARSRLQPRVVAARHAVLMAAHVAVSMQHGDAPRSEMTQEPP

SEQ ID NO: 797818 - protein, 400 aa, Homo sapiens
GGACPGGGGGAILAKGGSGSADRGGGGGGGGGGPERRPEVPARRPRSGGTRRMQQPQPQGQQQPGPGQQLGGQGAAPGAGGGPGGGPGPGPCLRRELKLLESIFHRGHERFRIASACLDELSCEFLLAGAGGAGAGAAPGPHLPPRGSVPGDPVRIHCNITESYPAVPPIWSVESDDPNLAAVLERLVDIKKGNTLLLQHLKRIISDLCKLYNLPQHPDVEMLDQPLPAEQCTQEDVSSEDEDEEMPEDTEDLDHYEMKEEEPAEGKKSEDDGIGKENLAILEKIKKNQRQDYLNGAVSGSVQATDRLMKELRDIYRSQSFKGGNYAVELVNDSLYDWNVKLLKVDQDSALHNDLQILKEKEGADFILLNFSFKPLKREYIYSTEYCLSKQSLSVCPLIP

SEQ ID NO: 797819 - protein, 474 aa, Homo sapiens; identical to SEQ ID NO: 797810

SEQ ID NO: 797820 - protein, 330 aa, Homo sapiens
AVLEDPNFDGRIHCNITESYPAVPPIWSVESDDPNLAAVLERLVDIKKGNTLLLQHLKRIISDLCKLYNLPQHPDVEMLDQPLPAEQCTQEDVSSEDEDEEMPEDTEDLDHYEMKEEEPAEGKKSEDDGIGKENLAILEKIKKNQRQDYLNGAVSGSVQATDRLMKELRDIYRSQSFKGGNYAVELVNDSLYDWNVKLLKVDQDSALHNDLQILKEKEGADFILLNFSFKDNFPFDPPFVRVVSPVLSGGYVLGGGAICMELLTKQGWSSAYSIESVIMQISATLVKGKARVQFGANKSQYSLTRAQQSYKSLVQIHEKNGWYTPPKEDG

SEQ ID NO: 797821 - protein, 234 aa, Homo sapiens
LIRLRMPEDTEDLDHYEMKEEEPAEGKKSEDDGIGKENLAILEKIKKNQRQDYLNGAVSGSVQATDRLMKELRDIYRSQSFKGGNYAVELVNDSLYDWNVKLLKVDQDSALHNDLQILKEKEGADFILLNFSFKDNFPFDPPFVRVVSPVLSGGYVLGGGAICMELLTKQGWSSAYSIESVIMQISATLVKGKARVQFGANKSQYSLTRAQQSYKSLVQIHEKNGWYTPPKEDG

SEQ ID NO: 797822 - protein, 93 aa, Homo sapiens
FCQAQLTNLSHARYVLGGGAICMELLTKQGWSSAYSIESVIMQISATLVKGKARVQFGANKSQYSLTRAQQSYKSLVQIHEKNGWYTPPKEDG

SEQ ID NO: 797823 - protein, 105 aa, Homo sapiens [sequence omitted]

SEQ ID NO: 797824 - protein, 474 aa, Homo sapiens; identical to SEQ ID NO: 797810

SEQ ID NO: 797825 - protein, 462 aa, Homo sapiens
GGACPGGGGGAILAKGGSGSADRGGGGGGGGGGPERRPEVPARRPRSGGTRRMQQPQPQGQQQPGPGQQLGGQGAAPGAGGGPGGGPGPGPCLRRELKLLESIFHRGHERFRIASACLDELSCEFLLAGAGGAGAGAAPGPHLPPRGSVPGDPVRIHCNITESYPAVPPIWSVESDDPNLAAVLERLVDIKKGNTLLLQHLKRIISDLCKLYNLPQHPDVEMLDQPLPAEQCTQEDVSSEDEDEEMPEDTEDLDHYEMKEEEPAEGKKSEDDGIGKENLAILEKIKKNQRQDYLNGAVSGSVQATDRLMKELRDIYRSQSFKGGNYAVELVNDSLYDWNVKLLKVDQDSALHNDLQILKEKEGADFILLNFSFKDNFPFDPPFVRVVSPVLSGGYVLGGGAICMELLTKQGWSSAYSIESVIMQISATLVKGKARVQFGANKVRILVLGLVGLGGAKYTWGH

SEQ ID NO: 797826 - protein, 301 aa, Homo sapiens
SRCFKRLLRGSERGRSRSPNERTEPTGQVHGCGDGSGMTGHHGWGYGQDDGPSHWHKLYPIAQGDRQSPINIISSQAVYSPSLQPLELSYEACMSLSITNNGHSVQVDFNDSDDRTVVTGGPLEGPYRLKQFHFHWGKKHDVGSEHTVDGKSFPSELHLVHWNAKKYSTFGEAASAPDGLAVVGVFLETGDEHPSMNRLTDALYMVRFKGTKAQFSCFNPKCLLPASRHYWTYPGSLTTPPLSESVTWIVLREPICISERQMGKFRSLLFTSEDDERIHMVNNFRPPQPLKGRVVKASFRA

SEQ ID NO: 797827 - protein, 149 aa, Homo sapiens
MTEPLHLVHWNAKKYSTFGEAASAPDGLAVVGVFLETGDEHPSMNRLTDALYMVRFKGTKAQFSCFNPKCLLPASRHYWTYPGSLTTPPLSESVTWIVLREPICISERQMGKFRSLLFTSEDDERIHMVNNFRPPQPLKGRVVKASFRA

SEQ ID NO: 797828 - protein, 208 aa, Homo sapiens
MSLSITNNGHSVQVDFNDSDDRTVVTGGPLEGPYRLKQFHFHWGKKHDVGSEHTVDGKSFPSELHLVHWNAKKYSTFGEAASAPDGLAVVGVFLETGDEHPSMNRLTDALYMVRFKGTKAQFSCFNPKCLLPASRHYWTYPGSLTTPPLSESVTWIVLREPICISERQMGKFRSLLFTSEDDERIHMVNNFRPPQPLKGRVVKASFRA

SEQ ID NO: 797829 - protein, 188 aa, Homo sapiens
MVRYSLDPENPTKSCKSRGSNLRVHFKNTRETAQAIKGMHIRKATKYLKDVTLQKQCVPFRRYNGGVGRCAQAKQWGWTQGRWPKKSAEFLLHMLKNAESNAELKGLDVDSLVIEHIQVNKAPKMRRRTYRAHGRINPYMSSPCHIEMILTEKEQIVPKPEEEVAHCDTTSQWGGEDSFTCPINPLLV

SEQ ID NO: 797830 - protein, 200 aa, Homo sapiens
MVRYSLDPENPTKSCKSRGSNLRVHFKNTRETAQAIKGMHIRKATKYLKDVTLQKQCVPFRRYNGGVGRCAQAKQWGWTQGRWPKKSAEFLLHMLKNAESNAELKGLDVDSLVIEHIQVNKAPKMRRRTYRAHGRINPYMSSPCHIEMILTEKEQIVPKPEEEVAQKKKISQKKLEETKTYWHGSKFSIKINVINKEKKK

SEQ ID NO: 797831 - protein, 193 aa, Homo sapiens
STFCTHSERTPPNVDSSVAKKSRGSNLRVHFKNTRETAQAIKGMHIRKATKYLKDVTLQKQCVPFRRYNGGVGRCAQAKQWGWTQGRWPKKSAEFLLHMLKNAESNAELKGLDVDSLVIEHIQVNKAPKMRRRTYRAHGRINPYMSSPCHIEMILTEKEQIVPKPEEEVAHCDTTSQWGGEDSFTCPINPLLV

SEQ ID NO: 797832 - protein, 166 aa, Homo sapiens
MLVISNERLPSPSQGLLPTLDYERHSFGVRGFSESPPLPPLLPHPLVPFRITWPPISHIPDPGTRVPFFRPSVLLPPLLRVSVPRGCSPPPPVSQASSRRWSRVPVLRWLRESGVRSAFFPFLSYICLFESAPARPVSLPSLLGPLLLFYFSLATPVLSNSLFRTH

SEQ ID NO: 797833 - protein, 166 aa, Homo sapiens; identical to SEQ ID NO: 797832

SEQ ID NO: 797834 - protein, 71 aa, Homo sapiens
SPALRPPFCCTQTGSPPLTTGQKGKGVQASKTNDLHLGADPSCSQLGPSPSVGTRKIFAHLEKLLVQPNFI

SEQ ID NO: 797835 - protein, 114 aa, Homo sapiens
MLIFQHQGAQTILLEMLVVFLYLIVLVLCGKVILSEEAPGLTPFSCCELILQELWPLLNRPFALGLNQYKVYPQIFALYQKVLLCGPLRLFVHIIFSLSHLTAASTLYNGVQEN

SEQ ID NO: 797836 - protein, 114 aa, Homo sapiens; identical to SEQ ID NO: 797835

SEQ ID NO: 797837 - protein, 125 aa, Homo sapiens
LDSRQRNERNVRWVRHYINHSLCGQEPRQAASATSSLRPGKSNLPKCPRLASVPFPTAAIMNIHCPIISPLDEDYSTYFTEEIKVLMQPGNTTGAKRGLALCMEAEGLKFAFDHLQLLAPVVAVF

SEQ ID NO: 797838 - protein, 73 aa, Homo sapiens
VDYQAALGATVFSFFSLLRAVCYSVKLFSTVLTLQFDRATSFFLDINPGPTEQRVQKGLYRFPGRIAKLQGFR

SEQ ID NO: 797839 - protein, 111 aa, Homo sapiens
MADLQKTRKQKDGTDTSQSGEDGGCWQREREDSGDAEAHAFKSPSKENKKKDKDMLEDKFKSNNLEREQEQLDRIVKESGGKLTRRLVNSQCKFERRTQTEQQCWDFSILW

SEQ ID NO: 797840 - protein, 117 aa, Homo sapiens
LLFLENTEAPASPQGSSSASLVETEDPSLEDTSVPSVPLGSRQCFLYPGPGGSYGFRLSCVASGPRLFISQVTDAPWILNPFDPLLPDRSSSASLPEPKASKLSPGVPCSACPHNTR

SEQ ID NO: 797841 - protein, 226 aa, Homo sapiens
WVADPAMEKAADLQDTASLTLKFKFNPKLGIDNPVLSLAEDHDPYDPWSLEPPRFCLLSKEEGKSFGFHLQQELGRAGHVVCRVDPGTSAQRQGLQEGDRILAVNNDVVEHEDYAVVVRRIRASSPRVLLTVLARHAHDVARAQLGEDAHLCPTLGPGVRPRLCHIVKDEGGFGFSVTHGNQGPFWLVLSTGGAAERAGVPPGARLLEVNGVSVEKFTHNQLTRKV

SEQ ID NO: 797842 - protein, 324 aa, Homo sapiens
MSVEDGGMPGLGRPRQARWTLMLLLSTAMYGAHAPLLALCHVDGRVPFRPSSAVLLTELTKLLLCAFSLLVGWQAWPQGPPPWRQAAPFALSALLYGANNNLVIYLQRYMDPSTYQVLSNLKIGSTAVLYCLCLRHRLSVRQGLALLLLMAAGACYAAGGLQVPGNTLPSPPPAAAASPMPLHITPLGLLLLILYCLISGLSSVYTELLMKRQRLPLALQNLFLYTFGVLLNLGLHAGGGSGPGLLEGFSGWAALVVLSQALNGLLMSAVMKHGSSITRLFVVSCSLVVNAVLSAVLLRLQLTAAFFLATLLIGLAMRLYYGSR

SEQ ID NO: 797843 - protein, 324 aa, Homo sapiens; identical to SEQ ID NO: 797842

SEQ ID NO: 797844 - protein, 324 aa, Homo sapiens; identical to SEQ ID NO: 797842

SEQ ID NO: 797845 - protein, 324 aa, Homo sapiens; identical to SEQ ID NO: 797842

SEQ ID NO: 797846 - protein, 324 aa, Homo sapiens; identical to SEQ ID NO: 797842

SEQ ID NO: 797847 - protein, 324 aa, Homo sapiens; identical to SEQ ID NO: 797842

SEQ ID NO: 797848 - protein, 324 aa, Homo sapiens; identical to SEQ ID NO: 797842

SEQ ID NO: 797849 - protein, 324 aa, Homo sapiens; identical to SEQ ID NO: 797842

SEQ ID NO: 797850 - protein, 324 aa, Homo sapiens; identical to SEQ ID NO: 797842

SEQ ID NO: 797851 - protein, 324 aa, Homo sapiens; identical to SEQ ID NO: 797842

SEQ ID NO: 797852 - protein, 324 aa, Homo sapiens; identical to SEQ ID NO: 797842

SEQ ID NO: 797853 - protein, 324 aa, Homo sapiens; identical to SEQ ID NO: 797842

SEQ ID NO: 797854 - protein, 324 aa, Homo sapiens; identical to SEQ ID NO: 797842

SEQ ID NO: 797855 - protein, 224 aa, Homo sapiens
MSVEDGGMPGLGRPRQARWTLMLLLSTAMYGAHAPLLALCHVDGRVPFRPSSAVLLTELTKLLLCAFSLLVGWQAWPQGPPPWRQAAPFALSALLYGANNNLVIYLQRYMDPSTYQVLSNLKIGSTAVLYCLCLRHRLSVRQGLALLLLMAAGACYAAGGLQVPGNTLPSPPPAAAASPMPLHITPLGLLLLILYCLISGLSSVYTELLMNSAQSDLRPGTGNL

SEQ ID NO: 797856 - protein, 221 aa, Homo sapiens
MARRRYMDPSTYQVLSNLKIGSTAVLYCLCLRHRLSVRQGLALLLLMAAGACYAAGGLQVPGNTLPSPPPAAAASPMPLHITPLGLLLLILYCLISGLSSVYTELLMKRQRLPLALQNLFLYTFGVLLNLGLHAGGGSGPGLLEGFSGWAALVVLSQALNGLLMSAVMKHGSSITRLFVVSCSLVVNAVLSAVLLRLQLTAAFFLATLLIGLAMRLYYGSR

SEQ ID NO: 797857 - protein, 103 aa, Homo sapiens
MADDKDSLPKLKDLAFLKNQLESLQRRVEDEVNSGVGQDGSLLSSPFLKGFLAGYVVAKLRASAVLGFAVGTCTGIYAAQAYAVPNVEKTLRDYLQLLRKGPD

SEQ ID NO: 797858 - protein, 103 aa, Homo sapiens; identical to SEQ ID NO: 797857

SEQ ID NO: 797859 - protein, 103 aa, Homo sapiens; identical to SEQ ID NO: 797857

SEQ ID NO: 797860 - protein, 103 aa, Homo sapiens; identical to SEQ ID NO: 797857

SEQ ID NO: 797861 - protein, 103 aa, Homo sapiens; identical to SEQ ID NO: 797857

SEQ ID NO: 797862 - protein, 384 aa, Homo sapiens
PVLGGAGAGGSSGRSGSADVLPSSPGSEAAMAESPTEEAATAGAGAAGPGASSVAGVVGVSGSGGGFGPPFLPDVWAAAAAAGGAGGPGSGLAPLPGLPPSAAAHGAALLSHWDPTLSSDWDGERTAPQCLLRIKRDIMSIYKEPPPGMFVVPDTVDMTKIHALITGPFDTPYEGGFFLFVFRCPPDYPIHPPRVKLMTTGNNTVRFNPNFYRNGKVCLSILGTWTGPAWSPAQSISSVLISIQSLMTENPYHNEPGFEQERHPGDSKNYNECIRHETIRVAVCDMMEGKCPCPEPLRGVMEKSFLEYYDFYEVACKDRLHLQGQTMQDPFGEKRGHFDYQSLLMRLGLIRQKVLERLHNENAEMDSDSSSSGTETDLHGSLRV

SEQ ID NO: 797863 - protein, 246 aa, Homo sapiens
MSIYKEPPPGMFVVPDTVDMTKIHALITGPFDTPYEGGFFLFVFRCPPDYPIHPPRVKLMTTGNNTVRFNPNFYRNGKVCLSILGTWTGPAWSPAQSISSVLISIQSLMTENPYHNEPGFEQERHPGDSKNYNECIRHETIRVAVCDMMEGKCPCPEPLRGVMEKSFLEYYDFYEVACKDRLHLQGQTMQDPFGEKRGHFDYQSLLMRLGLIRQKVLERLHNENAEMDSDSSSSGTETDLHGSLRV

SEQ ID NO: 797864 - protein, 246 aa, Homo sapiens; identical to SEQ ID NO: 797863

SEQ ID NO: 797865 - protein, 297 aa, Homo sapiens
PVLGGAGAGGSSGRSGSADVLPSSPGSEAAMAESPTEEAATAGAGAAGPGASSVAGVVGVSGSGGGFGPPFLPDVWAAAAAAGGAGGPGSGLAPLPGLPPSAAAHGAALLSHWDPTLSSDWDGERTAPQCLLRIKRTWTGPAWSPAQSISSVLISIQSLMTENPYHNEPGFEQERHPGDSKNYNECIRHETIRVAVCDMMEGKCPCPEPLRGVMEKSFLEYYDFYEVACKDRLHLQGQTMQDPFGEKRGHFDYQSLLMRLGLIRQKVLERLHNENAEMDSDSSSSGTETDLHGSLRV

SEQ ID NO: 797866 - protein, 384 aa, Homo sapiens; identical to SEQ ID NO: 797862

SEQ ID NO: 797867 - protein, 384 aa, Homo sapiens; identical to SEQ ID NO: 797862

SEQ ID NO: 797868 - protein, 384 aa, Homo sapiens; identical to SEQ ID NO: 797862

SEQ ID NO: 797869 - protein, 384 aa, Homo sapiens; identical to SEQ ID NO: 797862

SEQ ID NO: 797870 - protein, 222 aa, Homo sapiens
GSRWCGSGREQRPLWSADVLPSSPGSEAAMAESPTEEAATAGAGAAGPGASSVAGVVGVSGSGGGFGPPFLPDVWAAAAAAGGAGGPGSGLAPLPGLPPSAAAHGAALLSHWDPTLSSDWDGERTAPQCLLRIKRDIMSIYKEPPPGMFVVPDTVDMTKIHALITGPFDTPYEGGFFLFVFRCPPDYPIHPPRVKLMTTGNNTVRFNPNFYRNGKVCLSILG

SEQ ID NO: 797871 - protein, 384 aa, Homo sapiens; identical to SEQ ID NO: 797862

SEQ ID NO: 797872 - protein, 278 aa, Homo sapiens
GSRWCGSGREQRPLWSADVLPSSPGSEAAMAESPTEEAATAGAGAAGPGASSVAGVVGVSGSGGGFGPPFLPDVWAAAAAAGGAGGPGSGLAPLPGLPPSAAAHGAALLSHWDPTLSSDWDGERTAPQCLLRIKRDIMSIYKEPPPGMFVVPDTVDMTKIHALITGPFDTPYEGGFFLFVFRCPPDYPIHPPRVKLMTTGNNTVRFNPNFYRNGKVCLSILGTWTGPAWSPAQSISSVLISIQSLMTENPYHNEPGFEQERHPETAKTIIAVTRWSGS

SEQ ID NO: 797873 - protein, 72 aa, Homo sapiens
ILRWGFILQIHALITGPFDTPYEGGFFLFVFRCPPDYPIHPPRVKLMTTGNNTVRFNPNFYRNGKVCLSILG

SEQ ID NO: 797874 - protein, 96 aa, Homo sapiens
MEHKEVVLLLLLFLKSGQGEPLDDYVNTQGPSLFSVTKKQLGAGSREECAAKCEEDKEFTCRAFQYHSKEQQCVIMAENRKSSIIIRMRDAVLFEK

SEQ ID NO: 797875 - protein, 96 aa, Homo sapiens; identical to SEQ ID NO: 797874

SEQ ID NO: 797876 - protein, 96 aa, Homo sapiens; identical to SEQ ID NO: 797874

SEQ ID NO: 797877 - protein, 629 aa, Homo sapiens [sequence omitted]

SEQ ID NO: 797878 - protein, 632 aa, Homo sapiens
MDTMMLNVRNLFEQLVRRVEILSEGNEVQFIQLAKDFEDFRKKWQRTDHELGKYKDLLMKAETERSALDVKLKHARNQVDVEIKRRQRAEADCEKLERQIQLIREMLMCDTSGSIQLSEEQKSALAFLNRGQPSSSNAGNKRLSTIDESGSILSDISFDKTDESLDWDSSLVKTFKLKKREKRRSTSRQFVDGPPGPVKKTRSIGSAVDQGNESIVAKTTVTVPNDGGPIEAVSTIETVPYWTRSRRKTGTLQPWNSDSTLNSRQLEPRTETDSVGTPQSNGGMRLHDFVSKTVIKPESCVPCGKRIKFGKLSLKCRDCRVVSHPECRDRCPLPCIPTLIGTPVKIGEGMLADFVSQTSPMIPSIVVHCVNEIEQRGLTETGLYRISGCDRTVKELKEKFLRVKTVPLLSKVDDIHAICSLLKDFLRNLKEPLLTFRLNRAFMEAAEITDEDNSIAAMYQAVGELPQANRDTLAFLMIHLQRVAQSPHTKMDVANLAKVFGPTIVAHAVPNPDPVTMLQDIKRQPKVVERLLSLPLEYWSQFMMVEQENIDPLHVIENSNAFSTPQTPDIKVSLLGPVTTPEHQLLKTPSSSSLSQRVRSTLTKNTPRFGSKSKSATNLGRQGNFFASPMLK

SEQ ID NO: 797879 - protein, 255 aa, Homo sapiens
MELLVARTQMISVSRAFAGKLKFLRVKTVPLLSKVDDIHAICSLLKDFLRNLKEPLLTFRLNRAFMEAAEITDEDNSIAAMYQAVGELPQANRDTLAFLMIHLQRVAQSPHTKMDVANLAKVFGPTIVAHAVPNPDPVTMLQDIKRQPKVVERLLSLPLEYWSQFMMVEQENIDPLHVIENSNAFSTPQTPDIKVSLLGPVTTPEHQLLKTPSSSSLSQRVRSTLTKNTPRFGSKSKSATNLGRQGNFFASPMLK

SEQ ID NO: 797880 - protein, 149 aa, Homo sapiens
MDVAKDFSQIGTSILVFGPTIVAHAVPNPDPVTMLQDIKRQPKVVERLLSLPLEYWSQFMMVEQENIDPLHVIENSNAFSTPQTPDIKVSLLGPVTTPEHQLLKTPSSSSLSQRVRSTLTKNTPRFGSKSKSATNLGRQGNFFASPMLK

SEQ ID NO: 797881 - protein, 607 aa, Homo sapiens
MDTMMLNVRNLFEQLVRRVEILSEGNEVQFIQLAKDFEDFRKKWQRTDHELGKYKDLLMKAETERSALDVKLKHARNQVDVEIKRRQRAEADCEKLERQIQLIREMLMCDTSGSIQLSEEQKSALAFLNRGQPSSSNAGNKRLSTIDESGSILSDISFDKTDESLDWDSSLVKTFKLKKREKRRSTSRQFVDGPPGPVKKTRSIGSAVDQGNESIVAKTTVTVPNDGGPIEAVSTIETVPYWTRSRRKTGTLQPWNSDSTLNSRQLEPRTETDSVGTPQSNGGMRLHDFVSKTVIKPESCVPCGKRIKFGKLSLKCRDCRVVSHPECRDRCPLPCIPTLIGTPVKIGEGMLADFVSQTSPMIPSIVVHCVNEIEQRGLTETGLYRISGCDRTVKELKEKFLRVKTVPLLSKVDDIHAICSLLKDFLRNLKEPLLTFRLNRAFMEAAEITDEDNSIAAMYQAVGELPQANRDTLAFLMIHLQRVAQSPHTKMDVANLAKVFGPTIVAHAVPNPDPVTMLQDIKRQPKVVERLLSLPLEYWSQFMMVEQENIDPLHVIENSNAFSTPQTPDIKAVPGGGLCVHFTAGEAEIQKGPPSCGQNKSTAAFNY

SEQ ID NO: 797882 - protein, 632 aa, Homo sapiens; identical to SEQ ID NO: 797878

SEQ ID NO: 797883 - protein, 632 aa, Homo sapiens; identical to SEQ ID NO: 797878

SEQ ID NO: 797884 - protein, 68 aa, Homo sapiens
TRPRTRGLSLLGPVTTPEHQLLKTPSSSSLSQRVRSTLTKNTPRFGSKSKSATNLGRQGNFFASPMLK

SEQ ID NO: 797885 - protein, 503 aa, Homo sapiens
LPAGTKCLESLLGSVPPPCPGLHSLRELPDPVLSEEVVEGIAAGIEAALWDLTQGTNGRYKTKYRSLLFNLRDPRNLDLFLKVVHGDVTPYDLVRMSSMQLAPQELARWRDQEEKRGLNIIEQQQKEPCRLPASKMTHKGEVEIQRDMDQTLTLEDLGPQMFMDCSPQALPIASEDTTGQHDHHFLDPNCHICKDWEPSNELLGSFEAAKSCGDNIFQKALSQTPMPPWEGVLDMFSIKRFRARAQLVSGHSCRLVQALPTVIRSAGCIPSNIVWDLLASICPAKAKVWRSLTQVCCWLCCSPRKGFQTQQGPAPGWGKVQKMVSFNSKVEKRYYQPDDRRPNVPLKGTPPPGGAWQQSQGRGSIAPRGISAWQRPPRGRGRLWPEPENWQHPGRGQWPPEPGLRQSQHPYSVAPAGHGFGRGQHFHRDSCPHQALLRHLESLATMSHQLQALLCPQTKSSIPRPLQRLSSALAAPEPPGPARDSSLGPTDEAGSECPFPRKA

SEQ ID NO: 797886 - protein, 190 aa, Homo sapiens
ISQMTGGRMYLFSTLLVEKRYYQPDDRRPNVPLKGTPPPGGAWQQSQGRGSIAPRGISAWQRPPRGRGRLWPEPENWQHPGRGQWPPEPGLRQSQHPYSVAPAGHGFGRGQHFHRDSCPHQALLRHLESLATMSHQLQALLCPQTKSSIPRPLQRLSSALAAPEPPGPARDSSLGPTDEAGSECPFPRKA

SEQ ID NO: 797887 - protein, 189 aa, Homo sapiens
LPAGTKCLESLLGSVPPPCPGLHSLRELPDPVLSEEVVEGIAAGIEAALWDLTQGTNGRYKTKYRSLLFNLRDPRNLDLFLKVVHGDVTPYDLVRMSSMQLAPQELARWRDQEEKRGLNIIEQQQKEPCRLPASKMTHKGEVEIQRDMDQTLTLEDLVVKLEPDLVLGRAHAWGSHASPHQQCGLGHVT

SEQ ID NO: 797888 - protein, 243 aa, Homo sapiens
WSTWGWSCCPCLPSSPCPPGCALWGAQVWRSLTQVCCWLCCSPRKGFQTQQGPAPGWGKVQKMVSFNSKVEKRYYQPDDRRPNVPLKGTPPPGGAWQQSQGRGSIAPRGISAWQRPPRGRGRLWPEPENWQHPGRGQWPPEPGLRQSQHPYSVAPAGHGFGRGQHFHRDSCPHQALLRHLESLATMSHQLQALLCPQTKSSIPRPLQRLSSALAAPEPPGPARDSSLGPTDEAGSECPFPRKA

SEQ ID NO: 797889 - protein, 606 aa, Homo sapiens
LPAGTKCLESLLGSVPPPCPGLHSLRELPDPVLSEEVVEGIAAGIEAALWDLTQGTNGRYKTKYRSLLFNLRDPRNLDLFLKVVHGDVTPYDLVRMSSMQLAPQELARWRDQEEKRGPQMFMDCSPQALPIASEDTTGQHDHHFLDPNCHICKDWEPSNELLGSFEAAKSCGDNIFQKALSQTPMPAPEMPKTRELSPTEPQDRCGVGSREVDNPAGLRGRPPPGATDIALAFPVWPWASLPSLGNLTFPICAMELIIPASWQPPAQGQAWASVPVPTVGTQDLLRKERRCRGSPHGLLCLALSSVPPSRVPPSGLHVPAAPTKALPCLPPWEGVLDMFSIKRFRARAQLVSGHSCRLVQALPTVIRSAGCIPSNIVWDLLASICPAKAKVWRSLTQVCCWLCCSPRKGFQTQQGPAPGWGKVQKMVSFNSKVEKRYYQPDDRRPNVPLKGTPPPGGAWQQSQGRGSIAPRGISAWQRPPRGRGRLWPEPENWQHPGRGQWPPEPGLRQSQHPYSVAPAGHGFGRGQHFHRDSCPHQALLRHLESLATMSHQLQALLCPQTKSSIPRPLQRLSSALAAPEPPGPARDSSLGPTDEAGSECPFPRKA

SEQ ID NO: 797890 - protein, 300 aa, Homo sapiens
LPAGTKCLESLLGSVPPPCPGLHSLRELPDPVLSEEVVEGIAAGIEAALWDLTQGTNGRYKTKYRSLLFNLRDPRNLDLFLKVVHGDVTPYDLVRMSSMQLAPQELARWRDQEEKRGLNIIEQQQKEPCRLPASKMTHKGEVEIQRDMDQTLTLEDLGPQMFMDCSPQALPIASEDTTGQHDHHFLDPNCHICKDWEPSNELLGSFEAAKSCGDNIFQKALSQTPMPAPEMPKTRELSPTEPQDRVPPSGLHVPAAPTKALPCLPPWEGVLDMFSIKRFRARAQLVSGHSCRLVQPWPSP

SEQ ID NO: 797891 - protein, 127 aa, Homo sapiens
WCQTHILSYPQYLPLLPIILFWISNMLSLLFLCTLHPSLSLPSLRLTLTPIRLSKLPGLYCRKASQTAPITSVKPKFHPHLLVILLFTVLNYSYMPCSCLHCRFTLFLQAITADIAWCYPQTATLNS

SEQ ID NO: 797892 - protein, 111 aa, Homo sapiens
TASSSAETLRTVRRRSVPSSSMPYLALAHNRVSSLNHAASVDGWGTSHRNVADSFSRTSRSCSRFLKGTAGSARREDCYFEAYMGSWFLDPRIYQNLCILKFYGQPCGTQA

SEQ ID NO: 797893 - protein, 239 aa, Homo sapiens
MHKPIRLRPASLTSTVLGTGAWWRSCRWGPEKPPQRAKAQGQPEDRTPEEDRKNQEDQRNREEAPEQGKERPRHQDMDAVEPGGRGWASMLACRLWKAISRALFAEFLATGLYVFFGVGSVMRWPTALPSVLQIAITFNLVTAMAVQVTWKASGAHANPAVTLAFLVGSHISLPRAVAYVAAQLVGATVGAALLYGVMPGDIRETLGINVAPPTSSALRLFPSSSLHLEACLTRPFSIS

SEQ ID NO: 797894 - protein, 358 aa, Homo sapiens
MHKPIRLRPASLTSTVLGTGAWWRSCRWGPEKPPQRAKAQGQPEDRTPEEDRKNQEDQRNREEAPEQGKERPRHQDMDAVEPGGRGWASMLACRLWKAISRALFAEFLATGLYVFFGVGSVMRWPTALPSVLQIAITFNLVTAMAVQVTWKASGAHANPAVTLAFLVGSHISLPRAVAYVAAQLVGATVGAALLYGVMPGDIRETLGINVVRNSVSTGQAVAVELLLTLQLVLCVFASTDSRQTSGSPATMIGISVALGHLIGIHFTGCSMNPARSFGPAIIIGKFTVHWVFWVGPLMGALLASLIYNFVLFPDTKTLAQRLAILTGTVEVGTGAGAGAEPLKKESQPGSGAVEMESV

SEQ ID NO: 797895 - protein, 239 aa, Homo sapiens; identical to SEQ ID NO: 797893

SEQ ID NO: 797896 - protein, 542 aa, Homo sapiens
MAEVEAGGELLDMMIAEEESLKERLIKSISVCQKELNTLCSELHVEPFQEEGETTILQLEKDLRTQVELMRKQKKERKQELKLLQEQDQELCEILCMPHYDIDSASVPSLEELNQFRQHVTTLRETKASRREEFVSIKRQIILCMEELDHTPDTSFERDVVCEDEDAFCLSLENIATLQKLLRQLEMQKSQNEAVCEGLRTQIRELWDRLQIPEEEREAVATIMSGSKAKVRKALQLEVDRLEELKMQNMKKVIEAIRVELVQYWDQCFYSQEQRQAFAPFCAEDYTESLLQLHDAEIVRLKNYYEVHKELFEGVQKWEETWRLFLEFERKASDPNRFTNRGGNLLKEEKQRAKLQKMLPKLEEELKARIELWEQEHSKAFMVNGQKFMEYVAEQWEMHRLEKERAKQERQLKNKKQTETEMLYGSAPRTPSKRRGLAPNTPGKARKLNTTTMSNATANSSIRPIFGGTVYHSPVSRLPPSGSKPVAASTCSGKKTPRTGRHGANKENLELNGSILSGGYPGSAPLQRNFSINSVATLFSAS

SEQ ID NO: 797897 - protein, 580 aa, Homo sapiens
MAEVEAGGELLDMMIAEEESLKERLIKSISVCQKELNTLCSELHVEPFQEEGETTILQLEKDLRTQVELMRKQKKERKQELKLLQEQDQELCEILCMPHYDIDSASVPSLEELNQFRQHVTTLRETKASRREEFVSIKRQIILCMEELDHTPDTSFERDVVCEDEDAFCLSLENIATLQKLLRQLEMQKSQNEAVCEGLRTQIRELWDRLQIPEEEREAVATIMSGSKAKVRKALQLEVDRLEELKMQNMKKVIEAIRVELVQYWDQCFYSQEQRQAFAPFCAEDYTESLLQLHDAEIVRLKNYYEVHKELFEGVQKWEETWRLFLEFERKASDPNRFTNRGGNLLKEEKQRAKLQKMLPKLEEELKARIELWEQEHSKAFMVNGQKFMEYVAEQWEMHRLEKERAKQERQLKNKKQTETEMLYGSAPRTPSKRRGLAPNTPGKARKLNTTTMSNATANSSIRPIFGGTVYHSPVSRLPPSGSKPVAASTCSGKKTPRTGRHGANKENLELNGSILSGGYPGSAPLQRNFSINSVASTYSEFAKDPSLSDSSTVGLQRELSKASKSDATSGILNSTNIQS

SEQ ID NO: 797898 - protein, 543 aa, Homo sapiens
MAEVEAGGELLDMMIAEEESLKERLIKSISVCQKELNTLCSELHVEPFQEEGETTILQLEKDLRTQVELMRKQKKERKQELKLLQEQDQELCEILCMPHYDIDSASVPSLEELNQFRQHVTTLRETKASRREEFVSIKRQIILCMEELDHTPDTSFERDVVCEDEDAFCLSLENIATLQKLLRQLEMQKSQNEAVCEGLRTQIRELWDRLQIPEEEREAVATIMSGSKAKVRKALQLEVDRLEELKMQNMKKVIEAIRVELVQYWDQCFYSQEQRQAFAPFCAEDYTESLLQLHDAEIVRLKNYYEVHKELFEGVQKWEETWRLFLEFERKASDPNRFTNRGGNLLKEEKQRAKLQKMLPKLEEELKARIELWEQEHSKAFMVNGQKFMEYVAEQWEMHRLEKERAKQERQLKNKKQTETEMLYGSAPRTPSKRRGLAPNTPGKARKLNTTTMSNATANSSIRPIFGGTVYHSPVSRLPPSGSKPVAASTCSGKKTPRTGRHGANKENLELNGSILSENFQRLPNLMLLLESSIQPTSSPEKP

SEQ ID NO: 797899 - protein, 356 aa, Homo sapiens
MQKSQNEAVCEGLRTQIRELWDRLQIPEEEREAVATIMSGSKAKVRKALQLEVDRLEELKMQNMKKVIEAIRVELVQYWDQCFYSQEQRQAFAPFCAEDYTESLLQLHDAEIVRLKNYYEVHKELFEGVQKWEETWRLFLEFERKASDPNRFTNRGGNLLKEEKQRAKLQKMLPKLEEELKARIELWEQEHSKAFMVNGQKFMEYVAEQWEMHRLEKERAKQERQLKNKKQTETEMLYGSAPRTPSKRRGLAPNTPGKARKLNTTTMSNATANSSIRPIFGGTVYHSPVSRLPPSGSKPVAASTCSGKKTPRTGRHGANKENLELNGSILSGGYPGSAPLQRNFSINSVATLFSAS

SEQ ID NO: 797900 - protein, 557 aa, Homo sapiens
MAEVEAGGELLDMMIAEEESLKERLIKSISVCQKELNTLCSELHVEPFQEEGETTILQLEKDLRTQVELMRKQKKERKQELKLLQEQDQELCEILCMPHYDIDSASVPSLEELNQFRQHVTTLRETKASRREEFVSIKRQIILCMEELDHTPDTSFERDVVCEDEDAFCLSLENIATLQKLLRQLEMQKSQNEAVCEGLRTQIRELWDRLQIPEEEREAVATIMSGSKAKVRKALQLEVDRLEELKMQNMKKVIEAIRVELVQYWDQCFYSQEQRQAFAPFCAEDYTESLLQLHDAEIVRLKNYYEVHKELFEGVQKWEETWRLFLEFERKASDPNRFTNRGGNLLKEEKQRAKLQKMLPKLEEELKARIELWEQEHSKAFMVNGQKFMEYVAEQWEMHRLEKERAKQERQLKNKKQTETEMLYGSAPRTPSKRRGLAPNTPGKARKLNTTTMSNATANSSIRPIFGGTVYHSPVSRLPPSGSKPVAASTCSGKKTPRTGRHGANKENLELNGSILRRIRPSLTVPLLGFSENFQRLPNLMLLLESSIQPTSSPEKP

SEQ ID NO: 797901 - protein, 580 aa, Homo sapiens; identical to SEQ ID NO: 797897

SEQ ID NO: 797902 - protein, 581 aa, Homo sapiens
MAEVEAGGELLDMMIAEEESLKERLIKSISVCQKELNTLCSELHVEPFQEEGETTILQLEKDLRTQVELMRKQKKERKQELKLLQEQDQELCEILCMPHYDIDSASVPSLEELNQFRQHVTTLRETKASRREEFVSIKRQIILCMEELDHTPDTSFERDVVCEDEDAFCLSLENIATLQKLLRQLEMQKSQNEAVCEGLRTQIRELWDRLQIPEEEREAVATIMSGSKAKVRKALQLEVDRLEELKMQNMKKVIEAIRVELVQYWDQCFYSQEQRQAFAPFCAEDYTESLLQLHDAEIVRLKNYYEVHKELFEGVQKWEETWRLFLEFERKASDPNRFTNRGGNLLKEEKQRAKLQKMLPKLEEELKARIELWEQEHSKAFMVNGQKFMEYVAEQWEMHRLEKERAKQERQLKNKKQTETEMLYGSAPRTPSKRRGLAPNTPGKARKLNTTTMSNATANSSIRPIFGGTVYHSPVSRLPPSGSKPVAASTCSGKKTPRTGRHGANKENLELNGSILSGGYPGSAPLQRNFSINSVASTYSEFAKDPSLSDSSTVGLQDSLPPEENVFVCPKLRWPALLPKR

SEQ ID NO: 797903 - protein, 533 aa, Homo sapiens
NYRLQVEAGGELLDMMIAEEESLKERLIKSISVCQKELNTLCSELHVEPFQEEGETTILQLEKDLRTQVELMRKQKKERKQELKLLQEQDQELCEILCMPHYDIDSASVPSLEELNQFRQHVTTLRETKASRREEFVSIKRQIILCMEELDHTPDTSFERDVVCEDEDAFCLSLENIATLQKLLRQLEMQKSQNEAVCEGLRTQIRELWDRLQIPEEEREAVATIMSGSKAKVRKALQLEVDRLEELKMQNMKKVIEAIRVELVQYWDQCFYSQEQRQAFAPFCAEDYTESLLQLHDAEIVRLKNYYEVHKELFEGVQKWEETWRLFLEFERKASDPNRFTNRGGNLLKEEKQRAKLQKMLPKLEEELKARIELWEQEHSKAFMVNGQKFMEYVAEQWEMHRLEKERAKQERQLKNKKQTETEMLYGSAPRTPSKRRGLAPNTPGKARKLNTTTMSNATANSSIRPIFGGTVYHSPVSRLPPSGSKPVAASTCSGKKTPRTGRHGANKENLELNGSILRTAFLLKRMSLCVRS

SEQ ID NO: 797904 - protein, 542 aa, Homo sapiens; identical to SEQ ID NO: 797896

SEQ ID NO: 797905 - protein, 542 aa, Homo sapiens; identical to SEQ ID NO: 797896

SEQ ID NO: 797906 - protein, 542 aa, Homo sapiens; identical to SEQ ID NO: 797896

SEQ ID NO: 797907 - protein, 538 aa, Homo sapiens
MAEVEAGGELLDMMIAEEESLKERLIKSISVCQKELNTLCSELHVEPFQEEGETTILQLEKDLRTQVELMRKQKKERKQELKLLQEQDQELCEILCMPHYDIDSASVPSLEELNQFRQHVTTLRETKASRREEFVSIKRQIILCMEELDHTPDTSFERDVVCEDEDAFCLSLENIATLQKLLRQLEMQKSQNEAVCEGLRTQIRELWDRLQIPEEEREAVATIMSGSKAKVRKALQLEVDRLEELKMQNMKKVIEAIRVELVQYWDQCFYSQEQRQAFAPFCAEDYTESLLQLHDAEIVRLKNYYEVHKELFEGVQKWEETWRLFLEFERKASDPNRFTNRGGNLLKEEKQRAKLQKMLPKLEEELKARIELWEQEHSKAFMVNGQKFMEYVAEQWEMHRLEKERAKQERQLKNKKQTETEMLYGSAPRTPSKRRGLAPNTPGKARKLNTTTMSNATANSSIRPIFGGTVYHSPVSRLPPSGSKPVAASTCSGKKTPRTGRHGANKENLELNGSILSENFQRLPNLMLLLESLNHYSS

SEQ ID NO: 797908 - protein, 328 aa, Homo sapiens
TIGLVEAGGELLDMMIAEEESLKERLIKSISVCQKELNTLCSELHVEPFQEEGETTILQLEKDLRTQVELMRKQKKERKQELKLLQEQDQELCEILCMPHYDIDSASVPSLEELNQFRQHVTTLRETKASRREEFVSIKRQIILCMEELDHTPDTSFERDVVCEDEDAFCLSLENIATLQKLLRQLEMQKSQNEAVCEGLRTQIRELWDRLQIPEEEREAVATIMSGSKAKVRKALQLEVDRLEELKMQNMKKVIEAIRVELVQYWDQCFYSQEQRQAFAPFCAEDYTESLLQLHDAEIVRLKNYYEVHKELFEGVQKWEETWRLFLE

SEQ ID NO: 797909 - protein, 97 aa, Homo sapiens
GTFKGIYGEWAEIHGVCGRTMGDASIGERESQAGKSKCERERKLGKDEESNLSSPYSLPGTRVCGTGSRGPGLVEREAGDRGLWNGEPGTGACGTGS

SEQ ID NO: 797910 - protein, 164 aa, Homo sapiens
MYFSQRKASDPNRFTNRGGNLLKEEKQRAKLQKMLPKLEEELKARIELWEQEHSKAFMVNGQKFMEYVAEQWEMHRLEKERAKQERQLKNKKQTETEMLYGSAPRTPSKRRGLAPNTPGKARKVNTRLRETLISREWVRVVPATSLKGASPSTPVGISHQVGQE

SEQ ID NO: 797911 - protein, 566 aa, Homo sapiens
MAEVEAGGELLDMMIAEEESLKERLIKSISVCQKELNTLCSELHVEPFQEEGETTILQLEKDLRTQVELMRKQKKERKQELKLLQEQDQELCEILCMPHYDIDSASVPSLEELNQFRQHVTTLRETKASRREEFVSIKRQIILCMEELDHTPDTSFERDVVCEDEDAFCLSLENIATLQKLLRQLEMQKSQNEAVCEGLRTQIRELWDRLQIPEEEREAVATIMSGSKAKVRKALQLEVDRLEELKMQNMKKVIEAIRVELVQYWDQCFYSQEQRQAFAPFCAEDYTESLLQLHDAEIVRLKNYYEVHKELFEGVQKWEETWRLFLEFERKASDPNRFTNRGGNLLKEEKQRAKLQKMLPKLEEELKARIELWEQEHSKAFMVNGQKFMEYVAEQWEMHRLEKERAKQERQLKNKKQTETEMLYGSAPRTPSKRRGLAPNTPGKARKLNTTTMSNATANSSIRPIFGGTVYHSPVSRLPPSGSKPVAASTCSGKKTPRTGRHGANKENLELNGSILSGGYPGSAPLQRNFSINSVASTYSEFARELSKASKSDATSGILNSTNIQS

SEQ ID NO: 797912 - protein, 518 aa, Homo sapiens
MAEVEAGGELLDMMIAEEESLKERLIKSISVCQKELNTLCSELHVEPFQEEGETTILQLEKDLRTQVELMRKQKKERKQELKLLQEQDQELCEILCMPHYDIDSASVPSLEELNQFRQHVTTLRETKASRREEFVSIKRQIILCMEELDHTPDTSFERDVVCEDEDAFCLSLENIATLQKLLRQLEMQKSQNEAVCEGLRTQIRELWDRLQIPEEEREAVATIMSGSKAKVRKALQLEVDRLEELKMQNMKKVIEAIRVELVQYWDQCFYSQEQRQAFAPFCAEDYTESLLQLHDAEIVRLKNYYEVHKELFEGVQKWEETWRLFLEFERKASDPNRFTNRGGNLLKEEKQRAKLQKMLPKLEEELKARIELWEQEHSKAFMVNGQKFMEYVAEQWEMHRLEKERAKQERQLKNKKQTETEMLYGSAPRTPSKRRGLAPNTPGKARKLNTTTMSNATANSSIRPIFGGTVYHSPVSRLPPSGSKPVAASTCSGGGYPGSAPLQRNFSINSVATLFSAS

SEQ ID NO: 797913 - protein, 542 aa, Homo sapiens; identical to SEQ ID NO: 797896

SEQ ID NO: 797914 - protein, 542 aa, Homo sapiens; identical to SEQ ID NO: 797896

SEQ ID NO: 797915 - protein, 481 aa, Homo sapiens
MAEVEAGGELLDMMIAEEESLKERLIKSISVCQKELNTLCSELHVEPFQEEGETTILQLEKDLRTQVELMRKQKKERKQELKLLQEQDQELCEILCMPHYDIDSASVPSLEELNQFRQHVTTLRETKASRREEFVSIKRQIILCMEELDHTPDTSFERDVVCEDEDAFCLSLENIATLQKLLRQLEMQKSQNEAVCEGLRTQIRELWDRLQIPEEEREAVATIMSGSKAKVRKALQLEVDRLEELKMQNMKKVIEAIRVELVQYWDQCFYSQEQRQAFAPFCAEDYTESLLQLHDAEIVRLKNYYEVHKELFEGVQKWEETWRLFLEFERKASDPNRFTNRGGNLLKEEKQRAKLQKMLPKLEEELKARIELWEQEHSKAFMVNGQKFMEYVAEQWEMHRLEKERAKQERQLKNKKQTETEMLYGSAPRTPSKRRGLAPNTPGKARKLNTTTMSNATANSSIRPIFGGTVYHSPHSCAYFA

SEQ ID NO: 797916 - protein, 315 aa, Homo sapiens
MMIAEEESLKERLIKSISVCQKELNTLCSELHVEPFQEEGETTILQLEKDLRTQVELMRKQKKERKQELKLLQEQDQELCEILCMPHYDIDSASVPSLEELNQFRQHVTTLRETKASRREEFVSIKRQIILCMEELDHTPDTSFERDVVCEDEDAFCLSLENIATLQKLLRQLEMQKSQNEAVCEGLRTQIRELWDRLQIPEEEREAVATIMSGSKAKVRKALQLEVDRLEELKMQNMKKVIEAIRVELVQYWDQCFYSQEQRQAFAPFCAEDYTESLLQLHDAEIVRLKNYYEVHKELFEGVQKWEETWRLFLE

SEQ ID NO: 797917 - protein, 192 aa, Homo sapiens
MAAPPKAPIRVRNLTIRAGALTGKENNMLQPETHIFTAPEEGSSQGALLLGQAPEPLSLPCTPVTLEQQLVSPSGDPHRAPALPSICSTLILQPCATLDPLLLQPQVPKVSDQALVSAHSEWQRKLEAAEALLTLRNSAQAPPDSISLHQPCNPPAPAGDKGFQPPSPSLRPRPASSISLPIGHLGCISLLS

SEQ ID NO: 797918 - protein, 192 aa, Homo sapiens; identical to SEQ ID NO: 797917

SEQ ID NO: 797919 - protein, 127 aa, Homo sapiens
MAAPPKAPIRVRNLTIRAGALTGKENNMLQPETHIFTAPEEVPKVSDQALVSAHSEWQRKLEAAEALLTLRNSAQAPPDSISLHQPCNPPAPAGDKGFQPPSPSLRPRPASSISLPIGHLGCISLLS

SEQ ID NO: 797920 - protein, 150 aa, Homo sapiens
CSSSSSSSSSSSSFSSSSRSEGGGLRLKTLGLRVFLAAAAAAAATSLSSRPGTQRSGRRMPVDAHLFPEFLLPGPAKAAGENVRGRGDTQGLRVSEARWPAPLLLAQETPTGAPAAGTPSAPRSPGSTSSEAWSPCSGASESSFVDPRNP

SEQ ID NO: 797921 - protein, 145 aa, Homo sapiens
YREKPRGRADRFYVREKLDAHAPWSILAFPGEKRIPEKQPNLSALVEKGISEAGRKPGQVSFIRLPKGTSTHLPETWPSGSSWQHHPLPVPTTIRLPPGVLQDSQRRPFRSTELEDSCSWITPEWRSKLLPLAESLCFLCLDSED

SEQ ID NO: 797922 - protein, 514 aa, Homo sapiens
RLGRFLQGCPPEGPAREGRGHRVKIKIRQLQPLEGQRLASVPLAGSSQESPRARRSQAAAGRGRCSGMAEERPGAWFGFGFCGFGQELGSGRGRQVHSPSPLRAGVDICRVSASWSYTAFVTREHSPPRPHLFQPRSPVASPHRCGQSSLSPPFRPPAPHSGLVPNSTPSQEHPAPPTPAASILATLLQIRPAGGGRLELSGSASGAAGRCKDAWASEGLLAVLRAGPGPEALLQVWAAESALRGEPLWAQNVVPEAEGEDDPAGEAQAGRLPLLPCARAYVSPRAPFYRPLAPELRARQLELGAEHALLLDAAGQVFSWGGGRHGQLGHGTLEAELEPRLLEALQGLVMAEVAAGGWHSVCVSETGDIYIWGWNESGQLALPTRNLAEDGETVAREATELNEDGSQVKRTGGAEDGAPAPFIAVQPFPALLDLPMGSDAVKASCGSRHTAVVTRTGELYTWGWGKYGQLGHEDTTSLDRPRRVEYFVDKQLQVKAVTCGPWNTYVYAVEKGKS

SEQ ID NO: 797923 - protein, 49 aa, Homo sapiens [sequence omitted]

SEQ ID NO: 797924 - protein, 376 aa, Homo sapiens
MAEERPGAWFGFGFCGFGQELGSGRGRQVHSPSPLRAGVDICRVSASWSYTAFVTRGGRLELSGSASGAAGRCKDAWASEGLLAVLRAGPGPEALLQVWAAESALRGEPLWAQNVVPEAEGEDDPAGEAQAGRLPLLPCARAYVSPRAPFYRPLAPELRARQLELGAEHALLLDAAGQVFSWGGGRHGQLGHGTLEAELEPRLLEALQGLVMAEVAAGGWHSVCVSETGDIYIWGWNESGQLALPTRNLAEDGETVAREATELNEDGSQVKRTGGAEDGAPAPFIAVQPFPALLDLPMGSDAVKASCGSRHTAVVTRTGELYTWGWGKYGQLGHEDTTSLDRPRRVEYFVDKQLQVKAVTCGPWNTYVYAVEKGKS

SEQ ID NO: 797925 - protein, 328 aa, Homo sapiens
MAEERPGAWFGFGFCGFGQELGSGRGRQVHSPSPLRAGVDICRVSASWSYTAFVTRGGRLELSGSASGAAGRCKDAWASEGLLAVLRAGPGPEALLQVWAAESALRGEPLWAQNVVPEAEGEDDPAGEAQAGRLPLLPCARAYVSPRAPFYRPLAPELRARQLELGAEHALLLDAAGQVFSWGGGRHGQLGHGTLEAELEPRLLEALQGLVMAEVAAGGWHSVCVSETGDIYIWGWNESGQLALPTRNLAEDGETVAREATELNEDGSQVKRTGGAEDGAPAPFIAVQPFPALLDLPMGSDAVKASCGSRHTAVVTRTGELYTWGWGK

SEQ ID NO: 797926 - protein, 376 aa, Homo sapiens; identical to SEQ ID NO: 797924

SEQ ID NO: 797927 - protein, 447 aa, Homo sapiens
MAEERPGAWFGFGFCGFGQELGSGRGRQVHSPSPLRAGVDICRVSASWSYTAFVTREHSPPRPHLFQPRSPVASPHRCGQSSLSPPFRPPAPHSGLVPNSTPSQEHPAPPTPAASILATLLQIRPAGGGRLELSGSASGAAGRCKDAWASEGLLAVLRAGPGPEALLQVWAAESALRGEPLWAQNVVPEAEGEDDPAGEAQAGRLPLLPCARAYVSPRAPFYRPLAPELRARQLELGAEHALLLDAAGQVFSWGGGRHGQLGHGTLEAELEPRLLEALQGLVMAEVAAGGWHSVCVSETGDIYIWGWNESGQLALPTRNLAEDGETVAREATELNEDGSQVKRTGGAEDGAPAPFIAVQPFPALLDLPMGSDAVKASCGSRHTAVVTRTGELYTWGWGKYGQLGHEDTTSLDRPRRVEYFVDKQLQVKAVTCGPWNTYVYAVEKGKS

SEQ ID NO: 797928 - protein, 447 aa, Homo sapiens; identical to SEQ ID NO: 797927

SEQ ID NO: 797929 - protein, 376 aa, Homo sapiens; identical to SEQ ID NO: 797924

SEQ ID NO: 797930 - protein, 263 aa, Homo sapiens
MAEERPGAWFGFGFCGFGQELGSGRGRQVHSPSPLRAGVDICRVSASWSYTAFVTRGGRLELSGSASGAAGRCKDAWASEGLLAVLRAGPGPEALLQVWAAESALRGEPLWAQNVVPEAEGEDDPAGEAQAGRLPLLPCARAYVSPRAPFYRPLAPELRARQLELGAEHALLLDAAGQVFSWGGGRHGQLGHGTLEAELEPRLLEALQGLVMAEVAAGGWHSVCVSETGDIYIWGWNESGQLALPTRNLAEDGETVAREATKS

SEQ ID NO: 797931 - protein, 266 aa, Homo sapiens
TRERLPAGAVQLLIMGTIHLFRKPQRSFFGKLLREFRLVAADRRSWKILLFGVINLICTGFLLMWCSSTNSIALTAYTYLTIFDLFSLMTCLISYWVTLRKPSPVYSFGFERLEVLAVFASTVLAQLGALFILKESAERFLEQPEIHTGRLLVGTFVALCFNLFTMLSIRNKPFAYVSEAASTSWLQEHVADLSRSLCGIIPGLSSIFLPRMNPFVLIDLAGAFALCITYMLIEINNYFAVDTASAIAIALMTFGTMYPMSVYSGK

SEQ ID NO: 797932 - protein, 195 aa, Homo sapiens
TRERLPAGAVQLLIMGTIHLFRKPQRSFFGKLLREFRLVAADRRSWKILLFGVINLICTGFLLMWCSSTNSIALTAYTYLTIFDLFSLMTCLISYWVTLRKPSPVYSFGFERLEVLAVFASTVLAQLGALFILKESAERFLEQPEIHTGRLLVGTFVALCFNLFTMLSIRNKPFAYVSEACVELFRDLAVSSFPE

SEQ ID NO: 797933 - protein, 306 aa, Homo sapiens
TRERLPAGAVQLLIMGTIHLFRKPQRSFFGKLLREFRLVAADRRSWKILLFGVINLICTGFLLMWCSSTNSIALTAYTYLTIFDLFRDGVSPFWLGWSQTPDLKWSTHLGLPKCWDNRRELPCLSNSLMTCLISYWVTLRKPSPVYSFGFERLEVLAVFASTVLAQLGALFILKESAERFLEQPEIHTGRLLVGTFVALCFNLFTMLSIRNKPFAYVSEAASTSWLQEHVADLSRSLCGIIPGLSSIFLPRMNPFVLIDLAGAFALCITYMLIEINNYFAVDTASAIAIALMTFGTMYPMSVYSGK

SEQ ID NO: 797934 - protein, 154 aa, Homo sapiens [sequence omitted]

SEQ ID NO: 797935 - protein, 419 aa, Homo sapiens
MSRDVCIHTWPCTYYLEPKRRWVTGQLSLTSLSLRFMTDSTGEILVSFPLSSIVEIKKEASHFIFSSITILEKGHAKHWFSSLRPSRNVVFSIIEHFWRELLLSQPGAVADASVPRTRGEELTGLMAGSQKRLEDTARVLHHQGQQLDSVMRGLDKMESDLEVADRLLTELESPAWWPFSSKLWKTPPETKPREDVSMTSCEPFGKEGILIKIPAVISHRTESHVKPGRLTVLVSGLEIHDSSSLLMHRFEREDVDDIKVHSPYEISIRQRFIGKPDMAYRLISAKMPEVIPILEVQFSKKMELLEDALVLRSARTSSPAEKSCSVWHAASGLMGRTLHREPPAGDQEGTALHLQTSLPALSEADTQELTQILRRMKGLALEAESELERQDEALDGVAAAVDRATLTIDKHNRRMKRLT

SEQ ID NO: 797936 - protein, 435 aa, Homo sapiens
MRQKRPGPWRTQTQEQMSRDVCIHTWPCTYYLEPKRRWVTGQLSLTSLSLRFMTDSTGEILVSFPLSSIVEIKKEASHFIFSSITILEKGHAKHWFSSLRPSRNVVFSIIEHFWRELLLSQPGAVADASVPRTRGEELTGLMAGSQKRLEDTARVLHHQGQQLDSVMRGLDKMESDLEVADRLLTELESPAWWPFSSKLWKTPPETKPREDVSMTSCEPFGKEGILIKIPAVISHRTESHVKPGRLTVLVSGLEIHDSSSLLMHRFEREDVDDIKVHSPYEISIRQRFIGKPDMAYRLISAKMPEVIPILEVQFSKKMELLEDALVLRSARTSSPAEKSCSVWHAASGLMGRTLHREPPAGDQEGTALHLQTSLPALSEADTQELTQILRRMKGLALEAESELERQDEALDGVAAAVDRATLTIDKHNRRMKRLT

SEQ ID NO: 797937 - protein, 459 aa, Homo sapiens
EGARLRDEGYPARSLADAGDIDPQASEVAVGEGARLAVHPAQHGSKDPPPHFRRSGNGEDQPRNQKTQGAAFLPPSAWGSGPARMRAARRGLHCAGAERPRRRGRLWDSSGVPQRQKRPGPWRTQTQEQMSRDVCIHTWPCTYYLEPKRRWVTGQLSLTSLSLRFMTDSTGEILVSFPLSSIVEIKKEASHFIFSSITILEKGHAKHWFSSLRPSRNVVFSIIEHFWRELLLSQPGAVADASVPRTRGEELTGLMAGSQKRLEDTARVLHHQGQQLDSVMRGLDKMESDLEVADRLLTELESPAWWPFSSKLWKTPPETKPREDVSMTSCEPFGKEGILIKIPAVISHRTESHVKPGRLTVLVSGLEIHDSSSLLMHRFEREDVDDIKVHSPYEISIRQRFIGKPDMAYRLISAKMPEVIPILEVQFSKKMELLEDALVLRSARTSSPAEKSCSVWHAG

SEQ ID NO: 797938 - protein, 222 aa, Homo sapiens
MTSCEPFGKEGILIKIPAVISHRTESHVKPGRLTVLVSGLEIHDSSSLLMHRFEREDVDDIKVHSPYEISIRQRFIGKPDMAYRLISAKMPEVIPILEVQFSKKMELLEDALVLRSARTSSPAEKSCSVWHAASGLMGRTLHREPPAGDQEGTALHLQTSLPALSEADTQELTQILRRMKGLALEAESELERQDEALDGVAAAVDRATLTIDKHNRRMKRLT

SEQ ID NO: 797939 - protein, 548 aa, Homo sapiens
EGARLRDEGYPARSLADAGDIDPQASEVAVGEGARLAVHPAQHGSKDPPPHFRRSGNGEDQPRNQKTQGAAFLPPSAWGSGPARMRAARRGLHCAGAERPRRRGRLWDSSGVPQRQKRPGPWRTQTQEQMSRDVCIHTWPCTYYLEPKRRWVTGQLSLTSLSLRFMTDSTGEILVSFPLSSIVEIKKEASHFIFSSITILEKGHAKHWFSSLRPSRNVVFSIIEHFWRELLLSQPGAVADASVPRTRGEELTGLMAGSQKRLEDTARVLHHQGQQLDSVMRGLDKMESDLEVADRLLTELESPAWWPFSSKLWKTPPETKPREDVSMTSCEPFGKEGILIKIPAVISHRTESHVKPGRLTVLVSGLEIHDSSSLLMHRFEREDVDDIKVHSPYEISIRQRFIGKPDMAYRLISAKMPEVIPILEVQFSKKMELLEDALVLRSARTSSPAEKSCSVWHAASGLMGRTLHREPPAGDQEGTALHLQTSLPALSEADTQELTQILRRMKGLALEAESELERQDEALDGVAAAVDRATLTIDKHNRRMKRLT

SEQ ID NO: 797940 - protein, 524 aa, Homo sapiens
EGARLRDEGYPARSLADAGDIDPQASEVAVGEGARLAVHPAQHGSKDPPPHFRRSGNGEDQPRNQKTQGAAFLPPSAWGSGPARMRAARRGLHCAGAERPRRRGRLWDSSGVPQRQKRPGPWRTQTQEQMSRDVCIHTWPCTYYLEPKRRWVTGQLSLTSLSLRFMTDSTGEILVSFPLSSIVEIKKEASHFIFSSITILEKGHAKHWFSSLRPSRNVVFSIIEHFWRELLLSQPGAVADASVPRTRGEELTGLMAGSQKRLEDTARVLHHQGQQLDSVMRGLDKMESDLEVADRLLTELESPAWWPFSSKLWKTPPETKPREDVSMTSCEPFGKEGILIKIPAVISHRTESHVKPGRLTVLVSGLEIHDSSSLLMHRFEREDVDDIKVHSPYEISIRQRFIGKPDMAYRLISAKMPEVIPILEVQFSKKMELLEDALVLRSARTSSPAEKSCSVWHAASGLMGRTLHREPPAGDQEGTALHLQTSLPALSEADTQELTQELENALHLPQGPPFLVWLPSLPYP

SEQ ID NO: 797941 - protein, 222 aa, Homo sapiens; identical to SEQ ID NO: 797938

SEQ ID NO: 797942 - protein, 331 aa, Homo sapiens
EGARLRDEGYPARSLADAGDIDPQASEVAVGEGARLAVHPAQHGSKDPPPHFRRSGNGEDQPRNQKTQGAAFLPPSAWGSGPARMRAARRGLHCAGAERPRRRGRLWDSSGVPQRQKRPGPWRTQTQEQMSRDVCIHTWPCTYYLEPKRRWVTGQLSLTSLSLRFMTDSTGEILVSFPLSSIVEIKKEASHFIFSSITILEKGHAKHWFSSLRPSRNVVFSIIEHFWRELLLSQPGAVADASVPRTRGEELTGLMAGSQKRLEDTARVLHHQGQQLDSVMRGLDKMESDLEVADRLLTELESPAWWPFSSKLWKTPSWRRAMPSTGSAPCG

SEQ ID NO: 797943 - protein, 119 aa, Homo sapiens
MRLPKNTPEEKDRRTAALQEGLRRAVSVPLTLAETVASLWPALQELARCGNLACRSDLQVAAKALEMGVFGAYFNVLINLRDITDEAFKDQIHHRVSSLLQEAKTQAALVLDCLETRQE

SEQ ID NO: 797944 - protein, 555 aa, Homo sapiens
SICPERSIWIKVLAMSQLVECVPNFSEGKNQEVIDAISGAITQTPGCVLLDVDAGPSTNRTVYTFVGPPECVVEGALNAARVASRLIDMSRHQGEHPRMGALDVCPFIPVRGVSVDECVLCAQAFGQRLAEELDVPVYLYGEAARMDSRRTLPAIRAGEYEALPKKLQQADWAPDFGPSSFVPSWGATATGARKFLIAFNINLLGTKEQAHRIALNLREQGRGKDQPGRLKKVQGIGWYLDEKNLAQVSTNLLDFEVTALHTVYEETCREAQELSLPVVGSQLVGLVPLKALLDAAAFYCEKENLFILEEEQRIRLVVSRLGLDSLCPFSPKERIIEYLVPERGPERGLGSKSLRAFVGEVGARSAAPGGGSVAAAAAAMGAALGSMVGLMTYGRRQFQSLDTTMRRLIPPFREASAKLTTLVDADAEAFTAYLEAMRLPKNTPEEKDRRTAALQEGLRRAVSVPLTLAETVASLWPALQELARCGNLACRSDLQVAAKALEMGVFGAYFNVLINLRDITDEAFKDQIHHRVSSLLQEAKTQAALVLDCLETRQE

SEQ ID NO: 797945 - protein, 555 aa, Homo sapiens; identical to SEQ ID NO: 797944

SEQ ID NO: 797946 - protein, 563 aa, Homo sapiens
SICPERSIWIKVLAMSQLVECVPNFSEGKNQEVIDAISGAITQTPGCVLLDVDAGPSTNRTVYTFVGPPECVVEGALNAARVASRLIDMSRHQGEHPRMGALDVCPFIPVRGVSVDECVLCAQAFGQRLAEELDVPGLTAGLSCIYLYGEAARMDSRRTLPAIRAGEYEALPKKLQQADWAPDFGPSSFVPSWGATATGARKFLIAFNINLLGTKEQAHRIALNLREQGRGKDQPGRLKKVQGIGWYLDEKNLAQVSTNLLDFEVTALHTVYEETCREAQELSLPVVGSQLVGLVPLKALLDAAAFYCEKENLFILEEEQRIRLVVSRLGLDSLCPFSPKERIIEYLVPERGPERGLGSKSLRAFVGEVGARSAAPGGGSVAAAAAAMGAALGSMVGLMTYGRRQFQSLDTTMRRLIPPFREASAKLTTLVDADAEAFTAYLEAMRLPKNTPEEKDRRTAALQEGLRRAVSVPLTLAETVASLWPALQELARCGNLACRSDLQVAAKALEMGVFGAYFNVLINLRDITDEAFKDQIHHRVSSLLQEAKTQAALVLDCLETRQE

SEQ ID NO: 797947 - protein, 509 aa, Homo sapiens
SICPERSIWIKVLAMSQLVECVPNFSEGKNQEVIDAISGAITQTPGCVLLDVDAGPSTNRTVYTFVGPPECVVEGALNAARVASRLIDMSRHQGEHPRMGALDVCPFIPVRGVSVDECVLCAQAFGQRLAEELDVPVYLYGEAARMDSRRTLPAIRAGEYEALPKKLQQADWAPDFGPSSFVPSWGATATGARKFLIAFNINLLGTKEQAHRIALNLREQGRGKDQPGRLKKVQGIGWYLDEKNLAQVSTNLLDFEVTALHTVYEETCREAQELSLPVVGSQLVGLVPLKALLDAAAFYCEKENLFILEEEQRIRLVVSRLGLDSLCPFSPKERIIEYLVPERGPERGLGSKSLRAFVGEVGARSAAPGGGSVAAAAAAMGAALGSMVGLMTYGRRQFQSLDTTMRRLIPPFREASAKLTTLVDADAEAFTAYLAHGGPTGGSEAGSLCAADAGGDGGLAVAGAAGTGPVWEPGLPVRPPGGGQSPGDGRVWRIFQRAHQPEGHHRRGI

SEQ ID NO: 797948 - protein, 104 aa, Homo sapiens
MTSHRPLLQLCSALLGCSVSTACLCVPLCSGSPLAPFRRTAALQEGLRRAVSVPLTLAETVASLWPALQELARCGNLACRSDLQVGGPGGPQASCRKAGSSCWG

SEQ ID NO: 797949 - protein, 331 aa, Homo sapiens
NSFLWASGSPRATQGDGCFQKPVRGACWGGAHRAPGGAEVGGASHAPALLPAKAPVCSGQGAAAARVGPAGSEAFLVVETRRGRFHSKPLFQVVSRLGLDSLCPFSPKERIIEYLVPERGPERGLGSKSLRAFVGEVGARSAAPGGGSVAAAAAAMGAALGSMVGLMTYGRRQFQSLDTTMRRLIPPFREASAKLTTLVDADAEAFTAYLEAMRLPKNTPEEKDRRTAALQEGLRRAVSVPLTLAETVASLWPALQELARCGNLACRSDLQVAAKALEMGVFGAYFNVLINLRDITDEAFKDQIHHRVSSLLQEAKTQAALVLDCLETRQE

SEQ ID NO: 797950 - protein, 606 aa, Homo sapiens
SICPERSIWIKVLAMSQLVECVPNFSEGKNQEVIDAISGAITQTPGCVLLDVDAGPSTNRTVYTFVGPPECVVEGALNAARVASRLIDMSRHQGEHPRMGALDVCPFIPVRGVSVDECVLCAQAFGQRLAEELDVPVYLYGEAARMDSRRTLPAIRAGEYEALPKKLQQADWAPDFGPSSFVPSWGATATGARKFLIAFNINLLGTKEQAHRIALNLREQGRGKDQPGRLKKVQGIGWYLDEKNLAQVSTNLLDFEVTALHTVYEETCREAQELSLPVVGSQLVGLVPLKALLDAAAFYCEKENLFILEEEQRIRLVVSRLGLDSLCPFSPKERIIEYLVPERGPERGLGSKSLRAFVGEVGARSAAPGGGSVAAAAAAMGAALGSMVGLMTYGRRQFQSLDTTMRRLIPPFREASAKLTTLVDADAEAFTAYLEAMRLPKNTPEEKDRRTAALQEGLRRAVSVPLTLAETVASLWPALQELARCGNLACRSDLQVAAKALEMGVFGAYFNVLINLRDITDEAFKDQPPAGSQDPGCTGAGLLGDPAGVTVREASPGSVAPPSPIPRGQSCDLGGDTACSCGARRIGGQAAGHRLGMEALAGTEGP

SEQ ID NO: 797951 - protein, 555 aa, Homo sapiens; identical to SEQ ID NO: 797944

SEQ ID NO: 797952 - protein, 444 aa, Homo sapiens
SICPERSIWIKVLAMSQLVECVPNFSEGKNQEVIDAISGAITQTPGCVLLDVDAGPSTNRTVYTFVGPPECVVEGALNAARVASRLIDMSRHQGEHPRMGALDVCPFIPVRGVSVDECVLCAQAFGQRLAEELDVPVYLYGEAARMDSRRTLPAIRAGEYEALPKKLQQADWAPDFGPSSFVPSWGATATGARKFLIAFNINLLGTKEQAHRIALNLREQGRGKDQPGRLKKVQGIGWYLDEKNLAQVSTNLLDFEVTALHTVYEETCREAQELSLPVVGSQLVGLVPLKALLDAAAFYCEKENLFILEEEQRIRLVVSRLGLDSLCPFSPKERIIEYLVPERGPERGLGSKSLRAFVGEVGARSAAPGGGSVAAAAAGHGCGAGLHGGPHDLRAAPIPVPGHDDAAPDPALPRGFGQANHAGGCRRRGLHRLPGSNEAPQEHT

SEQ ID NO: 797953 - protein, 104 aa, Homo sapiens
MGVFGAYFNVLINLRDITDEAFKDQPPAGSQDPGCTGAGLLGDPAGVTVREASPGSVAPPSPIPRGQSCDLGGDTACSCGARRIGGQAAGHRLGMEALAGTEGP

SEQ ID NO: 797954 - protein, 586 aa, Homo sapiens
SICPERSIWIKVLAMSQLVECVPNFSEGKNQEVIDAISGAITQTPGCVLLDVDAGPSTNRTVYTFVGPPECVVEGALNAARVASRLIDMSRHQGEHPRMGALDVCPFIPVRGVSVDECVLCAQAFGQRLAEELDVPVYLYGEAARMDSRRTLPAIRAGEYEALPKKLQQADWAPDFGPSSFVPSWGATATGARKFLIAFNINLLGTKEQAHRIALNLREQGRGKDQPGRLKKVQGIGWYLDEKNLAQVSTNLLDFEVTALHTVYEETCREAQELSLPVVGSQLVGLVPLKALLDAAAFYCEKENLFILEEEQRIRLVVSRLGLDSLCPFSPKERIIEYLVPERGPERGLGSKSLRAFVGEVGARSAAPGGGSVAAAAAAMGAALGSMVGLMTYGRRQFQSLDTTMRRLIPPFREASAKLTTLVDADAEAFTAYLEAMRLPKNTPEEKDRRTAALQEGLRRAVSVPLTLAETVASLWPALQELARCGNLACRSDLQVAAKALEMGVFGAYFNVLINLRDITDEAFKDQPPAGSQDPGCTGAGLLGDPAGVTVREASPGSVAPPSPIPRGQSCDLETPGTAGPSTLEG

SEQ ID NO: 797955 - protein, 598 aa, Homo sapiens
SICPERSIWIKVLAMSQLVECVPNFSEGKNQEVIDAISGAITQTPGCVLLDVDAGPSTNRTVYTFVGPPECVVEGALNAARVASRLIDMSRHQGEHPRMGALDVCPFIPVRGVSVDECVLCAQAFGQRLAEELDVPVYLYGEAARMDSRRTLPAIRAGEYEALPKKLQQADWAPDFGPSSFVPSWGATATGARKFLIAFNINLLGTKEQAHRIALNLREQGRGKDQPGRLKKVQGIGWYLDEKNLAQVSTNLLDFEVTALHTVYEETCREAQELSLPVVGSQLVGLVPLKALLDAAAFYCEKENLFILEEEQRIRLVVSRLGLDSLCPFSPKERIIEYLVPERGPERGLGSKSLRAFVGEVGARSAAPGGGSVAAAAAAMGAALGSMVGLMTYGRRQFQSLDTTMRRLIPPFREASAKLTTLVDADAEAFTAYLKLGSQRTGPCLGHAPCYSPLWELRGHGCSPYGPSPSGSVSLWQEAMRLPKNTPEEKDRRTAALQEGLRRAVSVPLTLAETVASLWPALQELARCGNLACRSDLQVAAKALEMGVFGAYFNVLINLRDITDEAFKDQIHHRVSSLLQEAKTQAALVLDCLETRQE

SEQ ID NO: 797956 - protein, 176 aa, Homo sapiens
MGAALGSMVGLMTYGRRQFQSLDTTMRRLIPPFREASAKLTTLVDADAEAFTAYLEAMRLPKNTPEEKDRRTAALQEGLRRAVSVPLTLAETVASLWPALQELARCGNLACRSDLQVAAKALEMGVFGAYFNVLINLRDITDEAFKDQIHHRVSSLLQEAKTQAALVLDCLETRQE

SEQ ID NO: 797957 - protein, 381 aa, Homo sapiens
SICPERSIWIKVLAMSQLVECVPNFSEGKNQEVIDAISGAITQTPGCVLLDVDAGPSTNRTVYTFVGPPECVVEGALNAARVASRLIDMSRHQGEHPRMGALDVCPFIPVRGVSVDECVLCAQAFGQRLAEELDVPVYLYGEAARMDSRRTLCPFSPKERIIEYLVPERGPERGLGSKSLRAFVGEVGARSAAPGGGSVAAAAAAMGAALGSMVGLMTYGRRQFQSLDTTMRRLIPPFREASAKLTTLVDADAEAFTAYLEAMRLPKNTPEEKDRRTAALQEGLRRAVSVPLTLAETVASLWPALQELARCGNLACRSDLQVAAKALEMGVFGAYFNVLINLRDITDEAFKDQIHHRVSSLLQEAKTQAALVLDCLETRQE

SEQ ID NO: 797958 - protein, 136 aa, Homo sapiens
VWKLFSEPSALWKPHRQGQRRTVAQAFRKAQFPDVSLPEVRRSTSTFWLLENDSTPPTCSLPLCKIRAALAGLLGRVSDRGVSSPTWHVISALYPLGAVILEAGLRVVAMSCLSREKHFALDTDCPFSAVRRPQPP

SEQ ID NO: 797959 - protein, 110 aa, Homo sapiens
LHGHIRKKGTGERDIFTKPQPMVTPCKALNLRIPRPGRGCLSKAAQLVLCLERAEGSSTVTASGTSDQFPQPLMKADGSMGWRRWDALERTRVRVGKKIELSSGKSKSRE

SEQ ID NO: 797960 - protein, 110 aa, Homo sapiens; identical to SEQ ID NO: 797959

SEQ ID NO: 797961 - protein, 110 aa, Homo sapiens; identical to SEQ ID NO: 797959

SEQ ID NO: 797962 - protein, 110 aa, Homo sapiens; identical to SEQ ID NO: 797959

SEQ ID NO: 797963 - protein, 110 aa, Homo sapiens; identical to SEQ ID NO: 797959

SEQ ID NO: 797964 - protein, 110 aa, Homo sapiens; identical to SEQ ID NO: 797959

SEQ ID NO: 797965 - protein, 113 aa, Homo sapiens
LPDLAHFKTLVITLGPRSSGHSLHLKTSSGILPSTSIPLHHGVVVFTKESQVPSLCFFGVFGLPLLFFQDACKYPGNWVCFSCDLPNVSFQLTASVYTLPTMFVVFVAEDFSL

SEQ ID NO: 797966 - protein, 132 aa, Homo sapiens
RPQDVPTITELEAKPSRTKSAQWPSYRFTMAFGPAHTQSILSNAKKCLYVSPSSIHAQPARTLRVPQFTIREPTSAAGRVVLWDRLGLAGQADRGAEQESMQEENPAGVSVSQELQEYRTIPSTKEASGSRS

SEQ ID NO: 797967 - protein, 71 aa, Homo sapiens
CGRAPPPAPRTLPLPLVCPAGGPACWLYASLPAVSAREKRSWVGMFVLVCGGGCRLSCQENSALTIPLLML

SEQ ID NO: 797968 - protein, 216 aa, Homo sapiens
MARSTIIHPHLRDVDRAATVSGRFLAPQQQDPKSSGGCAALLGADLPWSAPPLERATRRVHTALLDPGTGSGSGSASAKGPARRPGAEEARRSVASAVRLTEVGAQRDREERPGRGCQAPSNRGGVGVKAAPGGGRTPNPGHRPPPGLLLYPKGGRGGWEAVHDEHNLHGEENRNVPVSPAAPYRQRSPASRVPSYPTGERGPHSQLQPSPGPATA

SEQ ID NO: 797969 - protein, 113 aa, Homo sapiens
MLGGQGQPLSLGPQASLLPTVAKIAGLYNDLEPPRKTMRRGVLMTLLQQSAMTLPLWIGKPGDKPPPLCGAIPASGDYVARPGDKVAARVKAVDGDEQWILAEVVSYSHATNK

SEQ ID NO: 797970 - protein, 310 aa, Homo sapiens
MCRSAWGGPPLERTSPGARDAQGAHSPLGPRDRLRLRLGVSKGTCAAPWGGGGPTVSGQCRAADGGRGATGPGGAPRAGVPGPLQPRRGWSQGGSGRGSDPKSRPQAAARSSSLPEGRPRRMGSRARRAQSPWGGEQECSCEPRRALPPAQPSIAGPLLSHRRTGSSLPASAEPWPRNCLKARPLHLPTSGPASSPVAKIAGLYNDLEPPRKTMRRGVLMTLLQQSAMTLPLWIGKPGDKPPPLCGAIPASGDYVARPGDKVAARVKAVDGDEQWILAEVVSYSHATNKHLLCRRLLPSSQCGPEVPGSF

SEQ ID NO: 797971 - protein, 260 aa, Homo sapiens
MCRSAWGGPPLERTSPGARDAQGAHSPLGPRDRLRLRLGVSKGTCAAPWGGGGPTVSGQCRAADGGRGATGPGGAPRAGVPGPLQPRRGWSQGGSGRGSDPKSRPQAAARSSSLPEGRPRRMGSRARRAQSPWGGEQECSCEPRRALPPAQPSIAGPLLSHRRTGSSLPASAEPWPRNCLKARPLHLPTSGPASSPVAKIAGLYNDLEPPRKTMRRGVLMTLLQQSAMTLPLWIGKPGDKRLRGQTWRQGGCPGEGRGWG

SEQ ID NO: 797972 - protein, 289 aa, Homo sapiens
MCRSAWGGPPLERTSPGARDAQGAHSPLGPRDRLRLRLGVSKGTCAAPWGGGGPTVSGQCRAADGGRGATGPGGAPRAGVPGPLQPRRGWSQGGSGRGSDPKSRPQAAARSSSLPEGRPRRMGSRARRAQSPWGGEQECSCEPRRALPPAQPSIAGPLLSHRRTGSSLPASAEPWPRNCLKARPLHLPTSGPASSPVAKIAGLYNDLEPPRKTMRRGVLMTLLQQSAMTLPLWIGKPGDKPPPLCGAIPASGDYVARPGDKVAARVKAVDGDEQWILAEVVSYSHATNK

SEQ ID NO: 797973 - protein, 69 aa, Homo sapiens
ETKRLIIVFYSKTCLSATTAAITFDHSLSENTALGCGNAVVEKPGIILIPMEALSPSKGRGPASPEVSS

SEQ ID NO: 797974 - protein, 1237 aa, Homo sapiens
MGDMKTPDFDDLLAAFDIPDIDANEAIHSGPEENEGPGGPGKPEPGVGSESEDTAAASAGDGPGVPAQASDHGLPPPDISVVSVIVKNTVCPEQSEALAGGSAGDGAQAAGVTKEGPVGPHRMQNGFGSPEPSLPGTPHSPAPPSGGTWKEKGMEGKTPLDLFAHFGPEPGDHSDPLPPSAPSPTREGALTPPPFPSSFELAQENGPGMQPPVSSPPLGALKQESCSPHHPQVLAQQGSGSSPKATDIPASASPPPVAGVPFFKQSPGHQSPLASPKVPVCQPLKEEDDDEGPVDKSSPGSPQSPSSGAEAADEDSNDSPASSSSRPLKVRIKTIKTSCGNITRTVTQVPSDPDPPAPLAEGAFLAEASLLKLSPATPTSEGPKVVSVQLGDGTRLKGTVLPVATIQNASTAMLMAASVARKAVVLPGGTATSPKMIAKNVLGLVPQALPKADGRAGLGTGGQKVNGASVVMVQPSKTATGPSTGGGTVISRTQSSLVEAFNKILNSKNLLPAYRPNLSPPAEAGLALPPTGYRCLECGDAFSLEKSLARHYDRRSMRIEVTCNHCARRLVFFNKCSLLLHAREHKDKGLVMQCSHLVMRPVALDQMVGQPDITPLLPVAVPPVSGPLALPALGKGEGAITSSAITTVAAEAPVLPLSTEPPAAPATSAYTCFRCLECKEQCRDKAGMAAHFQQLGPPAPGATSNVCPTCPMMLPNRCSFSAHQRMHKNRPPHVCPECGGNFLQANFQTHLREACLHVSRRVGYRCPSCSVVFGGVNSIKSHIQTSHCEVFHKCPICPMAFKSGPSAHAHLYSQHPSFQTQQAKLIYKCAMCDTVFTHKPLLSSHFDQHLLPQRVSVFKCPSCPLLFAQKRTMLEHLKNTHQSGRLEETAGKGAGGALLTPKTEPEELAVSQGGAAPATEESSSSSEEEEVPSSPEPPRPAKRPRRELGSKGLKGGGGGPGGWTCGLCHSWFPERDEYVAHMKKEHGKSVKKFPCRLCERSFCSAPSLRRHVRVNHEGIKRVYPCRYCTEGKRTFSSRLILEKHVQVRHGLQLGAQSPGRGTTLARGSSARAQGPGRKRRQSSDSCSEEPDSTTPPAKSPRGGPGSGGHGPLRYRSSSSTEQSLMMGLRVEDGAQQCLDCGLCFASPGSLSRHRFISHKKRRGVGKASALGLGDGEEEAPPSRSDPDGGDSPLPASGGPLTCKVCGKSCDSPLNLKTHFRTHGMAFIRARQGAVGDN

SEQ ID NO: 797975 - protein, 1261 aa, Homo sapiens
MGDMKTPDFDDLLAAFDIPDIDANEAIHSGPEENEGPGGPGKPEPGVGSESEDTAAASAGDGPGVPAQASDHGLPPPDISVVSVIVKNTVCPEQSEALAGGSAGDGAQAAGVTKEGPVGPHRMQNGFGSPEPSLPGTPHSPAPPSGGTWKEKGMEGKTPLDLFAHFGPEPGDHSDPLPPSAPSPTREGALTPPPFPSSFELAQENGPGMQPPVSSPPLGALKQESCSPHHPQVLAQQGSGSSPKATDIPASASPPPVAGVPFFKQSPGHQSPLASPKVPVCQPLKEEDDDEGPVDKSSPGSPQSPSSGAEAADEDSNDSPASSSSRPLKVRIKTIKTSCGNITRTVTQVPSDPDPPAPLAEGAFLAEASLLKLSPATPTSEGPKVVSVQLGDGTRLKGTVLPVATIQNASTAMLMAASVARKAVVLPGGTATSPKMIAKNVLGLVPQALPKADGRAGLGTGGQKVNGASVVMVQPSKTATGPSTGGGTVISRTQSSLVEAFNKILNSKNLLPAYRPNLSPPAEAGLALPPTGYRCLECGDAFSLEKSLARHYDRRSMRIEVTCNHCARRLVFFNKCSLLLHAREHKDKGLVMQCSHLVMRPVALDQMVGQPDITPLLPVAVPPVSGPLALPALGKGEGAITSSAITTVAAEAPVLPLSTEPPAAPATSAYTCFRCLECKEQCRDKAGMAAHFQQLGPPAPGATSNVCPTCPMMLPNRCSFSAHQRMHKNRPPHVCPECGGNFLQANFQTHLREACLHVSRRVGYRCPSCSVVFGGVNSIKSHIQTSHCEVFHKCPICPMAFKSGPSAHAHLYSQHPSFQTQQAKLIYKCAMCDTVFTHKPLLSSHFDQHLLPQRVSVFKCPSCPLLFAQKRTMLEHLKNTHQSGRLEETAGKGAGGALLTPKTEPEELAVSQGGAAPATEESSSSSEEEEVPSSPEPPRPAKRPRRELGSKGLKGGGGGPGGWTCGLCHSWFPERDEYVAHMKKEHGKSVKKFPCRLCERSFCSAPSLRRHVRVNHEGIKRVYPCSPSSEARALAFGLCRCCHPVLSHFRYCTEGKRTFSSRLILEKHVQVRHGLQLGAQSPGRGTTLARGSSARAQGPGRKRRQSSDSCSEEPDSTTPPAKSPRGGPGSGGHGPLRYRSSSSTEQSLMMGLRVEDGAQQCLDCGLCFASPGSLSRHRFISHKKRRGVGKASALGLGDGEEEAPPSRSDPDGGDSPLPASGGPLTCKVCGKSCDSPLNLKTHFRTHGMAFIRARQGAVGDN

SEQ ID NO: 797976 - protein, 573 aa, Homo sapiens
LPNSAGQADLQVRHVRHSLHSQTPPLLTLRPALACPGATSNVCPTCPMMLPNRCSFSAHQRMHKNRPPHVCPECGGNFLQANFQTHLREACLHVSRRVGYRCPSCSVVFGGVNSIKSHIQTSHCEVFHKCPICPMAFKSGPSAHAHLYSQHPSFQTQQAKLIYKCAMCDTVFTHKPLLSSHFDQHLLPQRVSVFKCPSCPLLFAQKRTMLEHLKNTHQSGRLEETAGKGAGGALLTPKTEPEELAVSQGGAAPATEESSSSSEEEEVPSSPEPPRPAKRPRRELGSKGLKGGGGGPGGWTCGLCHSWFPERDEYVAHMKKEHGKSVKKFPCRLCERSFCSAPSLRRHVRVNHEGIKRVYPCRYCTEGKRTFSSRLILEKHVQVRHGLQLGAQSPGRGTTLARGSSARAQGPGRKRRQSSDSCSEEPDSTTPPAKSPRGGPGSGGHGPLRYRSSSSTEQSLMMGLRVEDGAQQCLDCGLCFASPGSLSRHRFISHKKRRGVGKASALGLGDGEEEAPPSRSDPDGGDSPLPASGGPLTCKVCGKSCDSPLNLKTHFRTHGMAFIRARQGAVGDN

SEQ ID NO: 797977 - protein, 332 aa, Homo sapiens
MGDMKTPDFDDLLAAFDIPDIDANEAIHSGPEENEGPGGPGKPEPGVGSESEDTAAASAGDGPGVPAQASDHGLPPPDISVVSVIVKNTVCPEQSEALAGGSAGDGAQAAGVTKEGPVGPHRMQNGFGSPEPSLPGTPHSPAPPSGGTWKEKGMEGKTPLDLFAHFGPEPGDHSDPLPPSAPSPTREGALTPPPFPSSFELAQENGPGMQPPVSSPPLGALKQESCSPHHPQVLAQQGSGSSPKATDIPASASPPPVAGVPFFKQSPGHQSPLASPKVPVCQPLKEEDDDEGPVDKSSPGSPQSPSSGAEAADEDSNDSPASSSSRPLKVRI

SEQ ID NO: 797978 - protein, 422 aa, Homo sapiens
MGDMKTPDFDDLLAAFDIPDIDANEAIHSGPEENEGPGGPGKPEPGVGSESEDTAAASAGDGPGVPAQASDHGLPPPDISVVSVIVKNTVCPEQSEALAGGSAGDGAQAAGVTKEGPVGPHRMQNGFGSPEPSLPGTPHSPAPPSGGTWKEKGMEGKTPLDLFAHFGPEPGDHSDPLPPSAPSPTREGALTPPPFPSSFELAQENGPGMQPPVSSPPLGALKQESCSPHHPQVLAQQGSGSSPKATDIPASASPPPVAGVPFFKQSPGHQSPLASPKVPVCQPLKEEDDDEGPVDKSSPGSPQSPSSGAEAADEDSNDSPASSSSRPLKVRIKTIKTSCGNITRTVTQVPSDPDPPAPLAEGAFLAEASLLKLSPATPTSEGPKVVSLVGLGPGDDGGCSSPASRPPMVGKKQVAACLGHSP

SEQ ID NO: 797979 - protein, 106 aa, Homo sapiens
GSRPTWRTDSQPAPGLSLARSRAGTRAVGAQGPSALRPAHRGSQGRRAGAFSCLSQQLRAAPPGLASCPSQGEGGHRNVAAALICEFQSRARLFLNYKLIDGPHLN

SEQ ID NO: 797980 - protein, 317 aa, Homo sapiens
MKSDCMQTTICQERKKDPIEMFHSGQLVKVCAPMVRYSKLAFRTLVRKYSCDLCYTPMIVAADFVKSIKARDSEFTTNQGDCPLIVQFAANDARLLSDAARIVCPYANGIDINCGCPQRWAMAEGYGACLINKPELVQDMVKQVRNQVETPGFSVSIKIRIHDDLKRTVDLCQKAEATGVSWITVHGRTAEERHQPVHYDSIKIIKENMSIPVIANGDIRSLKEAENVWRITGTDGVMVARGLLANPAMFAGYEETPLKCIWDWVDIALELGTPYMCFHQHLMYMMEKITSRQEKRVFNALSSTSAIIDYLTDHYGI

SEQ ID NO: 797981 - protein, 98 aa, Homo sapiens
GSRPTWRTDSQPAPGLSLARSRAGTRAVGAQGPSALRPAHRGSQGRRAGAFSCLSQQLRAAPPGLASCPSQGEGGHRNVAAALICEASIKPQNRGRAA

SEQ ID NO: 797982 - protein, 196 aa, Homo sapiens
MAEGYGACLINKPELVQDMVKQVRNQVETPGFSVSIKIRIHDDLKRTVDLCQKAEATGVSWITVHGRTAEERHQPVHYDSIKIIKENMSIPVIANGDIRSLKEAENVWRITGTDGVMVARGLLANPAMFAGYEETPLKCIWDWVDIALELGTPYMCFHQHLMYMMEKITSRQEKRVFNALSSTSAIIDYLTDHYGI

SEQ ID NO: 797983 - protein, 196 aa, Homo sapiens; identical to SEQ ID NO: 797982

SEQ ID NO: 797984 - protein, 106 aa, Homo sapiens; identical to SEQ ID NO: 797979

SEQ ID NO: 797985 - protein, 98 aa, Homo sapiens; identical to SEQ ID NO: 797981

SEQ ID NO: 797986 - protein, 98 aa, Homo sapiens; identical to SEQ ID NO: 797981

SEQ ID NO: 797987 - protein, 106 aa, Homo sapiens
  misc_feature (4)..(4): Xaa can be any naturally occurring amino acid
SEVXFHPQAARSEQEMGSHFVTQAGLKLLASSDLLALVSQSAGITGLNYCTRLTFPISNVSMKNTRSQLQRHPAISSILHFAKSYLWQSLHEQDWYPYKRSPRELS

SEQ ID NO: 797988 - protein, 337 aa, Homo sapiens
MLFSALLLEVIWILAADGGQHWTYEGPHGQDHWPASYPECGNNAQSPIDIQTDSVTFDPDLPALQPHGYDQPGTEPLDLHNNGHTVQLSLPSTLYLGGLPRKYVAAQLHLHWGQKGSPGGSEHQINSEATFAELHIVHYDSDSYDSLSEAAERPQGLAVLGILIEVGETKNIAYEHILSHLHEVRHKDQKTSVPPFNLRELLPKQLGQYFRYNGSLTTPPCYQSVLWTVFYRRSQISMEQLEKLQGTLFSTEEEPSKLLVQNYRALQPLNQRMVFASFIQAGSSYTTGEMLSLGVGILVGCLCLLLAVYFIARKIRKKRLENRKSVVFTSAQATTEA

SEQ ID NO: 797989 - protein, 337 aa, Homo sapiens; identical to SEQ ID NO: 797988

SEQ ID NO: 797990 - protein, 120 aa, Homo sapiens
MPPETQPDQKMCVPTRKKACLCLHALPLPFLTTYKYSLSEEVREEGGGPCLAFLRLSSIPSRSSSERGAAVNCDNCYALALKTWQVGDGGGDCDLTESSRGQGGTQGHSTGSPRAPRHEV

SEQ ID NO: 797991 - protein, 261 aa, Homo sapiens
MEEPQLLRIVLPGGQDQVVARQAQGALDSRVERPVQHHIVHPRGLNQLRKLHAPPAAGAREPSPAQGPPLPLGSGSRVGKRRAVGESRLRIRFHALAARTPSGSGYSLLEPTTTPGGSSRSRNSEDAEVAAGSWSSLGPLEMPPETQPDQKMCVPTRKKACLCLHALPLPFLTTYKYSLSEEVREEGGGPCLAFLRLSSIPSRSSSERGAAVNCDNCYALALKTWQVGDGGGDCDLTESSRGQGGTQGHSTGSPRAPRHEV

SEQ ID NO: 797992 - protein, 120 aa, Homo sapiens; identical to SEQ ID NO: 797990

SEQ ID NO: 797993 - protein, 561 aa, Homo sapiens
GCRIRTREHIRTPKVENVRLVDRVSPKKAALGTLYLTATHVIFVENSPDARKETWILHSQISTIEKQATTATGCPLLIRCKNFQIIQLIIPQERDCHDVYISLIRLARPVKYEELYCFSFNPMLDKEEREQGWVLIDLSEEYTRMGLPNHYWQLSDVNRDYRVCDSYPTELYVPKSATAHIIVGSSKFRSRRRFPVLSYYYKDNHASICRSSQPLSGFSARCLEDEQMLQAIRKANPGSDFVYVVDTRPKLNAMANRAAGKGYENEDNYSNIKFQFIGIENIHVMRNSLQKMLEVCELKSPSMSDFLWGLENSGWLRHIKAIMDAGIFIAKAVSEEGASVLVHCSDGWDRTAQVCSVASLLLDPHYRTLKGFMVLIEKDWISFGHKFNHRYGNLDGDPKEISPVIDQFIECVWQLMEQFPCAFEFNERFLIHIQHHIYSCQFGNFLCNSQKERRELKIQERTYSLWAHLWKNRADYLNPLFRADHSQTQGTLHLPTTPCNFMYKFWSGMYNRFEKGMQPRQSVTDYLMAVKEETQQLEEELEALEEVRHTCFVNLFSVLIS

SEQ ID NO: 797994 - protein, 666 aa, Homo sapiens
GCRIRTREHIRTPKVENVRLVDRVSPKKAALGTLYLTATHVIFVENSPDARKETWILHSQISTIEKQATTATGCPLLIRCKNFQIIQLIIPQERDCHDVYISLIRLARPVKYEELYCFSFNPMLDKEEREQGWVLIDLSEEYTRMGLPNHYWQLSDVNRDYRVCDSYPTELYVPKSATAHIIVGSSKFRSRRRFPVLSYYYKDNHASICRSSQPLSGFSARCLEDEQMLQAIRKANPGSDFVYVVDTRPKLNAMANRAAGKGYENEDNYSNIKFQFIGIENIHVMRNSLQKMLEVCELKSPSMSDFLWGLENSGWLRHIKAIMDAGIFIAKAVSEEGASVLVHCSDGWDRTAQVCSVASLLLDPHYRTLKGFMVLIEKDWISFGHKFNHRYGNLDGDPKEISPVIDQFIECVWQLMEQFPCAFEFNERFLIHIQHHIYSCQFGNFLCNSQKERRELKIQERTYSLWAHLWKNRADYLNPLFRADHSQTQGTLHLPTTPCNFMYKFWSGMYNRFEKGMQPRQSVTDYLMAVKEETQQLEEELEALEERLEKIQKVQLNCTKVKSKQSEPSKHSGFSTSDNSIANTPQDYSGNMKSFPSRSPSQGDEDSALILTQDNLKSSDPDLSANSDQESGVEDLSCRSPSGGEHAPSEDSGKDRDSDEAVFLTA

SEQ ID NO: 797995 - protein, 102 aa, Homo sapiens
MVLHPDHTLPSPAATLPISPQTKVTVASSPGASKWKDKALSMSSFSSQPRRSRSVFSNQAPTWRGPQGKVTGRTLAASWAWLSRAGSAPTRLALESLSFSKG

SEQ ID NO: 797996 - protein, 135 aa, Homo sapiens
MMDETFSKTAFLAGEGLFTLSLNIRFKNLIPVDSLVVMDVELDKIEDQKLYMSCIAHSSWKKSLPSNSHCACRRATASPACLLPPASPACLLPPASPACLLPPASPACLGPIKEQGGVLKQQLVRRGKGPFSLSK

SEQ ID NO: 797997 - protein, 328 aa, Homo sapiens
EAAPSAAESTPWESAKTLHPSRAGSLHLAMIRRCFQVAARLGHHRGLLEAPRILPRLNPASAFGSSTDSMFSRFLPEKTDLKDYALPNASWCSDMLSLYQEFLEKTKSSGWIKLPSFKSNRDHIRGLKLPSGLAVSSDKGDCRIFTRCIQVEGQGFEYVIFFQPTQKKSVCLFQPGSYLEGPPGFAHGGSLAAMMDETFSKTAFLAGEGLFTLSLNIRFKNLIPVDSLVVMDVELDKIEDQKLYMSCIAHSSWKKSLPSNSHCACRRATASPACLLPPASPACLLPPASPACLLPPASPACLGPIKEQGGVLKQQLVRRGKGPFSLSK

SEQ ID NO: 797998 - protein, 95 aa, Homo sapiens
IRPILDPYSSSFPSANRTWWVAGPSVIRDHGSAKKNTGFLKPEATDLRRERGSNVSSSFLFRFRFYFLVTRPPKKVPPNGQSIRRSDSLFPERRV

SEQ ID NO: 797999 - protein, 90 aa, Homo sapiens
LTLLVYTYCQRYQQQSHDATVIHPVSPAPLNTSITNHINKLDKYDSVEAIKAFNKNNLILEERNKYFNPHLTGKTYSNAYFTDLNNYDEY

SEQ ID NO: 798000 - protein, 326 aa, Homo sapiens
MPPSISAFQAAYIGIEVLIALVSVPGNVLVIWAVKVNQALRDATFCFIVSLAVADVAVGALVIPLAILINIGPQTYFHTCLMVACPVLILTQSSILALLAIAVDRYLRVKIPLRYKMVVTPRRAAVAIAGCWILSFVVGLTPMFGWNNLSAVERAWAANGSMGEPVIKCEFEKVISMEYMVYFNFFVWVLPPLLLMVLIYLEVFYLIRKQLNKKVSASSGDPQKYYGKELKIAKSLALILFLFALSWLPLHILNCITLFCPSCHKPSILTYIAIFLTHGNSAMNPIVYAFRIQKFRVTFLKIWNDHFRCQPAPPIDEDLPEERPDD

SEQ ID NO: 798001 - protein, 326 aa, Homo sapiens; identical to SEQ ID NO: 798000

SEQ ID NO: 798002 - protein, 258 aa, Homo sapiens
MHLPTHRALEEEGAPLRGPWRPGVPQRGLSRQLGGRSSHSALLSPRYKMVVTPRRAAVAIAGCWILSFVVGLTPMFGWNNLSAVERAWAANGSMGEPVIKCEFEKVISMEYMVYFNFFVWVLPPLLLMVLIYLEVFYLIRKQLNKKVSASSGDPQKYYGKELKIAKSLALILFLFALSWLPLHILNCITLFCPSCHKPSILTYIAIFLTHGNSAMNPIVYAFRIQKFRVTFLKIWNDHFRCQPAPPIDEDLPEERPDD

SEQ ID NO: 798003 - protein, 326 aa, Homo sapiens; identical to SEQ ID NO: 798000

SEQ ID NO: 798004 - protein, 326 aa, Homo sapiens; identical to SEQ ID NO: 798000

SEQ ID NO: 798005 - protein, 326 aa, Homo sapiens; identical to SEQ ID NO: 798000

SEQ ID NO: 798006 - protein, 326 aa, Homo sapiens; identical to SEQ ID NO: 798000

SEQ ID NO: 798007 - protein, 91 aa, Homo sapiens
MPGTVATLRFQLLPPEPDDAFWGAPCEQPLERRYQALPALVCIMCCLFGVVYCFFGEIPISSLTWAPQCFPEFFFWAPKSSLNPSTIMNNS

SEQ ID NO: 798008 - protein, 601 aa, Homo sapiens
LPPRRAEPAARAESPEPRLDSPPAAALGCAGFLRSALEPQPRPQLSDVSLQGPRPRGGVSGSRYRRGRRRGRLKGKDPRKCPLLSAGEGDAGGGVPCLPRRGWCVPGDVRSSPPLPGWCALSDVRSRGRSCPSAPKAAGGLRAWGRGSGAARAPAPAPSPSSGPARVPGRRGTGVPAGVGRGAAPPPRRHHSLRPSSPLPRTTDFPWTPVSWSLWRPATPAPRASAQPLSLRSSGRLQPSTMPGTVATLRFQLLPPEPDDAFWGAPCEQPLERRYQALPALVCIMCCLFGVVYCFFGYRCFKAVLFLTGLLFGSVVIFLLCYRERVLETQLSAGASAGIALGIGLLCGLVAMLVRSVGLFLVGLLLGLLLAAAALLGSAPYYQPGSVWGPLGLLLGGGLLCALLTLRWPRPLTTLATAVTGAALIATAADYFAELLLLGRYVVERLRAAPVPPLCWRSWALLALWPLLSLMGVLVQWRVTAEGDSHTEVVISRQRRRVQLMRIRQQEDRKEKRRKKRPPRAPLRGPRAPPRPGPPDPAYRRRPVPIKRFNGDVLSPSYIQSFRDRQTGSSLSSFMASPTDADYEYGSRGPLTACSGPPVRV

SEQ ID NO: 798009 - protein, 590 aa, Homo sapiens
LPPRRAEPAARAESPEPRLDSPPAAALGCAGFLRSALEPQPRPQLSDVSLQGPRPRGGVSGSRYRRGRRRGRLKGKDPRKCPLLSAGEGDAGGGVPCLPRRGWCVPGDVRSSPPLPGWCALSDVRSRGRSCPSAPKAAGGLRAWGRGSGAARAPAPAPSPSSGPARVPGRRGTGVPAGVGRGAAPPPRRHHSLRPSSPLPRTTDFPWTPVSWSLWRPATPAPRASAQPLSLRSSGRLQPRLTWEGDSLLFPALCRGLWQHCGSSCCPLSQMMPSGVHLVNSPWSAGYRCFKAVLFLTGLLFGSVVIFLLCYRERVLETQLSAGASAGIALGIGLLCGLVAMLVRSVGLFLVGLLLGLLLAAAALLGSAPYYQPGSVWGPLGLLLGGGLLCALLTLRWPRPLTTLATAVTGAALIATAADYFAELLLLGRYVVERLRAAPVPPLCWRSWALLALWPLLSLMGVLVQWRVTAEGDSHTEVVISRQRRRVQLMRIRQQEDRKEKRRKKRPPRAPLRGPRAPPRPGPPDPAYRRRPVPIKRFNGDVLSPSYIQSFRDRQTGSSLSSFMASPTDADYEYGSRGPLTACSGPPVRV

SEQ ID NO: 798010 - protein, 360 aa, Homo sapiens
MPGTVATLRFQLLPPEPDDAFWGAPCEQPLERRYQALPALVCIMCCLFGVVYCFFGYRCFKAVLFLTGLLFGSVVIFLLCYRERVLETQLSAGASAGIALGIGLLCGLVAMLVRSVGLFLVGLLLGLLLAAAALLGSAPYYQPGSVWGPLGLLLGGGLLCALLTLRWPRPLTTLATAVTGAALIATAADYFAELLLLGRYVVERLRAAPVPPLCWRSWALLALWPLLSLMGVLVQWRVTAEGDSHTEVVISRQRRRVQLMRIRQQEDRKEKRRKKRPPRAPLRGPRAPPRPGPPDPAYRRRPVPIKRFNGDVLSPSYIQSFRDRQTGSSLSSFMASPTDADYEYGSRGPLTACSGPPVRV

SEQ ID NO: 798011 - protein, 382 aa, Homo sapiens
MVMFAFPLTTNSHISLTSPDLNGPITDAVMTPVTLNSLILVSLSLVPLGSHVLDPLDLLPPAWCPHLGPSLAPVPPPGYRCFKAVLFLTGLLFGSVVIFLLCYRERVLETQLSAGASAGIALGIGLLCGLVAMLVRSVGLFLVGLLLGLLLAAAALLGSAPYYQPGSVWGPLGLLLGGGLLCALLTLRWPRPLTTLATAVTGAALIATAADYFAELLLLGRYVVERLRAAPVPPLCWRSWALLALWPLLSLMGVLVQWRVTAEGDSHTEVVISRQRRRVQLMRIRQQEDRKEKRRKKRPPRAPLRGPRAPPRPGPPDPAYRRRPVPIKRFNGDVLSPSYIQSFRDRQTGSSLSSFMASPTDADYEYGSRGPLTACSGPPVRV

SEQ ID NO: 798012 - protein, 360 aa, Homo sapiens; identical to SEQ ID NO: 798010

SEQ ID NO: 798013 - protein, 360 aa, Homo sapiens; identical to SEQ ID NO: 798010

SEQ ID NO: 798014 - protein, 360 aa, Homo sapiens; identical to SEQ ID NO: 798010

SEQ ID NO: 798015 - protein, 288 aa, Homo sapiens
MPGTVATLRFQLLPPEPDDAFWGAPCEQPLERRYQALPALVCIMCCLFGVVYCFFGYRCFKAVLFLTGLLFGSVVIFLLCYRERVLETQLSAGASAGIALGIGLLCGLVAMLVRSVGLFLVGLLLGLLLAAAALLGSAPYYQPGSVWGPLGLLLGGGLLCALLTLRWPRPLTTLATAVTGAALIATAADYFAELLLLGRYVVERLRAAPVPPLCWRSWALLALWPLLSLMGVLVQWRVTAEGDSHTEVVISRQRRRVQLMRIRQQEDRKEKRRKKRPLTACSGPPVRV

SEQ ID NO: 798016 - protein, 246 aa, Homo sapiens
MSTCCTSVPRSQPRPSCLSVFWDLYCAAPDRREACEHSGEAKAFQDYSAAAAPSPVMGSMAPGDTMAAGSMAAGFFQPFMSPRFPGGPRPTLRMPSQSYGGGMRPPPNSLAGPGLPAMNMGPGVRGPWASPSGNSIPYSSSFPGSYTGTPGGWLGPLGTPIMPSPWRIPPNTERNSMFTYSCNPQFVDKDARSGALSFPRLRAPCPWEGAPSGRPRSREWGRHHSTVKRDPVWTRVDIERPCRKVP

SEQ ID NO: 798017 - protein, 387 aa, Homo sapiens
MYAKGGKGSAVPSDSQAREKLALYVYEYLLHIGAQKSAQTFLSEIRWEKNITLGEPPGFLHSWWCVFWDLYCAAPDRREACEHSGEAKAFQDYSAAAAPSPVMGSMAPGDTMAAGSMAAGFFQPFMSPRFPGGPRPTLRMPSQPPAGLPGSQPLLPGAMEPSPRAQGHPSMGGPMQRVTPPRGMASVGPQSYGGGMRPPPNSLAGPGLPAMNMGPGVRGPWASPSGNSIPYSSSSPGSYTGPPGGGGPPGTPIMPSPGDSTNSSENMYTIMNPIGQGAGRANFPLGPGPEGPMAAMSAMEPHHVNGSLGSGDMDGLPKSSPGAVAGLSNAPGTPRDDGEMAAAGTFLHPFPSESVSDCVDSPPAAASGRRGLAGRPRRGGRGARARP

SEQ ID NO: 798018 - protein, 387 aa, Homo sapiens; identical to SEQ ID NO: 798017

SEQ ID NO: 798019 - protein, 385 aa, Homo sapiens
MGLSAVVPAAGYTFAVWSAMLSVAANVCGWVYNNVGGRLHLRLALYVYEYLLHIGAQKSAQTFLSEIRWEKNITLGEPPGFLHSWWCVFWDLYCAAPDRREACEHSGEAKAFQDYSAAAAPSPVMGSMAPGDTMAAGSMAAGFFQPFMSPRFPGGPRPTLRMPSQPPAGLPGSQPLLPGAMEPSPRAQGHPSMGGPMQRVTPPRGMASVGPQSYGGGMRPPPNSLAGPGLPAMNMGPGVRGPWASPSGNSIPYSSSSPGSYTGPPGGGGPPGTPIMPSPGDSTNSSENMYTIMNPIGQGAGRANFPLGPGPEGPMAAMSAMEPHHVNGSLGSGDMDGLPKSSPGAVAGLSNAPGTPRDDGEMAAAGTFLHPFPSESYSPGMTMSV

SEQ ID NO: 798020 - protein, 387 aa, Homo sapiens; identical to SEQ ID NO: 798017

SEQ ID NO: 798021 - protein, 261 aa, Homo sapiens
MGSMAPGDTMAAGSMAAGFFQPFMSPRFPGGPRPTLRMPSQPPAGLPGSQPLLPGAMEPSPRAQGHPSMGGPMQRVTPPRGMASVGPQSYGGGMRPPPNSLAGPGLPAMNMGPGVRGPWASPSGNSIPYSSSSPGSYTGPPGGGGPPGTPIMPSPGDSTNSSENMYTIMNPIGQGAGRANFPLGPGPEGPMAAMSAMEPHHVNGSLGSGDMDGLPKSSPGAVAGLSNAPGTPRDDGEMAAAGTFLHPFPSESYSPGMTMSV

SEQ ID NO: 798022 - protein, 297 aa, Homo sapiens
MYAKGGKGSAVPSDSQAREKLALYVYEYLLHIGAQKSAQTFLSEIRWEKNITLGEPPGFLHSWWCVFWDLYCAAPDRREACEHSGEAKAFQDYSAAAAPSPVMGSMAPGDTMAAGSMAAGFFQPFMSPRFPGGPRPTLRMPSQPPAGLPGSQPLLPGAMEPSPRAQGHPSMGGPMQRVTPPRGMASVGPQHERDGASPRERIPGLGRHGRVAEEFPRRRGRPEQRPGHPAGRRRDGGRRDLPAPVPERKRKRLRRLPPRGGVGPEGPGGQAPAGRPGGQSKTVTAAGQYSPGMTMSV

SEQ ID NO: 798023 - protein, 330 aa, Homo sapiens
MYAKGGKGSAVPSDSQAREKLALYVYEYLLHIGAQKSAQTFLSEIRWEKNITLGEPPGFLHSWWCVFWDLYCAAPDRREACEHSGEAKAFQDYSAAAAPSPVMGSMAPGDTMAAGSMAAGFFQPFMSPRFPGGPRPTLRMPSQPPAGLPGSQPLLPGAMEPSPRAQGHPSMGGPMQRVTPPRGMASVGPQSYGGGMRPPPNSLAGPGLPAMNMGPGVRGPWASPSGNSIPYSSSSPGSYTGPPGGGGPPGTPIMPSPGDSTNSSENMYTIMNPIGQGAGRANFPLGPGPEGPMAAMSAMEPHHVNGSLGSGDMDGLPKVRRLRSCRGWDP

SEQ ID NO: 798024 - protein, 133 aa, Homo sapiens
AFPGTARAEEREEKKPPCGRGRSWSRRCRRRRGRLELPRADDACRARLGLGAVRPGARGSYGDGKRGPRRRLTGVGPGGGGVEQHVRQGGQGFGRALRQPGPREVSAGPGAGLGVRALPWAPARAGTARGTWA

SEQ ID NO: 798025 - protein, 385 aa, Homo sapiens
MYAKGGKGSAVPSDSQAREKLALYVYEYLLHIGAQKSAQTFLSEIRWEKNITLGEPPGFLHSWWCVFWDLYCAAPDRREACEHSGEAKAFQDYSAAAAPSPVMGSMAPGDTMAAGSMAAGFFQGPPGSQPSPHNPNAPMMGPHGQPFMSPRFPGGPRPTLRMPSQPPAGLPGSQPLLPGAMEPSPRAQGHPSMGGPMQRVTPPRGMASVGPQSYGGGMRPPPNSLAGPGLPAMNMGPGVRGPWASPSGNSIPYSSSSPGSYTGPPGGGGPPGTPIMPSPGDSTNSSENMYTIMNPIGQGAGRANFPLGPGPEGPMAAMSAMEPHHVNGSLGSGDMDGLPKSSPGAVAGLSNAPGTPRDDGEMAAAGTFLHPFPSESYSPGMTMSV

SEQ ID NO: 798026 - protein, 363 aa, Homo sapiens
MYAKGGKGSAVPSDSQAREKLALYVYEYLLHIGAQKSAQTFLSEIRWEKNITLGEPPGFLHSWWCVFWDLYCAAPDRREACEHSGEAKAFQDYSAAAAPSPVMGSMAPGDTMAAGSMAAGFFQPFMSPRFPGGPRPTLRMPSQPPAGLPGSQPLLPGAMEPSPRAQGHPSMGGPMQRVTPPRGMASVGPQSYGGGMRPPPNSLAGPGLPAMNMGPGVRGPWASPSGNSIPYSSSSPGSYTGPPGGGGPPGTPIMPSPGDSTNSSENMYTIMNPIGQGAGRANFPLGPGPEGPMAAMSAMEPHHVNGSLGSGDMDGLPKSSPGAVAGLSNAPGTPRDDGEMAAAGTFLHPFPSESYSPGMTMSV

SEQ ID NO: 798027 - protein, 387 aa, Homo sapiens; identical to SEQ ID NO: 798017

SEQ ID NO: 798028 - protein, 387 aa, Homo sapiens; identical to SEQ ID NO: 798017

SEQ ID NO: 798029 - protein, 401 aa, Homo sapiens
REEGSARFPEQPARRKGRKKSHPAAGAGAGAAAAAAAAAVWSSPARTMPAVPAWGSGRLALYVYEYLLHIGAQKSAQTFLSEIRWEKNITLGEPPGFLHSWWCVFWDLYCAAPDRREACEHSGEAKAFQDYSAAAAPSPVMGSMAPGDTMAAGSMAAGFFQPFMSPRFPGGPRPTLRMPSQPPAGLPGSQPLLPGAMEPSPRAQGHPSMGGPMQRVTPPRGMASVGPQSYGGGMRPPPNSLAGPGLPAMNMGPGVRGPWASPSGNSIPYSSSSPGSYTGPPGGGGPPGTPIMPSPGDSTNSSENMYTIMNPIGQGAGRANFPLGPGPEGPMAAMSAMEPHHVNGSLGSGDMDGLPKSSPGAVAGLSNAPGTPRDDGEMAAAGTFLHPFPSESYSPGMTMSV

SEQ ID NO: 798030 - protein, 83 aa, Homo sapiens
WCPPWPSPGPGTEGGLWGGSLGPVELCISWISFPGAEAAGLRESPLRWKVLPPTETPANSECHTVASGDPCGPEPFAHRQGGC

SEQ ID NO: 798031 - protein, 83 aa, Homo sapiens; identical to SEQ ID NO: 798030

SEQ ID NO: 798032 - protein, 288 aa, Homo sapiens
MDAELAEVRALQAEIAALRRACEDPPAPWEEKSRVQKSFQAIHQFNLEGWKSSKDLKNQLGHLESELSFLSTLTGINIRNHSKQTEDLTSTEMTEKSIRKVLQRHRLSGNCHMVTFQLEFQILEIQNKERLSSAVTDLNIIMEPTECSELSEFVSRAEERKDLFMFFRSLHFFVEWFEYRKRTFKHLKEKYPDAVYLSEGPSSCSMGIRSASRPGFELVIVWRIQIDEDGKVFPKLDLLTKVPQRALELDKNRAIETAPLSFRTLVGLLGIEAALESLIKSLCAEENN

SEQ ID NO: 798033 - protein, 1049 aa, Homo sapiens
QAEFAAASTTPALGSDGVRVTMDSALTARDRVGVQDFVLLENFTSEAAFIENLRRRFRENLIYTYIGPVLVSVNPYRDLQIYSRQHMERYRGVSFYEVPPHLFAVADTVYRALRTERRDQAVMISGESGAGKTEATKKLLQFYAETCPAPQRGGAVRDRLLQSNPVLEAFGNAKTLRNDNSSRFGKYMDVQFDFKGAPVGGHILSYLLEKSRVVHQNHGERNFHIFYQLLEGGEEETLRRLGLERNPQSYLYLVKGQCAKVSSINDKSDWKVVRKALTVIDFTEDEVEDLLSIVASVLHLGNIHFAANEDSNAQVTTENQLKYLTRLLSVEGSTLREALTHRKIIAKGEELLSPLNLEQAAYARNALAKAVYSRTFTWLVGKINRSLASKDVESPSWRSTTVLGLLDIYGFEVFQHNSFEQFCINYCNEKLQQLFIELPLKSEQEEYEAEGIAWEPVQYFNNKIICDLVEEKFKGIISILDEECLRPGEATDLTFLEKLEDTVKHHPHFLTHKLADQRTRKSLGRGEFRLLHYAGEVTYSVTGFLDKNNDLLFRNLKETMCSSKNPIMSQCFDRSELSDKKRPETVATQFKMSLLQLVEILQSKEPAYVRCIKPNDAKQPGRFDEVLIRHQVKYLGLLENLRVRRAGFAYRRKYEAFLQRYKSLCPETWPTWAGRPQDGVAVLVRHLGYKPEEYKMGRTKIFIRFPKTLFATEDALEVRRQSLATKIQAAWRGFHWRQKFLRVKRSAICIQSWWRGTLGRRKAAKRKWAAQTIRRLIRGFILRHAPRCPENAFFLDHVRTSFLLNLRRQLPRNVLDTSWPTPPPALREASELLRELCIKNMVWKYCRSISPEWKQQLQQKAVASEIFKGKKDNYPQSVPRLFISTRLGTDEISPRVLQALGSEPIQYAVPVVKYDRKGYKPRSRQLLLTPNAVVIVEDAKVKQRIDYANLTGISVSSLSDSLFVLHVQRADNKQKGDVVLQSDHVIETLTKTALSANRVNSININQGSITFAGGPGRDGTIDFTPGSELLITKAKNGHLAVVAPRLNSR

SEQ ID NO: 798034 - protein, 1049 aa, Homo sapiens; identical to SEQ ID NO: 798033

SEQ ID NO: 798035 - protein, 1049 aa, Homo sapiens; identical to SEQ ID NO: 798033

SEQ ID NO: 798036 - protein, 1049 aa, Homo sapiens; identical to SEQ ID NO: 798033

SEQ ID NO: 798037 - protein, 153 aa, Homo sapiens
RPTPGARLVALAVVFHNRHRILNGLRAQGLLLTPNAVVIVEDAKVKQRIDYANLTGISVSSLSDSLFVLHVQRADNKQKGDVVLQSDHVIETLTKTALSANRVNSININQGSITFAGGPGRDGTIDFTPGSELLITKAKNGHLAVVAPRLNSR

SEQ ID NO: 798038 - protein, 1049 aa, Homo sapiens; identical to SEQ ID NO: 798033

SEQ ID NO: 798039 - protein, 1049 aa, Homo sapiens; identical to SEQ ID NO: 798033

SEQ ID NO: 798040 - protein, 1049 aa, Homo sapiens; identical to SEQ ID NO: 798033

SEQ ID NO: 798041 - protein, 1049 aa, Homo sapiens; identical to SEQ ID NO: 798033

SEQ ID NO: 798042 - protein, 1049 aa, Homo sapiens; identical to SEQ ID NO: 798033

SEQ ID NO: 798043 - protein, 1049 aa, Homo sapiens; identical to SEQ ID NO: 798033

SEQ ID NO: 798044 - protein, 1049 aa, Homo sapiens; identical to SEQ ID NO: 798033

SEQ ID NO: 798045 - protein, 102 aa, Homo sapiens [sequence omitted]

SEQ ID NO: 798046 - protein, 736 aa, Homo sapiens
MRELKRTLDAKGHGVLEMPSGTGKTVSLLALIMAYQRAYPLEVTKLIYCSRTVPEIEKVIEELRKLLNFYEKQEGEKLPFLGLALSSRKNLCIHPEVTPLRFGKDVDGKCHSLTASYVRAQYQHDTSLPHCRFYEEFDAHGREVPLPAGIYNLDDLKALGRRQGWCPYFLARYSILHANVVVYSYHYLLDPKIADLVSKELARKAVVVFDEAHNIDNVCIDSMSVNLTRRTLDRCQGNLETLQKTVLRIKETDEQRLRDEYRRLVEGLREASAARETDAHLANPVLPDEVLQEAVPGSIRTAEHFLGFLRRLLEYVKWRLRVQHVVQESPPAFLSGLAQRVCIQRKPLRFCAERLRSLLHTLEITDLADFSPLTLLANFATLVSTYAKGFTIIIEPFDDRTPTIANPILHFSCMDASLAIKPVFERFQSVIITSGTLSPLDIYPKILDFHPVTMATFTMTLARVCLCPMIIGRGNDQVAISSKFETREDIAVIRNYGNLLLEMSAVVPDGIVAFFTSYQYMESTVASWYEQGILENIQRNKLLFIETQDGAETSVALEKYQEACENGRGAILLSVARGKVSEGIDFVHHYGRAVIMFGVPYVYTQSRILKARLEYLRDQFQIRENDFLTFDAMRHAAQCVGRAIRGKTDYGLMVFADKRFARGDKRGKLPRWIQEHLTDANLNLTVDEGVQVAKYFLRQMAQPFHREDQLGLSLLSLEQLESEETLKRIEQIAQQL

SEQ ID NO: 798047 - protein, 736 aa, Homo sapiens; identical to SEQ ID NO: 798046

SEQ ID NO: 798048 - protein, 760 aa, Homo sapiens
MKLNVDGLLVYFPYDYIYPEQFSYMRELKRTLDAKGHGVLEMPSGTGKTVSLLALIMAYQRAYPLEVTKLIYCSRTVPEIEKVIEELRKLLNFYEKQEGEKLPFLGLALSSRKNLCIHPEVTPLRFGKDVDGKCHSLTASYVRAQYQHDTSLPHCRFYEEFDAHGREVPLPAGIYNLDDLKALGRRQGWCPYFLARYSILHANVVVYSYHYLLDPKIADLVSKELARKAVVVFDEAHNIDNVCIDSMSVNLTRRTLDRCQGNLETLQKTVLRIKETDEQRLRDEYRRLVEGLREASAARETDAHLANPVLPDEVLQEAVPGSIRTAEHFLGFLRRLLEYVKWRLRVQHVVQESPPAFLSGLAQRVCIQRKPLRFCAERLRSLLHTLEITDLADFSPLTLLANFATLVSTYAKGFTIIIEPFDDRTPTIANPILHFSCMDASLAIKPVFERFQSVIITSGTLSPLDIYPKILDFHPVTMATFTMTLARVCLCPMIIGRGNDQVAISSKFETREDIAVIRNYGNLLLEMSAVVPDGIVAFFTSYQYMESTVASWYEQGILENIQRNKLLFIETQDGAETSVALEKYQEACENGRGAILLSVARGKVSEGIDFVHHYGRAVIMFGVPYVYTQSRILKARLEYLRDQFQIRENDFLTFDAMRHAAQCVGRAIRGKTDYGLMVFADKRFARGDKRGKLPRWIQEHLTDANLNLTVDEGVQVAKYFLRQMAQPFHREDQLGLSLLSLEQLESEETLKRIEQIAQQL

SEQ ID NO: 798049 - protein, 736 aa, Homo sapiens; identical to SEQ ID NO: 798046

SEQ ID NO: 798050 - protein, 715 aa, Homo sapiens
MRELKRTLDAKGHGVLEMPSGTGKTVSLLALIMAYQRAYPLEVTKLIYCSRTVPEIEKVIEELRKLLNFYEKQEGEKLPFLGLALSSRKNLCIHPEVTPLRFGKDVDGKCHSLTASYVRAQYQHDTSLPHCRFYEEFDAHGREVPLPAGIYNLDDLKALGRRQGWCPYFLARYSILHANVVVYSYHYLLDPKIADLVSKELARKAVVVFDEAHNIDNVCIDSMSVNLTRRTLDRCQGNLETLQKTVLRIKETDEQRLRDEYRRLVEGLREASAARETDAHLANPVLPDEVLQEAVPGSIRTAEHFLGFLRRLLEYVKWRLRVQHVVQESPPAFLSGLAQRVCIQRKPLRFCAERLRSLLHTLEITDLADFSPLTLLANFATLVSTYAKGFTIIIEPFDDRTPTIANPILHFSCMDASLAIKPVFERFQSVIITSGTLSPLDIYPKILDFHPVTMATFTMTLARVCLCPMLLIRNYGNLLLEMSAVVPDGIVAFFTSYQYMESTVASWYEQGILENIQRNKLLFIETQDGAETSVALEKYQEACENGRGAILLSVARGKVSEGIDFVHHYGRAVIMFGVPYVYTQSRILKARLEYLRDQFQIRENDFLTFDAMRHAAQCVGRAIRGKTDYGLMVFADKRFARGDKRGKLPRWIQEHLTDANLNLTVDEGVQVAKYFLRQMAQPFHREDQLGLSLLSLEQLESEETLKRIEQIAQQL

SEQ ID NO: 798051 - protein, 704 aa, Homo sapiens
KEKYLGWYEAWVVLIYCSRTVPEIEKVIEELRKLLNFYEKQEGEKLPFLGLALSSRKNLCIHPEVTPLRFGKDVDGKCHSLTASYVRAQYQHDTSLPHCRFYEEFDAHGREVPLPAGIYNLDDLKALGRRQGWCPYFLARYSILHANVVVYSYHYLLDPKIADLVSKELARKAVVVFDEAHNIDNVCIDSMSVNLTRRTLDRCQGNLETLQKTVLRIKETDEQRLRDEYRRLVEGLREASAARETDAHLANPVLPDEVLQEAVPGSIRTAEHFLGFLRRLLEYVKWRLRVQHVVQESPPAFLSGLAQRVCIQRKPLRFCAERLRSLLHTLEITDLADFSPLTLLANFATLVSTYAKGFTIIIEPFDDRTPTIANPILHFSCMDASLAIKPVFERFQSVIITSGTLSPLDIYPKILDFHPVTMATFTMTLARVCLCPMIIGRGNDQVAISSKFETREDIAVIRNYGNLLLEMSAVVPDGIVAFFTSYQYMESTVASWYEQGILENIQRNKLLFIETQDGAETSVALEKYQEACENGRGAILLSVARGKVSEGIDFVHHYGRAVIMFGVPYVYTQSRILKARLEYLRDQFQIRENDFLTFDAMRHAAQCVGRAIRGKTDYGLMVFADKRFARGDKRGKLPRWIQEHLTDANLNLTVDEGVQVAKYFLRQMAQPFHREDQLGLSLLSLEQLESEETLKRIEQIAQQL

SEQ ID NO: 798052 - protein, 710 aa, Homo sapiens
MRELKRTLDAKAYPLEVTKLIYCSRTVPEIEKVIEELRKLLNFYEKQEGEKLPFLGLALSSRKNLCIHPEVTPLRFGKDVDGKCHSLTASYVRAQYQHDTSLPHCRFYEEFDAHGREVPLPAGIYNLDDLKALGRRQGWCPYFLARYSILHANVVVYSYHYLLDPKIADLVSKELARKAVVVFDEAHNIDNVCIDSMSVNLTRRTLDRCQGNLETLQKTVLRIKETDEQRLRDEYRRLVEGLREASAARETDAHLANPVLPDEVLQEAVPGSIRTAEHFLGFLRRLLEYVKWRLRVQHVVQESPPAFLSGLAQRVCIQRKPLRFCAERLRSLLHTLEITDLADFSPLTLLANFATLVSTYAKGFTIIIEPFDDRTPTIANPILHFSCMDASLAIKPVFERFQSVIITSGTLSPLDIYPKILDFHPVTMATFTMTLARVCLCPMIIGRGNDQVAISSKFETREDIAVIRNYGNLLLEMSAVVPDGIVAFFTSYQYMESTVASWYEQGILENIQRNKLLFIETQDGAETSVALEKYQEACENGRGAILLSVARGKVSEGIDFVHHYGRAVIMFGVPYVYTQSRILKARLEYLRDQFQIRENDFLTFDAMRHAAQCVGRAIRGKTDYGLMVFADKRFARGDKRGKLPRWIQEHLTDANLNLTVDEGVQVAKYFLRQMAQPFHREDQLGLSLLSLEQLESEETLKRIEQIAQQL

SEQ ID NO: 798053 - protein, 405 aa, Homo sapiens
MRELKRTLDAKGHGVLEMPSGTGKTVSLLALIMAYQRAYPLEVTKLIYCSRTVPEIEKVIEELRKLLNFYEKQEGEKLPFLGLALSSRKNLCIHPEVTPLRFGKDVDGKCHSLTASYVRAQYQHDTSLPHCRFYEEFDAHGREVPLPAGIYNLDDLKALGRRQGWCPYFLARYSILHANVVVYSYHYLLDPKIADLVSKELARKAVVVFDEAHNIDNVCIDSMSVNLTRRTLDRCQGNLETLQKTVLRIKETDEQRLRDEYRRLVEGLREASAARETDAHLANPVLPDEVLQEAVPGSIRTAEHFLGFLRRLLEYVKWRLRVQHVVQESPPAFLSGLAQRVCIQRKPLRFCAERLRSLLHTLEITDLADFSPLTLLANFATLVSTYAKGQAQHCGSSRNQKRSHP

SEQ ID NO: 798054 - protein, 503 aa, Homo sapiens
MRELKRTLDAKGHGVLEMPSGTGKTVSLLALIMAYQRAYPLEVTKLIYCSRTVPEIEKVIEELRKLLNFYEKQEGEKLPFLGLALSSRKNLCIHPEVTPLRFGKDVDGKCHSLTASYVRAQYQHDTSLPHCRFYEEFDAHGREVPLPAGIYNLDDLKALGRRQGWCPYFLARYSILHANVVVYSYHYLLDPKIADLVSKELARKAVVVFDEAHNIDNVCIDSMSVNLTRRTLDRCQGNLETLQKTVLRIKETDEQRLRDEYRRLVEGLREASAARETDAHLANPVLPDEVLQEAVPGSIRTAEHFLGFLRRLLEYVKWRLRVQHVVQESPPAFLSGLAQRVCIQRKPLRFCAERLRSLLHTLEITDLADFSPLTLLANFATLVSTYAKGFTIIIEPFDDRTPTIANPILHFSCMDASLAIKPVFERFQSVIITSGTLSPLDIYPKILDFHPVTMATFTMTLARVCLCPMIIGRGNDQVAISSKFETREDIGYAASGAGFCGFQ

SEQ ID NO: 798055 - protein, 318 aa, Homo sapiens
LVLDRDLELVSVIITSGTLSPLDIYPKILDFHPVTMATFTMTLARVCLCPMIIGRGNDQVAISSKFETREDIAVIRNYGNLLLEMSAVVPDGIVAFFTSYQYMESTVASWYEQGILENIQRNKLLFIETQDGAETSVALEKYQEACENGRGAILLSVARGKVSEGIDFVHHYGRAVIMFGVPYVYTQSRILKARLEYLRDQFQIRENDFLTFDAMRHAAQCVGRAIRGKTDYGLMVFADKRFARGDKRGKLPRWIQEHLTDANLNLTVDEGVQVAKYFLRQMAQPFHREDQLGLSLLSLEQLESEETLKRIEQIAQQL

SEQ ID NO: 798056 - protein, 102 aa, Homo sapiens [sequence omitted]

SEQ ID NO: 798057 - protein, 161 aa, Homo sapiens
TVPAGHLPQDPGLPPRHHGNLHHDAGTGLPLPYGEWERLGLGPGGEMGARGRPPSLASPTAQAGELYSEEAGFGIQTDLGLILLLCGLDSQASVFSSVKWECILPDLPGWLRGLRERTGVNHLGRPGPGTGRRLVSILASCRVRGLAVTQVSEPSSPSPSL

SEQ ID NO: 798058 - protein, 109 aa, Homo sapiens
MEHAVEEVKNSLQLFEEYFLQDKMFITGNQISLADLVAVVEMMQPMAANYNVFLNSSKLAEWRMQVELNIGSGLFREAHDRLMQLADWDFSTLDSMVKENISELLKKSR

SEQ ID NO: 798059 - protein, 69 aa, Homo sapiens
NMALELYMDLLSAPCRAVYIFSKKHDIQFNFQFVDLLKGHHHSKEYIDINPLRKLPSLKDGKFILSESC

SEQ ID NO: 798060 - protein, 123 aa, Homo sapiens
VGTQPPPPERPLCASCWETMKTHRAGLWGLRSALGETCFSGLREHSEHVLGEGRSPPTCPEDLAGSRHGMGQKGNLRGPTPTALPTNQAFNNPTLNTCSPEVLRPWAAPSSGGTGRGRGGASP

SEQ ID NO: 798061 - protein, 236 aa, Homo sapiens
MPTALFLLPPFVPFPDKRAISNNEYIWVFTGAGRRGVHFSPRGPPAKQPGSRGARGPGAGLGLRRGRLALGCGRSGIPILERRRRASGWGREGFLDPSRFSEIVKKGLNKRGGAFKKKIDSDALAGSRSTICHADSHTHRGPRDTATWDQTMRPAVWRPPCGKMPAAGPLREERMQREGKRREGPGAGQAGTSGCSACCPGGSCISAGKVRALPEPELGRLQLSPGGLAKSGHVGA

SEQ ID NO: 798062 - protein, 202 aa, Homo sapiens
MAGEKKRRHRKLVTAMNGTFWRGAEERGLGVPQTRAPGSPLPLGSVPDPRWDTASLVLPSAPWFPTALAPLAPAQSNPAQPSPAGGGRTSCWAPGKRSRTRRKSWRKVARTTAGHARTERLSALSRAPRWARSVCALCSSTSASVCGRCSPEHLRGTGRVGRGGRGQRQGHDRNSGSHSSQDTDTGDNTRVGRSTNTHADRA

SEQ ID NO: 798063 - protein, 202 aa, Homo sapiens; identical to SEQ ID NO: 798062

SEQ ID NO: 798064 - protein, 123 aa, Homo sapiens
MGAPGGKINRPRTELKKKLFKRRRVLNRERRLRHRVVGAVIDQGLITRHHLKKRASSARANITLSGKKRRKLLQQIRLAQKEKTAMEVEAPSKPARTSEPQLKRQKKTKAPQDVEMKDLEDES

SEQ ID NO: 798065 - protein, 126 aa, Homo sapiens
MFSNSKLYVTILEMRMSPVIQAYVWCDSVLVSRRALHDRHIIVRDQGLITRHHLKKRASSARANITLSGKKRRKLLQQIRLAQKEKTAMEVEAPSKPARTSEPQLKRQKKTKAPQDVEMKDLEDES

SEQ ID NO: 798066 - protein, 125 aa, Homo sapiens
FFRKESMAACTASGAPTGAPRSRKLLPRGLTTPWRRLERPIAETIDKRPAREDLLEETFGIRSAWISGLAEGVEVSKKCWHQGLSAGTLCPQFRGGIARGRVRVFMVAVGFMIAHFSVFRRFPIS

SEQ ID NO: 798067 - protein, 72 aa, Homo sapiens
SGGIRHGRTELKKKLFKRRRVLNRERRLRHRVVGAVIDQGLITRHHLKKRALISYTPVCIVIIRVYTFNAKT

SEQ ID NO: 798068 - protein, 123 aa, Homo sapiens; identical to SEQ ID NO: 798064

SEQ ID NO: 798069 - protein, 289 aa, Homo sapiens
MALVPGRSKEDGLWTRNSPGSSQHPESPRLPNPLWDRGKIGKVEGHQHIQDFSQKSHLPSIVVESSEVNEESGDLHLPHEELLLLTDGEEEDAEAFFQDQSEEPGWAWSPQDPRSPLRTFNAGLSWGQDQDEEDACWILEDTACLEATNHCPFWDSTGSRVVEVALWNIPISCLLIALRELKKKLFKRRRVLNRERRLRHRVVGAVIDQGLITRHHLKKRASSARANITLSGKKRRKLLQQIRLAQKEKTAMEVEAPSKPARTSEPQLKRQKKTKAPQDVEMKDLEDES

SEQ ID NO: 798070 - protein, 351 aa, Homo sapiens
FFRKESMAACTASGAPTGAPRSRKLLPRGLTTPWRRLERPIAETIDKRPAREDLLEETFGIRSAWISGRSKEDGLWTRNSPGSSQHPESPRLPNPLWDRGKIGKVEGHQHIQDFSQKSHLPSIVVESSEVNEESGDLHLPHEELLLLTDGEEEDAEAFFQDQSEEPGWAWSPQDPRSPLRTFNAGLSWGQDQDEEDACWILEDTACLEATNHCPFWDSTGSRVVEVALWNIPISCLLIALRELKKKLFKRRRVLNRERRLRHRVVGAVIDQGLITRHHLKKRASSARANITLSGKKRRKLLQQIRLAQKEKTAMEVEAPSKPARTSEPQLKRQKKTKAPQDVEMKDLEDES

SEQ ID NO: 798071 - protein, 190 aa, Homo sapiens
LSGSTDRELEWNRDYGSSGGKDQPAPNGDCCGGRDFVSSSVPEPFYLARDGISEGPGLPGGGAPGRGEPTPSDSHLSPRQELKKKLFKRRRVLNRERRLRHRVVGAVIDQGLITRHHLKKRASSARANITLSGKKRRKLLQQIRLAQKEKTAMEVEAPSKPARTSEPQLKRQKKTKAPQDVEMKDLEDES

SEQ ID NO: 798072 - protein, 289 aa, Homo sapiens; identical to SEQ ID NO: 798069

SEQ ID NO: 798073 - protein, 208 aa, Homo sapiens
MALVPGRSKEDGLWTRNSPGSSQHPESPRLPNPLWDRGKIGKVEGHQHIQDFSQKSHLPSIVVESSEVNEESGDLHLPHEELLLLTDGEEEDAEAFFQDQSEEPGWAWSPQDPRSPLRTFNAGLSWGQDQDEEDACWILEDTACLEATNHCPFWDSTGSRVCRSGFVEYSHLLPPNSFEGKYCSLPLKYLIQVYEAPYTHPLTISFYR

SEQ ID NO: 798074 - protein, 208 aa, Homo sapiens; identical to SEQ ID NO: 798073

SEQ ID NO: 798075 - protein, 88 aa, Homo sapiens
GYGVGLYKQGLISGTPQEAASSARANITLSGKKRRKLLQQIRLAQKEKTAMEVEAPSKPARTSEPQLKRQKKTKAPQDVEMKDLEDES

SEQ ID NO: 798076 - protein, 141 aa, Homo sapiens [sequence omitted]

SEQ ID NO: 798077 - protein, 159 aa, Homo sapiens
MKKMLVGFLRTQHVWKPPTTVPSGTQQAPVFVEVALWNIPISCLLIALRELKKKLFKRRRVLNRERRLRHRVVGAVIDQGLITRHHLKKRASSARANITLSGKKRRKLLQQIRLAQKEKTAMEVEAPSKPARTSEPQLKRQKKTKAPQDVEMKDLEDES

SEQ ID NO: 798078 - protein, 208 aa, Homo sapiens; identical to SEQ ID NO: 798073

SEQ ID NO: 798079 - protein, 208 aa, Homo sapiens; identical to SEQ ID NO: 798073

SEQ ID NO: 798080 - protein, 115 aa, Homo sapiens
SLPATRRSASTADFSTSSLTCASSFCISLTWPRQEQGRTCELSSHPTQQAPPSPRPTDPRAPQGQDLLCDAGYLHPGFCGWILKEGEAPCVTTSRLGSTLTLSPKEHLPPAAIQK

SEQ ID NO: 798081 - protein, 153 aa, Homo sapiens
MNVGVAHSEVNPNTRVMNSRGIWLAYIILVGLLHMVLLSIPFFSIPVVWTLTNVIHNLATYVFLHTVKGTPFETPDQGKARLLTHWEQMDYGLQFTSSRKFLSISPIVLYLLASFYTKYDAAHFLINTASLLSVLLPKLPQFHGVRVFGINKY

SEQ ID NO: 798082 - protein, 153 aa, Homo sapiens; identical to SEQ ID NO: 798081

SEQ ID NO: 798083 - protein, 153 aa, Homo sapiens; identical to SEQ ID NO: 798081

SEQ ID NO: 798084 - protein, 174 aa, Homo sapiens
FGTEGRIRHEAAPIAGRGSELMNVGVAHSEVNPNTRVMNSRGIWLAYIILVGLLHMVLLSIPFFSIPVVWTLTNVIHNLATYVFLHTVKGTPFETPDQGKARLLTHWEQMDYGLQFTSSRKFLSISPIVLYLLASFYTKYDAAHFLINTASLLSVLLPKLPQFHGVRVFGINKY

SEQ ID NO: 798085 - protein, 147 aa, Homo sapiens
RYFLETSGVVAGAAPIAGRGSELAGLLHMVLLSIPFFSIPVVWTLTNVIHNLATYVFLHTVKGTPFETPDQGKARLLTHWEQMDYGLQFTSSRKFLSISPIVLYLLASFYTKYDAAHFLINTASLLSVLLPKLPQFHGVRVFGINKY

SEQ ID NO: 798086 - protein, 161 aa, Homo sapiens
MPKPLLALMNVGVAHSEVNPNTRVMNSRGIWLAYIILVGLLHMVLLSIPFFSIPVVWTLTNVIHNLATYVFLHTVKGTPFETPDQGKARLLTHWEQMDYGLQFTSSRKFLSISPIVLYLLASFYTKYDAAHFLINTASLLSVLLPKLPQFHGVRVFGINKY

SEQ ID NO: 798087 - protein, 147 aa, Homo sapiens; identical to SEQ ID NO: 798085

SEQ ID NO: 798088 - protein, 174 aa, Homo sapiens
MPKPLLALMNVGVAHSEVNPNTRVMNSRGIWLAYIILVGLLHMVLLSIPFFSIPVVWTLTNVIHNLATYVFLHTVKGTPFETPDQGKARLLTHWEQMDYGLQFTSSRKFLSISPIVLYLLASFYTKYDAAHFLNQQILRDGFWDSSMGMGKALKQRTIKHPSLILHTVFYTFKA

SEQ ID NO: 798089 - protein, 153 aa, Homo sapiens; identical to SEQ ID NO: 798081

SEQ ID NO: 798090 - protein, 174 aa, Homo sapiens; identical to SEQ ID NO: 798084

SEQ ID NO: 798091 - protein, 153 aa, Homo sapiens; identical to SEQ ID NO: 798081

SEQ ID NO: 798092 - protein, 174 aa, Homo sapiens; identical to SEQ ID NO: 798084

SEQ ID NO: 798093 - protein, 153 aa, Homo sapiens; identical to SEQ ID NO: 798081

SEQ ID NO: 798094 - protein, 598 aa, Homo sapiens
TCPASGAPAALVPGAAGDHSPPLRRLHPRPPPGRASGAPAPSPWTRRPRCAGRRRGRKMAWVLKMDEVIESGLVHDFDASLSGIGQELGAGAYSMSDVLALPIFKQEDSSLPLDGETEHPPFQYVMCAATSPAVKLHDETLTYLNQGQSYEIRMLDNRKMGDMPEINGKLVKSIIRVVFHDRRLQYTEHQQLEGWKWNRPGDRLLDLDIPMSVGIIDTRTNPSQLNAVEFLWDPAKRTSAFIQVHCISTEFTPRKHGGEKGVPFRIQVDTFKQNENGEYTDHLHSASCQIKVFKPKGADRKQKTDREKMEKRTAHEKEKYQPSYDTTILTEMRLEPIIEDAVEHEQKKSSKRTLPADYGDSLAKRGSCSPWPDAPTAYVNNSPSPAPTFTSPQQSTCSVPDSNSSSPNHQGDGASQTSGEQIQPSATIQETQQWLLKNRFSSYTRLFSNFSGADLLKLTKEDLVQICGAADGIRLYNSLKSRSVRPRLTIYVCREQPSSTVLQGQQQAASSASENGSGAPYVYHAIYLEEMIASEVARKLALVFNIPLHQINQVYRQGPTGIHILVSDQMVQNFQDESCFLFSTVKAESSDGIHIILK

SEQ ID NO: 798095 - protein, 102 aa, Homo sapiens
TDLPRSIRIACCWEVSCFKSSLYGTILCPLMRWFSMSLSSKELKKPLLRRPPSCSSFLKASERRPGWEKDLRMGLRTGSWLPVGAAWGGLGRGLSDPRLPLT

SEQ ID NO: 798096 - protein, 145 aa, Homo sapiens
AKGYLLKIFLQCYFFGVRTDEVNFRLANREEHSSIFLDICGLHNIVSANEVVLNVALLEGAEEAAASEAPILQLLPKGQRAQAGLGEGLAHGPAHRLLAPCGRGMGRVGAGALGPPAAADVIELLDALVDQGRRSLLVRHRHAAA

SEQ ID NO: 798097 - protein, 141 aa, Homo sapiens
SLHKADFLLKAYGRLGLCTSWVIFYREEHSSIFLDICGLHNIVSANEVVLNVALLEGAEEAAASEAPILQLLPKGQRAQAGLGEGLAHGPAHRLLAPCGRGMGRVGAGALGPPAAADVIELLDALVDQGRRSLLVRHRHAA

SEQ ID NO: 798098 - protein, 481 aa, Homo sapiens
MALSYRVSELQSTIPEHILQSTFVHVISSNWSGLQTESIPEEMKQIVEEQGNKLHWAALLILMVIIPTIGGNTLVILAVSLEKKLQYATNYFLMSLAVADLLVGLFVMPIALLTIMFEAMWPLPLVLCPAWLFLDVLFSTASIMHLCAISVDRYIAIKKPIQANQYNSRATAFIKITVVWLISIGIAIPVPIKGIETDVDNPNNITCVLTKERFGDFMLFGSLAAFFTPLAIMIVTYFLTIHALQKKAYLVKNKPPQRLTWLTVSTVFQRDETPCSSPEKVAMLDGSRKDKALPNSGDETLMRRTSTIGKKSVQTISNEQRASKVLGIVFFLFLLMWCPFFITNITLVLCDSCNQTTLQMLLEIFVWIGYVSSGVNPLVYTLFNKTFRDAFGRYITCNYRATKSVKTLRKRSSKIYFRNPMAENSKFFKKHGIRNGINPAMYQSPMRLRSSTIQSSSIILLDTLLLTENEGDKTEEQVSYV

SEQ ID NO: 798099 - protein, 68 aa, Homo sapiens
  misc_feature (38)..(38): Xaa can be any naturally occurring amino acid
AKKAAMSPLQARHSAGAMARRTRRGAAPKVKALLQVPXLTSSHFRAASRGRGILPEEPESQLCQVLAV

SEQ ID NO: 798100 - protein, 71 aa, Homo sapiens
DPPGPAKFLKVVSLPCPGVPGHRNQDSPAHPESFRAPLKYESELLDGNPGATTCPMVAMGKSLNLPDPVFS

SEQ ID NO: 798101 - protein, 686 aa, Homo sapiens
MGPRSRERRAGAVQNTNDSSALSKRSLAARGYVQDPFAALLVPGAARRAPLIHRGYYVRARAVRHCVRAFLEQIGAPQAALRAQILSLGAGFDSLYFRLKTAGRLARAAVWEVDFPDVARRKAERIGETPELCALTGPFERGEPASALCFESADYCILGLDLRQLQRVEEALGAAGLDAASPTLLLAEAVLTYLEPESAAALIAWAAQRFPNALFVVYEQMRPQDAFGQFMLQHFRQLNSPLHGLERFPDVEAQRRRFLQAGWTACGAVDMNEFYHCFLPAEERRRVENIEPFDEFEEWHLKCAHYFILAASRGDTLSHTLVFPSSEAFPRVNPASPSGVFPASVVSSEGQVPNLKRYGHASVFLSPDVILSAGGFGEQEGRHCRVSQFHLLSRDCDSEWKGSQIGSCGTGVQWDGRLYHTMTRLSESRVLVLGGRLSPVSPALGVLQLHFFKSEDNNTEDLKVTITKAGRKDDSTLCCWRHSTTEVSCQNQEYLFVYGGRSVVEPVLSDWHFLHVGTMAWVRIPVEGEVPEARHSHSACTWQGGALIAGGLGASEEPLNSVLFLRPISCGFLWESVDIQPPITPRYSHTAHVLNGKLLLVGGIWIHSSSFPGVTVINLTTGLSSEYQIDTTYVPWPLMLHNHTSILLPEEQQLLLLGGGGNCFSFGTYFNPHTVTLDLSSLSAGQ

SEQ ID NO: 798102 - protein, 660 aa, Homo sapiens
RSFTEATTSAHARGYVQDPFAALLVPGAARRAPLIHRGYYVRAFLEQIGAPQAALRAQILSLGAGFDSLYFRLKTAGRLARAAVWEVDFPDVARRKAERIGETPELCALTGPFERGEPASALCFESADYCILGLDLRQLQRVEEALGAAGLDAASPTLLLAEAVLTYLEPESAAALIAWAAQRFPNALFVVYEQMRPQDAFGQFMLQHFRQLNSPLHGLERFPDVEAQRRRFLQAGWTACGAVDMNEFYHCFLPAEERRRVENIEPFDEFEEWHLKCAHYFILAASRGDTLSHTLVFPSSEAFPRVNPASPSGVFPASVVSSEGQVPNLKRYGHASVFLSPDVILSAGGFGEQEGRHCRVSQFHLLSRDCDSEWKGSQIGSCGTGVQWDGRLYHTMTRLSESRVLVLGGRLSPVSPALGVLQLHFFKSEDNNTEDLKVTITKAGRKDDSTLCCWRHSTTEVSCQNQEYLFVYGGRSVVEPVLSDWHFLHVGTMAWVRIPVEGEVPEARHSHSACTWQGGALIAGGLGASEEPLNSVLFLRPISCGFLWESVDIQPPITPRYSHTAHVLNGKLLLVGGIWIHSSSFPGVTVINLTTGLSSEYQIDTTYVPWPLMLHNHTSILLPEEQQLLLLGGGGNCFSFGTYFNPHTVTLDLSSLSAGQ

SEQ ID NO: 798103 - protein, 686 aa, Homo sapiens; identical to SEQ ID NO: 798101

SEQ ID NO: 798104 - protein, 151 aa, Homo sapiens
DAWVGRVGRPTRAGGGLGASEEPLNSVLFLRPISCGFLWESVDIQPPITPRYSHTAHVLNGKLLLVGGIWIHSSSFPGVTVINLTTGLSSEYQIDTTYVPWPLMLHNHTSILLPEEQQLLLLGGGGNCFSFGTYFNPHTVTLDLSSLSAGQ

SEQ ID NO: 798105 - protein, 669 aa, Homo sapiens
MGPRSRERRAGAVQNTNDSSALSKRSLAARGYVQDPFAALLVPGAARRAPLIHRGYYVRARAVRHCVRAFLEQIGAPQAALRAQILSLGAGFDSLYFRLKTAGRLARAAVWEVDFPDVARRKAERIGETPELCALTGPFERGEPASALCFESADYCILGLDLRQLQRVEEALGAAGLDAASPTLLLAEAVLTYLEPESAAALIAWAAQRFPNALFVVYEQMRPQDAFGQFMLQHFRQLNSPLHGLERFPDVEAQRRRFLQAGWTACGAVDMNEFYHCFLPAEERRRVENIEPFDEFEEWHLKCAHYFILAASRGDTLSHTLVFPSSEAFPRVNPASPSGVFPASVVSSEGQVPNLKRYGHASVFLSPDVILSAGGFGEQEGRHCRVSQFHLLSRDCDSEWKGSQIGSCGTGVQWDGRLYHTMTRLSESRVLVLGGRLSPVSPALGVLQLHFFKSEDNNTEDLKVTITKAGRKDDSTLCCWRHSTTEVSCQNQEYLFVYGGRSVVEPVLSDWHFLHVGTMAWVRIPVEGEVPEARHSHSACTWQGGALIAGGLGASEEPLNSVLFLRPISCGFLWESVDIQPPITPRYSHTAHVLNGKLLLVGGIWIHSSSFPGVTVINLTTGLSSEYQIDTTYVPWPLMLHNHTSILLPLKINNASELRVGSPGDGVCI

SEQ ID NO: 798106 - protein, 686 aa, Homo sapiens; identical to SEQ ID NO: 798101

SEQ ID NO: 798107 - protein, 372 aa, Homo sapiens
AGTGPECMGSSSEAFPRVNPASPSGVFPASVVSSEGQVPNLKRYGHASVFLSPDVILSAGGFGEQEGRHCRVSQFHLLSRDCDSEWKGSQIGSCGTGVQWDGRLYHTMTRLSESRVLVLGGRLSPVSPALGVLQLHFFKSEDNNTEDLKVTITKAGRKDDSTLCCWRHSTTEVSCQNQEYLFVYGGRSVVEPVLSDWHFLHVGTMAWVRIPVEGEVPEARHSHSACTWQGGALIAGGLGASEEPLNSVLFLRPISCGFLWESVDIQPPITPRYSHTAHVLNGKLLLVGGIWIHSSSFPGVTVINLTTGLSSEYQIDTTYVPWPLMLHNHTSILLPEEQQLLLLGGGGNCFSFGTYFNPHTVTLDLSSLSAGQ

SEQ ID NO: 798108 - protein, 685 aa, Homo sapiens
MGPRSRERRAGAVQNTNDSSALSKRSLAARGYVQDPFAALLVPGAARRAPLIHRGYYVRARAVRHCVRAFLEQIGAPQAALRAQILSLGAGFDSLYFRLKTAGRLARAAVWEVDFPDVARRKAERIGETPELCALTGPFERGEPASALCFESADYCILGLDLRQLQRVEEALGAAGLDAASPTLLLAEAVLTYLEPESAAALIAWAAQRFPNALFVVYEQMRPQDAFGQFMLQHFRQLNSPLHGLERFPDVEAQRRRFLQAGWTACGAVDMNEFYHCFLPAEERRRVENIEPFDEFEEWHLKCAHYFILAASRGDTLSHTLVFPSSEAFPRVNPASPSGVFPASVVSSEGQVPNLKRYGHASVFLSPDVILSAGGFGEQEGRHCRVSQFHLLSRDCDSEWKGSQIGSCGTGVQWDGRLYHTMTRLSESRVLVLGGRLSPVSPALGVLQLHFFKSEDNNTEDLKVTITKAGRKDDSTLCCWRHSTTEVSCQNQEYLFVYGGRSVVEPVLSDWHFLHVGTMAWVRIPVEGEVPEARHSHSACTWQGGALIAGGLGASEEPLNSVLFLRPISCGFLWESVDIQPPITPRYSHTAHVLNGKLLLVGGIWIHSSSFPGVTVINLTTGLSSEYQIDTTYVPWPLMLHNHTSILLPEEQQLLLLGGGGNCFSFGTYFNPHTVTATFPDRLDC

SEQ ID NO: 798109 - protein, 462 aa, Homo sapiens
LSRLEAVTARSFEEEGEHLGSRKHRMSEEKDCGGGDALSNGIKKHRTSLPSPMFSRNDFSIWSILRKCIGMELSKITMPVIFNEPLSFLQRLTEYMEHTYLIHKASSLSDPVERMQCVAAFAVSAVASQWERTGKPFNPLLGETYELVRDDLGFRLISEQVSHHPPISAFHAEGLNNDFIFHGSIYPKLKFWGKSVEAEPKGTITLELLEHNEAYTWTNPTCCVHNIIVGKLWIEQYGNVEIINHKTGDKCVLNFKPCGLFGKELHKVEGYIQDKSKKKLCALYGKWTECLYSVDPATFDAYKKNDKKNTEEKKNSKQMSTSEELDEMPVPDSESVFIIPGSVLLWRIAPRPPNSAQMYNFTSFAMVLNEVDKDMESVIPKTDCRLRPDIRAMENGEIDQASEEKKRLEEKQRAARKNRSKSEEDWKTRWFHQGPNPYNGAQDWIYSGSYWDRNYFNLPDIY

SEQ ID NO: 798110 - protein, 218 aa, Homo sapiens
LSRLEAVTARSFEEEGEHLGSRKHRMSEEKDCGGGDALSNGIKKHRTSLPSPMFSRNDFSIWSILRKCIGMELSKITMPVIFNEPLSFLQRLTEYMEHTYLIHKASSLSDPVERMQCVAAFAVSAVASQWERTGKPFNPLLGETYELVREEPLEFRASVPAKQGQASQPRPSQWQFQELKQLNDDFIFLTGVILQSTDVIMSEQSTVRKPCASTASYE

SEQ ID NO: 798111 - protein, 462 aa, Homo sapiens; identical to SEQ ID NO: 798109

SEQ ID NO: 798112 - protein, 196 aa, Homo sapiens
MSSSRDFHVTFAPKRSLVRQPTCTEELLQTGMETASAKNSENNTKEKKNSKQMSTSEELDEMPVPDSESVFIIPGSVLLWRIAPRPPNSAQMYNFTSFAMVLNEVDKDMESVIPKTDCRLRPDIRAMENGEIDQASEEKKRLEEKQRAARKNRSKSEEDWKTRWFHQGPNPYNGAQDWIYSGSYWDRNYFNLPDIY

SEQ ID NO: 798113 - protein, 565 aa, Homo sapiens
PDQDPGVTMAAPMLRWGCRGRRWAFARVDGGSCHRRGAPTGSTSNQIRGESSVAQQPLHTAQKTRKGEHKWAAVVGLEIHAQISSNSKLFSGSQVRFSAPPNSLVSFFDASLPGTLPVLNRRCVEAAVMTGLALNCHINKKSLFDRKHYFYADLPAGYQITQQRLPIAVNGSLIYGVCAGKKQSQVIPKTVRIKQIQLEQDSGKSLHDNLRSQTLIDLNRAGVGLLEVVLEPDMSCGEEAATAVRELQLILQALGTSQANMAEGQLRVDANISVHHPGEPLGVRTEVKNLNSIRFLAKAIDYEIQRQINELENGGEILNETRSFHHKLGCTMSMRDKEGKQDYRFMPEPNLPPLVLYDATSLPAGADPQQVINIDQIRETLPELPSVTREKLVQQYGMLLEHSFTLLNEVGLLEFFQNVIKETRAEPKKVTSWVLNTFLGYLKQQNLAVSESPVTPSALAELLDLLDSRTISSSAAKQVFEELWKREGKTPGQIVSEKQLELMQDQGALEQLCHSVMEAHPQVVMDVKNRNPRAINKLIGLVRKATQSRADPVMIKEILEKKLSL

SEQ ID NO: 798114 - protein, 475 aa, Homo sapiens
PDQDPGVTMAAPMLRWGCRGRRWAFARVDGGSCHRRGAPTGSTSNQIRGESSVAQQPLHTAQKTRKGEHKWAAVVGLEIHAQISSNSKLFSGSQVRFSAPPNSLVSFFDASLPGTLPVLNRRCVEAAVMTGLALNCHINKKSLFDRKHYFYADLPAGYQITQQRLPIAVNGSLIYGVCAGKKQSQVIPKTVRIKQIQLEQDSGKSLHDNLRSQTLIDLNRAGVGLLEVVLEPDMSCGEEAATAVRELQLILQALGTSQANMAEGQLRVDANISVHHPGEPLGVRTEVKNLNSIRFLAKAIDYEIQRQINELENGGEILNETRSFHHKLGCTMSMRDKEGKQDYRFMPEPNLPPLVLYDATSLPAGADPQQVINIDQIRETLPELPSVTREKLVQQYGMLLEHSFTLLNEVGLLEFFQNVIKETRAEPKKVTSWVLNTFLGYLKQQNLAVSERCLRNCGRGKARLQGRLFQKSSLN

SEQ ID NO: 798115 - protein, 565 aa, Homo sapiens; identical to SEQ ID NO: 798113

SEQ ID NO: 798116 - protein, 565 aa, Homo sapiens; identical to SEQ ID NO: 798113

SEQ ID NO: 798117 - protein, 486 aa, Homo sapiens
PDQDPGVTMAAPMLRWGCRGRRWAFARVDGGSCHRRGAPTGSTSNQIRGESSVAQQPLHTAQKTRKGEHKWAAVVGLEIHAQISSNSKLFSGSQVRFSAPPNSLVSFFDASLPGTLPVLNRRCVEAAVMTGLALNCHINKKSLFDRKHYFYADLPAGYQITQQRLPIAVNGSLIYGVCAGKKQSQVIPKTVRIKQIQLEQDSGKSLHDNLRSQTLIDLNRAGVGLLEVVLEPDMSCGEEAATAVRELQLILQALGTSQANMAEGQLRVDANISVHHPGEPLGVRTEVKNLNSIRFLAKAIDYEIQRQINELENGGEILNETRSFHHKLGCTMSMRDKEGKQDYRFMPEPNLPPLVLYDATSLPAGADPQQVINIDQIRETLPELPSVTREKLVQQYGMLLEHSFTLLNEVGLLEFFQNVIKETRAEPKKVTSWVLNTFLGYLKQQNLAVSESPVTPSALAELLDLLDSRTISSSAAKQTCTSSGTG

SEQ ID NO: 798118 - protein, 565 aa, Homo sapiens; identical to SEQ ID NO: 798113

SEQ ID NO: 798119 - protein, 123 aa, Homo sapiens
PDQDPGVTMAAPMLRWGCRGRRWAFARVDGGSCHRRGAPTGSTSNQIRGESSVAQQPLHTAQKTRKGEHKWAAVVGLEIHAQISSNSKLFSGSQVRFSAPPNSLVSFFDASLPGTLPSEDSPS

SEQ ID NO: 798120 - protein, 520 aa, Homo sapiens
PDQDPGVTMAAPMLRWGCRGRRWAFARVDGGSCHRRGAPTGSTSNQIRGESSVAQQPLHTAQKTRKGEHKWAAVVGLEIHAQISSNSKLFSGSQVRFSAPPNSLVSFFDASLPGTLPVLNRRCVEAAVMTGLALNCHINKKSLFDRKHYFYADLPAGYQITQQRLPIAVNGSLIYGVCAGKKQSQVIPKTVRIKQIQLEQDSGKSLHDNLRSQTLIDLNRAGVGLLEVVLEPDMSCGEEAATAVRELQLILQALGTSQANMAEGQLRVDANISVHHPGEPLGVRTEVKNLNSIRFLAKAIDYEIQRQINELENGGEILNETRSFHHKLGCTMSMRDKEGKQDYRFMPEPNLPPLVLYDATSLPAGADPQQVINIDQIRETLPELPSVTREKLVQQYGMLLEHSFTLLNEVGLLEFFQNVIKETRAEPKKVTSWVLNTFLGYLKQQNLAVSESPVTPSALAELLDLLDSRTISSSAAKQVMDVKNRNPRAINKLIGLVRKATQSRADPVMIKEILEKKLSL

SEQ ID NO: 798121 - protein, 332 aa, Homo sapiens [sequence omitted]

SEQ ID NO: 798122 - protein, 234 aa, Homo sapiens
MSMRDKEGKQDYRFMPEPNLPPLVLYDATSLPAGADPQQVINIDQIRETLPELPSVTREKLVQQYGMLLEHSFTLLNEVGLLEFFQNVIKETRAEPKKVTSWVLNTFLGYLKQQNLAVSESPVTPSALAELLDLLDSRTISSSAAKQVFEELWKREGKTPGQIVSEKQLELMQDQGALEQLCHSVMEAHPQVVMDVKNRNPRAINKLIGLVRKATQSRADPVMIKEILEKKLSL

SEQ ID NO: 798123 - protein, 244 aa, Homo sapiens
MLSPDQAADSDHPSSAHSDPESLGGTDTKVLGSVSDLEPVEEAEGDGKGGSRAALYPHPQQLSREEKRRRRRATAKYRSAHATRERIRVEAFNLAFAELRKLLPTLPPDKKLSKIEILRLAICYISYLNHVLDVYGRGAPRGAACPGVRETLRIRTGAVARVAEAAVAQRDGRLERRPGKKLATCSLWSAGRRGKVSDAGRWGCLASPGARRGDFPGQENLVETPEMSHFWGSPRVVVLTHWRL

SEQ ID NO: 798124 - protein, 138 aa, Homo sapiens
MILQQPLQRGPQGGAQRLPRAALGVTWGLDASSPLRGAVPMSTKRRLEEEQEPLRKQFLSEENMATHFSQLSLHNDHPYCSPPMTFSPALPPLRSPCSELLLWRYPGSLIPEALRLLRLGDTPSPPYPATPAGDIMEL

SEQ ID NO: 798125 - protein, 182 aa, Homo sapiens
MLVRAWWLIGEALRREGGWCVLAEPKSRDSSPVAQIPPAGPQNPMILQQPLQRGPQGGAQRLPRAALGVTWGLDASSPLRGAVPMSTKRRLEEEQEPLRKQFLSEENMATHFSQLSLHNDHPYCSPPMTFSPALPPLRSPCSELLLWRYPGSLIPEALRLLRLGDTPSPPYPATPAGDIMEL

SEQ ID NO: 798126 - protein, 119 aa, Homo sapiens
MILQQPLQRGPQGGAQRLPRAALGVTWGLDAREPLRKQFLSEENMATHFSQLSLHNDHPYCSPPMTFSPALPPLRSPCSELLLWRYPGSLIPEALRLLRLGDTPSPPYPATPAGDIMEL

SEQ ID NO: 798127 - protein, 155 aa, Homo sapiens
ERFLSVAPYRLRREGGWCVPSRTLGAEIPPAGPQNPMILQQPLQRGPQGGAQRLPRAALGVTWGLDAREPLRKQFLSEENMATHFSQLSLHNDHPYCSPPMTFSPALPPLRSPCSELLLWRYPGSLIPEALRLLRLGDTPSPPYPATPAGDIMEL

SEQ ID NO: 798128 - protein, 216 aa, Homo sapiens
MILQQPLQRGPQGGAQRLPRAALGVTWGLDASSPLRGAVPMSTKRRLEEEQEPLRKQFLSEENMATHFSQLSLHNDHPYCSPPMTFSPALPPLRKVPPLARPSAESQAVLTADLRPCLIVPFLALADLWVVSHLGSLESAGNPGAPGDLDLVGGAQLGQPQLHALTVISSSRSPCSELLLWRYPGSLIPEALRLLRLGDTPSPPYPATPAGDIMEL

SEQ ID NO: 798129 - protein, 138 aa, Homo sapiens; identical to SEQ ID NO: 798124

SEQ ID NO: 798130 - protein, 114 aa, Homo sapiens
MILQQPLQRGPQGGAQRLPRAALGVTWGLDASSPLRGAVPMSTKRRLEEEQEPLRKQFLSEENMATHFSQLSLHNDHPYCSPPMTFSPALPPLSHNRRDQRLPQRDKVPPSPAE

SEQ ID NO: 798131 - protein, 218 aa, Homo sapiens
SGSSPWRPTAFGAKVAAPLSRIPSPTPRSKPAFRHAPPVFRARAEPRGCARLKPRPSSLGHALRDSSPVAQIPPAGPQNPMILQQPLQRGPQGGAQRLPRAALGVTWGLDASSPLRGAVPMSTKRRLEEEQEPLRKQFLSEENMATHFSQLSLHNDHPYCSPPMTFSPALPPLRSPCSELLLWRYPGSLIPEALRLLRLGDTPSPPYPATPAGDIMEL

SEQ ID NO: 798132 - protein, 174 aa, Homo sapiens
ERFLSVAPYRLRREGGWCVPSRTLGAEIPPAGPQNPMILQQPLQRGPQGGAQRLPRAALGVTWGLDASSPLRGAVPMSTKRRLEEEQEPLRKQFLSEENMATHFSQLSLHNDHPYCSPPMTFSPALPPLRSPCSELLLWRYPGSLIPEALRLLRLGDTPSPPYPATPAGDIMEL

SEQ ID NO: 798133 - protein, 138 aa, Homo sapiens; identical to SEQ ID NO: 798124

SEQ ID NO: 798134 - protein, 160 aa, Homo sapiens
MILQQPLQRGPQGGAQRLPRAALGVTWGLDASSPLRGAVPMSTKRRLEEEQEPLRKQFLSEENMATHFSQLSLHNDHPYCSPPMTFSPALPPLRSPCSELLLWRYPGSLIPEALRLLRLGDTPSPPPQQKRPATPAKGQGSSLSCRVGIWAPRPSLNRGH

SEQ ID NO: 798135 - protein, 160 aa, Homo sapiens
MEGSPIPVLTVPTAPYEDQRPSGGGGLRRPTGLFEGQRNYLPNFIQSVLSSIDLRDRQGCTMVVGSDGRYFSRTAIEIVVQMAAANGIGRLIIGQNGILSTPAVSCIIRKIKAAGGIILTASHCPGGPGGEFGVKFNVANGGMWFSICLNNHDFFPLILL

SEQ ID NO: 798136 - protein, 166 aa, Homo sapiens
PPYQLRKAFAPERNPAKMEKEETTRELLLPNWQGSGSHGLTIAQRDDGVFVQEVTQNSPAARTGVVKEGDQIVGATIYFDNLQSGEVTQLLNTMGHHTVGLKLHRKGDRSPEPGQTWTREVFSSCSSEVVLNTPQPSALECKDQNKQKEASSQAGAVSVSTPNAGL

SEQ ID NO: 798137 - protein, 177 aa, Homo sapiens
MTHTECADEEVRGVLLAMYSLLQRPPATMEKEETTRELLLPNWQGSGSHGLTIAQRDDGVFVQEVTQNSPAARTGVVKEGDQIVGATIYFDNLQSGEVTQLLNTMGHHTVGLKLHRKGDRSPEPGQTWTREVFSSCSSEVVLNTPQPSALECKDQNKQKEASSQAGAVSVSTPNAGL

SEQ ID NO: 798138 - protein, 149 aa, Homo sapiens
MEKEETTRELLLPNWQGSGSHGLTIAQRDDGVFVQEVTQNSPAARTGVVKEGDQIVGATIYFDNLQSGEVTQLLNTMGHHTVGLKLHRKGDRSPEPGQTWTREVFSSCSSEVVLNTPQPSALECKDQNKQKEASSQAGAVSVSTPNAGL

SEQ ID NO: 798139 - protein, 149 aa, Homo sapiens; identical to SEQ ID NO: 798138

SEQ ID NO: 798140 - protein, 141 aa, Homo sapiens
LSASGARADANGVTDGNASETASDDPARAAPDFLGCTGAGSGDRGPRPFGSGRGLAPRPTGGRDPTRTPPRFWAAGASRRLSGTLSPGLRPLGPLACRLGGKGPWICAPPMEQRPGSERPREAAGADPPGGLGGHRGLRLA

SEQ ID NO: 798141 - protein, 139 aa, Homo sapiens
LSASGARADANGVTDGNASETASDDPARAGTGVFGWLEGPDPWGRNLGSVCPNERGGSDESVVPPLSISSGPGPRGLSERPVAADPGRASLLPVVSLYSGSGASPPFTYRSYIQKLLLGPQRGLPRLCVTPALPLWGCG

SEQ ID NO: 798142 - protein, 139 aa, Homo sapiens; identical to SEQ ID NO: 798141

SEQ ID NO: 798143 - protein, 141 aa, Homo sapiens; identical to SEQ ID NO: 798140

SEQ ID NO: 798144 - protein, 141 aa, Homo sapiens; identical to SEQ ID NO: 798140

SEQ ID NO: 798145 - protein, 356 aa, Homo sapiens
MNFEFEREIGFINSQPSLAECLTSFPAVLETFQTSSIKESTLIPPPPPFEQTFPSLQPGASTLQRPRSQKRAEDGPALPPPPPPPLPAAPPAPEFPWMKEKKSAKKPSQSATSPSPAASAVPASGVGSPADGLGLPEAGGGGARRLRTAYTNTQLLELEKEFHFNKYLCRPRRVEIAALLDLTERQVKVWFQNRRMKHKRQTQHREPPDGEPACPGALEDICDPAEEPAASPGGPSASRAAWEACCHPPEVVPGALSADPRPLAVRLEGAGASSPGCALRGAGGLEPGPLPEDVFSGRQDSPFLPDLNFFAADSCLQLSGGLSPSLQGSLDSPVPFSEEELDFFTSTLCAIDLQFP

SEQ ID NO: 798146 - protein, 241 aa, Homo sapiens
PGRGCRLERERRKPKNGLGLPEAGGGGARRLRTAYTNTQLLELEKEFHFNKYLCRPRRVEIAALLDLTERQVKVWFQNRRMKHKRQTQHREPPDGEPACPGALEDICDPAEEPAASPGGPSASRAAWEACCHPPEVVPGALSADPRPLAVRLEGAGASSPGCALRGAGGLEPGPLPEDVFSGRQDSPFLPDLNFFAADSCLQLSGGLSPSLQGSLDSPVPFSEEELDFFTSTLCAIDLQFP

SEQ ID NO: 798147 - protein, 193 aa, Homo sapiens
MLCPDPGRGCRLERERRKPKSSKASGFGVGAGVGWRGRGEVILVLEDGVVRTEVGAEYTARYDAEPVFPADGLGLPEAGGGGARRLRTAYTNTQLLELEKEFHFNKYLCRPRRVEIAALLDLTERQVKVWFQNRRMKHKRQTQHREPPDGEPACPGALEDICDPAEEPAASPGGPSASRAAWEACCHPPEVVP

SEQ ID NO: 798148 - protein, 356 aa, Homo sapiens; identical to SEQ ID NO: 798145

SEQ ID NO: 798149 - protein, 114 aa, Homo sapiens
MIFQPRPPKVLGLQSATAPEMFSTVTHKGPDRAIIPEMEWTSQALLTVDIVDSGNLVEITVFGRPRVQNRVKSMLLCLAWFHREHRARAEKMKHLEKNLKAHASDPHSPQDPVA

SEQ ID NO: 798150 - protein, 371 aa, Homo sapiens
MLMASTTSAVPGHPSLPSLPSNSSQERPLDTRDPLLARAELALLSIVFVAVALSNGLVLAALARRGRRGHWAPIHVFIGHLCLADLAVALFQVLPQLAWKATDRFRGPDALCRAVKYLQMVGMYASSYMILAMTLDRHRAICRPMLAYRHGSGAHWNRPVLVAWAFSLLLSLPQLFIFAQRNVEGGSGVTDCWACFAEPWGRRTYVTWIALMVFVAPTLGIAACQVLIFREIHASLVPGPSERPGGRRRGRRTGSPGEGAHVSAAVAKTVRMTLVIVVVYVLCWAPFFLVQLWAAWDPEAPLEGAPFVLLMLLASLNSCTNPWIYASFSSSVSSELRSLLCCARGRTPPSLGPQDESCTTASSSLAKDTSS

SEQ ID NO: 798151 - protein, 470 aa, Homo sapiens
MLMASTTSAVPGHPSLPSLPSNSSQERPLDTRDPLLARAELALLSIVFVAVALSNGLVLAALARRGRRGHWAPIHVFIGHLCLADLAVALFQVLPQLAWKATDRFRGPDALCRAVKYLQMVGMYASSYMILAMTLDRHRAICRPMLAYRHGSGAHWNRPVLVAWAFSLLLSLPQLFIFAQRNVEGGSGVTDCWACFAEPWGRRTYVTWIALMVFVAPTLGIAACQVLIFREIHASLVPGPSERPGGRRRGRRTGSPGEGAHVSAAVAKTVRMTLVIVVVYVLCWAPFFLVQLWAAWDPEAPLEGGCSRGYGLTGPLGLGRMPLCPTSHPEPNLDPPPPQGRPLCYSCCWPASTAAPTPGSMHLSAAACPQSCEACSAVPGDAPHPAWVPKMSPAPPPAPPWPRTLHREELLGVLPLEALRSSAAFLGLVLGATGRGTRGELARACGPEAGTLCGPGQATAPAWVSTSPAV

SEQ ID NO: 798152 - protein, 259 aa, Homo sapiens
MVFVAPTLGIAACQVLIFREIHASLVPGPSERPGGRRRGRRTGSPGEGAHVSAAVAKTVRMTLVIVVVYVLCWAPFFLVQLWAAWDPEAPLEGGCSRGYGLTGPLGLGRMPLCPTSHPEPNLDPPPPQGRPLCYSCCWPASTAAPTPGSMHLSAAACPQSCEACSAVPGDAPHPAWVPKMSPAPPPAPPWPRTLHREELLGVLPLEALRSSAAFLGLVLGATGRGTRGELARACGPEAGTLCGPGQATAPAWVSTSPAV

SEQ ID NO: 798153 - protein, 371 aa, Homo sapiens; identical to SEQ ID NO: 798150

SEQ ID NO: 798154 - protein, 500 aa, Homo sapiens
SWRPRQGGRRAEAGRAYSMEVCYQLPVLPLDRPVPQHVLSRRGAISFSSSSALFGCPNPRQLSQRRGAISYDSSDQTALYIRMLGDVRVRSRAGFESERRGSHPYIDFRIFHSQSEIEVSVSARNIRRLLSFQRYLRSSRFFRGTAVSNSLNILDDDYNGQAKCMLEKVGNWNFDIFLFDRLTNGNSLVSLTFHLFSLHGLIEYFHLDMMKLRRFLVMIQEDYHSQNPYHNAVHAADVTQAMHCYLKEPKLANSVTPWDILLSLIAAATHDLDHPGVNQPFLIKTNHYLATLYKNTSVLENHHWRSAVGLLRESGLFSHLPLESRQQMETQIGALILATDISRQNEYLSLFRSHLDRGDLCLEDTRHRHLVLQMALKCADICNPCRTWELSKQWSEKVTEEFFHQGDIEKKYHLGVSPLCDRHTESIANIQIGFMTYLVEPLFTEWARFSNTRLSQTMLGHVGLNKASWKGLQREQSSSEDTDAAFELNSQLLPQENRLS

SEQ ID NO: 798155 - protein, 442 aa, Homo sapiens
SWRPRQGGRRAEAGRAYSMEVCYQLPVLPLDRPVPQHVLSRRGAISFSSSSALFGCPNPRQLSQRRGAISYDSSDQTALYIRMLGDVRVRSRAGFESERRGSHPYIDFRIFHSQSEIEVSVSARNIRRLLSFQRYLRSSRFFRGTAVSNSLNILDDDYNGQAKCMLEKVGNWNFDIFLFDRLTNGNSLVSLTFHLFSLHGLIEYFHLDMMKLRRFLVMIQEDYHSQNPYHNAVHAADVTQAMHCYLKEPKLANSVTPWDILLSLIAAATHDLDHPGVNQPFLIKTNHYLATLYKNTSVLENHHWRSAVGLLRESGLFSHLPLESRQQMETQIGALILATDISRQNEYLSLFRSHLDRGDLCLEDTRHRHLVLQMALKCADICNPCRTWELSKQWSEKVTEEFFHQGDIEKKYHLGVSPLCDRHTESIANIQIGNYTYLDIAG

SEQ ID NO: 798156 - protein, 218 aa, Homo sapiens
SWRPRQGGRRAEAGRAYSMEVCYQLPVLPLDRPVPQHVLSRRGAISFSSSSALFGCPNPRQLSQRRGAISYDSSDQTALYIRMLGDVRVRSRAGFESERRGSHPYIDFRIFHSQSEIEVSVSARNIRRLLSFQRYLRSSRFFRGTAVSNSLNILDDDYNGQAKCMLEKVGNWNFDIFLFDRLTNGNSLVSLTFHLFSLHGLIEYFHLDMMKLRRFLGK

SEQ ID NO: 798157 - protein, 456 aa, Homo sapiens
MGITLIWCLALVLIKWITSKRRGAISYDSSDQTALYIRMLGDVRVRSRAGFESERRGSHPYIDFRIFHSQSEIEVSVSARNIRRLLSFQRYLRSSRFFRGTAVSNSLNILDDDYNGQAKCMLEKVGNWNFDIFLFDRLTNGNSLVSLTFHLFSLHGLIEYFHLDMMKLRRFLVMIQEDYHSQNPYHNAVHAADVTQAMHCYLKEPKLANSVTPWDILLSLIAAATHDLDHPGVNQPFLIKTNHYLATLYKNTSVLENHHWRSAVGLLRESGLFSHLPLESRQQMETQIGALILATDISRQNEYLSLFRSHLDRGDLCLEDTRHRHLVLQMALKCADICNPCRTWELSKQWSEKVTEEFFHQGDIEKKYHLGVSPLCDRHTESIANIQIGFMTYLVEPLFTEWARFSNTRLSQTMLGHVGLNKASWKGLQREQSSSEDTDAAFELNSQLLPQENRLS

SEQ ID NO: 798158 - protein, 456 aa, Homo sapiens; identical to SEQ ID NO: 798157

SEQ ID NO: 798159 - protein, 336 aa, Homo sapiens
MLEKVGNWNFDIFLFDRLTNGNSLVSLTFHLFSLHGLIEYFHLDMMKLRRFLVMIQEDYHSQNPYHNAVHAADVTQAMHCYLKEPKLANSVTPWDILLSLIAAATHDLDHPGVNQPFLIKTNHYLATLYKNTSVLENHHWRSAVGLLRESGLFSHLPLESRQQMETQIGALILATDISRQNEYLSLFRSHLDRGDLCLEDTRHRHLVLQMALKCADICNPCRTWELSKQWSEKVTEEFFHQGDIEKKYHLGVSPLCDRHTESIANIQIGFMTYLVEPLFTEWARFSNTRLSQTMLGHVGLNKASWKGLQREQSSSEDTDAAFELNSQLLPQENRLS

SEQ ID NO: 798160 - protein, 173 aa, Homo sapiens
METQIGALILATDISRQNEYLSLFRSHLDRGDLCLEDTRHRHLVLQMALKCADICNPCRTWELSKQWSEKVTEEFFHQGDIEKKYHLGVSPLCDRHTESIANIQIGFMTYLVEPLFTEWARFSNTRLSQTMLGHVGLNKASWKGLQREQSSSEDTDAAFELNSQLLPQENRLS

SEQ ID NO: 798161 - protein, 456 aa, Homo sapiens; identical to SEQ ID NO: 798157

SEQ ID NO: 798162 - protein, 442 aa, Homo sapiens; identical to SEQ ID NO: 798155

SEQ ID NO: 798163 - protein, 186 aa, Homo sapiens
SWRPRQGGRRAEAGRAYSMEVCYQLPVLPLDRPVPQHVLSRRGAISFSSSSALFGCPNPRQLSQRRGAISYDSSDQTALYIRMLGDVRVRSRAGFESERRGSHPYIDFRIFHSQSEIEVSVSARNIRRLLSFQRYLRSSRFFRGTAVSNSLNILDDDYNGQAKCMLEKVGNWNFDIFLFDRLTNGK

SEQ ID NO: 798164 - protein, 336 aa, Homo sapiens; identical to SEQ ID NO: 798159

SEQ ID NO: 798165 - protein, 360 aa, Homo sapiens
MLEKVGNWNFDIFLFDRLTNGNSLVSLTFHLFSLHGLIEYFHLDMMKLRRFLVMIQEDYHSQNPYHNAVHAADVTQAMHCYLKEPKAELMWIIKHFVQVEPKVSLIDVTLLANSVTPWDILLSLIAAATHDLDHPGVNQPFLIKTNHYLATLYKNTSVLENHHWRSAVGLLRESGLFSHLPLESRQQMETQIGALILATDISRQNEYLSLFRSHLDRGDLCLEDTRHRHLVLQMALKCADICNPCRTWELSKQWSEKVTEEFFHQGDIEKKYHLGVSPLCDRHTESIANIQIGFMTYLVEPLFTEWARFSNTRLSQTMLGHVGLNKASWKGLQREQSSSEDTDAAFELNSQLLPQENRLS

SEQ ID NO: 798166 - protein, 456 aa, Homo sapiens; identical to SEQ ID NO: 798157

SEQ ID NO: 798167 - protein, 410 aa, Homo sapiens
SWRPRQGGRRAEAGRAYSMEVCYQLPVLPLDRPVPQHVLSRRGAISFSSSSALFGCPNPRQLSQRRGAISYDSSDQTALYIRMLGDVRVRSRAGFESERRGSHPYIDFRIFHSQSEIEVSVSARNIRRLLSFQRYLRSSRFFRGTAVSNSLNILDDDYNGQAKCMLEKVGNWNFDIFLFDRLTNGNSLVSLTFHLFSLHGLIEYFHLDMMKLRRFLVMIQEDYHSQNPYHNAVHAADVTQAMHCYLKEPKLANSVTPWDILLSLIAAATHDLDHPGVNQPFLIKTNHYLATLYKNTSVLENHHWRSAVGLLRESGLFSHLPLESRQQMETQIGALILATDISRQNEYLSLFRSHLDRGDLCLEDTRHRHLVLQMALKCADICNPCRTWELSKQWSEKVTEEFFHQGKLQY

SEQ ID NO: 798168 - protein, 132 aa, Homo sapiens
SWRPRQGGRRAEAGRAYSMEVCYQLPVLPLDRPVPQHVLSRRGAISFSSSSALFGCPNPRQLSQRRGAISYDSSDQTALYIRMLGDVRVRSRAGFESERRGSHPYIDFRIFHSQSEIEVSVSARNIRRMLAL

SEQ ID NO: 798169 - protein, 125 aa, Homo sapiens
MGFGSNQQRRKPAVRLRSVVGVHKASESAAAPAFASSSSEVNPAPKFHWETLRHRCFYRKKTSEAHGNKAMTALEGDQTSSIIPSATQDSTAEPQRTQLKEVFTRALTTEKWEVPSCCHTQPMAG

SEQ ID NO: 798170 - protein, 72 aa, Homo sapiens
CPCVRGTERPLVPAEGSAKTVPSLGARAGGSCRGGAAPPSSELQDFEMTLSSAWRMRYSDCLVLCQLGLPLG

SEQ ID NO: 798171 - protein, 76 aa, Homo sapiens
GPEHPRIEEGARARPSHAPSRDPAARQTDRRTARELKYPDTRTSAEQRAGHAPARSACASALRAGARVTCAEPAVM

SEQ ID NO: 798172 - protein, 82 aa, Homo sapiens
GPEHPRIEEGARARPSHAPSRDPAARQTDRRTARELKYPDTRTSAEQRAGHAPARSACASALRAGARVTCAVPLVWWKQGAM

SEQ ID NO: 798173 - protein, 82 aa, Homo sapiens; identical to SEQ ID NO: 798172

SEQ ID NO: 798174 - protein, 76 aa, Homo sapiens; identical to SEQ ID NO: 798171

SEQ ID NO: 798175 - protein, 76 aa, Homo sapiens; identical to SEQ ID NO: 798171

SEQ ID NO: 798176 - protein, 460 aa, Homo sapiens; identical to SEQ ID NO: 746776

SEQ ID NO: 798177 - protein, 176 aa, Homo sapiens [sequence omitted]

SEQ ID NO: 798178 - protein, 1148 aa, Homo sapiens
AAAGRAPRRALPPGCHPCPAMSRRKPASGGLAASSSAPARQAVLSRFFQSTGSLKSTSSSTGAADQVDPGAAAAAAPPAPAFPPQLPPHVATEIDRRKKRPLENDGPVKKKVKKVQQKEGGSDLGMSGNSEPKKCLRTRNVSKSLEKLKEFCCDSALPQSRVQTESLQERFAVLPKCTDFDDISLLHAKNAVSSEDSKRQINQKDTTLFDLSQFGSSNTSHENLQKTASKSANKRSKSIYTPLELQYIEMKQQHKDAVLCVECGYKYRFFGEDAEIAARELNIYCHLDHNFMTASIPTHRLFVHVRRLVAKGYKVGVVKQTETAALKAIGDNRSSLFSRKLTALYTKSTLIGEDVNPLIKLDDAVNVDEIMTDTSTSYLLCISENKENVRDKKKGNIFIGIVGVQPATGEVVFDSFQDSASRSELETRMSSLQPVELLLPSALSEQTEALIHRATSVSVQDDRIRVERMDNIYFEYSHAFQAVTEFYAKDTVDIKGSQIISGIVNLEKPVICSLAAIIKYLKEFNLEKMLSKPENFKQLSSKMEFMTINGTTLRNLEILQNQTDMKTKGSLLWVLDHTKTSFGRRKLKKWVTQPLLKLREINARLDAVSEVLHSESSVFGQIENHLRKLPDIERGLCSIYHKKCSTQEFFLIVKTLYHLKSEFQAIIPAVNSHIQSDLLRTVILEIPELLSPVEHYLKILNEQAAKVGDKTELFKDLSDFPLIKKRKDEIQGVIDEIRMHLQEIRKILKNPSAQYVTVSGQEFMIEIKNSAVSCIPTDWVKVGSTKAVSRFHSPFIVENYRHLNQLREQLVLDCSAEWLDFLEKFSEHYHSLCKAVHHLATVDCIFSLAKVAKQGDYCRPTVQEERKIVIKNGRHPVIDVLLGEQDQYVPNNTDLSEDSERVMIITGPNMGGKSSYIKQVALITIMAQIGSYVPAEEATIGIVDGIFTRMGAADNIYKGRSTFMEELTDTAEIIRKATSQSLVILDELGRGTSTHDGIAIAYATLEYFIRDVKSLTLFVTHYPPVCELEKNYSHQVGNYHMGFLVSEDESKLDPGTAEQVPDFVTFLYQITRGIAARSYGLNVAKLADVPGEILKKAAHKSKELEGLINTKRKRLKYFAKLWTMHNAQDLQKWTEEFNMEETQTSLLH

SEQ ID NO: 798179 - protein, 1129 aa, Homo sapiens
AAAGRAPRRALPPGCHPCPAMSRRKPASGGLAASSSAPARQAVLSRFFQSTGSLKSTSSSTGAADQVDPGAAAAAAPPAPAFPPQLPPHVATEIDRRKKRPLENDGPVKKKVKKVQQKEGGSDLGMSGNSEPKKCLRTRNVSKSLEKLKEFCCDSALPQSRVQTESLQERFAVLPKCTDFDDISLLHAKNAVSSEDSKRQINQKDTTLFDLSQFGSSNTSHENLQKTASKSANKRSKSIYTPLELQYIEMKQQHKDAVLCVECGYKYRFFGEDAEIAARELNIYCHLDHNFMTASIPTHRLFVHVRRLVAKGYKVGVVKQTETAALKAIGDNRSSLFSRKLTALYTKSTLIGEDVNPLIKLDDAVNVDEIMTDTSTSYLLCISENKENVRDKKKGNIFIGIVGVQPATGEVVFDSFQDSASRSELETRMSSLQPVELLLPSALSEQTEALIHRATSVSVQDDRIRVERMDNIYFEYSHAFQAVTEFYAKDTVDIKGSQIISGIVNLEKPVICSLAAIIKYLKEFNLEKMLSKPENFKQLSSKMEFMTINGTTLRNLEILQNQTDMKTKGSLLWVLDHTKTSFGRRKLKKWVTQPLLKLREINARLDAVSEVLHSESSVFGQIENHLRKLPDIERGLCSIYHKKCSTQEFFLIVKTLYHLKSEFQAIIPAVNSHIQSDLLRTVILEIPELLSPVEHYLKILNEQAAKGRMKFKVLLTEIRMHLQEIRKILKNPSAQYVTVSGQEFMIEIKNSAVSCIPTDWVKVGSTKAVSRFHSPFIVENYRHLNQLREQLVLDCSAEWLDFLEKFSEHYHSLCKAVHHLATVDCIFSLAKVAKQGDYCRPTVQEERKIVIKNGRHPVIDVLLGEQDQYVPNNTDLSEDSERVMIITGPNMGGKSSYIKQVALITIMAQIGSYVPAEEATIGIVDGIFTRMGAADNIYKGRSTFMEELTDTAEIIRKATSQSLVILDELGRGTSTHDGIAIAYATLEYFIRDVKSLTLFVTHYPPVCELEKNYSHQVGNYHMGFLVSEDESKLDPGTAEQVPDFVTFLYQITRGIAARSYGLNVAKLADVPGEILKKAAHKSKELEGLINTKRKRLKYFAKLWTMHNAQDLQKWTEEFNMEETQTSLLH

SEQ ID NO: 798180 - protein, 770 aa, Homo sapiens
VTEFYAKDTVDIKGSQIISGIVNLEKPVICSLAAIIKYLKEFNLDRCSPNLTILNSYQVKLEFMTVNGTTLRNLEILQISVQDDRIRVERMDNIYFEYSHAFQAVTEFYAKDTVDIKGSQIISGIVNLEKPVICSLAAIIKYLKEFNLEKMLSKPENFKQLSSKMEFMTINGTTLRNLEILQNQTDMKTKGSLLWVLDHTKTSFGRRKLKKWVTQPLLKLREINARLDAVSEVLHSESSVFGQIENHLRKLPDIERGLCSIYHKKCSTQEFFLIVKTLYHLKSEFQAIIPAVNSHIQSDLLRTVILEIPELLSPVEHYLKILNEQAAKVGDKTELFKDLSDFPLIKKRKDEIQGVIDEIRMHLQEIRKILKNPSAQYVTVSGQEFMIEIKNSAVSCIPTDWVKVGSTKAVSRFHSPFIVENYRHLNQLREQLVLDCSAEWLDFLEKFSEHYHSLCKAVHHLATVDCIFSLAKVAKQGDYCRPTVQEERKIVIKNGRHPVIDVLLGEQDQYVPNNTDLSEDSERVMIITGPNMGGKSSYIKQVALITIMAQIGSYVPAEEATIGIVDGIFTRMGAADNIYKGRSTFMEELTDTAEIIRKATSQSLVILDELGRGTSTHDGIAIAYATLEYFIRDVKSLTLFVTHYPPVCELEKNYSHQVGNYHMGFLVSEDESKLDPGTAEQVPDFVTFLYQITRGIAARSYGLNVAKLADVPGEILKKAAHKSKELEGLINTKRKRLKYFAKLWTMHNAQDLQKWTEEFNMEETQTSLLH

SEQ ID NO: 798181 - protein, 270 aa, Homo sapiens
YTARYEAWVLRPKYTDLSEDSERVMIITGPNMGGKSSYIKQVALITIMAQIGSYVPAEEATIGIVDGIFTRMGAADNIYKGRSTFMEELTDTAEIIRKATSQSLVILDELGRGTSTHDGIAIAYATLEYFIRDVKSLTLFVTHYPPVCELEKNYSHQVGNYHMGFLVSEDESKLDPGTAEQVPDFVTFLYQITRGIAARSYGLNVAKLADVPGEILKKAAHKSKELEGLINTKRKRLKYFAKLWTMHNAQDLQKWTEEFNMEETQTSLLH

SEQ ID NO: 798182 - protein, 1148 aa, Homo sapiens; identical to SEQ ID NO: 798178

SEQ ID NO: 798183 - protein, 1159 aa, Homo sapiens
AAAGRAPRRALPPGCHPCPAMSRRKPASGGLAASSSAPARQAVLSRFFQSTGSLKSTSSSTGAADQVDPGAAAAAAPQRPQRPQAPSAPAPAFPPQLPPHVATEIDRRKKRPLENDGPVKKKVKKVQQKEGGSDLGMSGNSEPKKCLRTRNVSKSLEKLKEFCCDSALPQSRVQTESLQERFAVLPKCTDFDDISLLHAKNAVSSEDSKRQINQKDTTLFDLSQFGSSNTSHENLQKTASKSANKRSKSIYTPLELQYIEMKQQHKDAVLCVECGYKYRFFGEDAEIAARELNIYCHLDHNFMTASIPTHRLFVHVRRLVAKGYKVGVVKQTETAALKAIGDNRSSLFSRKLTALYTKSTLIGEDVNPLIKLDDAVNVDEIMTDTSTSYLLCISENKENVRDKKKGNIFIGIVGVQPATGEVVFDSFQDSASRSELETRMSSLQPVELLLPSALSEQTEALIHRATSVSVQDDRIRVERMDNIYFEYSHAFQAVTEFYAKDTVDIKGSQIISGIVNLEKPVICSLAAIIKYLKEFNLEKMLSKPENFKQLSSKMEFMTINGTTLRNLEILQNQTDMKTKGSLLWVLDHTKTSFGRRKLKKWVTQPLLKLREINARLDAVSEVLHSESSVFGQIENHLRKLPDIERGLCSIYHKKCSTQEFFLIVKTLYHLKSEFQAIIPAVNSHIQSDLLRTVILEIPELLSPVEHYLKILNEQAAKVGDKTELFKDLSDFPLIKKRKDEIQGVIDEIRMHLQEIRKILKNPSAQYVTVSGQEFMIEIKNSAVSCIPTDWVKVGSTKAVSRFHSPFIVENYRHLNQLREQLVLDCSAEWLDFLEKFSEHYHSLCKAVHHLATVDCIFSLAKVAKQGDYCRPTVQEERKIVIKNGRHPVIDVLLGEQDQYVPNNTDLSEDSERVMIITGPNMGGKSSYIKQVALITIMAQIGSYVPAEEATIGIVDGIFTRMGAADNIYKGRSTFMEELTDTAEIIRKATSQSLVILDELGRGTSTHDGIAIAYATLEYFIRDVKSLTLFVTHYPPVCELEKNYSHQVGNYHMGFLVSEDESKLDPGTAEQVPDFVTFLYQITRGIAARSYGLNVAKLADVPGEILKKAAHKSKELEGLINTKRKRLKYFAKLWTMHNAQDLQKWTEEFNMEETQTSLLH

SEQ ID NO: 798184 - protein, 680 aa, Homo sapiens
MDNIYFEYSHAFQAVTEFYAKDTVDIKGSQIISGIVNLEKPVICSLAAIIKYLKEFNLEKMLSKPENFKQLSSKMEFMTINGTTLRNLEILQNQTDMKTKGSLLWVLDHTKTSFGRRKLKKWVTQPLLKLREINARLDAVSEVLHSESSVFGQIENHLRKLPDIERGLCSIYHKKCSTQEFFLIVKTLYHLKSEFQAIIPAVNSHIQSDLLRTVILEIPELLSPVEHYLKILNEQAAKVGDKTELFKDLSDFPLIKKRKDEIQGVIDEIRMHLQEIRKILKNPSAQYVTVSGQEFMIEIKNSAVSCIPTDWVKVGSTKAVSRFHSPFIVENYRHLNQLREQLVLDCSAEWLDFLEKFSEHYHSLCKAVHHLATVDCIFSLAKVAKQGDYCRPTVQEERKIVIKNGRHPVIDVLLGEQDQYVPNNTDLSEDSERVMIITGPNMGGKSSYIKQVALITIMAQIGSYVPAEEATIGIVDGIFTRMGAADNIYKGRSTFMEELTDTAEIIRKATSQSLVILDELGRGTSTHDGIAIAYATLEYFIRDVKSLTLFVTHYPPVCELEKNYSHQVGNYHMGFLVSEDESKLDPGTAEQVPDFVTFLYQITRGIAARSYGLNVAKLADVPGEILKKAAHKSKELEGLINTKRKRLKYFAKLWTMHNAQDLQKWTEEFNMEETQTSLLH

SEQ ID NO: 798185 - protein, 226 aa, Homo sapiens
HIRGPRYSGHHSAFGCPYSDMNLKKEATLHDRLREQTQANLESDSSHSKSKSLCSLNFNGKHEKVNSQPRLVQQAKCLKIKGKEDIDLDNLFREYSVEQAQQVLHQSVSMSTVSAHPFRDLPLGREQHCKLLPGVADIRASQVARWTVDEVAEFVQSLLGCEEHAKCFKKEQIDGKAFLLLTQTDIVKVMKIKLGPALKIYNSILMFRHSQELPEEDIASGQEVRG

SEQ ID NO: 798186 - protein, 101 aa, Homo sapiens
  misc_feature (31)..(31): Xaa can be any naturally occurring amino acid
QKLSSNMRLVRGCSKKVILVIAESKDILVLXSAWILTIINDVRQVPSCLNYTDGVCSHDVYLISEESTHNLEIMLYLPPPVKGIPFYTVKSKNASCPQLLS

SEQ ID NO: 798187 - protein, 267 aa, Homo sapiens
MAPAADREGYWGPTTSTLDWCEENYSVTWYIAEFWNTVSNLIMIIPPMFGAIQSVRDGLEKRYIASYLALTVVGMGSWCFHMTLKYEMQLLDELPMIYSCCIFVYCMFECFKIKNSVNYHLLFTLVLFSLIVTTVYLKVKEPIFHQVMYGMLVFTLVLRSIYIVTWVYPWLRGLGYTSLGIFLLGFLFWNIDNIFCESLRNFRKKVPPIIGITTQFHAWWHILTGLGSYLHILFSLYTRTLYLRYRPKVKFLFGIWPVILFEPLRKH

SEQ ID NO: 798188 - protein, 105 aa, Homo sapiens
MGSWCFHMTLKYEMQLLDELPMIYSCCIFVYCMFECFKIKNSVNYHLLFTLVLFSLIVTTVYLKVKEPIFHQESHSVTPAEVQWHNLGSLEPPPPRSCMECWSLH

SEQ ID NO: 798189 - protein, 225 aa, Homo sapiens
MIIPPMFGAIQSVRDGLEKRYIASYLALTVVGMGSWCFHMTLKYEMQLLDELPMIYSCCIFVYCMFECFKIKNSVNYHLLFTLVLFSLIVTTVYLKVKEPIFHQVMYGMLVFTLVLRSIYIVTWVYPWLRGLGYTSLGIFLLGFLFWNIDNIFCESLRNFRKKVPPIIGITTQFHAWWHILTGLGSYLHILFSLYTRTLYLRYRPKVKFLFGIWPVILFEPLRKH

SEQ ID NO: 798190 - protein, 213 aa, Homo sapiens
MTLTHIKRYIASYLALTVVGMGSWCFHMTLKYEMQLLDELPMIYSCCIFVYCMFECFKIKNSVNYHLLFTLVLFSLIVTTVYLKVKEPIFHQVMYGMLVFTLVLRSIYIVTWVYPWLRGLGYTSLGIFLLGFLFWNIDNIFCESLRNFRKKVPPIIGITTQFHAWWHILTGLGSYLHILFSLYTRTLYLRYRPKVKFLFGIWPVILFEPLRKH

SEQ ID NO: 798191 - protein, 267 aa, Homo sapiens; identical to SEQ ID NO: 798187

SEQ ID NO: 798192 - protein, 134 aa, Homo sapiens
MAQSRLIGTSTSQVMYGMLVFTLVLRSIYIVTWVYPWLRGLGYTSLGIFLLGFLFWNIDNIFCESLRNFRKKVPPIIGITTQFHAWWHILTGLGSYLHILFSLYTRTLYLRYRPKVKFLFGIWPVILFEPLRKH

SEQ ID NO: 798193 - protein, 172 aa, Homo sapiens
MIYSCCIFVYCMFECFKIKNSVNYHLLFTLVLFSLIVTTVYLKVKEPIFHQVMYGMLVFTLVLRSIYIVTWVYPWLRGLGYTSLGIFLLGFLFWNIDNIFCESLRNFRKKVPPIIGITTQFHAWWHILTGLGSYLHILFSLYTRTLYLRYRPKVKFLFGIWPVILFEPLRKH

SEQ ID NO: 798194 - protein, 150 aa, Homo sapiens
TPLCFSLSLFPSLSLFLSLPFSFFLSCSLCLLLALSLFLFLAPLRKAKFVESPRIPESELGSPTLTSAQKLDVDAYCPGDAEQELGPPPSVDEAANTLMTRLGFLLGEKVTEVQPGDQYSMEVQDENQTSAITQRISPCSTLTSSTASPP

SEQ ID NO: 798195 - protein, 147 aa, Homo sapiens
MGATPTPFAPRPRAERRPRQCPQGTETEAGVSVPPRKEEGGPYVAGLTAPRRVLRAMAPALWRACNGLMAAFFALAALVQVNDPDAEVWVVVYTIPAVLTLLVGLNPEVTGECYLEKYLCNTHTLLYGVGCWLGVLPLASYTTEHLT

SEQ ID NO: 798196 - protein, 160 aa, Homo sapiens
MAPALWRACNGLMAAFFALAALVQVNDPDAEVWVVVYTIPAVLTLLVGLNPEVTGNVIWKSISAIHILFCTVWAVGLASYLLHRTQQNILHEEEGRELSGLVIITAWIILCHSSSKNPVGGRIQLAIAIVITLFPFISWVYIYINKEMRSSWPTHCKTVI

SEQ ID NO: 798197 - protein, 140 aa, Homo sapiens
MAPALWRACNGLMAAFFALAALVQVNDPDAEVWVVVYTIPAVLTLLVGLNPEVTGNVIWKSISAIHILFCTVWAVGLASYLLHRTQQNILHEEEGRELSGLVIITAWIILCHSSSKGRVLLCCPDWKAVARSQLTAASNS

SEQ ID NO: 798198 - protein, 176 aa, Homo sapiens
MAPALWRACNGLMAAFFALAALVQVNDPDAEVWVVVYTIPAVLTLLVGLNPEVTGNVIWKSISAIHILFCTVWAVGLASYLLHRTQQNILHEEEGRFKLFFCLSLLSSWDYRELSGLVIITAWIILCHSSSKNPVGGRIQLAIAIVITLFPFISWVYIYINKEMRSSWPTHCKTVI

SEQ ID NO: 798199 - protein, 457 aa, Homo sapiens
MSQGSVTFRDVAIDFSQEEWKWLQPAQRDLYRCVMLENYGHLVSLGLSISKPDVVSLLEQGKEPWLGKREVKRDLFSVSESSGEIKDFSPKNVIYDDSSQYLIMERILSQGPVYSSFKGGWKCKDHTEMLQENQGCIRKVTVSHQEALAQHMNISTVERPYGCHECGKTFGRRFSLVLHQRTHTGEKPYACKECGKTFSQISNLVKHQMIHTGKKPHECKDCNKTFSYLSFLIEHQRTHTGEKPYECTECGKAFSRASNLTRHQRIHIGKKQYICRKCGKAFSSGSELIRHQITHTGEKPYECIECGKAFRRFSHLTRHQSIHTTKTPYECNECRKAFRCHSFLIKHQRIHAGEKLYECDECGKVFTWHASLIQHTKSHTGEKPYACAECDKAFSRSFSLILHQRTHTGEKPYVCKVCNKSFSWSSNLAKHQRTHTLDNPYEYENSFNYHSFLTEHQ

SEQ ID NO: 798200 - protein, 510 aa, Homo sapiens
MSQGSVTFRDVAIDFSQEEWKWLQPAQRDLYRCVMLENYGHLVSLGLSISKPDVVSLLEQGKEPWLGKREVKRDLFSGFFSANCVSFFSWAHVDGSAFLVDGNFFCTVVTEVVKNYRGEDYCNSQPCSFIVSESSGEIKDFSPKNVIYDDSSQYLIMERILSQGPVYSSFKGGWKCKDHTEMLQENQGCIRKVTVSHQEALAQHMNISTVERPYGCHECGKTFGRRFSLVLHQRTHTGEKPYACKECGKTFSQISNLVKHQMIHTGKKPHECKDCNKTFSYLSFLIEHQRTHTGEKPYECTECGKAFSRASNLTRHQRIHIGKKQYICRKCGKAFSSGSELIRHQITHTGEKPYECIECGKAFRRFSHLTRHQSIHTTKTPYECNECRKAFRCHSFLIKHQRIHAGEKLYECDECGKVFTWHASLIQHTKSHTGEKPYACAECDKAFSRSFSLILHQRTHTGEKPYVCKVCNKSFSWSSNLAKHQRTHTLDNPYEYENSFNYHSFLTEHQ

SEQ ID NO: 798201 - protein, 467 aa, Homo sapiens [sequence omitted]

SEQ ID NO: 798202 - protein, 410 aa, Homo sapiens
LHSVAKEGRNGLILFNTGKRNIHFFFWYLSVSESSGEIKDFSPKNVIYDDSSQYLIMERILSQGPVYSSFKGGWKCKDHTEMLQENQGCIRKVTVSHQEALAQHMNISTVERPYGCHECGKTFGRRFSLVLHQRTHTGEKPYACKECGKTFSQISNLVKHQMIHTGKKPHECKDCNKTFSYLSFLIEHQRTHTGEKPYECTECGKAFSRASNLTRHQRIHIGKKQYICRKCGKAFSSGSELIRHQITHTGEKPYECIECGKAFRRFSHLTRHQSIHTTKTPYECNECRKAFRCHSFLIKHQRIHAGEKLYECDECGKVFTWHASLIQHTKSHTGEKPYACAECDKAFSRSFSLILHQRTHTGEKPYVCKVCNKSFSWSSNLAKHQRTHTLDNPYEYENSFNYHSFLTEHQ

SEQ ID NO: 798203 - protein, 394 aa, Homo sapiens
MSQGSVTFRDVAIDFSQEEWKWLQPAQRDLYRCVMLENYGHLVSLGLSISKPDVVSLLEQGKEPWLGKREVKRDLFSVSESSGEIKDFSPKNVIYDDSSQYLIMERILSQGPVYSSFKGGWKCKDHTEMLQENQGCIRKVTVSHQEALAQHMNISTVERPYGCHECGKTFGRRFSLVLHQRTHTGEKPYACKECGKTFSQISNLVKHQMIHTGKKPHECKDCNKTFSYLSFLIEHQRTHTGEKPYECTECGKAFSRASNLTRHQRIHIGKKQYICRKCGKAFSSGSELIRHQITHTGEKPYECIECGKAFRRFSHLTRHQSIHTTKTPYECNECRKAFRCHSFLIKHQRIHAGEKLYECDECGKVFTWHASLIQHTKKLHCGKTTIVISVAKSP

SEQ ID NO: 798204 - protein, 457 aa, Homo sapiens; identical to SEQ ID NO: 798199

SEQ ID NO: 798205 - protein, 457 aa, Homo sapiens; identical to SEQ ID NO: 798199

SEQ ID NO: 798206 - protein, 354 aa, Homo sapiens
MERILSQGPVYSSFKGGWKCKDHTEMLQENQGCIRKVTVSHQEALAQHMNISTVERPYGCHECGKTFGRRFSLVLHQRTHTGEKPYACKECGKTFSQISNLVKHQMIHTGKKPHECKDCNKTFSYLSFLIEHQRTHTGEKPYECTECGKAFSRASNLTRHQRIHIGKKQYICRKCGKAFSSGSELIRHQITHTGEKPYECIECGKAFRRFSHLTRHQSIHTTKTPYECNECRKAFRCHSFLIKHQRIHAGEKLYECDECGKVFTWHASLIQHTKSHTGEKPYACAECDKAFSRSFSLILHQRTHTGEKPYVCKVCNKSFSWSSNLAKHQRTHTLDNPYEYENSFNYHSFLTEHQ

SEQ ID NO: 798207 - protein, 457 aa, Homo sapiens; identical to SEQ ID NO: 798199

SEQ ID NO: 798208 - protein, 84 aa, Homo sapiens
RNAIQESAITGNSYDLEIIDDQVIWYHTDTAIHARKKYPRSMWNSHEEPSIIIRQYQGGNLMNVLSVERPLAVPPTSLDIKEFT

SEQ ID NO: 798209 - protein, 165 aa, Homo sapiens
PPHFPKPAGAPPNTSAAPPTHSPRPPPGEKMKPDWPRRGAAGTRVRSRGEGDGTYFARRGAGRRRREIKAPIRAAWSPPSAAMSGLQSGRRWRPQGTGTGARAAGALAALRLGPRLRAAPLLAPLWLLAPTPDSHMTPAPLALRASRGWRENNLSDYQYSWMQKC

SEQ ID NO: 798210 - protein, 556 aa, Homo sapiens [sequence omitted]

SEQ ID NO: 798211 - protein, 583 aa, Homo sapiens
  misc_feature (69)..(69): Xaa can be any naturally occurring amino acid
MSDLHVLLLMALVGKTACGFSADVFIRESAGAQSWIPWTSSDYSVRRISTISVEQTQRDGSRTNCSRSXVQYFAGAGYHSTCDVTQKHGVACTDRIARLVNEQVGRHGRLSYVESASRLQRGLASVSLGISVRMQNTCKDNPCGRGQCLITQSPPYYRCVCKHPYTGPSCSQVVPVCRPNPCQNGATCSRHKRRSKFTCACPDQFKGKFCEIGSDDCYVGDGYSYRGKMNRTVNQHACLYWNSHLLLQENYNMFMEDAETHGIGEHNFCRNPDADEKPWCFIKVTNDKVKWEYCDVSACSAQDVAYPEESPTEPSTKLPGFDSCGKTEIAERKIKRIYGGFKSTAGKHPWQASLQSSLPLTISMPQGHFCGGALIHPCWVLTAAHCTDIKTRHLKVVLGDQDLKKEEFHEQSFRVEKIFKYSHYNERDEIPHNDIALLKLKPVDGHCALESKYVKTVCLPDGSFPSGSECHISGWGVTETGKGSRQLLDAKVKLIANTLCNSRQLYDHMIDDSMICAGNLQKPGQDTCQGDSGGPLTCEKDGTYYVYGIVSWGLECGKRPGVYTQVTKFLNWIKATIKSESGF

SEQ ID NO: 798212 - protein, 556 aa, Homo sapiens [sequence omitted]

SEQ ID NO: 798213 - protein, 260 aa, Homo sapiens
GWRPRPAPPGCSMALCEAAGCGSALLWPRLLLFGDSITQFSFQQGGWGASLADRLVRKCDVLNRGFSGYNTRWAKIILPRLIRKGNSLDIPVAVTIFFGANDSALKDENPKQHIPLEEYAANLKSMVQYLKSVDIPENRVILITPTPLCETAWEEQCIIQGCKLNRLNSVVGEYANACLQVAQDCGTDVLDLWTLMQDSQDFSSYLSDGLHLSPKGNEFLFSHLWPLIEKKVSSLPLLLPYWRDVAEAKPELSLLGDGDH

SEQ ID NO: 798214 - protein, 242 aa, Homo sapiens
AGGPAPPRPAAPWRCARPRAAGVPCSGLACCSSGTPSPRKCDVLNRGFSGYNTRWAKIILPRLIRKGNSLDIPVAVTIFFGANDSALKDENPKQHIPLEEYAANLKSMVQYLKSVDIPENRVILITPTPLCETAWEEQCIIQGCKLNRLNSVVGEYANACLQVAQDCGTDVLDLWTLMQDSQDFSSYLSDGLHLSPKGNEFLFSHLWPLIEKKVSSLPLLLPYWRDVAEAKPELSLLGDGDH

SEQ ID NO: 798215 - protein, 284 aa, Homo sapiens
NEGPRLDLSCKAPPGDPSELGTSNLKKVMLYAHRPAPGSGVGLCAGAPGPSVTHLQLRDFKASFPPVRFYARLPNFIAQLRKCDVLNRGFSGYNTRWAKIILPRLIRKGNSLDIPVAVTIFFGANDSALKDENPKQHIPLEEYAANLKSMVQYLKSVDIPENRVILITPTPLCETAWEEQCIIQGCKLNRLNSVVGEYANACLQVAQDCGTDVLDLWTLMQDSQDFSSYLSDGLHLSPKGNEFLFSHLWPLIEKKVSSLPLLLPYWRDVAEAKPELSLLGDGDH

SEQ ID NO: 798216 - protein, 260 aa, Homo sapiens; identical to SEQ ID NO: 798213

SEQ ID NO: 798217 - protein, 119 aa, Homo sapiens
ESPGSRHRREGTRPRCPPRAASHPGRDARSSPQRPPGQRPFPSGSGLAAAGDRALCPRRPRGQLRAEAPGALSPHSLRAQVGPLGVDLGSKTPSGISFPSSRVDGEHRWLTGWSENVMF

SEQ ID NO: 798218 - protein, 223 aa, Homo sapiens
MQFSFQQGGWGASLADRLVRKCDVLNRGFSGYNTRWAKIILPRLIRKGNSLDIPVAVTIFFGANDSALKDENPKQHIPLEEYAANLKSMVQYLKSVDIPENRVILITPTPLCETAWEEQCIIQGCKLNRLNSVVGEYANACLQVAQDCGTDVLDLWTLMQDSQDFSSYLSDGLHLSPKGNEFLFSHLWPLIEKKVSSLPLLLPYWRDVAEAKPELSLLGDGDH

SEQ ID NO: 798219 - protein, 135 aa, Homo sapiens
MVQYLKSVDIPENRVILITPTPLCETAWEEQCIIQGCKLNRLNSVVGEYANACLQVAQDCGTDVLDLWTLMQDSQDFSSYLSDGLHLSPKGNEFLFSHLWPLIEKKVSSLPLLLPYWRDVAEAKPELSLLGDGDH

SEQ ID NO: 798220 - protein, 231 aa, Homo sapiens
LAAPPRPARLLHGAVRGRGLRECPALASLVALRGLHHPGYNTRWAKIILPRLIRKGNSLDIPVAVTIFFGANDSALKDENPKQHIPLEEYAANLKSMVQYLKSVDIPENRVILITPTPLCETAWEEQCIIQGCKLNRLNSVVGEYANACLQVAQDCGTDVLDLWTLMQDSQDFSSYLSDGLHLSPKGNEFLFSHLWPLIEKKVSSLPLLLPYWRDVAEAKPELSLLGDGDH

SEQ ID NO: 798221 - protein, 210 aa, Homo sapiens
GWRPRPAPPGCSMALCEAAGCGSALLWPRLLLFGDSITQFSFQQGGWGASLADRLVRKCDVLNRGFSGYNTRWAKIILPRLIRKGNSLDIPVAVTIFFGANDSALKDENPKQHIPLEEYAANLKSMVQYLKSVDIPENRVILITPTPLCETAWEEQCIIQGCKLNRLNSVVGEYANACLQVAQDCGTDVLDLWTLMQDSQGTVACSVLSG

SEQ ID NO: 798222 - protein, 172 aa, Homo sapiens
AVSEECLSPAVPELQHSSHCCLLSCSHMDTFTVQDSTAMSWWRNNFWIILAVAIIVVSVGLGLILYCVCKWQLRRGKKWEIAKPLKHKQVDEEKMYENVLNESPVQLPPLPPRNWPSLEDSSPQEAPSQPPATYSLVNKVKNKKTVSIPSYIEPEDDYDDVEIPANTEKASF

SEQ ID NO: 798223 - protein, 172 aa, Homo sapiens; identical to SEQ ID NO: 798222

SEQ ID NO: 798224 - protein, 452 aa, Homo sapiens
RAHTGALSLLSSSSPFSSPSSSSSPSSSSSSSLPSSSPSSFSSSTSSPSSSSSCAHRRQPALCAHPESSSTWVRDREGHIRSRRSMKMLWKLTDNIKYEDCEDRHDGTSNGTARLPQLGTVGQSPYTSAPPLSHTPNADFQPPYFPPPYQPIYPQSQDPYSHVNDPYSLNPLHAQPQPQHPGWPGQRQSQESGLLHTHRGLPHQLSGLDPRRDYRRHEDLLHGPHALSSGLGDLSIHSLPHAIEEVPHVEDPGINIPDQTVIKKGPVSLSKSNSNAVSAIPINKDNLFGGVVNPNEVFCSVPGRLSLLSSTSKYKVTVAEVQRRLSPPECLNASLLGGVLRRAKSKNGGRSLREKLDKIGLNLPAGRRKAANVTLLTSLVEGKRIHLLTRRNFLLGKWIIFSGQMFGRILCQLGSFIFAENIARCEWNYFMAKRNICMYSYTSILLPSFPLP

SEQ ID NO: 798225 - protein, 431 aa, Homo sapiens
MLVHSFSAMDRHDGTSNGTARLPQLGTVGQSPYTSAPPLSHTPNADFQPPYFPPPYQPIYPQSQDPYSHVNDPYSLNPLHAQPQPQHPGWPGQRQSQESGLLHTHRGLPHQLSGLDPRRDYRRHEDLLHGPHALSSGLGDLSIHSLPHAIEEVPHVEDPGINIPDQTVIKKGPVSLSKSNSNAVSAIPINKDNLFGGVVNPNEVFCSVPGRLSLLSSTSKYKVTVAEVQRRLSPPECLNASLLGGVLRRAKSKNGGRSLREKLDKIGLNLPAGRRKAANVTLLTSLVEGEAVHLARDFGYVCETEFPAKAVAEFLNRQHSDPNEQVTRKNMLLATKQICKEFTDLLAQDRSPLGNSRPNPILEPGIQSCLTHFNLISHGFGSPAVCAAVTALQNYLTEALKAMDKMYLSNNPNSHTDNNAKSSDKEEKHRK

SEQ ID NO: 798226 - protein, 476 aa, Homo sapiens
RAHTGALSLLSSSSPFSSPSSSSSPSSSSSSSLPSSSPSSFSSSTSSPSSSSSCAHRRQPALCAHPESSSTWVRDREGHIRSRRSMKMLWKLTDNIKYEDCEDRHDGTSNGTARLPQLGTPEPPARPAAAAAPRLARPEESQESGLLHTHRGLPHQLSGLDPRRDYRRHEDLLHGPHALSSGLGDLSIHSLPHAIEEVPHVEDPGINIPDQTVIKKGPVSLSKSNSNAVSAIPINKDNLFGGVVNPNEVFCSVPGRLSLLSSTSKYKVTVAEVQRRLSPPECLNASLLGGVLRRAKSKNGGRSLREKLDKIGLNLPAGRRKAANVTLLTSLVEGEAVHLARDFGYVCETEFPAKAVAEFLNRQHSDPNEQVTRKNMLLATKQICKEFTDLLAQDRSPLGNSRPNPILEPGIQSCLTHFNLISHGFGSPAVCAAVTALQNYLTEALKAMDKMYLSNNPNSHTDNNAKSSDKEEKHRK

SEQ ID NO: 798227 - protein, 483 aa, Homo sapiens
MAAAGRVSVLLAAQILDFKPLHWRQAGTALQGLALESRPFSGRRAAPSLQPGSAEELCSVQDRHDGTSNGTARLPQLGTVGQSPYTSAPPLSHTPNADFQPPYFPPPYQPIYPQSQDPYSHVNDPYSLNPLHAQPQPQHPGWPGQRQSQESGLLHTHRGLPHQLSGLDPRRDYRRHEDLLHGPHALSSGLGDLSIHSLPHAIEEVPHVEDPGINIPDQTVIKKGPVSLSKSNSNAVSAIPINKDNLFGGVVNPNEVFCSVPGRLSLLSSTSKYKVTVAEVQRRLSPPECLNASLLGGVLRRAKSKNGGRSLREKLDKIGLNLPAGRRKAANVTLLTSLVEGEAVHLARDFGYVCETEFPAKAVAEFLNRQHSDPNEQVTRKNMLLATKQICKEFTDLLAQDRSPLGNSRPNPILEPGIQSCLTHFNLISHGFGSPAVCAAVTALQNYLTEALKAMDKMYLSNNPNSHTDNNAKSSDKEEKHRK

SEQ ID NO: 798228 - protein, 145 aa, Homo sapiens
MPGEAVHLARDFGYVCETEFPAKAVAEFLNRQHSDPNEQVTRKNMLLATKQICKEFTDLLAQDRSPLGNSRPNPILEPGIQSCLTHFNLISHGFGSPAVCAAVTALQNYLTEALKAMDKMYLSNNPNSHTDNNAKSSDKEEKHRK

SEQ ID NO: 798229 - protein, 300 aa, Homo sapiens
MLVHSFSAMDRHDGTSNGTARLPQLGTVGQSPYTSAPPLSHTPNADFQPPYFPPPYQPIYPQSQDPYSHVNDPYSLNPLHAQPQPQHPGWPGQRQSQESGLLHTHRGLPHQLSGLDPRRDYRRHEDLLHGPHALSSGLGDLSIHSLPHAIEEVPHVEDPGINIPDQTVIKKGPVSLSKSNSNAVSAIPINKDNLFGGVVNPNEVFCSVPGRLSLLSSTSKYKVTVAEVQRRLSPPECLNASLLGGVLRRAKSKNGGRSLREKLDKIGLNLPAGRRKAANVTLLTSLVEGAEMAAVLRQEY

SEQ ID NO: 798230 - protein, 524 aa, Homo sapiens
RAHTGALSLLSSSSPFSSPSSSSSPSSSSSSSLPSSSPSSFSSSTSSPSSSSSCAHRRQPALCAHPESSSTWVRDREGHIRSRRSMKMLWKLTDNIKYEDCEDRHDGTSNGTARLPQLGTVGQSPYTSAPPLSHTPNADFQPPYFPPPYQPIYPQSQDPYSHVNDPYSLNPLHAQPQPQHPGWPGQRQSQESGLLHTHRGLPHQLSGLDPRRDYRRHEDLLHGPHALSSGLGDLSIHSLPHAIEEVPHVEDPGINIPDQTVIKKGPVSLSKSNSNAVSAIPINKDNLFGGVVNPNEVFCSVPGRLSLLSSTSKYKVTVAEVQRRLSPPECLNASLLGGVLRRAKSKNGGRSLREKLDKIGLNLPAGRRKAANVTLLTSLVEGEAVHLARDFGYVCETEFPAKAVAEFLNRQHSDPNEQVTRKNMLLATKQICKEFTDLLAQDRSPLGNSRPNPILEPGIQSCLTHFNLISHGFGSPAVCAAVTALQNYLTEALKAMDKMYLSNNPNSHTDNNAKSSDKEEKHRK

SEQ ID NO: 798231 - protein, 433 aa, Homo sapiens
MSILAKMGDWQDRHDGTSNGTARLPQLGTVGQSPYTSAPPLSHTPNADFQPPYFPPPYQPIYPQSQDPYSHVNDPYSLNPLHAQPQPQHPGWPGQRQSQESGLLHTHRGLPHQLSGLDPRRDYRRHEDLLHGPHALSSGLGDLSIHSLPHAIEEVPHVEDPGINIPDQTVIKKGPVSLSKSNSNAVSAIPINKDNLFGGVVNPNEVFCSVPGRLSLLSSTSKYKVTVAEVQRRLSPPECLNASLLGGVLRRAKSKNGGRSLREKLDKIGLNLPAGRRKAANVTLLTSLVEGEAVHLARDFGYVCETEFPAKAVAEFLNRQHSDPNEQVTRKNMLLATKQICKEFTDLLAQDRSPLGNSRPNPILEPGIQSCLTHFNLISHGFGSPAVCAAVTALQNYLTEALKAMDKMYLSNNPNSHTDNNAKSSDKEEKHRK

SEQ ID NO: 798232 - protein, 285 aa, Homo sapiens
MRAGVGQDLGVIHDAQHAASPLSPAGPVSLSKSNSNAVSAIPINKDNLFGGVVNPNEVFCSVPGRLSLLSSTSKYKVTVAEVQRRLSPPECLNASLLGGVLRRAKSKNGGRSLREKLDKIGLNLPAGRRKAANVTLLTSLVEGEAVHLARDFGYVCETEFPAKAVAEFLNRQHSDPNEQVTRKNMLLATKQICKEFTDLLAQDRSPLGNSRPNPILEPGIQSCLTHFNLISHGFGSPAVCAAVTALQNYLTEALKAMDKMYLSNNPNSHTDNNAKSSDKEEKHRK

SEQ ID NO: 798233 - protein, 449 aa, Homo sapiens
MLVHSFSAMDRHDGTSNGTARLPQLGTVGQSPYTSAPPLSHTPNADFQPPYFPPPYQPIYPQSQDPYSHVNDPYSLNPLHAQPQPQHPGWPGQRQSQESGLLHTHRGLPHQLSGLDPRRDYRRHEDLLHGPHALSSGLGDLSIHSLPHAIEEVPHVEDPGINIPDQTVIKKGPVSLSKSNSNAVSAIPINKDNLFGGVVNPNEVFCSVPGRLSLLSSTSKYKVTVAEVQRRLSPPECLNASLLGGVLRRAKSKNGGRSLREKLDKIGLNLPAGRRKAANVTLLTSLVEGEAVHLARDFGYVCETEFPAKAVAEFLNRQHSDPNEQVTRKNMLLATKQICKEFTDLLAQDRSPLGNSRPNPILEPGIQSCLTHFNLISHGFGSPAVCAAVTALQNYLTEALKAMDKMYLSNNPNSHTDHGNPIHYTIPFPCEADHPGPPTTPKIRRQPKA

SEQ ID NO: 798234 - protein, 300 aa, Homo sapiens; identical to SEQ ID NO: 798229

SEQ ID NO: 798235 - protein, 258 aa, Homo sapiens
MSGCELSPLGLRVGLSAGPAHGRRFPAPSGPWTGLNLASRQGAGPKPRDSRPYKAAAVGAWHARPEACAHTLSCPALARLGRARRRPWMSHRTSSTFRAERSFHSSSSSSSSSTSSSASRALPAQDPPMEKALSMFSDDFGSFMRPHSEPLAFPARPGGAGNIKTLGDAYEFAVDVRDFSPEDIIVTTSNNHIEVRAEKLAADGTVMNTFAHKCQLPEDVDPTSVTSALREDGSLTIRARRHPHTEHVQQTFRTEIKI

SEQ ID NO: 798236 - protein, 443 aa, Homo sapiens
MSGCELSPLGLRVGLSAGPAHGRRFPAPSGPWTGLNLASRQGAGPKPRDSRPYKAAAVGAWHARPEACAHTLSCPALARLGRARRRPWMSHRTSSTFRAERSFHSSSSSSSSSTSSSASRALPAQDPPMEKALSMFSDDFGSFMRPHSEPLAFPGKCPGPEGRGGAQGGDVCSRAPPKALWLPVGLEQVLHSLQPCVATKTDVATGTDVAMKTGGPLRNSCGPGGWTWFHGHPCSVTTANPSWSPGGLDGGAVGGSPQAPGLGWGCYRPSLIYTHTVLGEAPPPPQKRWAVGMRRSLGETARGEVGPGGAAPCPKRRSQNPRICMQGLLHASLTAAHPTARPGGAGNIKTLGDAYEFAVDVRDFSPEDIIVTTSNNHIEVRAEKLAADGTVMNTFAHKCQLPEDVDPTSVTSALREDGSLTIRARRHPHTEHVQQTFRTEIKI

SEQ ID NO: 798237 - protein, 258 aa, Homo sapiens; identical to SEQ ID NO: 798235

SEQ ID NO: 798238 - protein, 131 aa, Homo sapiens
MDRGLVFRPRICMQGLLHASLTAAHPTARPGGAGNIKTLGDAYEFAVDVRDFSPEDIIVTTSNNHIEVRAEKLAADGTVMNTFAHKCQLPEDVDPTSVTSALREDGSLTIRARRHPHTEHVQQTFRTEIKI

SEQ ID NO: 798239 - protein, 659 aa, Homo sapiens
MSLPPEKASELKQLIHQQLSKMDVHGRIREILAETIREELAPDQQHLSTEDLIKALRRRGIIDDVMKELNFVTDSVEQELPSSPKQPICFDRQSTLKKTNIDPTRRYLYLQVLGGKAFLEHLQEPEPLPGQVCSTFTLCLHYRNQRFRSKPVPCACEPDFHDGFLLEVHRESLGDGTRMADSTTMLSISDPIHMVLIKTDIFGETTLVASYFLEWRSVLGSENGVTSLTVELMGVGTESKVSVGILNIKLEMYPPLNQTLSQEVVNTQLALERQKTAEKERLFLVYAKQWWREYLQIRPSHNSRLVKIFAQDENGINRPVCSYVKPLRAGRLLDTPRQAARFVNVLGYERAPVIGGGGKQEQWCTLLAFLCRNKGDCEDHANLLCSLLLGYGLEAFVCVGTKAKGVPHAWVMTCGTDGAITFWESLTGHRYIHKPTNPDEPPVAEQPKPLYPYRTIGCVFNHQMFLGNCQPSDAVETCVFDLNDESKWKPMSEEAIKSVCAPGATTSLPPFPPLCASTIDASVTSNEIEMQLRLLVSEHRKDLGLTTVWEDQLSYLLSPALASYEFERTTSISAGNEEFQDAIRRAVPDGHTFKGFPIHFVYRNARRAFATCLRSPFCEEIICCRGDQVRLAVRVRVFTYPESACAVWIMFACKYRSVL

SEQ ID NO: 798240 - protein, 481 aa, Homo sapiens
MADSTTMLSISDPIHMVLIKTDIFGETTLVASYFLEWRSVLGSENGVTSLTVELMGVGTESKVSVGILNIKLEMYPPLNQTLSQEVVNTQLALERQKTAEKERLFLVYAKQWWREYLQIRPSHNSRLVKIFAQDENGINRPVCSYVKPLRAGRLLDTPRQAARFVNVLGYERAPVIGGGGKQEQWCTLLAFLCRNKGDCEDHANLLCSLLLGYGLEAFVCVGTKAKGVPHAWVMTCGTDGAITFWESLTGHRYIHKPTNPDEPPVAEQPKPLYPYRTIGCVFNHQMFLGNCQPSDAVETCVFDLNDESKWKPMSEEAIKSVCAPGATTSLPPFPPLCASTIDASVTSNEIEMQLRLLVSEHRKDLGLTTVWEDQLSYLLSPALASYEFERTTSISAGNEEFQDAIRRAVPDGHTFKGFPIHFVYRNARRAFATCLRSPFCEEIICCRGDQVRLAVRVRVFTYPESACAVWIMFACKYRSVL

SEQ ID NO: 798241 - protein, 657 aa, Homo sapiens
MSLPPEKASELKQLIHQQLSKMDVHGRIREILAETIREELAPDQQHLSTEDLIKALRRRGIIDDVMKELNFVTDSVEQELPSSPKQPICFDRQSTLKKTNIDPTRRYLYLQVLGGKAFLEHLQEPEPLPGQVCSTFTLCLHYRNQRFRSKPVPCACEPDFHDGFLLEVHRESLGDGTRMADSTTMLSISDPIHMVLIKTDIFGETTLVASYFLEWRSVLGSENGVTSLTVELMGVGTESKVSVGILNIKLEMYPPLNQTLSQEVVNTQLALERQKTAEKERLFLVYAKQWWREYLQIRPSHNSRLVKIFAQDENGINRPVCSYVKPLRAGRLLDTPRQAARFVNVLGYERAPVIGGGGKQEQWCTLLAFLCRNKGDCEDHANLLCSLLLGYGLEAFVCVGTKAKGVPHAWVMTCGTDGAITFWESLTGHRYIHKPTNPDEPPVAEQPKPLYPYRTIGCVFNHQMFLGNCQPSDAVETCVFDLNDESKWKPMSEEAIKSVCAPGATTSLPPFPPLCASTIDASVTSNEIEMQLRLLVSEHRKDLGLTTVWEDQLSYLLSPALASYEFERTTSISAGNEEFQDAIRRAVPDGHTFKGFPIHFVYRNARRAFATCLRSPFCEEIICCRGDQVRLAVRVRVFTYPESACAVWIMFACECAS

SEQ ID NO: 798242 - protein, 382 aa, Homo sapiens
MSLPPEKASELKQLIHQQLSKMDVHGRIREILAETIREELAPDQQHLSTEDLIKALRRRGIIDDVMKELNFVTDSVEQELPSSPKQPICFDRQSTLKKTNIDPTRRYLYLQVLGGKAFLEHLQEPEPLPGQVCSTFTLCLHYRNQRFRSKPVPCACEPDFHDGFLLEVHRESLGDGTRMADSTTMLSISDPIHMVLIKTDIFGETTLVASYFLEWRSVLGSENGVTSLTVELMGVGTESKVSVGILNIKLEMYPPLNQTLSQEVVNTQLALERQKTAEKERLFLVYAKQWWREYLQIRPSHNSRLVKIFAQDENGINRPVCSYVKPLRAGRLLDTPRQAARFVNVLGYERAPVIGGGGKQEQWCTLLAFLCRNKLGREMRFS

SEQ ID NO: 798243 - protein, 316 aa, Homo sapiens
MSLPPEKASELKQLIHQQLSKMDVHGRIREILAETIREELAPDQQHLSTEDLIKALRRRGIIDDVMKELNFVTDSVEQELPSSPKQPICFDRQSTLKKTNIDPTRRYLYLQVLGGKAFLEHLQEPEPLPGQVCSTFTLCLHYRNQRFRSKPVPCACEPDFHDGFLLEVHRESLGDGTRMADSTTMLSISDPIHMVLIKTDIFGETTLVASYFLEWRSVLGSENGVTSLTVELMGVGTESKVSVGILNIKLEMYPPLNQTLSQEVVNTQLALERQKTAEKERLFLVYAKQWWREYLQIRPSHNSRLVKIFAQVCKLY

SEQ ID NO: 798244 - protein, 659 aa, Homo sapiens; identical to SEQ ID NO: 798239

SEQ ID NO: 798245 - protein, 616 aa, Homo sapiens
MSLPPEKASELKQLIHQQLSKMDVHGRIREILAETIREELAPDQQHLSTEDLIKALRRRGIIDDVMKELNFVTDSVEQELPSSPKQPICFDRQSTLKKTNIDPTRRYLYLQVLGGKAFLEHLQEPEPLPGQVCSTFTLCLHYRNQRFRSKPVPCACEPDFHDGFLLEVHRESLGDGTRMADSTTMLSISDPIHMVLIKTDIFGETTLVASYFLEWRSVLGSENGVTSLTVELMGVGTESKVSVGILNIKLEMYPPLNQTLSQEVVNTQDENGINRPVCSYVKPLRAGRLLDTPRQAARFVNVLGYERAPVIGGGGKQEQWCTLLAFLCRNKGDCEDHANLLCSLLLGYGLEAFVCVGTKAKGVPHAWVMTCGTDGAITFWESLTGHRYIHKPTNPDEPPVAEQPKPLYPYRTIGCVFNHQMFLGNCQPSDAVETCVFDLNDESKWKPMSEEAIKSVCAPGATTSLPPFPPLCASTIDASVTSNEIEMQLRLLVSEHRKDLGLTTVWEDQLSYLLSPALASYEFERTTSISAGNEEFQDAIRRAVPDGHTFKGFPIHFVYRNARRAFATCLRSPFCEEIICCRGDQVRLAVRVRVFTYPESACAVWIMFACKYRSVL

SEQ ID NO: 798246 - protein, 481 aa, Homo sapiens; identical to SEQ ID NO: 798240

SEQ ID NO: 798247 - protein, 389 aa, Homo sapiens
MSLPPEKASELKQLIHQQLSKMDVHGRIREILAETIREELAPDQQHLSTEDLIKALRRRGIIDDVMKELNFVTDSVEQELPSSPKQPICFDRQSTLKKTNIDPTRRYLYLQVLGGKAFLEHLQEPEPLPGQVCSTFTLCLHYRNQRFRSKPVPCACEPDFHDGFLLEVHRESLGDGTRMADSTTMLSISDPIHMVLIKTDIFGETTLVASYFLEWRSVLGSENGVTSLTVELMGVGTESKVSVGILNIKLEMYPPLNQTLSQEVVNTQLALERQKTAEKERLFLVYAKQWWREYLQIRPSHNSRLVKIFAQDENGINRPVCSYVKPLRAGRLLDTPRQAARFVNVLGYERAPVIGGGGKQEQWCTLLAFLCRNKTRYYTHIIELSSSIS

SEQ ID NO: 798248 - protein, 74 aa, Homo sapiens
MQRGARLPAEVAGQVLWALPPLTWRQQGTCAPGEGRLPADGPSFAFTTHNFPYPLLLKGNNPKYPCWVNNTLLP

SEQ ID NO: 798249 - protein, 448 aa, Homo sapiens
MVLSKSGPGDGFFSSAFQARLSGNNLHNASIPEHLAYGSVITVKNLRMAIGYLHSHRHLYPEGIGARQQQVTTYLHKDYNNLWIIKKHNTNSDPLDPSFPVEFVRHGDIIRLEHKETSRNLHSHYHEAPMTRKHYQVTGYGINGTGDSNDFWRIEVVNRKFGNRIKVLRSRIRFIHLVTGCVLGSSGKVLPKWGWEQLEVTCTPYLKETLNSIWNVEDHINPKLPNISLDVLQPSFPEILLESHMVMIRGNSGLKPKDNEFTSKPWHWPINYQGLRFSGVNDTDFRVYLLGNPVVWWLNLLSIALYLLSGSIIAVAMQRGARLPAEVAGLSQVLLRGGGQVLLGWTLHYFPFFLMGRVLYFHHYFPAMLFSSMLTGILWDTLLRLCAWGLASWPLARGIHVAGILSLLLGTAYSFYLFHPLAYGMVGPLAQDPQSPMAGLRWLDSWDF

SEQ ID NO: 798250 - protein, 750 aa, Homo sapiens
MPPATGGGLAESELRPRRGRCGPQAARAAGRDVAAEAVARSPKRPAWGSRRFEAVGWWALLALVTLLSFATRFHRLDEPPHICWDETHFGKMGSYYINRTFFFDVHPPLGKMLIGLAGYLSGYDGTFLFQKPGDKYEHHSYMGMRGFCAFLGSWLVPFAYLTVLDLSKSLSAALLTAALLTFDTGCLTLSQYILLDPILMFFIMAAMLSMVKYNSCADRPFSAPWWFWLSLTGVSLAGALGVKFVGLFIILQVGLNTIADLWYLFGDLSLSLVTVGKHLTARVLCLIVLPLALYTATFAVHFMVLSKSGPGDGFFSSAFQARLSGNNLHNASIPEHLAYGSVITVKNLRMAIGYLHSHRHLYPEGIGARQQQVTTYLHKDYNNLWIIKKHNTNSDPLDPSFPVEFVRHGDIIRLEHKETSRNLHSHYHEAPMTRKHYQVTGYGINGTGDSNDFWRIEVVNRKFGNRIKVLRSRIRFIHLVTGCVLGSSGKVLPKWGWEQLEVTCTPYLKETLNSIWNVEDHINPKLPNISLDVLQPSFPEILLESHMVMIRGNSGLKPKDNEFTSKPWHWPINYQGLRFSGVNDTDFRVYLLGNPVVWWLNLLSIALYLLSGSIIAVAMQRGARLPAEVAGLSQVLLRGGGQVLLGWTLHYFPFFLMGRVLYFHHYFPAMLFSSMLTGILWDTLLRLCAWGLASWPLARGIHVAGILSLLLGTAYSFYLFHPLAYGMVGPLAQDPQSPMAGLRWLDSWDF

SEQ ID NO: 798251 - protein, 750 aa, Homo sapiens; identical to SEQ ID NO: 798250

SEQ ID NO: 798252 - protein, 319 aa, Homo sapiens [sequence omitted]

SEQ ID NO: 798253 - protein, 842 aa, Homo sapiens
MPPATGGGLAESELRPRRGRCGPQAARAAGRDVAAEAVARSPKRPAWGSRRFEAVGWWALLALVTLLSFATRFHRLDEPPHICWDETHFGKMGSYYINRTFFFDVHPPLGKMLIGLAGYLSGYDGTFLFQKPGDKYEHHSYMGMRGFCAFLGSWLVPFAYLTVLDLSKSLSAALLTAALLTFDTGCLTLSQYILLDPILMFFIMAAMLSMVKYNSCADRPFSAPWWFWLSLTGVSLAGALGVKFVGLFIILQVGLNTIADLWYLFGDLSLSLVTVGKHLTARVLCLIVLPLALYTATFAVHFMVLSKSGPGDGFFSSAFQARLSGNNLHNASIPEHLAYGSVITVKNLRMAIGYLHSHRHLYPEGIGARQQQVTTYLHKDYNNLWIIKKHNTNSDPLDPSFPVEFVRHGDIIRLEHKETSRNLHSHYHEAPMTRKHYQVTGYGINGTGDSNDFWRIEVVNRKFGNRIKVLRSRIRFIHLVTGCVLGSSGKVLPKWGWEQLEVTCTPYLKETLNSIWNVEDHINPKLPNISLDVLQPSFPEILLESHMVMIRGNSGLKPKDNEFTSKPWHWPINYQGLRFSGVNDTDFRVYLLGNPVVWWLNLLSIALYLLSGSIIAVAMQRGARLPAEVAGLSQVLLRGGGQVLLGWTLHYFPFFLMGRVLYFHHYFPAMLFSSMLTGILWDTLLRLCAWGLASWPLARGIHVAGILSLLLGTAYSCLRSPKNSAAHQDPALGVQLEWNPALERAGREPQLRPQHHGEDSASWAAPSCTAQGRMGARGWEWVRVCVCEGMLSISLWNTDRVTGQLSVINSKIVQAIVIFSGIFFCWISLVLVCKIHQKFSDL

SEQ ID NO: 798254 - protein, 179 aa, Homo sapiens
KVTQQGRGRAGPEPGISARSLSSDWAVLLGPRVVPGPAARRRPGPARLDTPLLPVFPDGPGPLLPPLLPSHALLKHVDRHSVGHPPAALCLGLGLMAPGEGHTCGGNPEPAPGNCLQLLPLPPSGLRDGWSPGPGPPKSNGRTKVAGLMGLLRPLQRFQPGSRNFPGEPAGKQYWTIRP

SEQ ID NO: 798255 - protein, 792 aa, Homo sapiens
MPPATGGGLAESELRPRRGRCGPQAARAAGRDVAAEAVARSPKRPAWGSRRFEAVGWWALLALVTLLSFATRFHRLDEPPHICWDETHFGKMGSYYINRTFFFDVHPPLGKMLIGLAGYLSGYDGTFLFQKPGDKYEHHSYMGMRGFCAFLGSWLVPFAYLTVLDLSKSLSAALLTAALLTFDTGCLTLSQYILLDPILMFFIMAAMLSMVKYNSCADRPFSAPWWFWLSLTGVSLAGALGVKFVGLFIILQVGLNTIADLWYLFGDLSLSLVTVGKHLTARVLCLIVLPLALYTATFAVHFMVLSKSGPGDGFFSSAFQARLSGNNLHNASIPEHLAYGSVITVKNLRMAIGYLHSHRHLYPEGIGARQQQVTTYLHKDYNNLWIIKKHNTNSDPLDPSFPVEFVRHGDIIRLEHKETSRNLHSHYHEAPMTRKHYQVTGYGINGTGDSNDFWRIEVVNRKFGNRIKVLRSRIRFIHLVTGCVLGSSGKVLPKWGWEQLEVTCTPYLKETLNSIWNVEDHINPKLPNISLDVLQPSFPEILLESHMVMIRGNSGLKPKDNEFTSKPWHWPINYQGLRFSGVNDTDFRVYLLGNPVVWWLNLLSIALYLLSGSIIAVAMQRGARLPAEVAGLSQVLLRGGGQVLLGWTLHYFPFFLMGRVLYFHHYFPAMLFSSMLTGILWDTLLRLCAWGLASWPLARGIHVAGILSLLLGTAYSKDSTLHPLVKDGWAPGQDPSHGRLAVARTWSTCRISGQELREQGHMARRESRANGPTWRRCTRRKDKERRSTREGP

SEQ ID NO: 798256 - protein, 693 aa, Homo sapiens
MPPATGGGLAESELRPRRGRCGPQAARAAGRDVAAEAVARSPKRPAWGSRRFEAVGWWALLALVTLLSFATRFHRLDEPPHICWDETHFGKMGSYYINRTFFFDVHPPLGKMLIGLAGYLSGYDGTFLFQKPGDKYEHHSYMGMRGFCAFLGSWLVPFAYLTVLDLSKSLSAALLTAALLTFDTGCLTLSQYILLDPILMFFIMAAMLSMVKYNSCADRPFSAPWWFWLSLTGVSLAGALGVKFVGLFIILQVGLNTIADLWYLFGDLSLSLVTVGKHLTARVLCLIVLPLALYTATFAVHFMVLSKSGPGDGFFSSAFQARLSGNNLHNASIPEHLAYGSVITVKNLRMAIGYLHSHRHLYPEGIGARQQQVTTYLHKDYNNLWIIKKHNTNSDPLDPSFPVEFVRHGDIIRLEHKETSRNLHSHYHEAPMTRKHYQVTGYGINGTGDSNDFWRIEVVNRKFGNRIKVLRSRIRFIHLVTGCVLGSSGKVLPKWGWEQLEVTCTPYLKETLNSIWNVEDHINPKLPNISLDVLQPSFPEILLESHMVMIRGNSGLKPKDNEFTSKPWHWPINYQGLRFSGVNDTDFRVYLLGNPVVWWLNLLSIALYLLSGSIIAVAMQRGARLPAEVAGQVLWALPPLTWRQQGTCAPGEGRLPADGPSFAFTTHNFPYPLLLKGNNPQVPVLRCTTLYFL

SEQ ID NO: 798257 - protein, 593 aa, Homo sapiens
MPPATGGGLAESELRPRRGRCGPQAARAAGRDVAAEAVARSPKRPAWGSRRFEAVGWWALLALVTLLSFATRFHRLDEPPHICWDETHFGKMGSYYINRTFFFDVHPPLGKMLIGLAGYLSGYDGTFLFQKPGDKYEHHSYMGMRGFCAFLGSWLVPFAYLTVLDLSKSLSAALLTAALLTFDTGCLTLSQYILLDPILMFFIMAAMLSMVKYNSCADRPFSAPWWFWLSLTGVSLAGALGVKFVGLFIILQVGLNTIADLWYLFGDLSLSLVTVGKHLTARVLCLIVLPLALYTATFAVHFMVLSKSGPGDGFFSSAFQARLSGNNLHNASIPEHLAYGSVITVKNLRMAIGYLHSHRHLYPEGIGARQQQVTTYLHKDYNNLWIIKKHNTNSDPLDPSFPVEFVRHGDIIRLEHKETSRNLHSHYHEAPMTRKHYQVTGYGINGTGDSNDFWRIEVVNRKFGNRIKVLRSRIRFIHLVTGCVLGSSGKVLPKWGWEQLEVTCTPYLKETLNSIWNVEDHINPKLPNISLDVLQPSFPEILLESHMVMIRGNSGLKPKDNEFTSKPWHWPINYQVGSKAGAPPRKWSQEQEQ

SEQ ID NO: 798258 - protein, 750 aa, Homo sapiens; identical to SEQ ID NO: 798250

SEQ ID NO: 798259 - protein, 448 aa, Homo sapiens; identical to SEQ ID NO: 798249

SEQ ID NO: 798260 - protein, 533 aa, Homo sapiens
DICGSGRIMSPCLTNSTGKEGSRGSEFVGLFIILQVGLNTIADLWYLFGDLSLSLVTVGKHLTARVLCLIVLPLALYTATFAVHFMVLSKSGPGDGFFSSAFQARLSGNNLHNASIPEHLAYGSVITVKNLRMAIGYLHSHRHLYPEGIGARQQQVTTYLHKDYNNLWIIKKHNTNSDPLDPSFPVEFVRHGDIIRLEHKETSRNLHSHYHEAPMTRKHYQVTGYGINGTGDSNDFWRIEVVNRKFGNRIKVLRSRIRFIHLVTGCVLGSSGKVLPKWGWEQLEVTCTPYLKETLNSIWNVEDHINPKLPNISLDVLQPSFPEILLESHMVMIRGNSGLKPKDNEFTSKPWHWPINYQGLRFSGVNDTDFRVYLLGNPVVWWLNLLSIALYLLSGSIIAVAMQRGARLPAEVAGLSQVLLRGGGQVLLGWTLHYFPFFLMGRVLYFHHYFPAMLFSSMLTGILWDTLLRLCAWGLASWPLARGIHVAGILSLLLGTAYSFYLFHPLAYGMVGPLAQDPQSPMAGLRWLDSWDF

SEQ ID NO: 798261 - protein, 243 aa, Homo sapiens
RLRKECMTKAFLLHFFPLVPNISLDVLQPSFPEILLESHMVMIRGNSGLKPKDNEFTSKPWHWPINYQGLRFSGVNDTDFRVYLLGNPVVWWLNLLSIALYLLSGSIIAVAMQRGARLPAEVAGLSQVLLRGGGQVLLGWTLHYFPFFLMGRVLYFHHYFPAMLFSSMLTGILWDTLLRLCAWGLASWPLARGIHVAGILSLLLGTAYSFYLFHPLAYGMVGPLAQDPQSPMAGLRWLDSWDF

SEQ ID NO: 798262 - protein, 149 aa, Homo sapiens
RALAIMTPILWIRKPRNHEIKKLAPGHTARLSQVLLRGGGQVLLGWTLHYFPFFLMGRVLYFHHYFPAMLFSSMLTGILWDTLLRLCAWGLASWPLARGIHVAGILSLLLGTAYSFYLFHPLAYGMVGPLAQDPQSPMAGLRWLDSWDF

SEQ ID NO: 798263 - protein, 750 aa, Homo sapiens; identical to SEQ ID NO: 798250

SEQ ID NO: 798264 - protein, 706 aa, Homo sapiens
MPPATGGGLAESELRPRRGRCGPQAARAAGRDVAAEAVARSPKRPAWGSRRFEAVGWWALLALVTLLSFATRFHRLDEPPHICWDETHFGKMGSYYINRTFFFDVHPPLGKMLIGLAGYLSGYDGTFLFQKPGDKYEHHSYMGMRGFCAFLGSWLVPFAYLTVLDLSKSLSAALLTAALLTFDTGCLTLSQYILLDPILMFFIMAAMLSMVKYNSCADRPFSAPWWFWLSLTGVSLAGALGVKFVGLFIILQVGLNTIADLWYLFGDLSLSLVTVGKHLTARVLCLIVLPLALYTATFAVHFMVLSKSGPGDGFFSSAFQARLSGNNLHNASIPEHLAYGSVITVKNLRMAIGYLHSHRHLYPEGIGARQQQVTTYLHKDYNNLWIIKKHNTNSDPLDPSFPVEFVRHGDIIRLEHKECPLKKIWRWEQKETSRNLHSHYHEAPMTRKHYQVTGYGINGTGDSNDFWRIEVVNRKFGNRIKVLRSRIRFIHLVTGCVLGSSGKVLPKWGWEQLEVTCTPYLKETLNSIWNVEDHINPKLPNISLDVLQPSFPEILLESHMVMIRGNSGLKPKDNEFTSKPWHWPINYQGLRFSGVNDTDFRVYLLGNPVVWWLNLLSIALYLLSGSIIAVAMQRGARLPAEVAGQVLWALPPLTWRQQGTCAPGEGRLPADGPSFAFTTHNFPYPLLLKGNNPQVPVLRCTTLYFL

SEQ ID NO: 798265 - protein, 70 aa, Homo sapiens
LMTTLLPPCSHLAPQFSDGAFLGVTTLKHVHLENNRLNQLPSNFPFDSLETLALTNNPWKCTCQLRGLRR

SEQ ID NO: 798266 - protein, 408 aa, Homo sapiens
DAPRRSWLGCRLRSGPPYKEGGRPERLGLAAARAPPPLLPPAPAPGVPAMVRPMLLLSLGLLAGLLPALAACPQNCHCHSDLQHVICDKVGLQKIPKVSEKTKLLNLQRNNFPVLAANSFRAMPNLVSLHLQHCQIREVAAGAFRGLKQLIYLYLSHNDIRVLRAGAFDDLTELTYLYLDHNKVTELPRGLLSPLVNLFILQLNNNKIRELRAGAFQGAKDLRWLYLSENALSSLQPGALDDVENLAKFHVDRNQLSSYPSAALSKLRVVEELKLSHNPLKSIPDNAFQSFGRYLETLWLDNTNLEKFSDGAFLGVTTLKHVHLENNRLNQLPSNFPFDSLETLALTNNPWKCTCQLRGLRRWLEAKASRPDATCASPAKFKGQHIRDTDAFRSCKFPTKRSKKAGRH

SEQ ID NO: 798267 - protein, 204 aa, Homo sapiens
MRKAPRSPRRSRPAEDAVARVGLELRQSEPAEPPPPPPSSSASSLLLLPPPRPPHSDITCSQSPALYRRRRLGPEGPARPVAPQSRSSPHPLTRTLHVSRAAAAGSAPPHSPEHAAPPTAHGVRAGTDTAQIPAPNGPRPAPYVNARKPSPPAAQSWPHRSRPRSRSLRRRRRGAWRSCSLGIRPAGNTWNLDTAVVCSRRAGF

SEQ ID NO: 798268 - protein, 1331 aa, Homo sapiens
MRGAPARLLLPLLPWLLLLLAPEARGAPGCPLSIRSCKCSGERPKGLSGGVPGPARRRVVCSGGDLPEPPEPGLLPNGTVTLLLSNNKITGLRNGSFLGLSLLEKLDLRNNIISTVQPGAFLGLGELKRLDLSNNRIGCLTSETFQGLPRLLRLNISGNIFSSLQPGVFDELPALKVVDLGTEFLTCDCHLRWLLPWAQNRSLQLSEHTLCAYPSALHAQALGSLQEAQLCCEGALELHTHHLIPSLRQVVFQGDRLPFQCSASYLGNDTRIRWYHNRAPVEGDEQAGILLAESLIHDCTFITSELTLSHIGVWASGEWECTVSMAQGNASKKVEIVVLETSASYCPAERVANNRGDFRWPRTLAGITAYQSCLQYPFTSVPLGGGAPGTRASRRCDRAGRWEPGDYSHCLYTNDITRVLYTFVLMPINASNALTLAHQLRVYTAEAASFSDMMDVVYVAQMIQKFLGYVDQIKELVEVMVDMASNLMLVDEHLLWLAQREDKACSRIVGALERIGGAALSPHAQHISVNARNVALEAYLIKPHSYVGLTCTAFQRREGGVPGTRPGSPGQNPPPEPEPPADQQLRFRCTTGRPNVSLSSFHIKNSVALASIQLPPSLFSSLPAALAPPVPPDCTLQLLVFRNGRLFHSHSNTSRPGAAGPGKRRGVATPVIFAGTSGCGVGNLTEPVAVSLRHWAEGAEPVAAWWSQEGPGEAGGWTSEGCQLRSSQPNVSALHCQHLGNVAVLMELSAFPREVGGAGAGLHPVVYPCTALLLLCLFATIITYILNHSSIRVSRKGWHMLLNLCFHIAMTSAVFAGGITLTNYQMVCQAVGITLHYSSLSTLLWMGVKARVLHKELTWRAPPPQEGDPALPTPSPMLRFYLIAGGIPLIICGITAAVNIHNYRDHSPYCWLVWRPSLGAFYIPVALILLITWIYFLCAGLRLRGPLAQNPKAGNSRASLEAGEELRGSTRLRGSGPLLSDSGSLLATGSARVGTPGPPEDGDSLYSPGVQLGALVTTHFLYLAMWACGALAVSQRWLPRVVCSCLYGVAASALGLFVFTHHCARRRDVRASWRACCPPASPAAPHAPPRALPAAAEDGSPVFGEGPPSLKSSPSGSSGHPLALGPCKLTNLQLAQSQVCEAGAAAGGEGEPEPAGTRGNLAHRHPNNVHHGRRAHKSRAKGHRAGEACGKNRLKALRGGAAGALELLSSESGSLHNSPTDSYLGSSRNSPGAGLQLEGEPMLTPSEGSDTSAAPLSEAGRAGQRRSASRDSLKGGGALEKESHRRSYPLNAASLNGAPKGGKYDDVTLMGAEVASGGCMKTGLWKSETTV

SEQ ID NO: 798269 - protein, 178 aa, Homo sapiens
MRGAPARLLLPLLPWLLLLLAPEARGAPGCPLSIRSCKCSGERPKGLSGGVPGPARRRVVCSGGDLPEPPEPGLLPNGTVTLLLSNNKITGLRNGSFLGLSLLEKLDLRNNIISTVQPGAFLGLGELKRLDLSNNRIGCLTSETFQGLPRLLRLNISGNIFSSLQPGVFDELPALKVV

SEQ ID NO: 798270 - protein, 1331 aa, Homo sapiens; identical to SEQ ID NO: 798268

SEQ ID NO: 798271 - protein, 1331 aa, Homo sapiens; identical to SEQ ID NO: 798268

SEQ ID NO: 798272 - protein, 1331 aa, Homo sapiens; identical to SEQ ID NO: 798268

SEQ ID NO: 798273 - protein, 1331 aa, Homo sapiens; identical to SEQ ID NO: 798268

SEQ ID NO: 798274 - protein, 1331 aa, Homo sapiens; identical to SEQ ID NO: 798268

SEQ ID NO: 798275 - protein, 1331 aa, Homo sapiens; identical to SEQ ID NO: 798268

SEQ ID NO: 798276 - protein, 843 aa, Homo sapiens
MRGAPARLLLPLLPWLLLLLAPEARGAPGCPLSIRSCKCSGERPKGLSGGVPGPARRRVVCSGGDLPEPPEPGLLPNGTVTLLLSNNKITGLRNGSFLGLSLLEKLDLRNNIISTVQPGAFLGLGELKRLDLSNNRIGCLTSETFQGLPRLLRLNISGNIFSSLQPGVFDELPALKVVDLGTEFLTCDCHLRWLLPWAQNRSLQLSEHTLCAYPSALHAQALGSLQEAQLCCEGALELHTHHLIPSLRQVVFQGDRLPFQCSASYLGNDTRIRWYHNRAPVEGDEQAGILLAESLIHDCTFITSELTLSHIGVWASGEWECTVSMAQGNASKKVEIVVLETSASYCPAERVANNRGDFRWPRTLAGITAYQSCLQYPFTSVPLGGGAPGTRASRRCDRAGRWEPGDYSHCLYTNDITRVLYTFVLMPINASNALTLAHQLRVYTAEAASFSDMMDVVYVAQMIQKFLGYVDQIKELVEVMVDMASNLMLVDEHLLWLAQREDKACSRIVGALERIGGAALSPHAQHISVNARNVALEAYLIKPHSYVGLTCTAFQRREGGVPGTRPGSPGQNPPPEPEPPADQQLRFRCTTGRPNVSLSSFHIKNSVALASIQLPPSLFSSLPAALAPPVPPDCTLQLLVFRNGRLFHSHSNTSRPGAAGPGKRRGVATPVIFAGTSGCGVGNLTEPVAVSLRHWAEGAEPVAAWWSQEGPGEAGGWTSEGCQLRSSQPNVSALHCQHLGNVAVLMELSAFPREVGGAGAGLHPVVYPCTALLLLCLFATIITYILNHSSIRVSRKGWHMLLNLCFHIAMTSAVFAGGITLTNYQMVCQAVSRRRGSGGGAPR

SEQ ID NO: 798277 - protein, 344 aa, Homo sapiens
MRGAPARLLLPLLPWLLLLLAPEARGAPGCPLSIRSCKCSGERPKGLSGGVPGPARRRVVCSGGDLPEPPEPGLLPNGTVTLLLSNNKITGLRNGSFLGLSLLEKLDLRNNIISTVQPGAFLGLGELKRLDLSNNRIGCLTSETFQGLPRLLRLNISGNIFSSLQPGVFDELPALKVVDLGTEFLTCDCHLRWLLPWAQNRSLQLSEHTLCAYPSALHAQALGSLQEAQLCCGEQVPPATHLPGTLPLHQPRAQTRASPQTHRFLPLYCNLQKTTTLSPALAFRETLSLCINHHLRSAAQHKKAFLCCLSLQVCNSSPTKRITFTIPATLPVRRGQCYPPSCLY

SEQ ID NO: 798278 - protein, 1301 aa, Homo sapiens
MRGAPARLLLPLLPWLLLLLAPEARGAPGCPLSIRSCKCSGERPKGLSGGVPGPARRRVVCSGGDLPEPPEPGLLPNGTVTLLLSNNKITGLRNGSFLGLSLLEKLDLRNNIISTVQPGAFLGLGELKRLDLSNNRIGCLTSETFQGLPRLLRLNISGNIFSSLQPGVFDELPALKVVDLGTEFLTCDCHLRWLLPWAQNRSLQLSEHTLCAYPSALHAQALGSLQEAQLCCEGALELHTHHLIPSLRQVVFQGDRLPFQCSASYLGNDTRIRWYHNRAPVEGDEQAGILLAESLIHDCTFITSELTLSHIGVWASGEWECTVSMAQGNASKKVEIVVLETSASYCPAERVANNRGDFRWPRTLAGITAYQSCLQYPFTSVPLGGGAPGTRASRRCDRAGRWEPGDYSHCLYTNDITRVLYTFVLMPINASNALTLAHQLRVYTAEAASFSDMMDVVYVAQMIQKFLGYVDQIKELVEVMVDMASNLMLVDEHLLWLAQREDKACSRIVGALERIGGAALSPHAQHISVNARNVALEAYLIKPHSYVGLTCTAFQRREGGVPGTRPGSPGQNPPPEPEPPADQQLRFRCTTGRPNVSLSSFHIKNSVALASIQLPPSLFSSLPAALAPPVPPDCTLQLLVFRNGRLFHSHSNTSRPGAAGPGKRRGVATPVIFAGTSGCGVGNLTEPVAVSLRHWAEGAEPVAAWWSQEGPGEAGGWTSEGCQLRSSQPNVSALHCQHLGNVAVLMELSAFPREVGGAGAGLHPVVYPCTALLLLCLFATIITYILNHSSIRVSRKGWHMLLNLCFHIAMTSAVFAGGITLTNYQMVCQAVGITLHYSSLSTLLWMGVKARVLHKELTWRAPPPQEGDPALPTPSPMLRCWLVWRPSLGAFYIPVALILLITWIYFLCAGLRLRGPLAQNPKAGNSRASLEAGEELRGSTRLRGSGPLLSDSGSLLATGSARVGTPGPPEDGDSLYSPGVQLGALVTTHFLYLAMWACGALAVSQRWLPRVVCSCLYGVAASALGLFVFTHHCARRRDVRASWRACCPPASPAAPHAPPRALPAAAEDGSPVFGEGPPSLKSSPSGSSGHPLALGPCKLTNLQLAQSQVCEAGAAAGGEGEPEPAGTRGNLAHRHPNNVHHGRRAHKSRAKGHRAGEACGKNRLKALRGGAAGALELLSSESGSLHNSPTDSYLGSSRNSPGAGLQLEGEPMLTPSEGSDTSAAPLSEAGRAGQRRSASRDSLKGGGALEKESHRRSYPLNAASLNGAPKGGKYDDVTLMGAEVASGGCMKTGLWKSETTV

SEQ ID NO: 798279 - protein, 1331 aa, Homo sapiens; identical to SEQ ID NO: 798268

SEQ ID NO: 798280 - protein, 1331 aa, Homo sapiens; identical to SEQ ID NO: 798268

SEQ ID NO: 798281 - protein, 1331 aa, Homo sapiens; identical to SEQ ID NO: 798268

SEQ ID NO: 798282 - protein, 1331 aa, Homo sapiens; identical to SEQ ID NO: 798268

SEQ ID NO: 798283 - protein, 1331 aa, Homo sapiens; identical to SEQ ID NO: 798268

SEQ ID NO: 798284 - protein, 498 aa, Homo sapiens
MRGAPARLLLPLLPWLLLLLAPEARGAPGCPLSIRSCKCSGERPKGLSGGVPGPARRRVVCSGGDLPEPPEPGLLPNGTVTLLLSNNKITGLRNGSFLGLSLLEKLDLRNNIISTVQPGAFLGLGELKRLDLSNNRIGCLTSETFQGLPRLLRLNISGNIFSSLQPGVFDELPALKVVDLGTEFLTCDCHLRWLLPWAQNRSLQLSEHTLCAYPSALHAQALGSLQEAQLCCEGALELHTHHLIPSLRQVVFQGDRLPFQCSASYLGNDTRIRWYHNRAPVEGDEQAGILLAESLIHDCTFITSELTLSHIGVWASGEWECTVSMAQGNASKKVEIVVLETSASYCPAERVANNRGDFRWPRTLAGITAYQSCLQYPFTSVPLGGGAPGTRASRRCDRAGRWEPGDYSHCLYTNDITRVLYTFVLMPINASNALTLAHQLRVYTAEAASFSDMMDVVYVAQMIQKFLGYVDQIKELVEVMVMPATAGARPPASGTEPI

SEQ ID NO: 798285 - protein, 1004 aa, Homo sapiens
MKVGWPGESCWQVGLAVEDSPALGAPRVGALPDVVPEGTLLNMVLRRMHRPRSCSYQLLLEHQRPSCIQGLRWTPLTNSEESLDFSESLEQASTERVLRAGRQLHRHLLATCPNLIRDRKYHLRLYRQCCSGRELVDGILALGLGVHSRSQVVGICQVLLDEGALCHVKHDWAFQDRDAQFYRFPGPEPEPVGTHEMEEELAEAVALLSQRGPDALLTVALRKPPGQRTDEELDLIFEELLHIKAVAHLSNSVKRELAAVLLFEPHSKAGTVLFSQGDKGTSWYIIWKGSVNVVTHGKGLVTTLHEGDDFGQLALVNDAPRAATIILREDNCHFLRVDKQDFNRIIKDVEAKTMRLEEHGKVVLVLERASQGAGPSRPPTPGRNRNTPAMLPLHTVPPFISQSLLPSPVSYPCPLATCGWRGIEGPGCALLSQSPPCPKVGQGWLMEKNDVIDIDVCPGVGVGSSGTSAKDWPFLLRYTVMSGTPEKILELLLEAMGPDSSAHDPTGGWPCLDVVVPLTVPTFHVEPAGGSEQERSTYVCNKRQQILRLVSQWVALYGSMLHTDPVATSFLQKLSDLVGRDTRLSNLLREQWPERRRCHRLENGCGNASPQMKARNLPVWLPNQDEPLPGSSCAIQVGDKVPYDICRPDHSVLTLQLPVTASVREVMAALAQEDGWTKGQVLVKVNSAGDAIGLQPDARGVATSLGLNERLFVVNPQEVHELIPHPDQLGPTVGSAEGLDLVSAKDLAGQLTDHDWSLFNSIHQVELIHYVLGPQHLRDVTTANLERFMRRFNELQYWVATELCLCPVPGPRAQLLRKFIKLAAHLKEQKNLNSFFAVMFGLSNSAISRLAHTWERLPHKVRKLYSALERLLDPSWNHRVYRLALAKLSPPVIPFMPLLLKDMTFIHEGNHTLVENLINFEKMRMMARAARMLHHCRSHNPVPLSPLRSRVSHLHEDSQVARISTCSEQSLSTRSPASTWAYVQQLKVIDNQRELSRLSRELEP

SEQ ID NO: 798286 - protein, 524 aa, Homo sapiens
MSGTPEKILELLLEAMGPDSSAHDPTGGWPCLDVVVPLTVPTFHVEPAGGSEQERSTYVCNKRQQILRLVSQWVALYGSMLHTDPVATSFLQKLSDLVGRDTRLSNLLREQWPERRRCHRLENGCGNASPQMKARNLPVWLPNQDEPLPGSSCAIQVGDKVPYDICRPDHSVLTLQLPVTASVREVMAALAQEDGWTKGQVLVKVNSAGDAIGLQPDARGVATSLGLNERLFVVNPQEVHELIPHPDQLGPTVGSAEGLDLVSAKDLAGQLTDHDWSLFNSIHQVELIHYVLGPQHLRDVTTANLERFMRRFNELQYWVATELCLCPVPGPRAQLLRKFIKLAAHLKEQKNLNSFFAVMFGLSNSAISRLAHTWERLPHKVRKLYSALERLLDPSWNHRVYRLALAKLSPPVIPFMPLLLKDMTFIHEGNHTLVENLINFEKMRMMARAARMLHHCRSHNPVPLSPLRSRVSHLHEDSQVARISTCSEQSLSTRSPASTWAYVQQLKVIDNQRELSRLSRELEP

SEQ ID NO: 798287 - protein, 452 aa, Homo sapiens
MSARYEAGVNRPRVSLWCHFHVEPAGGSEQERSTYVCNKRQQILRLVSQWVALYGSMLHTDPVATSFLQKLSDLVGRDTRLSNLLREQWPERRRCHRLENGCGNASPQMKARNLPVWLPNQDEPLPGSSCAIQVGDKDAIGLQPDARGVATSLGLNERLFVVNPQEVHELIPHPDQLGPTVGSAEGLDLVSAKDLAGQLTDHDWSLFNSIHQVELIHYVLGPQHLRDVTTANLERFMRRFNELQYWVATELCLCPVPGPRAQLLRKFIKLAAHLKEQKNLNSFFAVMFGLSNSAISRLAHTWERLPHKVRKLYSALERLLDPSWNHRVYRLALAKLSPPVIPFMPLLLKDMTFIHEGNHTLVENLINFEKMRMMARAARMLHHCRSHNPVPLSPLRSRVSHLHEDSQVARISTCSEQSLSTRSPASTWAYVQQLKVIDNQRELSRLSRELEP

SEQ ID NO: 798288 - protein, 166 aa, Homo sapiens [sequence omitted]

SEQ ID NO: 798289 - protein, 923 aa, Homo sapiens
MKVGWPGESCWQVGLAVEDSPALGAPRVGALPDVVPEGTLLNMVLRRMHRPRSCSYQLLLEHQRPSCIQGLRWTPLTNSEESLDFSESLEQASTERVLRAGRQLHRHLLATCPNLIRDRKYHLRLYRQCCSGRELVDGILALGLGVHSRSQVVGICQVLLDEGALCHVKHDWAFQDRDAQFYRFPGPEPEPVGTHEMEEELAEAVALLSQRGPDALLTVALRKPPGQRTDEELDLIFEELLHIKAVAHLSNSVKRELAAVLLFEPHSKAGTVLFSQGDKGTSWYIIWKGSVNVVTHGKGLVTTLHEGDDFGQLALVNDAPRAATIILREDNCHFLRVDKQDFNRIIKDVEAKTMRLEEHGKVVLVLERASQGAGPSRPPTPGRNRYTVMSGTPEKILELLLEAMGPDSSAHDPTETFLSDFLLTHRVFMPSAQLCAALLHHFHVEPAGGSEQERSTYVCNKRQQILRLVSQWVALYGSMLHTDPVATSFLQKLSDLVGRDTRLSNLLREQWPERRRCHRLENGCGNASPQMKARNLPVWLPNQDEPLPGSSCAIQVGDKVPYDICRPDHSVLTLQLPVTASVREVMAALAQEDGWTKGQVLVKVNSAGDAIGLQPDARGVATSLGLNERLFVVNPQEVHELIPHPDQLGPTVGSAEGLDLVSAKDLAGQLTDHDWSLFNSIHQVELIHYVLGPQHLRDVTTANLERFMRRFNELQYWVATELCLCPVPGPRAQLLRKFIKLAAHLKEQKNLNSFFAVMFGLSNSAISRLAHTWERLPHKVRKLYSALERLLDPSWNHRVYRLALAKLSPPVIPFMPLLLKDMTFIHEGNHTLVENLINFEKMRMMARAARMLHHCRSHNPVPLSPLRSRVSHLHEDSQVARISTCSEQSLSTRSPASTWAYVQQLKVIDNQRELSRLSRELEP

SEQ ID NO: 798290 - protein, 768 aa, Homo sapiens
SSPPPRLGLCPPVKHDWAFQDRDAQFYRFPGPEPEPVGTHEMEEELAEAVALLSQRGPDALLTVALRKPPGQRTDEELDLIFEELLHIKAVAHLSNSVKRELAAVLLFEPHSKAGTVLFSQGDKGTSWYIIWKGSVNVVTHGKGLVTTLHEGDDFGQLALVNDAPRAATIILREDNCHFLRVDKQDFNRIIKDVEAKTMRLEEHGKVVLVLERASQGAGPSRPPTPGRNRYTVMSGTPEKILELLLEAMGPDSSAHDPTETFLSDFLLTHRVFMPSAQLCAALLHHFHVEPAGGSEQERSTYVCNKRQQILRLVSQWVALYGSMLHTDPVATSFLQKLSDLVGRDTRLSNLLREQWPERRRCHRLENGCGNASPQMKARNLPVWLPNQDEPLPGSSCAIQVGDKVPYDICRPDHSVLTLQLPVTASVREVMAALAQEDGWTKGQVLVKVNSAGDAIGLQPDARGVATSLGLNERLFVVNPQEVHELIPHPDQLGPTVGSAEGLDLVSAKDLAGQLTDHDWSLFNSIHQVELIHYVLGPQHLRDVTTANLERFMRRFNELQYWVATELCLCPVPGPRAQLLRKFIKLAAHLKEQKNLNSFFAVMFGLSNSAISRLAHTWERLPHKVRKLYSALERLLDPSWNHRVYRLALAKLSPPVIPFMPLLLKDMTFIHEGNHTLVENLINFEKMRMMARAARMLHHCRSHNPVPLSPLRSRVSHLHEDSQVARISTCSEQSLSTRSPASTWAYVQQLKVIDNQRELSRLSRELEP

SEQ ID NO: 798291 - protein, 939 aa, Homo sapiens
MKVGWPGESCWQVGLAVEDSPALGAPRVGALPDVVPEGTLLNMVLRRMHRPRSCSYQLLLEHQRPSCIQGLRWTPLTNSEESLDFSESLEQASTERVLRAGRQLHRHLLATCPNLIRDRKYHLRLYRQCCSGRELVDGILALGLGVHSRSQVVGICQVLLDEGALCHVKHDWAFQDRDAQFYRFPGPEPEPVGTHEMEEELAEAVALLSQRGPDALLTVALRKPPGQRTDEELDLIFEELLHIKAVAHLSNSVKRELAAVLLFEPHSKAGTVLFSQGDKGTSWYIIWKGSVNVVTHGKGLVTTLHEGDDFGQLALVNDAPRAATIILREDNCHFLRVDKQDFNRIIKDVEAKTMRLEEHGKVVLVLERASQGAGPSRPPTPGRNRYTVMSGTPEKILELLLEAMGPDSSAHDPTETFLSDFLLTHRVFMPSAQLCAALLHHFHVEPAGGSEQERSTYVCNKRQQILRLVSQWVALYGSMLHTDPVATSFLQKLSDLVGRDTRLSNLLREQWPERRRCHRLENGCGNASPQMKARNLPVWLPNQDEPLPGSSCAIQVGDKVPYDICRPDHSVLTLQLPVTASVREVMAALAQEDGWTKGQVLVKVNSAGDAIGLQPDARGVATSLGLNERLFVVNPQEVHELIPHPDQLGPTVGSAEGLDLVSAKDLAGQLTDHDWSLFNSIHQVELIHYVLGPQHLRDVTTANLERFMRRFNELQYWVATELCLCPVPGPRAQLLRKFIKLAAHLKEQKNLNSFFAVMFGLSNSAISRLAHTWERLPHKVRKLYSALERLLDPSWNHRVYRLALAKLSPPVIPFMPLLLKDMTFIHEGNHTLVENLINFEKMRMMARAARMLHHCRSHNPVPLSPLRSRVSHLHEDSQVARISTCSEQSLSTRSPASTWAALAIILIFSKLMRFSTECVVSLMNEGHAFEKKGHEGDVA

SEQ ID NO: 798292 - protein, 109 aa, Homo sapiens
MPLLLKDMTFIHEGNHTLVENLINFEKMRMMARAARMLHHCRSHNPVPLSPLRSRVSHLHEDSQVARISTCSEQSLSTRSPASTWAYVQQLKVIDNQRELSRLSRELEP

SEQ ID NO: 798293 - protein, 435 aa, Homo sapiens
MDTASHSLVLLQQLNMQREFGFLCDCTVAIGDVYFKAHRAVLAAFSNYFKMIFIHQTSECIKIQPTDIQPDIFSYLLHIMYTGKGPKQIVDHSRLEEGIRFLHADYLSHIATEMNQVFSPETVQSSNLYGIQISTTQKTVVKQGLEVKEAPSSNSGNRAAVQGDHPQLQLSLAIGLDDGTADQQRACPATQALEEHQKPPVSIKQERCDPESVISQSHPSPSSEVTGPTFTENSVKIHLCHYCGERFDSRSNLRQHLHTHVSGSLPFGVPASILESNDLGEVHPLNENSEALECRRLSSFIVKENEQQPDHTNRGTTEPLQISQVSLISKDTEPVELNCNFSFSRKRKMSCTICGHKFPRKSQLLEHMYTHKGKSYRYNRCQRFGNALAQRFQPYCDSWSDVSLKSSRLSQEHLDLPCALESELTQENVDTILVE

SEQ ID NO: 798294 - protein, 131 aa, Homo sapiens
VIWISDSFFSRSLSVSCFKVISSFRTSTGLIIFSILAHSAHSAASSRSASSSSSTFSLRTSILERLWVSGDGMSLWGRIPGDPIHVMWTSYHMILPFWSQLIGPEMDDGHPTCKTTQPITSLVQGPHLARS

SEQ ID NO: 798295 - protein, 114 aa, Homo sapiens
MGWTMRLVTAALLLGLMMVVTGDEDENSPCAHEALLDEDTLFCQGLEVFYPELGNIGCKVVPDCNNYRQKITSWMEPIVKFPGAVDTVCLGHRAGFPRGPGEYPRGVFICMHES

SEQ ID NO: 798296 - protein, 227 aa, Homo sapiens
MGWTMRLVTAALLLGLMMVVTGDEDENSPCAHEALLDEDTLFCQGLEVFYPELGNIGCKVVPDCNNYRQKITSWMEPIVKFPGAVDGATYILVMVDPDAPSRAEPRQRFWRHWLVTDIKGADLKKGKIQGQELSAYQAPSPPAHSGFHRYQFFVYLQEGKVISLLPKENKTRGSWKMDRFLNRFHLGEPEASTQFMTQNYQDSPTLQAPRERASEPKHKNQAEIAAC

SEQ ID NO: 798297 - protein, 216 aa, Homo sapiens
HLNTELFVTTIMRPSNSPCAHEALLDEDTLFCQGLEVFYPELGNIGCKVVPDCNNYRQKITSWMEPIVKFPGAVDGATYILVMVDPDAPSRAEPRQRFWRHWLVTDIKGADLKKGKIQGQELSAYQAPSPPAHSGFHRYQFFVYLQEGKVISLLPKENKTRGSWKMDRFLNRFHLGEPEASTQFMTQNYQDSPTLQAPRERASEPKHKNQAEIAAC

SEQ ID NO: 798298 - protein, 241 aa, Homo sapiens
DPAALKFFLFQVVPMGWTMRLVTAALLLGLMMVVTGDEDENSPCAHEALLDEDTLFCQGLEVFYPELGNIGCKVVPDCNNYRQKITSWMEPIVKFPGAVDGATYILVMVDPDAPSRAEPRQRFWRHWLVTDIKGADLKKGKIQGQELSAYQAPSPPAHSGFHRYQFFVYLQEGKVISLLPKENKTRGSWKMDRFLNRFHLGEPEASTQFMTQNYQDSPTLQAPRERASEPKHKNQAEIAAC

SEQ ID NO: 798299 - protein, 227 aa, Homo sapiens; identical to SEQ ID NO: 798296

SEQ ID NO: 798300 - protein, 238 aa, Homo sapiens
VVPGYRCHHVPMGWTMRLVTAALLLGLMMVVTGDEDENSPCAHEALLDEDTLFCQGLEVFYPELGNIGCKVVPDCNNYRQKITSWMEPIVKFPGAVDGATYILVMVDPDAPSRAEPRQRFWRHWLVTDIKGADLKKGKIQGQELSAYQAPSPPAHSGFHRYQFFVYLQEGKVISLLPKENKTRGSWKMDRFLNRFHLGEPEASTQFMTQNYQDSPTLQAPRERASEPKHKNQAEIAAC

SEQ ID NO: 798301 - protein, 337 aa, Homo sapiens
LGRRRRRRAAAGLQPPGQLAATQKLRQGSPGRTWAQERTRALHCSRCPFRISIAPRARRPMSRRRAEPGCGGSGRRAGAPGEGRGRRRYAPGPAAKALPRRRLALQSQVPMGWTMRLVTAALLLGLMMVVTGDEDENSPCAHEALLDEDTLFCQGLEVFYPELGNIGCKVVPDCNNYRQKITSWMEPIVKFPGAVDGATYILVMVDPDAPSRAEPRQRFWRHWLVTDIKGADLKKGKIQGQELSAYQAPSPPAHSGFHRYQFFVYLQEGKVISLLPKENKTRGSWKMDRFLNRFHLGEPEASTQFMTQNYQDSPTLQAPRERASEPKHKNQAEIAAC

SEQ ID NO: 798302 - protein, 227 aa, Homo sapiens; identical to SEQ ID NO: 798296

SEQ ID NO: 798303 - protein, 72 aa, Homo sapiens
RALAGAGSSSNRRAGPLPTATSCPHRRAAGRASLPHRTTEEEVGFHSVTQAGVQWCDHSGDYKCAPHACLRT

SEQ ID NO: 798304 - protein, 232 aa, Homo sapiens
MEVLREKVEEEEEAEREEAAEWAEWARMEKMMRPVEVRKEEITLKQETLRDLEKKLSEIQITVSAELPAFTKDTIDISKLPISYKTNTPKEEHLLQVADNFSRQYSHLCPDRVPLFLHPLNECEVPKFVSTTLRPTLMPYPELYNWDSCAQFVSDFLTMVPLPDPLKPPRTCTPQTTVLKYQKGNCFDFSTLLCSMLIGSGYDAYCVNGYGSLDLCHMDLTREVCPLTVKPK

SEQ ID NO: 798305 - protein, 232 aa, Homo sapiens; identical to SEQ ID NO: 798304

SEQ ID NO: 798306 - protein, 232 aa, Homo sapiens; identical to SEQ ID NO: 798304

SEQ ID NO: 798307 - protein, 82 aa, Homo sapiens
CRYRLLKVKRKNKDGGCDNPMKCLGLGPEGSQLHPRLTGNQQSKPGSHQLNPEVGMLQSLQNRVKEESRNRRHWLHENRARL

SEQ ID NO: 798308 - protein, 179 aa, Homo sapiens
LPHPRHFQDSHPKATAPGFAPAFGTEEDGSLSQPGQSFPGLDGKKDFPRRRAGPDALGPGPFGRKRRKSRTAFTAQQVLELERRFVFQKYLAPSERDGLATRLGLANAQVVTWFQNRRAKLKRDVEEMRADVASLRALSPEVLCSLALPEGAPDPGLCLGPAGPDSRPHLSDEEIQVDD

SEQ ID NO: 798309 - protein, 355 aa, Homo sapiens
MGCRQSSEEKEAARRSRRIDRHLRSESQRQRREIKLLLLGTSNSGKSTIVKQMKIIHSGGFNLEACKEYKPLIIYNAIDSLTRIIRALAALRIDFHNPDRAYDAVQLFALTGPAESKGEITPELLGVMRRLWADPGAQACFSRSSEYHLEDNAAYYLNDLERIAAADYIPTVEDILRSRDMTTGIVENKFTFKELTFKMVDVGGQRSERKKWIHCFEGVTAIIFCVELSGYDLKLYEDNQTSRMAESLRLFDSICNNNWFINTSLILFLNKKDLLAEKIRRIPLTICFPEYKGQNTYEEAAVYIQRQFEDLNRNKETKEIYSHFTCATDTSNIQFVFDAVTDVIIQNNLKYIGLC

SEQ ID NO: 798310 - protein, 355 aa, Homo sapiens; identical to SEQ ID NO: 798309

SEQ ID NO: 798311 - protein, 90 aa, Homo sapiens
RPRLLPPPGNQGPSPSLLCSRDRSPQPRATGEAGAGAVGPAHRGGYPAGSPLLCGNRREDSARSPDKAWRISPARNLVGRQLRGCGPGYS

SEQ ID NO: 798312 - protein, 90 aa, Homo sapiens; identical to SEQ ID NO: 798311

SEQ ID NO: 798313 - protein, 262 aa, Homo sapiens
MGKTFSQLGSWREDENKSILSSKPAIGSKAVNYSSTGSSKSFCSCVPCEGTADASFVTCPTCQGSGKIPQELEKQLVALIPYGDQRLKPKHTKLFVFLAVLICLVTSSFIVFFLFPRSVIVQPAGLNSSTVAFDEADIYLNITNILNISNGNYYPIMVTQLTLEVLHLSLVVGQVSNNLLLHIGPLASEQMFYAVATKIRDENTYKICTWLEIKVHHVLLHIQGTLTCSYLSHSEQLVFQSYEYVDCRGNASVPHQLTPHPP

SEQ ID NO: 798314 - protein, 223 aa, Homo sapiens [sequence omitted]

SEQ ID NO: 798315 - protein, 124 aa, Homo sapiens
NWKKKFQKGVHRGEKSPGSTDLQTTTELSGECGETASHPDLTRNPHTPATLLLIQPERTPTPPPGGPPSWCWPVAEAVHGIPQVATAPHPPPSTLEGPSVADTMARFLFPTPVGLASDRSSSLH

SEQ ID NO: 798316 - protein, 104 aa, Homo sapiens
MEMMLDKKQIQVIFLFKFKMGHKAAETTRSINNAFGPEIANKGTVQWWFKNFCKGDESREDEECCARPSKVGNDQLRAIIEADPLTTLEVAENSTSTILRSFSI

SEQ ID NO: 798317 - protein, 104 aa, Homo sapiens; identical to SEQ ID NO: 798316

SEQ ID NO: 798318 - protein, 926 aa, Homo sapiens
MTTKDYPSLWGFGTTKTFKIPIEHLDFKYIEKCSDVKHLEKILCVLRSGEEGYYPELTEFCEKHLQALAPESRALRKDKPAATAASFTAEEWEKIDGDIKSWVSEIKKEEDKMHFHETETFPAMKDNLPPVRGSNSCLHVGKEKYSKRPTKKKTPRDYAEWDKFDVEKECLKIDEDYKEKTVIDKSHLSKIETRIDTAGLTEKEKDFLATREKEKGNEAFNSGDYEEAVMYYTRSISALPTVVAYNNRAQAEIKLQNWNSAFQDCEKVLELEPGNVKALLRRATTYKHQNKLREATEDLSKVLDVEPDNDLAKKTLSEVERDLKNSEAASETQTKGKRMVIQEIENSEDEEGKSGRKHEDGGGDKKPAEPAGAARAAQPCVMGNIQKKLTGKAEGGKRPARGAPQRGQTPEAGADKRSPRRASAAAAAGGGATGHPGGGQGAENPAGLKSQGNELFRSGQFAEAAGKYSAAIALLEPAGSEIADDLSILYSNRAACYLKEGNCSGCIQDCNRALELHPFSMKPLLRRAMAYETLEQYGKAYVDYKTVLQIDCGLQLANDSVNRLSRILMELDGPNWREKLSPIPAVPASVPLQAWHPAKEMISKQAGDSSSHRQQGITDEKTFKALKEEGNQCVNDKNYKDALSKYSECLKINNKECAIYTNRALCYLKLCQFEEAKQDCDQALQLADGNVKAFYRRALAHKGLKNYQKSLIDLNKVILLDPSIIEAKMELEEVTRLLNLKDKTAPFNKEKERRKIEIQEVNEGKEEPGRPAGEVSTGCLASEKGGKSSRSPEDPEKLPIAKPNNAYEFGQIINALSTRKDKEACAHLLAITAPKDLPMFLSNKLEGDTFLLLIQSLKNNLIEKDPSLVYQHLLYLSKAERFKMMLTLISKGQKELIEQLFEDLSDTPNNHFTLEDIQALKRQYEL

SEQ ID NO: 798319 - protein, 941 aa, Homo sapiens
VRRPRLPRRGALRSTMTTKDYPSLWGFGTTKTFKIPIEHLDFKYIEKCSDVKHLEKILCVLRSGEEGYYPELTEFCEKHLQALAPESRALRKDKPAATAASFTAEEWEKIDGDIKSWVSEIKKEEDKMHFHETETFPAMKDNLPPVRGSNSCLHVGKEKYSKRPTKKKTPRDYAEWDKFDVEKECLKIDEDYKEKTVIDKSHLSKIETRIDTAGLTEKEKDFLATREKEKGNEAFNSGDYEEAVMYYTRSISALPTVVAYNNRAQAEIKLQNWNSAFQDCEKVLELEPGNVKALLRRATTYKHQNKLREATEDLSKVLDVEPDNDLAKKTLSEVERDLKNSEAASETQTKGKRMVIQEIENSEDEEGKSGRKHEDGGGDKKPAEPAGAARAAQPCVMGNIQKKLTGKAEGGKRPARGAPQRGQTPEAGADKRSPRRASAAAAAGGGATGHPGGGQGAENPAGLKSQGNELFRSGQFAEAAGKYSAAIALLEPAGSEIADDLSILYSNRAACYLKEGNCSGCIQDCNRALELHPFSMKPLLRRAMAYETLEQYGKAYVDYKTVLQIDCGLQLANDSVNRLSRILMELDGPNWREKLSPIPAVPASVPLQAWHPAKEMISKQAGDSSSHRQQGITDEKTFKALKEEGNQCVNDKNYKDALSKYSECLKINNKECAIYTNRALCYLKLCQFEEAKQDCDQALQLADGNVKAFYRRALAHKGLKNYQKSLIDLNKVILLDPSIIEAKMELEEVTRLLNLKDKTAPFNKEKERRKIEIQEVNEGKEEPGRPAGEVSTGCLASEKGGKSSRSPEDPEKLPIAKPNNAYEFGQIINALSTRKDKEACAHLLAITAPKDLPMFLSNKLEGDTFLLLIQSLKNNLIEKDPSLVYQHLLYLSKAERFKMMLTLISKGQKELIEQLFEDLSDTPNNHFTLEDIQALKRQYEL

SEQ ID NO: 798320 - protein, 884 aa, Homo sapiens
VRRPRLPRRGALRSTMTTKDYPSLWGFGTTKTFKIPIEHLDFKYIEKCSDVKHLEKILCVLRSGEEGYYPELTEFCEKHLQALAPESRALRKDKPAATAASFTAEEWEKIDGDIKSWVSEIKKEEDKMHFHETETFPAMKDNLPPVRGSNSCLHVGKEKYSKRPTKKKTPRDYAEWDKFDVEKECLKIDEDYKEKTVIDKSHLSKIETRIDTAGLTEKEKDFLATREKEKGNEAFNSGDYEEAVMYYTRSISALPTVVAYNNRAQAEIKLQNWNSAFQDCEKVLELEPGNVKALLRRATTYKHQNKLREATEDLSKVLDVEPDNDLAKKTLSEVERDLKNSEAASETQTKGKRMVIQEIENSEDEEGKSGRKHEDGGGDEDAAAAAGGGATGHPGGGQGAENPAGLKSQGNELFRSGQFAEAAGKYSAAIALLEPAGSEIADDLSILYSNRAACYLKEGNCSGCIQDCNRALELHPFSMKPLLRRAMAYETLEQYGKAYVDYKTVLQIDCGLQLANDSVNRLSRILMELDGPNWREKLSPIPAVPASVPLQAWHPAKEMISKQAGDSSSHRQQGITDEKTFKALKEEGNQCVNDKNYKDALSKYSECLKINNKECAIYTNRALCYLKLCQFEEAKQDCDQALQLADGNVKAFYRRALAHKGLKNYQKSLIDLNKVILLDPSIIEAKMELEEVTRLLNLKDKTAPFNKEKERRKIEIQEVNEGKEEPGRPAGEVSTGCLASEKGGKSSRSPEDPEKLPIAKPNNAYEFGQIINALSTRKDKEACAHLLAITAPKDLPMFLSNKLEGDTFLLLIQSLKNNLIEKDPSLVYQHLLYLSKAERFKMMLTLISKGQKELIEQLFEDLSDTPNNHFTLEDIQALKRQYEL

SEQ ID NO: 798321 - protein, 857 aa, Homo sapiens
VRRPRLPRRGALRSTMTTKDYPSLWGFGTTKTFKIPIEHLDFKYIEKCSDVKHLEKILCVLRSGEEGYYPELTEFCEKHLQALAPESRALRKDKPAATAASFTAEEWEKIDGDIKSWVSEIKKEEDKMHFHETETFPAMKDNLPPVRGSNSCLHVGKEKYSKRPTKKKTPRDYAEWDKFDVEKECLKIDEDYKEKTVIDKSHLSKIETRIDTAGLTEKEKDFLATREKEKGNEAFNSGDYEEAVMYYTRSISALPTVVAYNNRAQAEIKLQNWNSAFQDCEKVLELEPGNVKALLRRATTYKHQNKLREATEDLSKVLDVEPDNDLAKKTLSEVERDLKNSEAASETQTKGKRMVIQEIENSEDEEGKSGRKHEDGGGDKKPAEPAGAARAAQPCVMGNIQKKLTGKAEGGKRPARGAPQRGQTPEAGADKRSPRRASAAAAAGGGATGHPGGGQGAENPAGLKSQGNELFRSGQFAEAAGKYSAAIALLEPAGYQEFYMELDGPNWREKLSPIPAVPASVPLQAWHPAKEMISKQAGDSSSHRQQGITDEKTFKALKEEGNQCVNDKNYKDALSKYSECLKINNKECAIYTNRALCYLKLCQFEEAKQDCDQALQLADGNVKAFYRRALAHKGLKNYQKSLIDLNKVILLDPSIIEAKMELEEVTRLLNLKDKTAPFNKEKERRKIEIQEVNEGKEEPGRPAGEVSTGCLASEKGGKSSRSPEDPEKLPIAKPNNAYEFGQIINALSTRKDKEACAHLLAITAPKDLPMFLSNKLEGDTFLLLIQSLKNNLIEKDPSLVYQHLLYLSKAERFKMMLTLISKGQKELIEQLFEDLSDTPNNHFTLEDIQALKRQYEL

SEQ ID NO: 798322 - protein, 424 aa, Homo sapiens
MVCNIFVFFRALELHPFSMKPLLRRAMAYETLEQYGKAYVDYKTVLQIDCGLQLANDSVNRLSRILMELDGPNWREKLSPIPAVPASVPLQAWHPAKEMISKQAGDSSSHRQQGITDEKTFKALKEEGNQCVNDKNYKDALSKYSECLKINNKECAIYTNRALCYLKLCQFEEAKQDCDQALQLADGNVKAFYRRALAHKGLKNYQKSLIDLNKVILLDPSIIEAKMELEEVTRLLNLKDKTAPFNKEKERRKIEIQEVNEGKEEPGRPAGEVSTGCLASEKGGKSSRSPEDPEKLPIAKPNNAYEFGQIINALSTRKDKEACAHLLAITAPKDLPMFLSNKLEGDTFLLLIQSLKNNLIEKDPSLVYQHLLYLSKAERFKMMLTLISKGQKELIEQLFEDLSDTPNNHFTLEDIQALKRQYEL

SEQ ID NO: 798323 - protein, 845 aa, Homo sapiens
VRRPRLPRRGALRSTMTTKDYPSLWGFGTTKTFKIPIEHLDFKYIEKCSDVKHLEKILCVLRSGEEGYYPELTEFCEKHLQALAPESRALRKDKPAATAASFTAEEWEKIDGDIKSWVSEIKKEEDKMHFHETETFPAMKDNLPPVRGSNSCLHVGKEKYSKRPTKKKTPRDYAEWDKFDVEKECLKIDEDYKEKTVIDKSHLSKIETRIDTAGLTEKEKDFLATREKEKGNEAFNSGDYEEAVMYYTRSISALPTVVAYNNRAQAEIKLQNWNSAFQDCEKVLELEPGNVKALLRRATTYKHQNKLREATEDLSKVLDVEPDNDLAKKTLSEVERDLKNSEAASETQTKGKRMVIQEIENSEDEEGKSGRKHEDGGGDEDAAAAAGGGATGHPGGGQGAENPAGLKSQGNELFRSGQFAEAAGKYSAAIALLEPAGSEIADDLSILYSNRAACYLKEGNCSGCIQDCNRALELHPFSMKPLLRRAMAYETLEQYGKAYVDYKTVLQIDCGLQLANDSVNRLSRILMELDGPNWREKLSPIPAVPASVPLQAWHPAKEMISKQAGDSSSHRQQGITDEKTFKALKEEGNQCVNDKNYKDALSKYSECLKINNKECAIYTNRALCYLKLCQFEEAKQDCDQALQLADGNVKAFYRRALAHKGLKNYQKSLIDLNKVILLDPSIIEAKMELEEVTRLLNLKDKTAPFNKEKERRKIEIQEVNEGKEEPGRPAGEVSTGCLASEKGGKSSRSPEDPEKLPIAKPNNAYEFGQIINALSTRKDKEACAHLLAITAPKDLPMFLSNKLEGDTFLLLIQSLKNNLIEKDPSLVYQHLLYLSKAERFKFTTF

SEQ ID NO: 798324 - protein, 69 aa, Homo sapiens
GLSSLVGVTWGLAIFTPLGLSTVYIFALFNSLQGVFICCWFTILYLPSQSTTVSSSTARLDQAHSASQE

SEQ ID NO: 798325 - protein, 444 aa, Homo sapiens
ALTHSLVLHYGLYKKMIVFKPYQASQHDMCRFHYGAGHPMKPHRLALTHSLVLHYGLYKKMIVFKPYQASQHDMCRFHSEDYIDFLQRVSPTNMQGFTKSLNAFNVGDDCPVFPGLFEFCSRYTGASLQGATQLNNKICDIAINWAGGLHHAKKFEASGFCYVNDIVIGILELLKYHPRVLYIDIDIHHGDGVQEAFYLTDRVMTVSFHKYGNYFFPGTGDMYEVGAESGRYYCLNVPLRDGIDDQSYKHLFQPVINQVVDFYQPTCIVLQCGADSLGCDRLGCFNLSIRGHGECVEYVKSFNIPLLVLGGGGYTVRNVARCWTYETSLLVEEAISEELPYSEYFEYFAPDFTLHPDVSTRIENQNSRQYLDQIRQTIFENLKMLNHAPSVQIHDVPADLLTYDRTDEADAEERGPEENYSRPEAPNEFYDGDHDNDKESDVEI

SEQ ID NO: 798326 - protein, 223 aa, Homo sapiens
MYEVGAESGRYYCLNVPLRDGIDDQSYKHLFQPVINQVVDFYQPTCIVLQCGADSLGCDRLGCFNLSIRGHGECVEYVKSFNIPLLVLGGGGYTVRNVARCWTYETSLLVEEAISEELPYSEYFEYFAPDFTLHPDVSTRIENQNSRQYLDQIRQTIFENLKMLNHAPSVQIHDVPADLLTYDRTDEADAEERGPEENYSRPEAPNEFYDGDHDNDKESDVEI

SEQ ID NO: 798327 - protein, 371 aa, Homo sapiens
MCRFHSEDYIDFLQRVSPTNMQGFTKSLNAFNVGDDCPVFPGLFEFCSRYTGASLQGATQLNNKICDIAINWAGGLHHAKKFEASGFCYVNDIVIGILELLKYHPRVLYIDIDIHHGDGVQEAFYLTDRVMTVSFHKYGNYFFPGTGDMYEVGAESGRYYCLNVPLRDGIDDQSYKHLFQPVINQVVDFYQPTCIVLQCGADSLGCDRLGCFNLSIRGHGECVEYVKSFNIPLLVLGGGGYTVRNVARCWTYETSLLVEEAISEELPYSEYFEYFAPDFTLHPDVSTRIENQNSRQYLDQIRQTIFENLKMLNHAPSVQIHDVPADLLTYDRTDEADAEERGPEENYSRPEAPNEFYDGDHDNDKESDVEI

SEQ ID NO: 798328 - protein, 97 aa, Homo sapiens
STHGTGWGWRRPRAAGGGGAGPAPAGTMAKTVAYFYDPDVGNFHYGAGHPMKPHRLALTHSLVLHYGLYKKMIVSSAASAGGWGVGRAVAVGIGGLD

SEQ ID NO: 798329 - protein, 426 aa, Homo sapiens
MARRGYFYTDVGRFHYGAGHPMKPHRLALTHSLVLHYGLYKKMIVFKPYQASQHDMCRFHSEDYIDFLQRVSPTNMQGFTKSLNAFNVGDDCPVFPGLFEFCSRYTGASLQGATQLNNKICDIAINWAGGLHHAKKFEASGFCYVNDIVIGILELLKYHPRVLYIDIDIHHGDGVQEAFYLTDRVMTVSFHKYGNYFFPGTGDMYEVGAESGRYYCLNVPLRDGIDDQSYKHLFQPVINQVVDFYQPTCIVLQCGADSLGCDRLGCFNLSIRGHGECVEYVKSFNIPLLVLGGGGYTVRNVARCWTYETSLLVEEAISEELPYSEYFEYFAPDFTLHPDVSTRIENQNSRQYLDQIRQTIFENLKMLNHAPSVQIHDVPADLLTYDRTDEADAEERGPEENYSRPEAPNEFYDGDHDNDKESDVEI

SEQ ID NO: 798330 - protein, 428 aa, Homo sapiens
MAKTVAYFYDPDVGNFHYGAGHPMKPHRLALTHSLVLHYGLYKKMIVFKPYQASQHDMCRFHSEDYIDFLQRVSPTNMQGFTKSLNAFNVGDDCPVFPGLFEFCSRYTGASLQGATQLNNKICDIAINWAGGLHHAKKFEASGFCYVNDIVIGILELLKYHPRVLYIDIDIHHGDGVQEAFYLTDRVMTVSFHKYGNYFFPGTGDMYEVGAESGRYYCLNVPLRDGIDDQSYKHLFQPVINQVVDFYQPTCIVLQCGADSLGCDRLGCFNLSIRGHGECVEYVKSFNIPLLVLGGGGYTVRNVARCWTYETSLLVEEAISEELPYSEYFEYFAPDFTLHPDVSTRIENQNSRQYLDQIRQTIFENLKMLNHAPSVQIHDVPADLLTYDRTDEADAEERGPEENYSRPEAPNEFYDGDHDNDKESDVEI

SEQ ID NO: 798331 - protein, 241 aa, Homo sapiens
MTVSFHKYGNYFFPGTGDMYEVGAESGRYYCLNVPLRDGIDDQSYKHLFQPVINQVVDFYQPTCIVLQCGADSLGCDRLGCFNLSIRGHGECVEYVKSFNIPLLVLGGGGYTVRNVARCWTYETSLLVEEAISEELPYSEYFEYFAPDFTLHPDVSTRIENQNSRQYLDQIRQTIFENLKMLNHAPSVQIHDVPADLLTYDRTDEADAEERGPEENYSRPEAPNEFYDGDHDNDKESDVEI

SEQ ID NO: 798332 - protein, 552 aa, Homo sapiens
MAKTVAYFYDPDVGNFHYGAGHPMKPHRLALTHSLVLHYGLYKKMIVFKPYQASQHDMCRFHSEDYIDFLQRVSPTNMQGFTKSLNAFNVGDDCPVFPGLFEFCSRYTGASLQGATQLNNKICDIAINWAGGLHHAKKFEASGFCYVNDIVIGILELLKYHPRVLYIDIDIHHGDGVQEAFYLTDRVMTVSFHKYGNYFFPGTGDMYEVGAESGRYYCLNVPLRDGIDDQSKYRSLPSVPRPLLFLLEITSSAWYCLLLGQLSLRMNGLQRDHESLENCMQHIMCMCIFLGKVIGFHQSLIAVWDPFQKFQTSDLILLGGPFPGLHARSTPFFLLFPVSPSPVGCQVPIFGPLPGYKHLFQPVINQVVDFYQPTCIVLQCGADSLGCDRLGCFNLSIRGHGECVEYVKSFNIPLLVLGGGGYTVRNVARCWTYETSLLVEEAISEELPYSEYFEYFAPDFTLHPDVSTRIENQNSRQYLDQIRQTIFENLKMLNHAPSVQIHDVPADLLTYDRTDEADAEERGPEENYSRPEAPNEFYDGDHDNDKESDVEI

SEQ ID NO: 798333 - protein, 434 aa, Homo sapiens
MAKTVAYFYDPDVGNFHYGAGHPMKPHRLALTHSLVLHYGLYKKMIVFKPYQASQHDMCRFHSEDYIDFLQRVSPTNMQGFTKSLNAFNVGDDCPVFPGLFEFCSRYTGASLQGATQLNNKICDIAINWAGGLHHAKKFEASGFCYVNDIVIGILELLKYHPRVLYIDIDIHHGDGVQEAFYLTDRVMTVSFHKYGNYFFPGTGDMYEVGAESGRYYCLNVPLRDGIDDQSYKHLFQPVINQVVDFYQPTCIVLQCGADSLGCDRLGCFNLSIRGHGECVEYVKSFNIPLLVLGGGGYTVRNVARCWTYETSLLVEEAISEELPYSEYFEYFAPDFTLHPDVSTRIENQNSRQYLDQIRQTIFENLKMLNHAPSVQIHDVPADLLTYDRTDEADAEERGPEENYSRSGSRDFSLLSIGLLGRFKREKVNGKVLV

SEQ ID NO: 798334 - protein, 154 aa, Homo sapiens
STHGTGWGWRRPRAAGGGGAGPAPAGTMAKTVAYFYDPDVGNFHYGAGHPMKPHRLALTHSLVLHYGLYKKMIVFKPYQASQHDMCRFHSEDYIDVELTLWAVIDWAALTSASEGMGNALNMSRASISLYSCWVVVVILSEMLPAAGHMRHRCW

SEQ ID NO: 798335 - protein, 157 aa, Homo sapiens
MVPFNRECVEYVKSFNIPLLVLGGGGYTVRNVARCWTYETSLLVEEAISEELPYSEYFEYFAPDFTLHPDVSTRIENQNSRQYLDQIRQTIFENLKMLNHAPSVQIHDVPADLLTYDRTDEADAEERGPEENYSRPEAPNEFYDGDHDNDKESDVEI

SEQ ID NO: 798336 - protein, 127 aa, Homo sapiens
MSRASISLYSCWVVVVILSEMLPAAEYFEYFAPDFTLHPDVSTRIENQNSRQYLDQIRQTIFENLKMLNHAPSVQIHDVPADLLTYDRTDEADAEERGPEENYSRPEAPNEFYDGDHDNDKESDVEI

SEQ ID NO: 798337 - protein, 280 aa, Homo sapiens
MAKTVAYFYDPDVGNFHYGAGHPMKPHRLALTHSLVLHYGLYKKMIVFKPYQASQHDMCRFHSEDYIDFLQRVSPTNMQGFTKSLNAFNVGDDCPVFPGLFEFCSRYTGASLQGATQLNNKICDIAINWAGGLHHAKKFEASGFCYVNDIVIGILELLKYHPRVLYIDIDIHHGDGVQEAFYLTDRVMTVSFHKYGNYFFPGTGDMYEVGAESGRYYCLNVPLRDGIDDQSYKHLFQPVINQVVDFYQPTCIVLQVILSVPPQECSAWAWGKRAREEEVL

SEQ ID NO: 798338 - protein, 79 aa, Homo sapiens
MGKRQLGDSMSWESLETAHSVFLISNQYLDQIRQTIFENLKMLNHAPSVQIHDVPADLLTYDRTDEADAEERGPEENYS

SEQ ID NO: 798339 - protein, 428 aa, Homo sapiens; identical to SEQ ID NO: 798330

SEQ ID NO: 798340 - protein, 428 aa, Homo sapiens; identical to SEQ ID NO: 798330

SEQ ID NO: 798341 - protein, 233 aa, Homo sapiens
STHGTGRGWRRPRAAGGGGAGPAPAGTMAKTVAYFYDPDVGNFHYGAGHPMKPHRLALTHSLVLHYGLYKKMIVFKPYQASQHDMCRFHSEDYIDFLQRVSPTNMQGFTKSLNAFNVGDDCPVFPGLFEFCSRYTGASLQGATQLNNKICDIAINWAGGLHHAKKFEASGFCYVNDIVIGILELLKYHPRVLYIDIDIHHGDGVQEAFYLTDRVMTVSFHKYGNYFFPGTGHV

SEQ ID NO: 798342 - protein, 428 aa, Homo sapiens; identical to SEQ ID NO: 798330

SEQ ID NO: 798343 - protein, 371 aa, Homo sapiens; identical to SEQ ID NO: 798327

SEQ ID NO: 798344 - protein, 280 aa, Homo sapiens; identical to SEQ ID NO: 798337

SEQ ID NO: 798345 - protein, 333 aa, Homo sapiens
STHGTGRGWRRPRAAGGGGAGPAPAGTMAKTVAYFYDPDVGNFHYGAGHPMKPHRLALTHSLVLHYGLYKKMIVFKPYQASQHDMCRFHSEDYIDFLQRVSPTNMQGFTKSLNAFNVGDDCPVFPGLFEFCSRYTGASLQGATQLNNKICDIAINWAGGLHHAKKFEASGFCYVNDIVIGILELLKYHPRVLYIDIDIHHGDGVQEAFYLTDRVMTVSFHKYGNYFFPGTGDMYEVGAESGRYYCLNVPLRDGIDDQSYKHLFQPVINQVVDFYQPTCIVLQCGADSLGCDRLGCFNLSIRGHGECVEYVKSFNIPLLVLGGGGYTVRNVARC

SEQ ID NO: 798346 - protein, 237 aa, Homo sapiens
MCRFHSEDYIDFLQRVSPTNMQGFTKSLNAFNVGDDCPVFPGLFEFCSRYTGASLQGATQLNNKCGADSLGCDRLGCFNLSIRGHGECVEYVKSFNIPLLVLGGGGYTVRNVARCWTYETSLLVEEAISEELPYSEYFEYFAPDFTLHPDVSTRIENQNSRQYLDQIRQTIFENLKMLNHAPSVQIHDVPADLLTYDRTDEADAEERGPEENYSRPEAPNEFYDGDHDNDKESDVEI

SEQ ID NO: 798347 - protein, 156 aa, Homo sapiens
APDPNCVTVTGLPENVEEAIDHILNLEEEYLLTCWTYETSLLVEEAISEELPYSEYFEYFAPDFTLHPDVSTRIENQNSRQYLDQIRQTIFENLKMLNHAPSVQIHDVPADLLTYDRTDEADAEERGPEENYSRPEAPNEFYDGDHDNDKESDVEI

SEQ ID NO: 798348 - protein, 329 aa, Homo sapiens
  misc_feature (328)..(329): Xaa can be any naturally occurring amino acid
STHGTGRGWRRPRAAGGGGAGPAPAGTMAKTVAYFYDPDVGNFHYGAGHPMKPHRLALTHSLVLHYGLYKKMIVFKPYQASQHDMCRFHSEDYIDFLQRVSPTNMQGFTKSLNAFNVGDDCPVFPGLFEFCSRYTGASLQGATQLNNKICDIAINWAGGLHHAKKFEASGFCYVNDIVIGILELLKYHPRVLYIDIDIHHGDGVQEAFYLTDRVMTVSFHKYGNYFFPGTGDMYEVGAESGRYYCLNVPLRDGIDDQSYKHLFQPVINQVVDFYQPTCIVLQCGADSLGCDRLGCFNLSIRGHGECVEYVKSFNIPLLVLGGGGYTIXX

SEQ ID NO: 798349 - protein, 240 aa, Homo sapiens
MAKTVAYFYDPDVGNFHYGAGHPMKPHRLALTHSLVLHYGLYKKMIVFKPYQASQHDMCRFHSEDYIDFLQRVSPTNMQGFTKSLNAFNVGDDCPVFPGLFEFCSRYTGASLQGATQLNNKICDIAINWAGGLHHAKKFEASGFCYVNDIVIGILELLKYHPRVLYIDIDIHHGDGVQEAFYLTDRVMTVSFHKYGNYFFPGTGDMYEVGAESGRYYCLNVPLRDGIDDQSKYRSLPSVP

SEQ ID NO: 798350 - protein, 248 aa, Homo sapiens
APAAQPVIALRPSPAPSAPHGGWSGRGKEKVRLGVITNPSPEGEETGIQQRRAAAGRSHLEMESRPTPSSSTSSSSSSFSSSHPGSLPKPLGLQPLPRPEVSFLTEYLRKLKACEGGGVEIAAASFPRIYLMGMCSRQDRIQKDIDVVIQKSRAEDCLFAGEFLLFQNLGPRAPFPVLRPRRVCLGQLLALRAEPAWPERGSRRRGSAWYFQPRVVPEACKHASWVPAAAAERGWLDPPGLRNGLSRR

SEQ ID NO: 798351 - protein, 168 aa, Homo sapiens
APAAQPVIALRPSPAPSAPHGGWSGRGKEKVRLGVITNPSPEGEETGIQQRRAAAGRSHLEMESRPTPSSSTSSSSSSFSSSHPGSLPKPLGLQPLPRPEVSFLTEYLRKLKACEGGGVEIAAASFPRIYLMGMCSRQDRIQKDIDVVIQKSRAEDCLFAGVKAILKA

SEQ ID NO: 798352 - protein, 172 aa, Homo sapiens
APAAQPVIALRPSPAPSAPHGGWSGRGKEKVRLGVITNPSPEGEETGIQQRRAAAGRSHLEMESRPTPSSSTSSSSSSFSSSHPGSLPKPLGLQPLPRPEVSFLTEYLRKLKACEGGGVEIAAASFPRIYLMGMCSRQDRIQKDIDVVIQKSRAEDCLFADFRYSDSTFTFT

SEQ ID NO: 798353 - protein, 487 aa, Homo sapiens
RSCCYCDLSGHGPGCCGCRGEMAEAEGVPTTPGPASGSTFRGRRDVSGSWERDQQVEAAQRALVEVLGPYEPLLSRVQAALVWERPARSALWCLGLNAAFWFFALTSLRLVFLLAFGLMIIVCIDQWKNKIWPEIKVPRPDALDNESWGFVHPRLLSVPELCHHVAEVWVSGTIFIRNVLLFKKQNPGKFCLLSCGILTFLAVLGRYVPGLLLSYLMLVTVMMWPLAVYHRLWDRAYVRLKPALQRLDFSVRGYMMSKQRERQLRRRALHPERAMDNHSDSEEELAAFCPQLDDSTVARELAITDSEHSDAEVSCTDNGTFNLSRGQTPLTEGSEDLDGHSDPEESFARDLPDFPSINMDPAGLDDEDDTSIGMPSLMYRSPPGAEEPQAPPASRDEAALPELLLGALPVGSNLTSNLASLVSQGMIQLALSGASQPGPSGAPAQRATRGFLRSPSSDLDTDAEGDDFELLDQSELSQLDPASSRSH

SEQ ID NO: 798354 - protein, 414 aa, Homo sapiens
  misc_feature (9)..(9): Xaa can be any naturally occurring amino acid
FRESKRQGXSLSSLYLNSDFNLVSQEESHASPPKHLGLVTPQTPFKTGSTGCLHSKMGGPSTPSFHSSPFSSHSWGFVHPRLLSVPELCHHVAEVWVSGTIFIRNVLLFKKQNPGKFCLLSCGILTFLAVLGRYVPGLLLSYLMLVTVMMWPLAVYHRLWDRAYVRLKPALQRLDFSVRGYMMSKQRERQLRRRALHPERAMDNHSDSEEELAAFCPQLDDSTVARELAITDSEHSDAEVSCTDNGTFNLSRGQTPLTEGSEDLDGHSDPEESFARDLPDFPSINMDPAGLDDEDDTSIGMPSLMYRSPPGAEEPQAPPASRDEAALPELLLGALPVGSNLTSNLASLVSQGMIQLALSGASQPGPSGAPAQRATRGFLRSPSSDLDTDAEGDDFELLDQSELSQLDPASSRSH

SEQ ID NO: 798355 - protein, 293 aa, Homo sapiens
RSCCYCDLSGHGPGCCGCRGEMAEAEGVPTTPGPASGSTFRGRRDVSGSWERDQQVEAAQRALVEVLGPYEPLLSRVQAALVWERPARSALWCLGLNAAFWFFALTSLRLVFLLAFGLMIIVCIDQWKNKIWPEIKVPRPDALDNESWGFVHPRLLSVPELCHHVAEVWVSGTIFIRNVLLFKKQNPGKFCLLSCGILTFLAVLGRYVPGLLLSYLMLVTVMMWPLAVYHRLWDRAYVRLKPALQRLDFSVRGYMMSKQRERQLRRRALHPERAMDNHSDSEEELAAFCPQVS

SEQ ID NO: 798356 - protein, 181 aa, Homo sapiens
RSCCYCDLSGHGPGCCGCRGEMAEAEGVPTTPGPASGSTFRGRRDVSGSWERDQQVEAAQRALVEVLGPYEPLLSRVQAALVWERPARSALWCLGLNAAFWFFALTSLRLVFLLAFGLMIIVCIDQWKNKIWPEIKVPRPDALDNERYGTLIKSLFVALIHSLVIFWLHVVNPMFWTHSVN

SEQ ID NO: 798357 - protein, 271 aa, Homo sapiens
MLVTVMMWPLAVYHRLWDRAYVRLKPALQRLDFSVRGYMMSKQRERQLRRRALHPERAMDNHSDSEEELAAFCPQLDDSTVARELAITDSEHSDAEVSCTDNGTFNLSRGQTPLTEGSEDLDGHSDPEESFARDLPDFPSINMDPAGLDDEDDTSIGMPSLMYRSPPGAEEPQAPPASRDEAALPELLLGALPVGSNLTSNLASLVSQGMIQLALSGASQPGPSGAPAQRATRGFLRSPSSDLDTDAEGDDFELLDQSELSQLDPASSRSH

SEQ ID NO: 798358 - protein, 170 aa, Homo sapiens
ALEDPSGALPSPLTEGSEDLDGHSDPEESFARDLPDFPSINMDPAGLDDEDDTSIGMPSLMYRSPPGAEEPQAPPASRDEAALPELLLGALPVGSNLTSNLASLVSQGMIQLALSGASQPGPSGAPAQRATRGFLRSPSSDLDTDAEGDDFELLDQSELSQLDPASSRSH

SEQ ID NO: 798359 - protein, 580 aa, Homo sapiens [sequence omitted]

SEQ ID NO: 798360 - protein, 715 aa, Homo sapiens [sequence omitted]

SEQ ID NO: 798361 - protein, 715 aa, Homo sapiens [sequence omitted]

SEQ ID NO: 798362 - protein, 468 aa, Homo sapiens
MAKLYMVSDASGSMRVTVVAEENPFSMAMLLSEECFILDHGAAKQIFVWKGKDANPQERKAAMKTAEEFLQQMNYSKNTQIQVLPEGGETPIFKQFFKDWRDKDQSDGFGKVYVTEKVAQIKQIPFDASKLHSSPQMAAQHNMVDDGSGKVEIWRVENNGRIQVDQNSYGEFYGGDCYIILYTYPRGQIIYTWQGANATRDELTTSAFLTVQLDRSLGGQAVQIRVSQGKEPVHLLSLFKDKPLIIYKNGTSKKGGQAPAPPTRLFQVRRNLASITRIVEVDVDANSLNSNDVFVLKLPQNSGYIWVGKGASQEEEKGAEYVASVLKCKTLRIQEGEEPEEFWNSLGGKKDYQTSPLLETQAEDHPPRLYGCSNKTGRFVIEEIPGEFTQDDLAEDDVMLLDAWEQIFIWIGKDANEVEKKESLKSAKMYLETDPSGRDKRTPIVIIKQGHEPPTFTGWFLGWDSSKW

SEQ ID NO: 798363 - protein, 344 aa, Homo sapiens
MARELYHEEFARAGKQAGLQVWRIEKLELVPVPQSAHGDFYVGDAYLVLHTAKTSRGFTYRLHFWLGKECSQDESTAAAIFTVQMDDYLGGKPVQNRELQGYESNDFVSYFKGGLKYKAGGVASGLNHVLTNDLTAKRLLHVKGRRVVRATEVPLSWDSFNKGDCFIIDLGTEIYQWCGSSCNKYERLKANQVATGIRYNERKGRSELIVVEEGSEPSELIKVLGEKPELPDGGDDDDIIADISNRKMAKLYMVSDASGSMRVTVVAEENPFSMAMLLSEECFILDHGAAKQIFVWKGKDANPQERKAAMKTAEEFLQQMNYSKNTQVCVKLNWLEKNRKHWSS

SEQ ID NO: 798364 - protein, 648 aa, Homo sapiens
MEGAGYRVVFEKGGVYLHTSAKKYQDRDSLIAGVIRVVEKDNDVLLHWAPVEEAGDSTQILFSKKDSSGGDSCASEEEPTFDPGYEPDWAVISTVRPQPCHSEPTRGAEPSCPQGSWAFSVSLGELKSIRRSKPGLSWAYLVLVTQAGGSLPALHFHRGGTRALLRVLSRYLLLASSPQDSRLYLVFPHDSSALSNSFHHLQLFDQDSSNVVSRFLQDPYSTTFSSFSRVTNFFRGALQPQPEGAASDLPPPPDDEPEPGFEVISCVELGPRPTVERGPPVTEEEWARHVGPEGRLQQVPELKNRIFSGGLSPSLRREAWKFLLGYLSWEGTAEEHKAHIRKKTDEYFRMKLQWKSVSPEQERRNSLLHGYRSLIERDVSRTDRTNKFYEGPENPGLGLLNDILLTYCMYHFDLGYVQGMSDLLSPILYVIQNEVDAFWCFCGFMELVQGNFEESQETMKRQLGRLLLLLRVLDPLLCDFLDSQDSGSLCFCFRWLLIWFKREFPFPDVLRLWEVLWTGLPGPNLHLLVACAILDMERDTLMLSGFGSNEILKHINELTMKLSVEDVLTRAEALHRQLTACPELPHNVQEILGLAPPAEPHSPSPTASPLPLSPTRAPPTPPPSTDTAPQPDSSLEILPEEEDEGADS

SEQ ID NO: 798365 - protein, 44 aa, Homo sapiens
MEGAGYRVSTEDAFPRFSVCETPRLVISSSLRPWLSRIRHGLGK

SEQ ID NO: 798366 - protein, 118 aa, Homo sapiens
MPVPKEHPGLWLIRLTLASHALPPTQCRLPRCRAQLPPGLLGLLSESGGAKVHPPLQARPQLGLPGSGDPGWRFPARTALPPRGHPRPAPRPQPLPAVGQVSSLPVLGLKPGPVPPWL

SEQ ID NO: 798367 - protein, 648 aa, Homo sapiens; identical to SEQ ID NO: 798364

SEQ ID NO: 798368 - protein, 650 aa, Homo sapiens
SPRWFPPTQVVFEKGGVYLHTSAKKYQDRDSLIAGVIRVVEKDNDVLLHWAPVEEAGDSTQILFSKKDSSGGDSCASEEEPTFDPGYEPDWAVISTVRPQPCHSEPTRGAEPSCPQGSWAFSVSLGELKSIRRSKPGLSWAYLVLVTQAGGSLPALHFHRGGTRALLRVLSRYLLLASSPQDSRLYLVFPHDSSALSNSFHHLQLFDQDSSNVVSRFLQDPYSTTFSSFSRVTNFFRGALQPQPEGAASDLPPPPDDEPEPGFEVISCVELGPRPTVERGPPVTEEEWARHVGPEGRLQQVPELKNRIFSGGLSPSLRREAWKFLLGYLSWEGTAEEHKAHIRKKTDEYFRMKLQWKSVSPEQERRNSLLHGYRSLIERDVSRTDRTNKFYEGPENPGLGLLNDILLTYCMYHFDLGYVQGMSDLLSPILYVIQNEVDAFWCFCGFMELVQGNFEESQETMKRQLGRLLLLLRVLDPLLCDFLDSQDSGSLCFCFRWLLIWFKREFPFPDVLRLWEVLWTGLPGPNLHLLVACAILDMERDTLMLSGFGSNEILKHINELTMKLSVEDVLTRAEALHRQLTACPELPHNVQEILGLAPPAEPHSPSPTASPLPLSPTRAPPTPPPSTDTAPQPDSSLEILPEEEDEGADS

SEQ ID NO: 798369 - protein, 659 aa, Homo sapiens
TTTKFAAAATYVKEPATWVVFEKGGVYLHTSAKKYQDRDSLIAGVIRVVEKDNDVLLHWAPVEEAGDSTQILFSKKDSSGGDSCASEEEPTFDPGYEPDWAVISTVRPQPCHSEPTRGAEPSCPQGSWAFSVSLGELKSIRRSKPGLSWAYLVLVTQAGGSLPALHFHRGGTRALLRVLSRYLLLASSPQDSRLYLVFPHDSSALSNSFHHLQLFDQDSSNVVSRFLQDPYSTTFSSFSRVTNFFRGALQPQPEGAASDLPPPPDDEPEPGFEVISCVELGPRPTVERGPPVTEEEWARHVGPEGRLQQVPELKNRIFSGGLSPSLRREAWKFLLGYLSWEGTAEEHKAHIRKKTDEYFRMKLQWKSVSPEQERRNSLLHGYRSLIERDVSRTDRTNKFYEGPENPGLGLLNDILLTYCMYHFDLGYVQGMSDLLSPILYVIQNEVDAFWCFCGFMELVQGNFEESQETMKRQLGRLLLLLRVLDPLLCDFLDSQDSGSLCFCFRWLLIWFKREFPFPDVLRLWEVLWTGLPGPNLHLLVACAILDMERDTLMLSGFGSNEILKHINELTMKLSVEDVLTRAEALHRQLTACPELPHNVQEILGLAPPAEPHSPSPTASPLPLSPTRAPPTPPPSTDTAPQPDSSLEILPEEEDEGADS

SEQ ID NO: 798370 - protein, 554 aa, Homo sapiens
MEGAGYRVVFEKGGVYLHTSAKKYQDRDSLIAGVIRVVEKDNDVLLHWAPVEEAGDSTQILFSKKDSSGGDSCASEEEPTFDPGYEPDWAVISTVRPQPCHSEPTRGAEPSCPQGSWAFSVSLGELKSIRRSKPGLSWAYLVLVTQAGGSLPALHFHRGGTRALLRVLSRYLLLASSPQDSRLYLVFPHDSSALSNSFHHLQLFDQDSSNVVSRFLQDPYSTTFSSFSRVTNFFRGALQPQPEGAASDLPPPPDDEPEPGFEVISCVELGPRPTVERGPPVTEEEWARHVGPEGRLQQVPELKNRIFSGGLSPSLRREAWKFLLGYLSWEGTAEEHKAHIRKKTDEYFRMKLQWKSVSPEQERRNSLLHGYRSLIERDVSRTDRTNKFYEGPENPGLGLLNDILLTYCMYHFDLGYVQGMSDLLSPILYVIQNEVDAFWCFCGFMELVQGNFEESQETMKRQLGRLLLLLRVLDPLLCDFLDSQDSGSLCFCFRWLLIWFKREFPFPDVLRLWEVGQPVWARGLKGWAHLPWEVGRRGTDPGGTSGPGWAMTSL

SEQ ID NO: 798371 - protein, 635 aa, Homo sapiens
AGITGVSHRTRPAVPSLCLSFPLYSMGLSSRVASRLRSESMAPYCLLLSSPKDSSGGDSCASEEEPTFDPGYEPDWAVISTVRPQPCHSEPTRGAEPSCPQGSWAFSVSLGELKSIRRSKPGLSWAYLVLVTQAGGSLPALHFHRGGTRALLRVLSRYLLLASSPQDSRLYLVFPHDSSALSNSFHHLQLFDQDSSNVVSRFLQDPYSTTFSSFSRVTNFFRGALQPQPEGAASDLPPPPDDEPEPGFEVISCVELGPRPTVERGPPVTEEEWARHVGPEGRLQQVPELKNRIFSGGLSPSLRREAWKFLLGYLSWEGTAEEHKAHIRKKTDEYFRMKLQWKSVSPEQERRNSLLHGYRSLIERDVSRTDRTNKFYEGPENPGLGLLNDILLTYCMYHFDLGYVQGMSDLLSPILYVIQNEVDAFWCFCGFMELVQGNFEESQETMKRQLGRLLLLLRVLDPLLCDFLDSQDSGSLCFCFRWLLIWFKREFPFPDVLRLWEVLWTGLPGPNLHLLVACAILDMERDTLMLSGFGSNEILKHINELTMKLSVEDVLTRAEALHRQLTACPELPHNVQEILGLAPPAEPHSPSPTASPLPLSPTRAPPTPPPSTDTAPQPDSSLEILPEEEDEGADS

SEQ ID NO: 798372 - protein, 662 aa, Homo sapiens
MEGAGYRVVFEKGGVYLHTSAKKYQDRDSLIAGVIRVVEKDNDVLLHWAPVEEAGDSTQILFSKKDSSGGDSCASEEEPTFDPGYEPDWAVISTVRPQPCHSEPTRGRLRWRPLRSTCGPGAEPSCPQGSWAFSVSLGELKSIRRSKPGLSWAYLVLVTQAGGSLPALHFHRGGTRALLRVLSRYLLLASSPQDSRLYLVFPHDSSALSNSFHHLQLFDQDSSNVVSRFLQDPYSTTFSSFSRVTNFFRGALQPQPEGAASDLPPPPDDEPEPGFEVISCVELGPRPTVERGPPVTEEEWARHVGPEGRLQQVPELKNRIFSGGLSPSLRREAWKFLLGYLSWEGTAEEHKAHIRKKTDEYFRMKLQWKSVSPEQERRNSLLHGYRSLIERDVSRTDRTNKFYEGPENPGLGLLNDILLTYCMYHFDLGYVQGMSDLLSPILYVIQNEVDAFWCFCGFMELVQGNFEESQETMKRQLGRLLLLLRVLDPLLCDFLDSQDSGSLCFCFRWLLIWFKREFPFPDVLRLWEVLWTGLPGPNLHLLVACAILDMERDTLMLSGFGSNEILKHINELTMKLSVEDVLTRAEALHRQLTACPELPHNVQEILGLAPPAEPHSPSPTASPLPLSPTRAPPTPPPSTDTAPQPDSSLEILPEEEDEGADS

SEQ ID NO: 798373 - protein, 299 aa, Homo sapiens [sequence omitted]

SEQ ID NO: 798374 - protein, 532 aa, Homo sapiens
MCPPLGSSCGPPLTAFPEMRGCPGVVGTLQLEPMSAEHRQPGTLGPYLCITCASPPASQLSPQDSRLYLVFPHDSSALSNSFHHLQLFDQDSSNVVSRFLQDPYSTTFSSFSRVTNFFRGALQPQPEGAASDLPPPPDDEPEPGFEVISCVELGPRPTVERGPPVTEEEWARHVGPEGRLQQVPELKNRIFSGGLSPSLRREAWKFLLGYLSWEGTAEEHKAHIRKKTDEYFRMKLQWKSVSPEQERRNSLLHGYRSLIERDVSRTDRTNKFYEGPENPGLGLLNDILLTYCMYHFDLGYVQGMSDLLSPILYVIQNEVDAFWCFCGFMELVQGNFEESQETMKRQLGRLLLLLRVLDPLLCDFLDSQDSGSLCFCFRWLLIWFKREFPFPDVLRLWEVLWTGLPGPNLHLLVACAILDMERDTLMLSGFGSNEILKHINELTMKLSVEDVLTRAEALHRQLTACPELPHNVQEILGLAPPAEPHSPSPTASPLPLSPTRAPPTPPPSTDTAPQPDSSLEILPEEEDEGADS

SEQ ID NO: 798375 - protein, 562 aa, Homo sapiens
MCPPLGSSCGPPLTAFPEMRGCPGVVGTLQLEPMSAEHRQPGTLGPYLCITCASPPASQLSPQDSRLYLVFPHDSSALSNSFHHLQLFDQDSSNVVSVSVPQQEAWRLWAGRDEKGRVVTSLCPRPQRFLQDPYSTTFSSFSRVTNFFRGALQPQPEGAASDLPPPPDDEPEPGFEVISCVELGPRPTVERGPPVTEEEWARHVGPEGRLQQVPELKNRIFSGGLSPSLRREAWKFLLGYLSWEGTAEEHKAHIRKKTDEYFRMKLQWKSVSPEQERRNSLLHGYRSLIERDVSRTDRTNKFYEGPENPGLGLLNDILLTYCMYHFDLGYVQGMSDLLSPILYVIQNEVDAFWCFCGFMELVQGNFEESQETMKRQLGRLLLLLRVLDPLLCDFLDSQDSGSLCFCFRWLLIWFKREFPFPDVLRLWEVLWTGLPGPNLHLLVACAILDMERDTLMLSGFGSNEILKHINELTMKLSVEDVLTRAEALHRQLTACPELPHNVQEILGLAPPAEPHSPSPTASPLPLSPTRAPPTPPPSTDTAPQPDSSLEILPEEEDEGADS

SEQ ID NO: 798376 - protein, 433 aa, Homo sapiens
MNLTGLSSALCGHSPATQSPRELQPQPEGAASDLPPPPDDEPEPGFEVISCVELGPRPTVERGPPVTEEEWARHVGPEGRLQQVPELKNRIFSGGLSPSLRREAWKFLLGYLSWEGTAEEHKAHIRKKTDEYFRMKLQWKSVSPEQERRNSLLHGYRSLIERDVSRTDRTNKFYEGPENPGLGLLNDILLTYCMYHFDLGYVQGMSDLLSPILYVIQNEVDAFWCFCGFMELVQGNFEESQETMKRQLGRLLLLLRVLDPLLCDFLDSQDSGSLCFCFRWLLIWFKREFPFPDVLRLWEVLWTGLPGPNLHLLVACAILDMERDTLMLSGFGSNEILKHINELTMKLSVEDVLTRAEALHRQLTACPELPHNVQEILGLAPPAEPHSPSPTASPLPLSPTRAPPTPPPSTDTAPQPDSSLEILPEEEDEGADS

SEQ ID NO: 798377 - protein, 295 aa, Homo sapiens
PPKVLGLQACAIAPGLQLKFLLTAYLGVSVPLALTSSGQRSVSSGVLGVLPPFHVHGRCGSIIAHFLWRVGGRRGRARVQGCSCLTSEVPQPGISHLPRLGEGLPVRMTSQTLSPALGKAEWAPCHPPDSQDSGSLCFCFRWLLIWFKREFPFPDVLRLWEVLWTGLPGPNLHLLVACAILDMERDTLMLSGFGSNEILKHINELTMKLSVEDVLTRAEALHRQLTACPELPHNVQEILGLAPPAEPHSPSPTASPLPLSPTRAPPTPPPSTDTAPQPDSSLEILPEEEDEGADS

SEQ ID NO: 798378 - protein, 159 aa, Homo sapiens
IFLVETRFLHIGQAGLELPTSGDPPASASQSAGITGVSHRTRPAVPSLCLSFPLYSMGLSSRVASRLRSESMAPYCLLLSSPKDSSGGDSCASEEEPTFDPGYEPDWAVISTVRPQPCHSEPTRGRLRWRPLRSTCGPGRTHLALSGHGPKGFAAHNQE

SEQ ID NO: 798379 - protein, 262 aa, Homo sapiens
MEGAGYRVVFEKGGVYLHTSAKKYQDRDSLIAGVIRVVEKDNDVLLHWAPVEEAGDSTQILFSKKIPRTPALSASVSGGCSSGSRGNSPSRMSFGCGRCCGQGSLAPICTCWWPAPSWTWRGTPSCCPASAPMRSSSTKHRVGARAEVVECRLAPDPPPPAAHQRADYEAERGGRADPRRGPAPPANRLPRAAHNVQEILGGPGPRRGKRRQYAPSAKPDFGRTTTVCRAYPHTAGLNTNANHQQDHSTITTHKEQRKHQHD

SEQ ID NO: 798380 - protein, 673 aa, Homo sapiens
MEGAGYRVVFEKGGVYLHTSAKKYQDRDSLIAGVIRVVEKDNDVLLHWAPVEEAGDSTQILFSKKDSSGGDSCASEEEPTFDPGYEPDWAVISTVRPQPCHSEPTRGAEPSCPQGSWAFSVSLGELKSIRRSKPGLSWAYLVLVTQAGGSLPALHFHRGGTRALLRVLSRYLLLASSPQDSRLYLVFPHDSSALSNSFHHLQLFDQDSSNVVSRFLQDPYSTTFSSFSRVTNFFRGALQPQPEGAASDLPPPPDDEPEPGFEVISCVELGPRPTVERGPPVTEEEWARHVGPEGRLQQVPELKNRIFSGGLSPSLRREAWKFLLGYLSWEGTAEEHKAHIRKKTDEYFRMKLQWKSVSPEQERRNSLLHGYRSLIERDVSRTDRTNKFYEGPENPGLGLLNDILLTYCMYHFDLGYVQGMSDLLSPILYVIQNEVDAFWCFCGFMELVQGNFEESQETMKRQLGRLLLLLRVLDPLLCDFLDSQDSGSLCFCFRWLLIWFKREFPFPDVLRLWEVLWTGLPGPNLHLLVACAILDMERDTLMLSGFGSNEILKHEAQSGRSGRRWLSADWRLTHPLPQHINELTMKLSVEDVLTRAEALHRQLTACPELPHNVQEILGLAPPAEPHSPSPTASPLPLSPTRAPPTPPPSTDTAPQPDSSLEILPEEEDEGADS

SEQ ID NO: 798381 - protein, 653 aa, Homo sapiens
MEGAGYRVVFEKGGVYLHTSAKKYQDRDSLIAGVIRVVEKDNDVLLHWAPVEEAGDSTQILFSKKDSSGGDSCASEEEPTFDPGYEPDWAVISTVRPQPCHSEPTRGAEPSCPQGSWAFSVSLGELKSIRRSKPGLSWAYLVLVTQAGGSLPALHFHRGGTRALLRVLSRYLLLASSPQDSRLYLVFPHDSSALSNSFHHLQLFDQDSSNVVSRFLQDPYSTTFSSFSRVTNFFRGALQPQPEGAASDLPPPPDDEPEPGFEVISCVELGPRPTVERGPPVTEEEWARHVGPEGRLQQVPELKNRIFSGGLSPSLRREAWKFLLGYLSWEGTAEEHKAHIRKKTDEYFRMKLQWKSVSPEQERRNSLLHGYRSLIERDVSRTDRTNKFYEGPENPGLGLLNDILLTYCMYHFDLGYVQGMSDLLSPILYVIQNEVDAFWCFCGFMELVQGNFEESQETMKRQLGRLLLLLRVLDPLLCDFLDSQDSGSLCFCFRWLLIWFKREFPFPDVLRLWEVLWTGLPGPNLHLLVACAILDMERDTLMLSGFGSNEILKHEAQSGRSGRRWLSADWRLTHPLPQHINELTMKLSVEDVLTRADALHGHSPAARQQPGDPARGGGRGRRLLTPPGSLVLHRHFSPSQAHLRGGRCAPPPC

SEQ ID NO: 798382 - protein, 555 aa, Homo sapiens
MEGAGYRVVFEKGGVYLHTSAKKYQDRDSLIAGVIRVVEKDNDVLLHWAPVEEAGDSTQILFSKKDSSGGDSCASEEEPTFDPGYEPDWAVISTVRPQPCHSEPTRGAEPSCPQGSWAFSVSLGELKSIRRSKPGLSWAYLVLVTQAGGSLPALHFHRGGTRALLRVLSRYLLLASSPQDSRLYLVFPHDSSALSNSFHHLQLFDQDSSNVVSRFLQDPYSTTFSSFSRVTNFFRGALQPQPEGAASDLPPPPDDEPEPGFEVISCVELGPRPTVERGPPVTEEEWARHVGPEGRLQQVPELKNRIFSGGLSPSLRREAWKFLLGYLSWEGTAEEHKAHIRKKTDEYFRMKLQWKSVSPEQERRNSLLHGYRSLIERDVSRTDRTNKFYEGPENPGLGLLNDILLTYCMYHFDLGYVQGMSDLLSPILYVIQNEVDAFWCFCGFMELVQGNFEESQETMKRQLGRLLLLLRVLDPLLCDFLDSQDSGSLCFCFRWLLIWFKREFPFPDVLRLWEVLWTGLPGPNLHLLVACAILDMERDTLMLSGFGSNEILKAL

SEQ ID NO: 798383 - protein, 659 aa, Homo sapiens
SVTARGYGIGGDYEGASQVVFEKGGVYLHTSAKKYQDRDSLIAGVIRVVEKDNDVLLHWAPVEEAGDSTQILFSKKDSSGGDSCASEEEPTFDPGYEPDWAVISTVRPQPCHSEPTRGAEPSCPQGSWAFSVSLGELKSIRRSKPGLSWAYLVLVTQAGGSLPALHFHRGGTRALLRVLSRYLLLASSPQDSRLYLVFPHDSSALSNSFHHLQLFDQDSSNVVSRFLQDPYSTTFSSFSRVTNFFRGALQPQPEGAASDLPPPPDDEPEPGFEVISCVELGPRPTVERGPPVTEEEWARHVGPEGRLQQVPELKNRIFSGGLSPSLRREAWKFLLGYLSWEGTAEEHKAHIRKKTDEYFRMKLQWKSVSPEQERRNSLLHGYRSLIERDVSRTDRTNKFYEGPENPGLGLLNDILLTYCMYHFDLGYVQGMSDLLSPILYVIQNEVDAFWCFCGFMELVQGNFEESQETMKRQLGRLLLLLRVLDPLLCDFLDSQDSGSLCFCFRWLLIWFKREFPFPDVLRLWEVLWTGLPGPNLHLLVACAILDMERDTLMLSGFGSNEILKHINELTMKLSVEDVLTRAEALHRQLTACPELPHNVQEILGLAPPAEPHSPSPTASPLPLSPTRAPPTPPPSTDTAPQPDSSLEILPEEEDEGADS

SEQ ID NO: 798384 - protein, 666 aa, Homo sapiens
MEGAGYRVVFEKGGVYLHTSAKKYQDRDSLIAGVIRVVEKDNDVLLHWAPVEEAGDSTQILFSKKPNTAKAPGSVRYITSAFQDSSGGDSCASEEEPTFDPGYEPDWAVISTVRPQPCHSEPTRGAEPSCPQGSWAFSVSLGELKSIRRSKPGLSWAYLVLVTQAGGSLPALHFHRGGTRALLRVLSRYLLLASSPQDSRLYLVFPHDSSALSNSFHHLQLFDQDSSNVVSRFLQDPYSTTFSSFSRVTNFFRGALQPQPEGAASDLPPPPDDEPEPGFEVISCVELGPRPTVERGPPVTEEEWARHVGPEGRLQQVPELKNRIFSGGLSPSLRREAWKFLLGYLSWEGTAEEHKAHIRKKTDEYFRMKLQWKSVSPEQERRNSLLHGYRSLIERDVSRTDRTNKFYEGPENPGLGLLNDILLTYCMYHFDLGYVQGMSDLLSPILYVIQNEVDAFWCFCGFMELVQGNFEESQETMKRQLGRLLLLLRVLDPLLCDFLDSQDSGSLCFCFRWLLIWFKREFPFPDVLRLWEVLWTGLPGPNLHLLVACAILDMERDTLMLSGFGSNEILKHINELTMKLSVEDVLTRAEALHRQLTACPELPHNVQEILGLAPPAEPHSPSPTASPLPLSPTRAPPTPPPSTDTAPQPDSSLEILPEEEDEGADS

SEQ ID NO: 798385 - protein, 595 aa, Homo sapiens
MGSSSLSEDYRQCLERELRRGRAGVCGDPSLRAVLWQILVEDFDLHGALQDDALALLTDGLWGRADLAPALRGLARAFELLELAAVHLYLLPWRKEFTTIKTFSGGYVHVLKGVLSDDLLLKSFQKMGYVRRDSHRLMVTALPPACQLVQVALGCFALRLECEILGEVLAQLGTSVLPAEELLQARRASGDVASCVAWLQQRLAQDEEPPPLPPRGSPAAYRAPLDLYRDLQEDEGSEDASLYGEPSPGPDSPPAELAYRPPLWEQSAKLWGTGGRAWEPPAEELPQASSPPYGALEEGLEPEPSAFSFLSLRRELSRPGDLATPESSAAASPRRIRAEGVPASAYRSVSEPPGYQAHSCLSPGALPTLCCDTCRQLHAAHCAALPACRPGHSLRVLLGDAQRRLWLQRAQMDTLLYNSPGAGPRPAGPQVKGSWETAPVVLLFAGEGSGPLVALSLGESWAQQGVGESRPTLAGGGTLCIWKAPRAAGLSRPAGAFPHFPTLGTQTHAHMCWVEGSSLFQPVPEPVPEKDPVPQGPWLLACSLQYGVRGSGLGGPPRVPGILHTSVLKGLLVTPSSPHPKLCWSQSAGLCRVHG

SEQ ID NO: 798386 - protein, 623 aa, Homo sapiens
SGTPGGSARRAGRPELIRGGRRPLGTDRMGSSSLSEDYRQCLERELRRGRAGVCGDPSLRAVLWQILVEDFDLHGALQDDALALLTDGLWGRADLAPALRGLARAFELLELAAVHLYLLPWRKEFTTIKTFSGGYVHVLKGVLSDDLLLKSFQKMGYVRRDSHRLMVTALPPACQLVQVALGCFALRLECEILGEVLAQLGTSVLPAEELLQARRASGDVASCVAWLQQRLAQDEEPPPLPPRGSPAAYRAPLDLYRDLQEDEGSEDASLYGEPSPGPDSPPAELAYRPPLWEQSAKLWGTGGRAWEPPAEELPQASSPPYGALEEGLEPEPSAFSFLSLRRELSRPGDLATPESSAAASPRRIRAEGVPASAYRSVSEPPGYQAHSCLSPGALPTLCCDTCRQLHAAHCAALPACRPGHSLRVLLGDAQRRLWLQRAQMDTLLYNSPGAGPRPAGPQVKGSWETAPVVLLFAGEGSGPLVALSLGESWAQQGVGESRPTLAGGGTLCIWKAPRAAGLSRPAGAFPHFPTLGTQTHAHMCWVEGSSLFQPVPEPVPEKDPVPQGPWLLACSLQYGVRGSGLGGPPRVPGILHTSVLKGLLVTPSSPHPKLCWSQSAGLCRVHG

SEQ ID NO: 798387 - protein, 180 aa, Homo sapiens
SGTPGGSARRAGRPELIRGGRRPLGTDRMGSSSLSEDYRQCLERELRRGRAGVCGDPSLRAVLWQILVEDFDLHGALQDDALALLTDGLWGRADLAPALRGLARAFELLELAAVHLYLLPWRKEFTTIKTFSGGYVHVLKGVLSDDLLLKSFQKMGYVRRDSHRLMLCWSQSAGLCRVHG

SEQ ID NO: 798388 - protein, 443 aa, Homo sapiens
MNLSIAIPAMVNNTAPPSQPNASTERPSTDSQGYWNETLKEFKAMAPAYDWSPEIQGIILSSLNYGSFLAPIPSGYVAGIFGAKYVVGAGLFISSFLTLFIPLAANAGVALLIVLRIVQGIAQVMVLTGQYSIWVKWAPPLERSQLTTIAGSGSMLGSFIVLLAGGLLCQTIGWPYVFYIFGGIGCACCPLWFPLIYDDPVNHPFISAGEKRYIVCSLAQQDCSPGWSLPIRAMIKSLPLWAILVSYFCEYWLFYTIMAYTPTYISSVLQANLRDSGILSALPFVVGCICIILGGLLADFLLSRKILRLITIRKLFTAIGVLFPSVILVSLPWVRSSHSMTMTFLVLSSAISSFCESGALVNFLDIAPRYTGFLKGLLQVFAHIAGAISPTAAGFFISQDSEFGWRNVFLLSAAVNISGLVFYLIFGRADVQDWAKEQTFTHL

SEQ ID NO: 798389 - protein, 68 aa, Homo sapiens
DCAVTSVIIVHSGSQRKRLSADIVIPTFLMRWHRSSHSMTMTFLVLSSAISSFCESGALVNFLDIAPR

SEQ ID NO: 798390 - protein, 497 aa, Homo sapiens
MSTGPDVKATVGDISSDGNLNVAQEECSRKGFCSVRHGLALILQLCNFSIYTQQMNLSIAIPAMVNNTAPPSQPNASTERPSTDSQGYWNETLKEFKAMAPAYDWSPEIQGIILSSLNYGSFLAPIPSGYVAGIFGAKYVVGAGLFISSFLTLFIPLAANAGVALLIVLRIVQGIAQVMVLTGQYSIWVKWAPPLERSQLTTIAGSGSMLGSFIVLLAGGLLCQTIGWPYVFYIFGGIGCACCPLWFPLIYDDPVNHPFISAGEKRYIVCSLAQQDCSPGWSLPIRAMIKSLPLWAILVSYFCEYWLFYTIMAYTPTYISSVLQANLRDSGILSALPFVVGCICIILGGLLADFLLSRKILRLITIRKLFTAIGVLFPSVILVSLPWVRSSHSMTMTFLVLSSAISSFCESGALVNFLDIAPRYTGFLKGLLQVFAHIAGAISPTAAGFFISQDSEFGWRNVFLLSAAVNISGLVFYLIFGRADVQDWAKEQTFTHL

SEQ ID NO: 798391 - protein, 497 aa, Homo sapiens; identical to SEQ ID NO: 798390

SEQ ID NO: 798392 - protein, 114 aa, Homo sapiens
MSTGPDVKATVGDISSDGNLNVAQEECSRKGFCSVRHGLALILQLCNFSIYTQQMNLSIAIPAMVNNTAPPSQPNASTERPSTDSQGYWNETLKEFKAMVSLMRLWTLSLTQII

SEQ ID NO: 798393 - protein, 718 aa, Homo sapiens
MELLDMVCMDPLVDDNDDILNMVIVIHSLLDICSVISSMDHAFHANTWKFIIKQSLKHQSIIKSQLKHKDIITSLCEDILFSFHSCLQLAEQMTQSDAQDNADYRLFQKTLKLCRFFANSLLHYAKEFLPFLSDSCCTLHQLYLQIHSKFPPSLYATRISKAHQEEIAGAFLVTLDPLISQLLTFQPFMQVVLDSKLDLPCELQFPQCLLLVVVMDKLPSQPKEVQTLWCTDSQVSETTTRISLLKAVFYSFEQCSGELSLPVHLQGLKSKGKAEVAVTLYQHVCVHLCTFITSFHPSLFAELDAALLNAVLSANMITSLLAMDAWCFLARYGTAELCAHHVTIVAHLIKSCPGECYQLINLSILLKRLFFFMAPPHQLEFIQKFSPKEAENLPLWQHISFQALPPELREQTVHEVTTVGTAECRKWLSRSRTLGELESLNTVLSALLAVCNSAGEALDTGKQTAIIEVVSQLWAFLNIKQVADQPYVQQTFSLLLPLLGFFIQTLDPKLILQAVTLQTSLLKLELPDYVRLAMLDFVSSLGKLFIPEAIQDRILPNLSCMFALLLADRSWLLEQHTLEAFTQFAEGTNHEEIVPQCLSSEETKNKVVSFLEKTGFVDETEAAKVERVKQEKGIFWEPFANVTVEEAKRSSLQPYAKRARQEFPWEEEYRSALHTIAGALEATESLLQKGPAPAWLSMEMEALQERMDKLKRYIHTLG

SEQ ID NO: 798394 - protein, 853 aa, Homo sapiens
MFLPHMNHLTLEQTFFSQVLPKTVKLFDDMMYELTSQARGLSSQNLEIQTTLRNILQTMVQLLGALTGCVQHICATQESIILENIQSLPSSVLHIIKSTFVHCKNSESVYSGCLHLVSDLLQALFKEAYSLQKQLMELLDMVCMDPLVDDNDDILNMVIVIHSLLDICSVISSMDHAFHANTWKFIIKQSLKHQSIIKSQLKHKDIITSLCEDILFSFHSCLQLAEQMTQSDAQDNADYRLFQKTLKLCRFFANSLLHYAKEFLPFLSDSCCTLHQLYLQIHSKFPPSLYATRISKAHQEEIAGAFLVTLDPLISQLLTFQPFMQVVLDSKLDLPCELQFPQCLLLVVVMDKLPSQPKEVQTLWCTDSQVSETTTRISLLKAVFYSFEQCSGELSLPVHLQGLKSKGKAEVAVTLYQHVCVHLCTFITSFHPSLFAELDAALLNAVLSANMITSLLAMDAWCFLARYGTAELCAHHVTIVAHLIKSCPGECYQLINLSILLKRLFFFMAPPHQLEFIQKFSPKEAENLPLWQHISFQALPPELREQTVHEVTTVGTAECRKWLSRSRTLGELESLNTVLSALLAVCNSAGEALDTGKQTAIIEVVSQLWAFLNIKQVADQPYVQQTFSLLLPLLGFFIQTLDPKLILQAVTLQTSLLKLELPDYVRLAMLDFVSSLGKLFIPEAIQDRILPNLSCMFALLLADRSWLLEQHTLEAFTQFAEGTNHEEIVPQCLSSEETKNKVVSFLEKTGFVDETEAAKVERVKQEKGIFWEPFANVTVEEAKRSSLQPYAKRARQEFPWEEEYRSALHTIAGALEATESLLQKGPAPAWLSMEMEALQERMDKLKRYIHTLG

SEQ ID NO: 798395 - protein, 933 aa, Homo sapiens
GTASFRSGLWRVWFEALLFDESMSQEGAVPASAVPLEELSSWPEELCRRELPSVLPRLLSLSQHSESWIEHIQILKIIVEMFLPHMNHLTLEQTFFSQVLPKTVKLFDDMMYELTSQARGLSSQNLEIQTTLRNILQTMVQLLGALTGCVQHICATQESIILENIQSLPSSVLHIIKSTFVHCKNSESVYSGCLHLVSDLLQALFKEAYSLQKQLMELLDMVCMDPLVDDNDDILNMVIVIHSLLDICSVISSMDHAFHANTWKFIIKQSLKHQSIIKSQLKHKDIITSLCEDILFSFHSCLQLAEQMTQSDAQDNADYRLFQKTLKLCRFFANSLLHYAKEFLPFLSDSCCTLHQLYLQIHSKFPPSLYATRISKAHQEEIAGAFLVTLDPLISQLLTFQPFMQVVLDSKLDLPCELQFPQCLLLVVVMDKLPSQPKEVQTLWCTDSQVSETTTRISLLKAVFYSFEQCSGELSLPVHLQGLKSKGKAEVAVTLYQHVCVHLCTFITSFHPSLFAELDAALLNAVLSANMITSLLAMDAWCFLARYGTAELCAHHVTIVAHLIKSCPGECYQLINLSILLKRLFFFMAPPHQLEFIQKFSPKEAENLPLWQHISFQALPPELREQTVHEVTTVGTAECRKWLSRSRTLGELESLNTVLSALLAVCNSAGEALDTGKQTAIIEVVSQLWAFLNIKQVADQPYVQQTFSLLLPLLGFFIQTLDPKLILQAVTLQTSLLKLELPDYVRLAMLDFVSSLGKLFIPEAIQDRILPNLSCMFALLLADRSWLLEQHTLEAFTQFAEGTNHEEIVPQCLSSEETKNKVVSFLEKTGFVDETEAAKVERVKQEKGIFWEPFANVTVEEAKRSSLQPYAKRARQEFPWEEEYRSALHTIAGALEATESLLQKGPAPAWLSMEMEALQERMDKLKRYIHTLG

SEQ ID NO: 798396 - protein, 718 aa, Homo sapiens; identical to SEQ ID NO: 798393

SEQ ID NO: 798397 - protein, 691 aa, Homo sapiens
MELLDMVCMDPLVDDNDDILNMVIVIHSLLDICSVISSMDHAFHANTWKFIIKQSLKHQSIIKSQLKHKDIITSLCEDILFSFHSCLQLAEQMTQSDAQDNADYRLFQKTLKLCRFFANSLLHYAKEFLPFLSDSCCTLHQLYLQIHSKFPPSLYATRISKAHQEEIAGAFLVTLDPLISQLLTFQPFMQVVLDSKLDLPCELQFPQCLLLVVVMDKLPSQPKEVQTLWCTDSQVSETTTRISLLKAVFYSFEQCSGELSLPVHLQGLKSKGKAEVAVTLYQHVCVHLCTFITSFHPSLFAELDAALLNAVLSANMITSLLAMDAWCFLARYGTAELCAHHVTIVAHLIKSCPGECYQLINLSILLKRLFFFMAPPHQLEFIQKFSPKEAENLPLWQHISFQALPPELREQTVHEVTTVGTAECRKWLSRSRTLGELESLNTVLSALLAVCNSAGEALDTGKQTAIIEVVSQLWAFLNIKQVADQPYVQQTFSLLLPLLGFFIQTLDPKLILQAVTLQTSLLKLELPDYVRLAMLDFVSSLGKLFIPEAIQDRILPNLSCMFALLLADRSWLLEQHTLEAFTQFAEGTNHEEIVPQCLSSEETKNKVVSFLEKTGFVDETEAAKVERVKQEKGIFWEPFANVTVEEAKRSSLQVWADFNRGQTLTRQILPFLLTDETNQCGFQPYAEFQIK

SEQ ID NO: 798398 - protein, 104 aa, Homo sapiens [sequence omitted]

SEQ ID NO: 798399 - protein, 202 aa, Homo sapiens
GTASFRSGLWRVWFEALLFDESMSQEGAVPASAVPLEELSSWPEELCRRELPSVLPRLLSLSQHSESWIEHIQILKIIVEMFLPHMNHLTLEQTFFSQVLPKTVKLFDDMMYELTSQARGLSSQNLEIQTTLRNILQTMVQLLGALTGCVQHICATQESIILENIQSLPSSVLHIIKSTFVHCKFQTFSRLFSRRPILFKSS

SEQ ID NO: 798400 - protein, 161 aa, Homo sapiens
MFLPHMNHLTLEQTFFSQVLPKTVKLFDDMMYELTSQARGLSSQNLEIQTTLRNILQTMVQLLGALTGCVQHICATQESIILENIQSLPSSVLHIIKSTFVHCKNSESVYSGCLHLVSDLLQALFKEAYSLQKQLMELLDMVCMDPLVDDNDDILNMVIGE

SEQ ID NO: 798401 - protein, 718 aa, Homo sapiens; identical to SEQ ID NO: 798393

SEQ ID NO: 798402 - protein, 718 aa, Homo sapiens; identical to SEQ ID NO: 798393

SEQ ID NO: 798403 - protein, 853 aa, Homo sapiens; identical to SEQ ID NO: 798394

SEQ ID NO: 798404 - protein, 718 aa, Homo sapiens; identical to SEQ ID NO: 798393

SEQ ID NO: 798405 - protein, 107 aa, Homo sapiens
MCRDQENSAWRNGGAGTLRVTPAGGVPKDNIHFGGTNGVVTQKMSTLGKERFCDREIRCNKCCDRKPPARRCWRKSQQNAGCCHRDTDFRTPASDGERRVRSHHITS

SEQ ID NO: 798406 - protein, 107 aa, Homo sapiens; identical to SEQ ID NO: 798405

SEQ ID NO: 798407 - protein, 107 aa, Homo sapiens; identical to SEQ ID NO: 798405

SEQ ID NO: 798408 - protein, 107 aa, Homo sapiens; identical to SEQ ID NO: 798405

SEQ ID NO: 798409 - protein, 107 aa, Homo sapiens; identical to SEQ ID NO: 798405

SEQ ID NO: 798410 - protein, 68 aa, Homo sapiens
RTPGRRGRAGTRPRDEGGRRLDTTCGRASEVLALRVDRLQVFTEHPRSLGQAQSEELGTGVAEDQALP

SEQ ID NO: 798411 - protein, 101 aa, Homo sapiens
DAFSPCCKAALGLLASSNLPTASSQSAGWNYRQTELLPNSLNYLDPNSQELLLRHFGEGQSKQYGSFLPGPWEKIIFLLEPVGKLQLSKITGPQVTSQQSL

SEQ ID NO: 798412 - protein, 98 aa, Homo sapiens
TPHRDLAPQAQEFGKGTREGSEGSVLVLSSPRLPGVKRGSGVGTRSLATVLPGIRSPPPPGCRVDKEEDVKRRQTKAKGHPVSRKRPNYNSDVQCLHK

SEQ ID NO: 798413 - protein, 89 aa, Homo sapiens
RRRSLCPTREGSEGSVLVLSSPRLPGVKRGSGVGTRSLATVLPGIRSPPPPGCRVDKEEDVKRRQTKAKGHPVSRKRPNYNSDVQCLHK

SEQ ID NO: 798414 - protein, 146 aa, Homo sapiens
MEAADYSRKAFFLPCLPHCPTWGNNPYYICSDLPLCPGLTHAYPSQPRAWHPVHWELMFLGLQVSTSPPSPSDPRAYLAVTTQVIPIVQPLALGEGELVPPLHEVAQPRVHLAIIDATYRRKEENKERLFCPEPSPERIHTYYVPT

SEQ ID NO: 798415 - protein, 157 aa, Homo sapiens
AVGRRRSPPAAVRAGSRLGAGVVRVPLAVAARRLVREAGAGAVTGPCPAAAQGARGSWPSPRCLPSDGGAREAPPTSAPHPRRPAGSPPALADREGRRSLVPQTSIQGQNFAQLSLARPWAGKRGHRQREPEALRALRAGQELWNLSDDILILLDQD

SEQ ID NO: 798416 - protein, 125 aa, Homo sapiens
  misc_feature (118)..(118): Xaa can be any naturally occurring amino acid
  misc_feature (125)..(125): Xaa can be any naturally occurring amino acid
MAGENYRPGPPAGPLFNGKPHQDRLDPSDAQFVDVIHSDTDALGYKEPLGNIDFYPNGGLDQPGCPKTILGGFQYFKCDHQRSVYLYLSSLRESCTITAYPCDSYQDYWNGKCVSLRXVTKRVLX

SEQ ID NO: 798417 - protein, 495 aa, Homo sapiens
GQTWARRALLLGILWATAHLPLSGTSLPQRLPRATGNSTQCVISPSSEFPEGFFTRQERRDGGIIIYFLIIVYMFMAISIVCDEYFLPSLEIISESLGLSQDVAGTTFMAAGSSAPELVTAFLGVFITKGDIGISTILGSAIYNLLGICAACGLLSNTVSTLSCWPLFRDCAAYTISAAAVLGIIYDNQVYWYEGALLLLIYGLYVLVLCFDIKINQYIIKKCSPCCACLAKAMERSEQQPLMGWEDEGQPFIRRQSRTDSGIFYEDSGYSQLSISLHGLSQVSEDPPSVFNMPEADLKRIFWVLSLPIITLLFLTTPDCRKKFWKNYFVITFFMSAIWISAFTYILVWMVTITGETLEIPDTVMGLTLLAAGTSIPDTIASVLVARKGKGDMAMSNIVGSNVFDMLCLGIPWFIKTAFINGSAPAEVNSRGLTYITISLNISIIFLFLAVHFNGWKLDRKLGIVCLLSYLGLATLSVLYELGIIGNNKIRGCGG

SEQ ID NO: 798418 - protein, 69 aa, Homo sapiens
LVRQKSSPSPHSTQEVQLASPLTGITVTEAEKSKIKGPHPVRAFLLMVDWKQCQHDSPTWKDKMGLIIR

SEQ ID NO: 798419 - protein, 185 aa, Homo sapiens
MRNDSLNFSTATQSVDTHQRSFDIGIQIGYQRRNKDVLAWVKKRRRTIRREDLISFLCGKVPPPRNSRAPPRLTVVSPNRATSTETSSSVETDLQPFREAIALHGLSGAMASISVRSSTPGSPTHVSSGSNASRRRNGLHDVDLNTFISEEMALHLDNGGTRKRTSAQCGDVITDSPTHKRNRMI

SEQ ID NO: 798420 - protein, 515 aa, Homo sapiens
PLGSDATTVSSSPSSSFILPDIHSLPPANWLRQADRPKNQSRRCAQKPPRGTGRIRLIGALGAATPQPGRVAWAQWAVLLLSACGRGRAGTSSRRAVLGGGDDDDVAQSWGGLRGAGRAARRARRSAAAAAVGRPQRHGGALDRLRRPRRGAAAVIWSAATFGRARGWEGLGRGSSLVARGRGAGLAGRRGAGGLGLLKGEGAVGRQALPPGRLTTTLPRGPRLRRTRRRWRRGRGRPRRMEERKEEGEAEIQEHGPEHWFSKWERQCLAEAEQDEQLPPELQEEAAAAAQPEHKQQKLWHLFQNSATAVAQLYKDRVCQQPGLSLWVPFQNAATAVTNLYKESVDTHQRSFDIGIQIGYQRRNKDVLAWVKKRRRTIRREDLISFLCGKVPPPRNSRAPPRLTVVSPNRATSTETSSSVETDLQPFREAIALHGLSGAMASISVRSSTPGSPTHVSSGSNASRRRNGLHDVDLNTFISEEMALHLDNGGTRKRTSAQCGDVITDSPTHKRNRMI

SEQ ID NO: 798421 - protein, 438 aa, Homo sapiens
PLGSDATTVSSSPSSSFILPDIHSLPPANWLRQADRPKNQSRRCAQKPPRGTGRIRLIGALGAATPQPGRVAWAQWAVLLLSACGRGRAGTSSRRAVLGGGDDDDVAQSWGGLRGAGRAARRARRSAAAAAVGRPQRHGGALDRLRRPRRGAAAVIWSAATFGRARGWEGLGRGSSLVARGRGAGLAGRRGAGGLGLLKGEGAVGRQALPPGRLTTTLPRGPRLRRTRRRWRRGRGRPRRMEERKEEGEAEIQEHGPEHWFSKWERQCLAEAEQDEQLPPELQEEAAAAAQPEHKQQKLWHLFQNSATAVAQLYKDRVCQQPGLSLWVPFQNAATAVTNLYKESVDTHQRSFDIGIQIGYQRRNKDVLAWVKKRRRTIRREDLISFLCGKVPPPRNSRAPPRLTVVSPNRATSTETSSSVETDLQPFREAIALHGKAV

SEQ ID NO: 798422 - protein, 109 aa, Homo sapiens
MNGLIQGVKGLLSFLSAPLIGALSDVWGRKSFLLLTVFFTCAPIPLMKISPWWYFAVISVSGVFAVTFSVVFAYVADITQEHERSMAYGLVCMFILYLLYLLRNALFLR

SEQ ID NO: 798423 - protein, 432 aa, Homo sapiens
LLVLHETFPKHTFLMNGLIQGVKGLLSFLSAPLIGALSDVWGRKSFLLLTVFFTCAPIPLMKISPWWYFAVISVSGVFAVTFSVVFAYVADITQEHERSMAYGLVSATFAASLVTSPAIGAYLGRVYGDSLVVVLATAIALLDICFILVAVPESLPEKMRPASWGAPISWEQADPFASLKKVGQDSIVLLICITVFLSYLPEAGQYSSFFLYLRQIMKFSPESVAAFIAVLGILSIIAQTIVLSLLMRSIGNKNTILLGLGFQILQLAWYGFGSEPWMMWAAGAVAAMSSITFPAVSALVSRTADADQQGVVQGMITGIRGLCNGLGPALYGFIFYIFHVELKELPITGTDLGTNTSPQHHFEQNSIIPGPPFLFGACSVLLALLVALFIPEHTNLSLRSSSWRKHCGSHSHPHNTQAPGEAKEPLLQDTNV

SEQ ID NO: 798424 - protein, 380 aa, Homo sapiens
MNGLIQGVKGLLSFLSAPLIGALSDVWGRKSFLLLTVFFTCAPIPLMKISPWWYFAVISVSGVFAVTFSVVFAYVADITQEHERSMAYGLVSATFAASLVTSPAIGAYLGRVYGDSLVVVLATAIALLDICFILVAVPESLPEKMRPASWGAPISWEQADPFAIMKFSPESVAAFIAVLGILSIIAQTIVLSLLMRSIGNKNTILLGLGFQILQLAWYGFGSEPWMMWAAGAVAAMSSITFPAVSALVSRTADADQQGVVQGMITGIRGLCNGLGPALYGFIFYIFHVELKELPITGTDLGTNTSPQHHFEQNSIIPGPPFLFGACSVLLALLVALFIPEHTNLSLRSSSWRKHCGSHSHPHNTQAPGEAKEPLLQDTNV

SEQ ID NO: 798425 - protein, 432 aa, Homo sapiens; identical to SEQ ID NO: 798423

SEQ ID NO: 798426 - protein, 103 aa, Homo sapiens
FLFCCSPYRMMWAAGAVAAMSSITFPAVSALVSRTADADQQGVVQGMITGIRGLCNGLGPALYGFIFYIFHVELKELPITGTDLGTNTSPQHHFEQLSQDIDL

SEQ ID NO: 798427 - protein, 274 aa, Homo sapiens
MRPASWGAPISWEQADPFASLKKVGQDSIVLLICITVFLSYLPEAGQYSSFFLYLRQIMKFSPESVAAFIAVLGILSIIAQTIVLSLLMRSIGNKNTILLGLGFQILQLAWYGFGSEPWMMWAAGAVAAMSSITFPAVSALVSRTADADQQGVVQGMITGIRGLCNGLGPALYGFIFYIFHVELKELPITGTDLGTNTSPQHHFEQNSIIPGPPFLFGACSVLLALLVALFIPEHTNLSLRSSSWRKHCGSHSHPHNTQAPGEAKEPLLQDTNV

SEQ ID NO: 798428 - protein, 432 aa, Homo sapiens; identical to SEQ ID NO: 798423

SEQ ID NO: 798429 - protein, 101 aa, Homo sapiens
GFRAPPEARPAPNKSGATSLRLSRTLLGAARQGETFAAERSGENAPATPSRPRPSPTYHRRRPPWRLGRPAGNPGRSRQSGLDPRWPAGSDGETDMKRSPK

SEQ ID NO: 798430 - protein, 106 aa, Homo sapiens
ADIKSICAEAALCALRRRYPQIYTTSEKLQLDLSSINISAKDFEVAMQKMIPASQRAVTSPGQALSTVVKPLLQNTVDKILEALQRVFPHAEFRTNKTLDSGIKLD

SEQ ID NO: 798431 - protein, 403 aa, Homo sapiens
ADIKSICAEAALCALRRRYPQIYTTSEKLQLDLSSINISAKDFEVAMQKMIPASQRAVTSPGQALSTVVKPLLQNTVDKILEALQRVFPHAEFRTNKTLDSDISCPLLESDLAYSDDDVPSVYENGLSQKSSHKAKDNFNFLHLNRNACYQPMSFRPRILIVGEPGFGQGSHLAPAVIHALEKFTVYTLDIPVLFGVSTTSPEETCAQVIREAKRTAPSIVYVPHIHVWWEIVGPTLKATFTTLLQNIPSFAPVLLLATSDKPHSALPEEVQELFIRDYGEIFNVQLPDKEERTKFFEDLILKQAAKPPISKKKAVLQALEVLPVAPPPEPRSLTAEEVKRLEEQEEDTFRELRIFLRNVTHRLAIDKRFRVFTKPVDPDEVPDYVTVIKQPMDLSSVIRSNL

SEQ ID NO: 798432 - protein, 532 aa, Homo sapiens
ADIKSICAEAALCALRRRYPQIYTTSEKLQLDLSSINISAKDFEVAMQKMIPASQRAVTSPGQALSTVVKPLLQNTVDKILEALQRVFPHAEFRTNKTLDSDISCPLLESDLAYSDDDVPSVYENGLSQKSSHKAKDNFNFLHLNRNACYQPMSFRPRILIVGEPGFGQGSHLAPAVIHALEKFTVYTLDIPVLFGVSTTSPEETCAQVIREAKRTAPSIVYVPHIHVWWEIVGPTLKATFTTLLQNIPSFAPVLLLATSDKPHSALPEEVQELFIRDYGEIFNVQLPDKEERTKFFEDLILKQAAKPPISKKKAVLQALEVLPVAPPPEPRSLTAEEVKRLEEQEEDTFRELRIFLRNVTHRLAIDKRFRVFTKPVDPDEVPDYVTVIKQPMDLSSVISKIDLHKYLTVKDYLRDIDLICSNALEYNPDRDPGDRLIRHRACALRDTAYAIIKEELDEDFEQLCEEIQESRKKRGCSSSKYAPSYYHVMPKQNSTLVGDKRSDPEQNEKLKTPSTPVACSTPGKYSSSFHL

SEQ ID NO: 798433 - protein, 642 aa, Homo sapiens
PSHHWQLGQKLEGLLRQVGEVCRQDIQDFTQATLDTARSLCPQMLQGSSWREQLEGVLAGSRGLPELLPEQLLQDAFTRLRDMRLSITGTLAESIVAQALAGLSAARDQLVESLAQQATVTMPPALPAPDGGEPSLLEPGELEGLFFPEEKEEEKEKDDSPPQKWPELSHGLHLVPFIHSAAEEAEPEPELAAPGEDAEPQAGPSARGSPSPAAPGPPAGPLPRMDLPLAGQPLRHPTRARPRPRRQHHHRPPPGGPQVPPALPQEGNGLSARVDEGVEEFFSKRLIQQDRLWAPEEDPATEGGATPVPRTLRKKLGTLFAFKKPRSTRGPRTDLETSPGAAPRTRKTTFGDLLRPPTRPSRGEELGGAEGDTSSPDPAGRSRPRYTRDSKAYSMILLPAEEEATLGARPDKRRPLERGETELAPSFEQRVQVMLQRIGVSRGSGGAEGKRKQSKDGEIKKAGSDGDIMDSSTEAPPISIKSRTHSVSADPSCRPGPGSQGPESATWKTLGQQLNAELRSRGWGQQDGPGPPSPGQSPSPCRTSPSPDSLGLPEDPCLGPRNEGRRAVSVHEDQLQAPAERPLRLQRSPVLKRRPKLEAPPSPSLGSGLGTEPLPPQPTEPSSPERSPPSPATDQRGGGPNP

SEQ ID NO: 798434 - protein, 653 aa, Homo sapiens
PSHHWQLGQKLEGLLRQVGEVCRQDIQDFTQATLDTARSLCPQMLQGSSWREQLEGVLAGSRGLPELLPEQLLQDAFTRLRDMRLSITGTLAESIVAQALAGLSAARDQLVESLAQQATVTMPPALPAPDGGEPSLLEPGELEGLFFPEEKEEEKEKDDSPPQKWPELSHGLHLVPFIHSAAEEAEPEPELAAPGEDAEPQAGPSARGSPSPAAPGPPAGPLPRMDLPLAGQPLRHPTRARPRPRRQHHHRPPPGGPQVPPALPQEGNGLSARVDEGVEEFFSKRLIQQDRLWAPEEDPATEGGATPVPRTLRKKLGTLFAFKKPRSTRGPRTDLETSPGAAPRTRKTTFGDLLRPPTRPSRGEELGGAEGDTSSPDPAGRSRPRYTRDSKAYSMILLPAEEEATLGARPDKRRPLERGETELAPSFEQRVQVMLQRIGVSRGSGGAEGKRKQSKDGEIKKAGSDGDIMDSSTEAPPISIKSRTHSVSADPSCRPGPGSQGPESATWKTLGQQLNAELRSRGWGQQDGPGPPSPGQSPSPCRTSPSPDSLGLPEDPCLGPRNEDGQLRPRPLSAGRRAVSVHEDQLQAPAERPLRLQRSPVLKRRPKLEAPPSPSLGSGLGTEPLPPQPTEPSSPERSPPSPATDQRGGGPNP

SEQ ID NO: 798435 - protein, 670 aa, Homo sapiens
PSHHWQLGQKLEGLLRQVGEVCRQDIQDFTQATLDTARSLCPQMLQGSSWREQLEGVLAGSRGLPELLPEQLLQDAFTRLRDMRLSITGTLAESIVAQALAGLSAARDQLVESLAQQATVTMPPALPAPDGGEPSLLEPGELEGLFFPEEKEEEKEKDDSPPQKWPELSHGLHLVPFIHSAAEEAEPEPELAAPGEDAEPQAGPSARGSPSPAAPGPPAGPLPRMDLPLAGQPLRHPTRARPRPRRQHHHRPPPGGPQVPPALPQEGNGLSARVDEGVEEFFSKRLIQQDRLWAPEEDPATEGGATPVPRTLRKKLGTLFAFKKPRSTRGPRTDLETSPGAAPRTRKTTFGDLLRPPTRPSRGEELGGAEGDTSSPDPAGRSRPRYTRDSKAYSMILLPAEEEATLGARPDKRRPLERGETELAPSFEQRVQVMLQRIGVSRGSGGAEGKRKQSKDGEIKKAGSDGLVPESPAPPCGDIMDSSTEAPPISIKSRTHSVSADPSCRPGPGSQGPESATWKTLGQQLNAELRSRGWGQQDGPGPPSPGQSPSPCRTSPSPDSLGLPEDPCLGPRNEGRRAVSVHEDQLQAPAGEGRHLHVCLNAGDVGGWASGAPFIALVLGGSHQCVRSQEIREPEDQVQGFDSKPFQLALAPLPEEQPLPGVRTQGRGML

SEQ ID NO: 798436 - protein, 105 aa, Homo sapiens
MFLSSPWWAFSGRIIRTRTNKRLGCGERAGLESDCPVSCRAKMARSRKLAQMVSGTLGCGSTFARRCPYRQPPRHLLSLGRKGRGQVFLPLTSKVWYLSPQLRLA

SEQ ID NO: 798437 - protein, 659 aa, Homo sapiens
PSHHWQLGQKLEGLLRQVGEVCRQDIQDFTQATLDTARSLCPQMLQGSSWREQLEGVLAGSRGLPELLPEQLLQDAFTRLRDMRLSITGTLAESIVAQALAGLSAARDQLVESLAQQATVTMPPALPAPDGGEPSLLEPGELEGLFFPEEKEEEKEKDDSPPQKWPELSHGLHLVPFIHSAAEEAEPEPELAAPGEDAEPQAGPSARGSPSPAAPGPPAGPLPRMDLPLAGQPLRHPTRARPRPRRQHHHRPPPGGPQVPPALPQEGNGLSARVDEGVEEFFSKRLIQQDRLWAPEEDPATEGGATPVPRTLRKKLGTLFAFKKPRSTRGPRTDLETSPGAAPRTRKTTFGDLLRPPTRPSRGEELGGAEGDTSSPDPAGRSRPRYTRDSKAYSMILLPAEEEATLGARPDKRRPLERGETELAPSFEQRVQVMLQRIGVSRGSGGAEGKRKQSKDGEIKKAGSDGDIMDSSTEAPPISIKSRTHSVSADPSCRPGPGSQGPESATWKTLGQQLNAELRSRGWGQQDGPGPPSPGQSPSPCRTSPSPDSLGLPEDPCLGPRNEGRRAVSVHEDQLQAPAGEGRHLHVCLNAGDVGGWASGAPFIALVLGGSHQCVRSQEIREPEDQVQGFDSKPFQLALAPLPEEQPLPGVRTQGRGML

SEQ ID NO: 798438 - protein, 626 aa, Homo sapiens
PSHHWQLGQKLEGLLRQVGEVCRQDIQDFTQATLDTARSLCPQMLQGSSWREQLEGVLAGSRGLPELLPEQLLQDAFTRLRDMRLSITGTLAESIVAQALAGLSAARDQLVESLAQQATVTMPPALPAPDGGEPSLLEPGELEGLFFPEEKEEEKEKDDSPPQKWPELSHGLHLVPFIHSAAEEAEPEPELAAPGEDAEPQAGPSARGSPSPAAPGPPAGPLPRMDLPLAGQPLRHPTRARPRPRRQHHHRPPPGGPQVPPALPQEGNGLSARVDEGVEEFFSKRLIQQDRLWAPEEDPATEGGATPVPRTLRKKLGTLFAFKKPRSTRGPRTDLETSPGAAPRTRKTTFGDLLRPPTRPSRGEELGGAEGDTSSPDPAGRSRPRYTRDSKAYSMILLPAEEEATLGARPDKRRPLERGETELAPSFEQRVQVMLQRIGVSRGSGGAEGKRKQSKDGEIKKAGSDGDIMDSSTEAPPISIKSRTHSVSADPSCRPGPGSQGPESATWKTLGQQLNAELRSRGWGQQDGPGPPSPGQSPSPCRTSPSPDSLGLPEDPCLGPRNEERPLRLQRSPVLKRRPKLEAPPSPSLGSGLGTEPLPPQPTEPSSPERSPPSPATDQRGGGPNP

SEQ ID NO: 798439 - protein, 564 aa, Homo sapiens
MAEALPAIFGCLVLQVESLAQQATVTMPPALPAPDGGEPSLLEPGELEGLFFPEEKEEEKEKDDSPPQKWPELSHGLHLVPFIHSAAEEAEPEPELAAPGEDAEPQAGPSARGSPSPAAPGPPAGPLPRMDLPLAGQPLRHPTRARPRPRRQHHHRPPPGGPQVPPALPQEGNGLSARVDEGVEEFFSKRLIQQDRLWAPEEDPATEGGATPVPRTLRKKLGTLFAFKKPRSTRGPRTDLETSPGAAPRTRKTTFGDLLRPPTRPSRGEELGGAEGDTSSPDPAGRSRPRYTRDSKAYSMILLPAEEEATLGARPDKRRPLERGETELAPSFEQRVQVMLQRIGVSRGSGGAEGKRKQSKDGEIKKAGSDGDIMDSSTEAPPISIKSRTHSVSADPSCRPGPGSQGPESATWKTLGQQLNAELRSRGWGQQDGPGPPSPGQSPSPCRTSPSPDSLGLPEDPCLGPRNEGRRAVSVHEDQLQAPAGEGRHLHVCLNAGDVGGWASGAPFIALVLGGSHQCVRSQEIREPEDQVQGFDSKPFQLALAPLPEEQPLPGVRTQGRGML

SEQ ID NO: 798440 - protein, 82 aa, Homo sapiens
AATSPGSALGALLVLSPQVLLRKRSRSPSWRLREKMQSRRRGRPRAALRALPPLGPRPARCPAWTCHWRGSPCAIRPGPGRG

SEQ ID NO: 798441 - protein, 466 aa, Homo sapiens
AATAAARAVTAAAAAAPGGRWCRVPRRPVRRWGAAGRGEPTAAAAPEERSRARERRGRAGPAAEERGGARQAARGPRAKQRRPRRKRGRRPGFLRPPLLSSQYFLFGLSFASPQLPPYPHTPTPPFPRSKLPSAPGGLPRPGTPCASPPGLRGSPSETMRKFNIRKVLDGLTAGSSSASQQQQQQHPPGNREPEIQETLQSEHFQLCKTVRHGFPYQPSALAFDPVQKILAVGTQTGALRLFGRPGVECYCQHDSGAAVIQLQFLINEGALVSALADDTLHLWNLRQKRPAILHSLKFCRERVTFCHLPFQSKWLYVGTERGNIHIVNVESFTLSGYVIMWNKAIELSSKSHPGPVVHISDNPMDEGKLLIGFESGTVVLWDLKSKKADYRYTYDEAIHSVAWHHEGKQFICSHSDGTLTIWNVRSPAKPVQTITPHGKQLKDGKKPEPCKPILKVEFKTTRSGVC

SEQ ID NO: 798442 - protein, 396 aa, Homo sapiens
AATAAARAVTAAAAAAPGGRWCRVPRRPVRRWGAAGRGEPTAAAAPEERSRARERRGRAGPAAEERGGARQAARGPRAKQRRPRRKRGRRPGFLRPPLLSSQYFLFGLSFASPQLPPYPHTPTPPFPRSKLPSAPGGLPRPGTPCASPPGLRGSPSETMRKFNIRKVLDGLTAGSSSASQQQQQQHPPGNREPEIQETLQSEHFQLCKTVRHGFPYQPSALAFDPVQKILAVGTQTGALRLFGRPGVECYCQHDSGAAVIQLQFLINEGALVSALADDTLHLWNLRQKRPAILHSLKFCRERVTFCHLPFQSKWLYVGTERGNIHIVNVESFTLSGYVIMWNKAIELSSKSHPGPVVHISDNPMDEGKVEFFVKNYILNAQILVFFNKHAISGSHL

SEQ ID NO: 798443 - protein, 557 aa, Homo sapiens
AATAAARAVTAAAAAAPGGRWCRVPRRPVRRWGAAGRGEPTAAAAPEERSRARERRGRAGPAAEERGGARQAARGPRAKQRRPRRKRGRRPGFLRPPLLSSQYFLFGLSFASPQLPPYPHTPTPPFPRSKLPSAPGGLPRPGTPCASPPGLRGSPSETMRKFNIRKVLDGLTAGSSSASQQQQQQHPPGNREPEIQETLQSEHFQLCKTVRHGFPYQPSALAFDPVQKILAVGTQTGALRLFGRPGVECYCQHDSGAAVIQLQFLINEGALVSALADDTLHLWNLRQKRPAILHSLKFCRERVTFCHLPFQSKWLYVGTERGNIHIVNVESFTLSGYVIMWNKAIELSSKSHPGPVVHISDNPMDEGKLLIGFESGTVVLWDLKSKKADYRYTYDEAIHSVAWHHEGKQFICSHSDGTLTIWNVRSPAKPVQTITPHGKQLKDGKKPEPCKPILKVEFKTTRSGEPFIILSGGLSYDTVGRRPCLTVMHGKSTAVLEMDYSIVDFLTLCETPYPNDFQEPYAVVVLLEKDLVLIDLAQNGYPIFENPYPLSIHESPV

SEQ ID NO: 798444 - protein, 268 aa, Homo sapiens
AATAAARAVTAAAAAAPGGRWCRVPRRPVRRWGAAGRGEPTAAAAPEERSRARERRGRAGPAAEERGGARQAARGPRAKQRRPRRKRGRRPGFLRPPLLSSQYFLFGLSFASPQLPPYPHTPTPPFPRSKLPSAPGGLPRPGTPCASPPGLRGSPSETMRKFNIRKVLDGLTAGSSSASQQQQQQHPPGNREPEIQETLQSEHFQLCKVNGARSPATPSLKNWGCFKGATRALHGNAREENANNNNNNSNKRLAPPLANVSSVGCFGD

SEQ ID NO: 798445 - protein, 474 aa, Homo sapiens
MTAGSPEECGEVRRSPEGRVSRLGRRLGRRRRPRSPPEPLRVRARLRLRSPSGAFAALGALVVLVGMGIAVAGYWPHRAGAPGSRAANASSPQMSELRREGRGGGRAHGPHERLRLLGPVIMGVGLFVFICANTLLYENRDLETRRLRQGVLRAQALRPPDGPGWDCALLPSPGPRSPRAVGCAEPEIWDPSPRRGTSPVPSVRSLRSEPANPRLGLPALLNSYPLKGPGLPPPWGPRTQTGHVIITVQPSGSCIEHSKSLDLGLGELLLGAPAARDCAHRSWPRLDRLSLGGYAKLGGGGDLGARVLKRGETACSEAAAWTMLIGPKDQESQRLIDVSVTSQAGDGCSDHSSCEGHPDLHAGREMPAAPGLSELERVRFTVGCGGLASGISSASVSGLSPNRAGGPGQGDWEMYPVSWQTQESGGQGPLRLGGRLGCYRLGQAPSKAALVMECGASGKMDHGMRLSTAIWDGD

SEQ ID NO: 798446 - protein, 474 aa, Homo sapiens; identical to SEQ ID NO: 798445

SEQ ID NO: 798447 - protein, 474 aa, Homo sapiens; identical to SEQ ID NO: 798445

SEQ ID NO: 798448 - protein, 715 aa, Homo sapiens
IPAGSRGWDGNAGWKSGRGKSLKTLMSKGILQVHPPICDCPGCRISSPVNRGRLADKRTVALPAARNLKKEELPSFSAPPTRDRTGVAPPVGGWPGLKQEDGPHIRIMKRRVHTHWDVNISFREASCSQDGNLPTLISSVHRSRHLVMPEHQSRCEFQRGSLEIGLRPAGDLLGKRLGRSPRISSDCFSEKRARSESPQEALLLPRELGPSMAPEDHYRRLVSALSEASTFEDPQRLYHLGLPSHDLLRVRQEVAAAALRGPSGLEAHLPSSTAGQRRKQGLAQHREGAAPAAAPSFSERELPQPPPLLSPQNAPHVALGPHLRPPFLGVPSALCQTPGYGFLPPAQAEMFARQQELLRKQNLGPAGAARRLLRQKELESARPQLLAPRPPWPQRRPEELQRPRALLVLNHGAGTAGPAPQAPGLRTPEPVPDLCPSSPPEGGPGPASARPSESKEMTGARLWAQDGSEDEPPKDSDGEDPETAAVGCRGPTPGQAPAGGAGAEGKGLFPGSTLPLGFPYAVSPYFHTGAVGGLSMDGEEAPAPEDVTKWTVDDVCSFVGGLSGCGEYTRVFREQGIDGETLPLLTEEHLLTNMGLKLGPALKIRAQALQVARRLGRVFYVASFPVALPLQPPTLRAPERELGTGEQPLSPTTATCPYRRRGPRPCRSNFTQAGEWDLGSTSRGPRPFPASVSRLPGVGVGPHKSPGATTQHNGP

SEQ ID NO: 798449 - protein, 731 aa, Homo sapiens
IPAGSRGWDGNAGWKSGRGKSLKTLMSKGILQVHPPICDCPGCRISSPVNRGRLADKRTVALPAARNLKKEELPSFSAPPTRDRTGVAPPVGGWPGLKQEDGPHIRIMKRRVHTHWDVNISFREASCSQDGNLPTLISSVHRSRHLVMPEHQSRCEFQRGSLEIGLRPAGDLLGKRLGRSPRISSDCFSEKRARSESPQEALLLPRELGPSMAPEDHYRRLVSALSEASTFEDPQRLYHLGLPSHGEDPPWHDPPHHLPSHDLLRVRQEVAAAALRGPSGLEAHLPSSTAGQRRKQGLAQHREGAAPAAAPSFSERELPQPPPLLSPQNAPHVALGPHLRPPFLGVPSALCQTPGYGFLPPAQAEMFARQQELLRKQNLGPAGAARRLLRQKELESARPQLLAPRPPWPQRRPEELQRPRALLVLNHGAGTAGPAPQAPGLRTPEPVPDLCPSSPPEGRPGPASARPSESKEMTGARLWAQDGSEDEPPKDSDGEDPETAAVGCRGPTPGQAPAGGAGAEGKGLFPGSTLPLGFPYAVSPYFHTGAVGGLSMDGEEAPAPEDVTKWTVDDVCSFVGGLSGCGEYTRVFREQGIDGETLPLLTEEHLLTNMGLKLGPALKIRAQALQVARRLGRVFYVASFPVALPLQPPTLRAPERELGTGEQPLSPTTATCPYRRRGPRPCRSNFTQAGEWDLGSTSRGPRPFPASVSRLPGVGVGPHKSPGATTQHNGP

SEQ ID NO: 798450 - protein, 520 aa, Homo sapiens
MAPEDHYRRLVSALSEASTFEDPQRLYHLGLPSHGEDPPWHDPPHHLPSHDLLRVRQEVAAAALRGPSGLEAHLPSSTAGQRRKQGLAQHREGAAPAAAPSFSERELPQPPPLLSPQNAPHVALGPHLRPPFLGVPSALCQTPGYGFLPPAQAEMFARQQELLRKQNLGPAGAARRLLRQKELESARPQLLAPRPPWPQRRPEELQRPRALLVLNHGAGTAGPAPQAPGLRTPEPVPDLCPGAPRKGGPGPASARPSESKEMTGARLWAQDGSEDEPPKDSDGEDPETAAVGCRGPTPGQAPAGGAGAEGKGLFPGSTLPLGFPYAVSPYFHTGAVGGLSMDGEEAPAPEDVTKWTVDDVCSFVGGLSGCGEYTRVFREQGIDGETLPLLTEEHLLTNMGLKLGPALKIRAQALQVARRLGRVFYVASFPVALPLQPPTLRAPERELGTGEQPLSPTTATCPYRRRGPRPCRSNFTQAGEWDLGSTSRGPRPFPASVSRLPGVGVGPHKSPGATTQHNGP

SEQ ID NO: 798451 - protein, 511 aa, Homo sapiens
RNPAASAGALGPAGIDAGGLAGWALRAGTRPGAGPTSAFGHDLLRVRQEVAAAALRGPSGLEAHLPSSTAGQRRKQGLAQHREGAAPAAAPSFSERELPQPPPLLSPQNAPHVALGPHLRPPFLGVPSALCQTPGYGFLPPAQAEMFARQQELLRKQNLGPAGAARRLLRQKELESARPQLLAPRPPWPQRRPEELQRPRALLVLNHGAGTAGPAPQAPGLRTPEPVPDLCPSSPPEGGPGPASARPSESKEMTGARLWAQDGSEDEPPKDSDGEDPETAAVGCRGPTPGQAPAGGAGAEGKGLFPGSTLPLGFPYAVSPYFHTGAVGGLSMDGEEAPAPEDVTKWTVDDVCSFVGGLSGCGEYTRVFREQGIDGETLPLLTEEHLLTNMGLKLGPALKIRAQALQVARRLGRVFYVASFPVALPLQPPTLRAPERELGTGEQPLSPTTATCPYRRRGPRPCRSNFTQAGEWDLGSTSRGPRPFPASVSRLPGVGVGPHKSPGATTQHNGP

SEQ ID NO: 798452 - protein, 540 aa, Homo sapiens
IPAGSRGWDGNAGWKSGRGKSLKTLMSKGILQVHPPICDCPGCRISSPVNRGRLADKRTVALPAARNLKKEELPSFSAPPTRDRTGVAPPVGGWPGLKQEDGPHIRIMKRRVHTHWDVNISFREASCSQDGNLPTLISSVHRSRHLVMPEHQSRCEFQRGSLEIGLRPAGDLLGKRLGRSPRISSDCFSEKRARSESPQEALLLPRELGPSMAPEDHYRRLVSALSEASTFEDPQRLYHLGLPSHDLLRVRQEVAAAALRGPSGLEAHLPSSTAGQRRKQGLAQHREGAAPAAAPSFSERELPQPPPLLSPQNAPPLRAKLQLEEAGAEGKGLFPGSTLPLGFPYAVSPYFHTGAVGGLSMDGEEAPAPEDVTKWTVDDVCSFVGGLSGCGEYTRVFREQGIDGETLPLLTEEHLLTNMGLKLGPALKIRAQALQVARRLGRVFYVASFPVALPLQPPTLRAPERELGTGEQPLSPTTATCPYRRRGPRPCRSNFTQAGEWDLGSTSRGPRPFPASVSRLPGVGVGPHKSPGATTQHNGP

SEQ ID NO: 798453 - protein, 259 aa, Homo sapiens
MTGARLWAQDGSEDEPPKDSDGEDPETAAVGCRGPTPGQAPAGGAGAEGKGLFPGSTLPLGFPYAVSPYFHTGAVGGLSMDGEEAPAPEDVTKWTVDDVCSFVGGLSGCGEYTRVFREQGIDGETLPLLTEEHLLTNMGLKLGPALKIRAQALQVARRLGRVFYVASFPVALPLQPPTLRAPERELGTGEQPLSPTTATCPYRRRGPRPCRSNFTQAGEWDLGSTSRGPRPFPASVSRLPGVGVGPHKSPGATTQHNGP

SEQ ID NO: 798454 - protein, 83 aa, Homo sapiens
FCLTLKPNRSLFLKNFRELHKQLLLALLGWRMEQHPGPDPPSLPLPGLQGAGDRRGDPATADGGAPADQHGAEAGARPQDPGP

SEQ ID NO: 798455 - protein, 458 aa, Homo sapiens
RSCAPPTMRRLPRALLLQLRLALLVAAGAPEVLVSAPRSLVWGPGLQAAVVLPVRYFYLQAVNSEGQNLTRSPAGETPFKVVVKSLSPKELVRIHVPKPLDRNDGTFLMRYRMYETVDEGLKIEVLYGDEHVAQSPYILKGPVYHEYCECPEDPQAWQKTLSCPTKEPQIAKDFASFPSINLQQMLKEVPKRFGDERGAIVHYTILNNHVYRRSLGKYTDFKMFSDEILLSLTRKVLLPDLEFYVNLGDWPLEHRKVNGTPSPIPIISWCGSLDSRDVVLPTYDITHSMLEAMRGVTNDLLSIQGNTGPSWINKTERAFFRGRDSREERLQLVQLSKENPQLLDAGITGYFFFQEKEKELGKAKLMGFFDFFKYKYQVNVDGTVAAYRYPYLMLGDSLVLKQDSPYYEHFYMALEPWKHYVPIKRNLSDLLEKVKWAKENDEEAKKIAKEGQLMARDL

SEQ ID NO: 798456 - protein, 79 aa, Homo sapiens
MTTTRARYHIYPYLMLGDSLVLKQDSPYYEHFYMALEPWKHYVPIKRNLSDLLEKVKWAKENDEEAKKIAKEGQLMARD

SEQ ID NO: 798457 - protein, 101 aa, Homo sapiens
TSSLTFYSKSEMHIHSKSHTETKPHKCPHCSKTFANSSYLAQHIRIHSGAKPYSCNFVGGFVLSVKLQNRGVAEKGEFKANARTGLSSLGATVRCRTRIYI

SEQ ID NO: 798458 - protein, 105 aa, Homo sapiens
VAQAEAQAQAQAQAQAQAQAQAQASQASQQQQQQQQQQQQQQQQPPPHFQSPGAAPQGGGGGDSNPNPPPQCSFDLTPYKTAEHHKDICLTVTTSTIQVEHLASS

SEQ ID NO: 798459 - protein, 105 aa, Homo sapiens; identical to SEQ ID NO: 798458

SEQ ID NO: 798460 - protein, 105 aa, Homo sapiens; identical to SEQ ID NO: 798458

SEQ ID NO: 798461 - protein, 105 aa, Homo sapiens; identical to SEQ ID NO: 798458

SEQ ID NO: 798462 - protein, 105 aa, Homo sapiens; identical to SEQ ID NO: 798458

SEQ ID NO: 798463 - protein, 131 aa, Homo sapiens
  misc_feature (5)..(5): Xaa can be any naturally occurring amino acid
  misc_feature (7)..(7): Xaa can be any naturally occurring amino acid
RLVRXEXWISSTRPSGDSNPNPPPQCSFDLTPYKTAGIIRTSASLSPPAPSRWSTWPALRDPCCHPLGRGRSSPGVFFLQLLVGKVLFFLDRPWLHLLGPLSRLSFTGYHPFSELFFKRNISPPDCKGILS

SEQ ID NO: 798464 - protein, 105 aa, Homo sapiens; identical to SEQ ID NO: 798458

SEQ ID NO: 798465 - protein, 424 aa, Homo sapiens
MEKQCCSHPVICSLSTMYTFLLGAIFIALSSSRILLVKYSANEENKYDYLPTTVNVCSELVKLVFCVLVSFCVIKKDHQSRNLKYASWKEFSDFMKWSIPAFLYFLDNLIVFYVLSYLQPAMAVIFSNFSIITTALLFRIVLKRRLNWIQWASLLTLFLSIVALTAGTKTLQHNLAGRGFHHDAFFSPSNSCLLFRSECPRKDNCTAKEWTFPEAKWNTTARVFSHIRLGMGHVLIIVQCFISSMANIYNEKILKEGNQLTESIFIQNSKLYFFGILFNGLTLGLQRSNRDQIKNCGFFYGHSAFSVALIFVTAFQGLSVAFILKFLDNMFHVLMAQVTTVIITTVSVLVFDFRPSLEFFLEAPSVLLSIFIYNASKPQVPEYAPRQERIRDLSGNLWERSSGDGEELERLTKPKSDESDEDTF

SEQ ID NO: 798466 - protein, 424 aa, Homo sapiens; identical to SEQ ID NO: 798465

SEQ ID NO: 798467 - protein, 424 aa, Homo sapiens; identical to SEQ ID NO: 798465

SEQ ID NO: 798468 - protein, 330 aa, Homo sapiens [sequence omitted]

SEQ ID NO: 798469 - protein, 424 aa, Homo sapiens; identical to SEQ ID NO: 798465

SEQ ID NO: 798470 - protein, 235 aa, Homo sapiens
MEKQCCSHPVICSLSTMYTFLLGAIFIALSSSRILLVKYSANEENKYDYLPTTVNVCSELVKLVFCVLVSFCVIKKDHQSRNLKYASWKEFSDFMKWSIPAFLYFLDNLIVFYVLSYLQPAMAVIFSNFSIITTALLFRIVLKRRLNWIQWASLLTLFLSIVALTAGTKTLQHNLAGRGFHHDAFFSPSNSCLLFRSPPWNFSWKPHQSFSLYLFIMPASLKFRNTHLGKKGSEI

SEQ ID NO: 798471 - protein, 209 aa, Homo sapiens
MEKQCCSHPVICSLSTMYTFLLGAIFIALSSSRILLVKYSANEENKYDYLPTTVNVCSELVKLVFCVLVSFCVIKKDHQSRNLKYASWKEFSDFMKWSIPAFLYFLDNLIVFYVLSYLQPAMAVIFSNFSIITTALLFRIVLKRRLNWIQWASLLTLFLSIVALTAGTKTLQHNLAGRGFHHDAFFSPSNSCLLFRRWRRTRKTYQTQE

SEQ ID NO: 798472 - protein, 119 aa, Homo sapiens
MKWSIPAFLYFLDNLIVFYVLSYLQPAMAVIFSNFSIITTALLFRIVLKRRLNWIQWASLLTLFLSIVALTAGTKTLQHNLAGRGFHHDAFFSPSNSCLLFRTSLKFRNTHLGKKGSEI

SEQ ID NO: 798473 - protein, 403 aa, Homo sapiens
MEKQCCSHPVICSLSTMYTFLLGAIFIALSSSRILLVKYSANEENKYDYLPTTVNVCSELVKLVFCVLVSFCVIKKDHQSRNLKYASWKEFSDFMKWSIPAFLYFLDNLIVFYVLSYLQPAMAVIFSNFSIITTALLFRIVLKRRLNWIQWASLLTLFLSIVALTAGTKTLQHNLAGRGFHHDAFFSPSNSCLLFRSECPRKDNCTAKEWTFPEAKWNTTARVFSHIRLGMGHVLIIVQCFISSMANIYNEKILKEGNQLTESIFIQNSKLYFFGILFNGLTLGLQRSNRDQIKNCGFFYGHSAFSVALIFVTAFQGLSVAFILKFLDNMFHVLMAQVTTVIITTVSVLVFDFRPSLEFFLEAPSVLLSIFIYNASKPQVPEYAPRQERIRDLSGNLWERSSG

SEQ ID NO: 798474 - protein, 112 aa, Homo sapiens
SGVEKLQGTQKTQTTEFEGLLANSGTYGKTQMNHQLVSLCHPGWSGAITAHCSLDLPDSSDPPTTASQVARTTGECSAKLCNKFQASSGQLLSFLRKLTFSPWSDGTESRKL

SEQ ID NO: 798475 - protein, 546 aa, Homo sapiens
EVDTWLPSVPAEEVQQPEMAAVLNAERLEVSVDGLTLSPDPEERPGAEGAPLLPPPLPPPSPPGSGRGPGASGEQPEPGEAAAGGAAEEARRLEQRWGFGLEELYGLALRFFKEKDGKAFHPTYEEKLKLVALHKQVLMGPYNPDTCPEVGFFDVLGNDRRREWAALGNMSKEDAMVEFVKLLNRCCHLFSTYVASHKIEKEEQDKKRKEEEERRRREEEERERLQKEEEKRRREEEERLRREEEERRRIEEERLRLEQQKQQIMAALNSQTAVQFQQYAAQQYPGNYEQQQILIRQLQEQHYQQYMQQLYQVQLAQQQAALQKQQEVVVAGSSLPTSSKVNATVPSNMMSVNGQAKTHTDSSEKELEPEAAEEALENGPKESLPVIAAPSMWTRPQIKDFKEKIQQDADSVITVGRGEVVTVRVPTHEEGSYLFWEFATDNYDIGFGVYFEWTDSPNTAVSVHVSESSDDDEEEEENIGCEEKAKKNANKPLLDEIVPVYRRDCHEEVYAGSHQYPGRGVYLLKFDNSYSLWRSKSVYYRVYYTR

SEQ ID NO: 798476 - protein, 208 aa, Homo sapiens
EVDTWLPSVPAEEVQQPEMAAVLNAERLEVSVDGLTLSPDPEERPGAEGAPLLPPPLPPPSPPGSGRGPGASGEQPEPGEAAAGGAAEEARRLEQRWGFGLEELYGLALRFFKEKDGKAFHPTYEEKLKLVALHKQVLMGPYNPDTCPEVGFFDVLGNDRRREWAALGNMSKEDAMVEFVKLLNRCCHLFSTYVASHKIEKEEQDKKR

SEQ ID NO: 798477 - protein, 546 aa, Homo sapiens; identical to SEQ ID NO: 798475

SEQ ID NO: 798478 - protein, 269 aa, Homo sapiens
EVDTWLPSVPAEEVQQPEMAAVLNAERLEVSVDGLTLSPDPEERPGAEGAPLLPPPLPPPSPPGSGRGPGASGEQPEPGEAAAGGAAEEARRLEQRWGFGLEELYGLALRFFKEKDGKAFHPTYEEKLKLVALHKQVLMGPYNPDTCPEVGFFDVLGNDRRREWAALGNMSKEDAMVEFVKLLNRCCHLFSTYVASHKIEKEEQDKKRKEEEERRRREEEERERLQKEEEKRRREEEERLRREEEERRRIEEERLRLEQQKQHYRNNRK

SEQ ID NO: 798479 - protein, 364 aa, Homo sapiens
  misc_feature (3)..(3): Xaa can be any naturally occurring amino acid
PKXKWSLFEYPPMKKDHISFEEFATEKEEEERRRREEEERERLQKEEEKRRREEEERLRREEEERRRIEEERLRLEQQKQQIMAALNSQTAVQFQQYAAQQYPGNYEQQQILIRQLQEQHYQQYMQQLYQVQLAQQQAALQKQQEVVVAGSSLPTSSKVNATVPSNMMSVNGQAKTHTDSSEKELEPEAAEEALENGPKESLPVIAAPSMWTRPQIKDFKEKIQQDADSVITVGRGEVVTVRVPTHEEGSYLFWEFATDNYDIGFGVYFEWTDSPNTAVSVHVSESSDDDEEEEENIGCEEKAKKNANKPLLDEIVPVYRRDCHEEVYAGSHQYPGRGVYLLKFDNSYSLWRSKSVYYRVYYTR

SEQ ID NO: 798480 - protein, 546 aa, Homo sapiens; identical to SEQ ID NO: 798475

SEQ ID NO: 798481 - protein, 117 aa, Homo sapiens
VKAYRRPTRSGILNGQTLQTLLSACMSVSPAMTTRRKKKTSVVKRKPKRMPTSLCWMRLCLCTDGTVMRRCMLAAINIQGEESISSSLTTPTLCGGQNQSTTESIILDKNVVTKSGV

SEQ ID NO: 798482 - protein, 440 aa, Homo sapiens
EVDTWLPSVPAEEVQQPEMAAVLNAERLEVSVDGLTLSPDPEERPGAEGAPLLPPPLPPPSPPGSGRGPGASGEQPEPGEAAAGGAAEEARRLEQRWGFGLEELYGLALRFFKEKDGKAFHPTYEEKLKLVALHKQVLMGPYNPDTCPEVGFFDVLGNDRRREWAALGNMSKEDAMVEFVKLLNRCCHLFSTYVASHKIEKEEQDKKRKEEEERRRREEEERERLQKEEEKRRREEEERLRREEEERRRIEEERLRLEQQKQQIMAALNSQTAVQFQQYAAQQYPGNYEQQQILIRQLQEQHYQQYMQQLYQVQLAQQQAALQKQQEVVVAGSSLPTSSKVNATVPSNMMSVNGQAKTHTDSSEKELEPEAAEEALENGPKESLPVIAAPSMWTRPQIKDFKEKIQQDADSVITVGRGEVVTVRVPTHEEGSYLFIIHWP

SEQ ID NO: 798483 - protein, 397 aa, Homo sapiens
EVDTWLPSVPAEEVQQPEMAAVLNAERLEVSVDGLTLSPDPEERPGAEGAPLLPPPLPPPSPPGSGRGPGASGEQPEPGEAAAGGAAEEARRLEQRWGFGLEELYGLALRFFKEKDGKAFHPTYEEKLKLVALHKQVLMGPYNPDTCPEVGFFDVLGNDRRREWAALGNMSKEDAMVEFVKLLNRCCHLFSTYVASHKIEKEEQDKKRKEEEERRRREEEERERLQKEEEKRRREEEERLRREEEERRRIEEERLRLEQQKQQIMAALNSQTAVQFQQYAAQQYPGNYEQQQILIRQLQEQHYQQYMQQLYQVQLAQQQAALQKQQEVVVAGSSLPTSSKVNATVPSNMMSVNGQAKTHTDSSEKELEPEAAEEALENGPKGRFCICVCPDVIIPNL

SEQ ID NO: 798484 - protein, 269 aa, Homo sapiens; identical to SEQ ID NO: 798478

SEQ ID NO: 798485 - protein, 120 aa, Homo sapiens
RIQNGTDLAPPGRKQNKCRSRTLYIAGSCSSSGRGWVLPHHLSVLGLRPGSALTDSRLAVNNRIPPEPGNSRSEISVKNERHSAAQPRLQACPAGPVPSLWDGTLWESLLILMVHSFRCP

SEQ ID NO: 798486 - protein, 120 aa, Homo sapiens; identical to SEQ ID NO: 798485

SEQ ID NO: 798487 - protein, 120 aa, Homo sapiens; identical to SEQ ID NO: 798485

SEQ ID NO: 798488 - protein, 120 aa, Homo sapiens; identical to SEQ ID NO: 798485

SEQ ID NO: 798489 - protein, 72 aa, Homo sapiens
MEVSGSSRLSTKREASCEGGCGGGRAYVETLCSLLLSRGLLRLLLNCLRRIQSRRLCAPPPGTLRLGKEIFS

SEQ ID NO: 798490 - protein, 85 aa, Homo sapiens
ASEGLADGCRDHRGLDFEMSRTKCCPFSAALPVSAGTVGAAVQPNFDFRSCMPVKLLMSAVLQDPMRSLSPSTIPLKTVAQNSLE

SEQ ID NO: 798491 - protein, 153 aa, Homo sapiens
MGGSALNQGVLEGDDAPGQSLYERLSQRMLDISGDRGVLKDVIREGAGDLVAPDASVLDITLWGMELGLLSMQRGELARFLFKPNYAYGTLGSPPLIPPNTTVLFKIELLDFLDCAESDKFCALSAVRCRAQMSALYRETNGLVFLVILLDGL

SEQ ID NO: 798492 - protein, 131 aa, Homo sapiens
MGGSALNQGVLEGDDAPGQSLYERLSQRMLDISGDRGVLKDVIREGAGDLVAPDASVLVKYYGYLEHLDRPFDSNYFRKTPRLMKLGEDITLWGMELGLLSMQRGELARCFVLGKLLDSQGPSLHLYLRAS

SEQ ID NO: 798493 - protein, 131 aa, Homo sapiens; identical to SEQ ID NO: 798492

SEQ ID NO: 798494 - protein, 137 aa, Homo sapiens
LRFHPGFGTAAIMAPPVRYCIPGERLCNLEEGSPGSGTYTRHGYIFSSLAGCLMKSSENGALPVVSVVRETESQLLPDVGAIVTCKVSSINSRFAKVHILYVGSMPLKNSFRGTIRKEDVRATEKDKVEIYKSFRPG

SEQ ID NO: 798495 - protein, 71 aa, Homo sapiens
LRFHPGFGTAAIMAPPVRYCIPGERLCNLEEGSPGSGTYTRHGYIFSSLAGCLMKSSENGAVEIYKSFRPG

SEQ ID NO: 798496 - protein, 112 aa, Homo sapiens
LRFHPGFGTAAIMAPPVRYCIPGERLCNLEEGSPGSGTYTRHGYIFSSLAGCLMKSSENGAVSSINSRFAKVHILYVGSMPLKNSFRGTIRKEDVRATEKDKVEIYKSFRPG

SEQ ID NO: 798497 - protein, 116 aa, Homo sapiens
LRFHPGFGTAAIMAPPVRYCIPGERLCNLEEGSPGSGTYTRHGYIFSSLAGCLMKSSENGALPVVSVVRETESQLLPDVGAIVTCKVSSINSRFAKVHILYVGSMPLKNSFRGTIR

SEQ ID NO: 798498 - protein, 107 aa, Homo sapiens
MWGPCLLRTLFEELSARKMSEQLKKTRLKFIRVSAQGDIVLAKVISLGDAQSNYLLTTAENELGVVVAHSESGIQMVPISWCEMQCPKTHTKEFRKVARVQPEFLQT

SEQ ID NO: 798499 - protein, 137 aa, Homo sapiens; identical to SEQ ID NO: 798494

SEQ ID NO: 798500 - protein, 84 aa, Homo sapiens
SGALRIPYEALGDISWQSVTEISLGDAQSNYLLTTAENELGVVVAHSESGIQMVPISWCEMQCPKTHTKEFRKVARVQPEFLQT

SEQ ID NO: 798501 - protein, 137 aa, Homo sapiens; identical to SEQ ID NO: 798494

SEQ ID NO: 798502 - protein, 78 aa, Homo sapiens
LRFHPGFGTAAIMAPPVRYCIPGERLCNLEEGSPGSGTYTRHGYIFSSLAGCLMKSSENGAVKEAACHLPSVFPLGCP

SEQ ID NO: 798503 - protein, 135 aa, Homo sapiens
RRLNGLQLLGARDRCSIFSAGERLCNLEEGSPGSGTYTRHGYIFSSLAGCLMKSSENGALPVVSVVRETESQLLPDVGAIVTCKVSSINSRFAKVHILYVGSMPLKNSFRGTIRKEDVRATEKDKVEIYKSFRPG

SEQ ID NO: 798504 - protein, 137 aa, Homo sapiens; identical to SEQ ID NO: 798494

SEQ ID NO: 798505 - protein, 151 aa, Homo sapiens
LRFHPGFGTAAIMAPPVRYCIPGERLCNLEEGSPGSGTYTRHGYIFSSLAGCLMKSSENGALPVVSVVRETESQLLPDVGAIVTCKVSSINSRFAKVHILYVGSMPLKNSFRGTIRKEDVRATEKDKVSRWFPSAGVRCSALRPTLKNSGK

SEQ ID NO: 798506 - protein, 493 aa, Homo sapiens
MISSKPRLVVPYGLKTLLEGISRAVLKTNPSNINQFAAAYFQELTMYRGNTTMDIKDLVKQFHQIKVEKWSEGTTPQKKLECLKEPGKTSVESKVPTQMEKSTDTDEDNVTRTEYSDKTTQFPSVYAVPGTEQTEAVGGLSSKPATPKTTTPPSSPPPTAVSPEFAYVPADPAQLAAQMLGKVSSIHSDQSDVLMVDVATSMPVVIKEVPSSEAAEDVMVAAPLVCSGKVLEVQVVNQTSVHVDLGSQPKENEAEPSTASSVPLQDEQEPPAYDQAPEVTLQADIEVMSTVHISSVYNDVPVTEGVVYIEQLPEQIVIPFTDQVACLKENEQSKENEQSPRVSPKSVVEKTTSGMSKKSVESVKLAQLEENAKYSSVYMEAEATALLSDTSLKGQPEVPAQLLDAEGAIKIGSEKSLHLEVEITSIVSDNTGQEESGENSVPQEMEGKPVLSGEAAEAVHSGTSVKSSSGPFPPAPEGLTAPEIEPEGESTAE

SEQ ID NO: 798507 - protein, 493 aa, Homo sapiens; identical to SEQ ID NO: 798506

SEQ ID NO: 798508 - protein, 281 aa, Homo sapiens
MEKSTDTDEDNVTRTEYSDKTTQFPSVYAVPGTEQTEAVGGLSSKPATPKTTTPPSSPPPTAVSPEFAYVPADPAQLAAQMLAMATSERGQPPPCSNMWTLYCLTDKNQQGHPSPPPAPGPFPQATLYLPNPKDPQFQQHPPKVTFPTYVMGDTKKTSAPPFILVGSNVQEAQGWKPLPGHAVVSQSDVLRYVAMQVPIAVPADEKYQKHTLSPQNANPPSGQDVPRPKSPVFLSVAFPVEDVAKKSSGSGDKCAPFGSYGIAGEVTVTTAHKRRKAETEN

SEQ ID NO: 798509 - protein, 395 aa, Homo sapiens
MEKSTDTDEDNVTRTEYSDKTTQFPSVYAVPGTEQTEAVGGLSSKPATPKTTTPPSSPPPTAVSPEFAYVPADPAQLAAQMLGKVSSIHSDQSDVLMVDVATSMPVVIKEVPSSEAAEDVMVAAPLVCSGKVLEVQVVNQTSVHVDLGSQPKENEAEPSTASSVPLQDEQEPPAYDQAPEVTLQADIEVMSTVHISSVYNDVPVTEGVVYIEQLPEQIVIPFTDQVACLKENEQSKENEQSPRVSPKSVVEKTTSGMSKKSVESVKLAQLEENAKYSSVYMEAEATALLSDTSLKGQPEVPAQLLDAEGAIKIGSEKSLHLEVEITSIVSDNTGQEESGENSVPQEMEGKPVLSGEAAEAVHSGTSVKSSSGPFPPAPEGLTAPEIEPEGESTAE

SEQ ID NO: 798510 - protein, 221 aa, Homo sapiens
MISSKPRLVVPYGLKTLLEGISRAVLKTNPSNINQFAAAYFQELTMYRGNTTMDIKDLVKQFHQIKVEKWSEGTTPQKKLECLKEPGKTSVESKVPTQMEKSTDTDEDNVTRTEYSDKTTQFPSVYAVPGTEQTEAVGGLSSKPATPKTTTPPSSPPPTAVSPEFAYVPADPAQLAAQMLEDVAKKSSGSGDKCAPFGSYGIAGEVTVTTAHKRRKAETEN

SEQ ID NO: 798511 - protein, 379 aa, Homo sapiens
MISSKPRLVVPYGLKTLLEGISRAVLKTNPSNINQFAAAYFQELTMYRGNTTMDIKDLVKQFHQIKVEKWSEGTTPQKKLECLKEPGKTSVESKVPTQMEKSTDTDEDNVTRTEYSDKTTQFPSVYAVPGTEQTEAVGGLSSKPATPKTTTPPSSPPPTAVSPEFAYVPADPAQLAAQMLAMATSERGQPPPCSNMWTLYCLTDKNQQGHPSPPPAPGPFPQATLYLPNPKDPQFQQHPPKVTFPTYVMGDTKKTSAPPFILVGSNVQEAQGWKPLPGHAVVSQSDVLRYVAMQVPIAVPADEKYQKHTLSPQNANPPSGQDVPRPKSPVFLSVAFPVEDVAKKSSGSGDKCAPFGSYGIAGEVTVTTAHKRRKAETEN

SEQ ID NO: 798512 - protein, 493 aa, Homo sapiens; identical to SEQ ID NO: 798506

SEQ ID NO: 798513 - protein, 379 aa, Homo sapiens; identical to SEQ ID NO: 798511

SEQ ID NO: 798514 - protein, 493 aa, Homo sapiens; identical to SEQ ID NO: 798506

SEQ ID NO: 798515 - protein, 442 aa, Homo sapiens
MISSKPRLVVPYGLKTLLEGISRAVLKTNPSNINQFAAAYFQELTMYRGNTTMDIKDLVKQFHQIKVEKWSEGTTPQKKLECLKEPGKTSVESKVPTQMEKSTDTDEDNVTRTEYSDKTTQFPSVYAVPGTEQTEAVGGLSSKPATPKTTTPPSSPPPTAVSPEFAYVPADPAQLAAQMLGKVSSIHSDQSDVLMVDVATSMPVVIKEVPSSEAAEDVMVAAPLVCSGKVLEVQVVNQTSVHVDLGSQPKENEAEPSTASSVPLQDEQEPPAYDQAPEVTLQADIEVMSTVHISSVYNDVPVTEGVVYIEQLPEQIVIPFTDQVACLKENEQSKENEQSPRVSPKSVVEKTTSGMSKKSVESVKLAQLEENAKYSSVYMEAEATALLSDTSLKGQPEVPAQLLDAEGAIKIGSEKSLHLEVEITSIVSAPEGLTAPEIEPEC

SEQ ID NO: 798516 - protein, 395 aa, Homo sapiens; identical to SEQ ID NO: 798509

SEQ ID NO: 798517 - protein, 69 aa, Homo sapiens
TRGVSGTSPNPGPMVQEPGAPEDGHPRLSGERKFTLPPLLCSILAFNKLDDCPPTLVKAIFLLSLPIQC

SEQ ID NO: 798518 - protein, 277 aa, Homo sapiens
KVLSQREGTPAPAEAEQGKSQCPSGSTAQSWSAMDILVPLLQLLVLLLTLPLHLMALLGCWQPLCKSYFPYLMAVLTPKSNRKMESKKRELFSQIKGLTGASGKVALLELGCGTGANFQFYPPGCRVTCLDPNPHFEKFLTKSMAENRHLQYERFVVAPGEDMRQLADGSMDVVVCTLVLCSVQSPRKVLQEVRRVLRPGGVLFFWEHVAEPYGSWAFMWQQVFEPTWKHIGDGCCLTRETWKDLENAQFSEIQMERQPPPLKWLPVGPHIMGKAVK

SEQ ID NO: 798519 - protein, 259 aa, Homo sapiens
KVLSQREGTPAPAEAEQGKSQCPSGSTAQSWSAMDILVPLLQLLVLLLTLPLHLMALLGCWQPLCMESKKRELFSQIKGLTGASGKVALLELGCGTGANFQFYPPGCRVTCLDPNPHFEKFLTKSMAENRHLQYERFVVAPGEDMRQLADGSMDVVVCTLVLCSVQSPRKVLQEVRRVLRPGGVLFFWEHVAEPYGSWAFMWQQVFEPTWKHIGDGCCLTRETWKDLENAQFSEIQMERQPPPLKWLPVGPHIMGKAVK

SEQ ID NO: 798520 - protein, 159 aa, Homo sapiens
MNRKKLQKLTDTLTKNCKHLFRGFDKDNDGCVNVLEWIHGLSLFLRGSLEEKMKYCFEVFDLNGDGFISKEEMFHMLKNSLLKQPSEEDPDEGIKDLVEITLKKMDHDHDGKLSFADYELAVREETLLLEAFGPCLPDPKSQMEFEAQVFKDPNEFNDM

SEQ ID NO: 798521 - protein, 211 aa, Homo sapiens
MNRKKLQKLTDTLTKNCKHFNKFEVNCLIKLFYDLVGGVERQGLVVGLDRNAFRNILHVTFGMTDDMIMDRVFRGFDKDNDGCVNVLEWIHGLSLFLRGSLEEKMKYCFEVFDLNGDGFISKEEMFHMLKNSLLKQPSEEDPDEGIKDLVEITLKKMDHDHDGKLSFADYELAVREETLLLEAFGPCLPDPKSQMEFEAQVFKDPNEFNDM

SEQ ID NO: 798522 - protein, 211 aa, Homo sapiens; identical to SEQ ID NO: 798521

SEQ ID NO: 798523 - protein, 159 aa, Homo sapiens; identical to SEQ ID NO: 798520

SEQ ID NO: 798524 - protein, 211 aa, Homo sapiens; identical to SEQ ID NO: 798521

SEQ ID NO: 798525 - protein, 159 aa, Homo sapiens; identical to SEQ ID NO: 798520

SEQ ID NO: 798526 - protein, 171 aa, Homo sapiens
MNCFSISAFGPVAFSLGLLLVLPAAFPAPVPPGEDSKDVAAPHRQPLTSSERIDKQIRYILDGISALRKETCNKSNMCESSKEALAENNLNLPKMAEKDGCFQSGFNEETCLVKIITGLLEFEVYLEYLQNRFESSEEQARAVQMSTKVLIQFLQKKAKNLDAITTPSLHL

SEQ ID NO: 798527 - protein, 189 aa, Homo sapiens
MNSFSTIPPGEDSKDVAAPHRQPLTSSERIDKQIRYILDGISALRKETCNKSNMCESSKEALAENNLNLPKMAEKDGCFQSGFNEETCLVKIITGLLEFEVYLEYLQNRFESSEEQARAVQMSTKVLIQFLQKKAKNLDAITTPDPTTNASLLTKLQAQNQWLQDMTTHLILRSFKEFLQSSLRALRQM

SEQ ID NO: 798528 - protein, 194 aa, Homo sapiens
MNSFSTSAFGPVAFSLGLLLVLPAAFPAPVPPGEDSKDVAAPHRQPLTSSERIDKQIRYILDGISALRKENLNLPKMAEKDGCFQSGFNEETCLVKIITGLLEFEVYLEYLQNRFESSEEQARAVQMSTKVLIQFLQKKAKNLDAITTPDPTTNASLLTKLQAQNQWLQDMTTHLILRSFKEFLQSSLRALRQM

SEQ ID NO: 798529 - protein, 171 aa, Homo sapiens
MNSFSTSAFGPVAFSLGLLLVLPAAFPAPVPPGEDSKDVAAPHRQPLTSSERIDKQIRYILDGISALRKETCNKSNMCESSKEALAENNLNLPKMAEKDGCFQSGFNEETCLVKIITGLLEFEVYLEYLQNRFESSEEQARAVQMSTKVLIQFLQKKAKNLDAITTPSLHL

SEQ ID NO: 798530 - protein, 212 aa, Homo sapiens
MNSFSTSAFGPVAFSLGLLLVLPAAFPAPVPPGEDSKDVAAPHRQPLTSSERIDKQIRYILDGISALRKETCNKSNMCESSKEALAENNLNLPKMAEKDGCFQSGFNEETCLVKIITGLLEFEVYLEYLQNRFESSEEQARAVQMSTKVLIQFLQKKAKNLDAITTPDPTTNASLLTKLQAQNQWLQDMTTHLILRSFKEFLQSSLRALRQM

SEQ ID NO: 798531 - protein, 221 aa, Homo sapiens
SCAVSSPLRSLPSGTGAFGPVAFSLGLLLVLPAAFPAPVPPGEDSKDVAAPHRQPLTSSERIDKQIRYILDGISALRKETCNKSNMCESSKEALAENNLNLPKMAEKDGCFQSGFNEETCLVKIITGLLEFEVYLEYLQNRFESSEEQARAVQMSTKVLIQFLQKKAKNLDAITTPDPTTNASLLTKLQAQNQWLQDMTTHLILRSFKEFLQSSLRALRQM

SEQ ID NO: 798532 - protein, 136 aa, Homo sapiens
MCESSKEALAENNLNLPKMAEKDGCFQSGFNEETCLVKIITGLLEFEVYLEYLQNRFESSEEQARAVQMSTKVLIQFLQKKAKNLDAITTPDPTTNASLLTKLQAQNQWLQDMTTHLILRSFKEFLQSSLRALRQM

SEQ ID NO: 798533 - protein, 198 aa, Homo sapiens
MNSFSTSAFGPVAFSLGLLLVLPAAFPAPVPPGEDSKDVAAPHRQPLTSSERIDKQIRYILDGISALRKETCNKSNMCESSKEALAENNLNLPKMAEKDGCFQSGFNEETCLVKIITGLLEFEVYLEYLQNRFESSEEQARAVQMSTKVLIQFLQKKVGVSSFPQLGVGEDRLKDSVLDNSGMQCHFQKRRLHVNKRV

SEQ ID NO: 798534 - protein, 166 aa, Homo sapiens
MLDFFTIFSKGGLVLWCFQGVSDSCTGPVNALIRSVLLQERGGNNSFTHEALTLKYKLDNQFELVFVVGFQKILTLTYVDKLIDDVHRLFRDKYRTEIQQQSALSLLNGTFDFQNDFLRLLREAEESSKIRAPTTMKKFEDSEKGYGKDAAGIAMEAIAFGTVHGK

SEQ ID NO: 798535 - protein, 638 aa, Homo sapiens
MLDFFTIFSKGGLVLWCFQGVSDSCTGPVNALIRSVLLQERGGNNSFTHEALTLKYKLDNQFELVFVVGFQKILTLTYVDKLIDDVHRLFRDKYRTEIQQQSALSLLNGTFDFQNDFLRLLREAEESSKIRAPTTMKKFEDSEKAKKPVRSMIETRGEKPKEKAKNSKKKGAKKEGSDGPLATSKPVPAEKSGLPVGPENGVELSKEELIRRKREEFIQKHGRGMEKSNKSTKSDAPKEKGKKAPRVWELGGCANKEVLDYSTPTTNGTPEAALSEDINLIRGTGSGGQLQDLDCSSSDDEGAAQNSTKPSATKGTLGGMFGMLKGLVGSKSLSREDMESVLDKMRDHLIAKNVAADIAVQLCESVANKLEGKVMGTFSTVTSTVKQALQESLVQILQPQRRVDMLRDIMDAQRRQRPYVVTFCGVNGVGKSTNLAKISFWLLENGFSVLIAACDTFRAGAVEQLRTHTRRLSALHPPEKHGGRTMVQLFEKGYGKDAAGIAMEAIAFARNQGFDVVLVDTAGRMQDNAPLMTALAKLITVNTPDLVLFVGEALVGNEAVDQLVKFNRALADHSMAQTPRLIDGIVLTKFDTIDDKVGAAISMTYITSKPIVFVGTGQTYCDLRSLNAKAVVAALMKA

SEQ ID NO: 798536 - protein, 638 aa, Homo sapiens; identical to SEQ ID NO: 798535

SEQ ID NO: 798537 - protein, 491 aa, Homo sapiens
MALLHVTKALTWCVVDTAGRMQDKCPSDDCPGQTHYCAEYQPDLVLYVERSLSRHMKPWTSWSSSTEPMADHSMAQTPRLIDGIVLTKFDTMDDQRWEAAISMTYITSKPSSNVGTGRPTVTTQLNAKAVVAALMKAESGSCPIPDRRFPHKPFFLYLNSTKPCATKGTLGGMFGMLKGLVGSKSLSREDMESVLDKMRDHLIAKNVAADIAVQLCESVANKLEGKVMGTFSTVTSTVKQALQESLVQILQPQRRVDMLRDIMDAQRRQRPYVVTFCGVNGVGKSTNLAKISFWLLENGFSVLIAACDTFRAGAVEQLRTHTRRLSALHPPEKHGGRTMVQLFEKGYGKDAAGIAMEAIAFARNQGFDVVLVDTAGRMQDNAPLMTALAKLITVNTPDLVLFVGEALVGNEAVDQLVKFNRALADHSMAQTPRLIDGIVLTKFDTIDDKVGAAISMTYITSKPIVFVGTGQTYCDLRSLNAKAVVAALMKA

SEQ ID NO: 798538 - protein, 638 aa, Homo sapiens; identical to SEQ ID NO: 798535

SEQ ID NO: 798539 - protein, 115 aa, Homo sapiens
ERVGRPTRPAALAKLITVNTPDLVLFVGEALVGNEAVDQLVKFNRALADHSMAQTPRLIDGIVLTKFDTIDDKVGAAISMTYITSKPIVFVGTGQTYCDLRSLNAKAVVAALMKA

SEQ ID NO: 798540 - protein, 101 aa, Homo sapiens
RNAWVDPRVRLFVGEALVGNEAVDQLVKFNRALADHSMAQTPRLIDGIVLTKFDTIDDKVGAAISMTYITSKPIVFVGTGQTYCDLRSLNAKAVVAALMKA

SEQ ID NO: 798541 - protein, 638 aa, Homo sapiens; identical to SEQ ID NO: 798535

SEQ ID NO: 798542 - protein, 117 aa, Homo sapiens
MCFRVCEQPVFSVVQRQSEGACGSFQPHSPFSTAAICKEGLIMLQSLPTDPLPAGLPLPTQAPPSLCLQTQSYYSFDQWLEPNTRALLIISVVKSRLSLMSPSCIRLRDSSRASARS

SEQ ID NO: 798543 - protein, 638 aa, Homo sapiens; identical to SEQ ID NO: 798535

SEQ ID NO: 798544 - protein, 638 aa, Homo sapiens; identical to SEQ ID NO: 798535

SEQ ID NO: 798545 - protein, 643 aa, Homo sapiens
MLDFFTIFSKGGLVLWCFQGVSDSCTGPVNALIRSVLLQERGGNNSFTHEALTLKYKLDNQFELVFVVGFQKILTLTYVDKLIDDVHRLFRDKYRTEIQQQSALSLLNGTFDFQNDFLRLLREAEESSKIRAPTTMKKFEDSEKAKKPVRSMIETRGEKPKEKAKNSKKKGAKKEGSDGPLATSKPVPAEKSGLPVGPENGVELSKEELIRRKREEFIQKHGRGMEKSNKSTKSDAPKEKGKKAPRVWELGGCANKEVLDYSTPTTNGTPEAALSEDINLIRGTGSGGQLQDLDCSSSDDEGAAQNSTKPSATKGTLGGMFGMLKGLVGSKSLSREDMESVLDKMRDHLIAKNVAADIAVQLCESVANKLEGKVMGTFSTVTSTVKQALQESLVQILQPQRRVDMLRDIMDAQRRQRPYVVTFCGVNGVGKSTNLAKISFWLLENGFSVLIAACDTFRAGAVEQLRTHTRRLSALHPPEKHGGRTMVQLFEKGYGKDAAGIAMEAIAFARNQGFDVVLVDTAGRMQDNAPLMTALAKLITVNTPDLVLFVGEALVGNEAVDQLVKFNRALADHSMAQTPRLIDGIVLTKFDTIDDKVVHGFIAYYGFSYKQDQIRCIDSHEYGQGSHHRGIVLHAVCRVHQCI

SEQ ID NO: 798546 - protein, 502 aa, Homo sapiens
MLDFFTIFSKGGLVLWCFQGVSDSCTGPVNALIRSVLLQERGGNNSFTHEALTLKYKLDNQFELVFVVGFQKILTLTYVDKLIDDVHRLFRDKYRTEIQQQSALSLLNGTFDFQNDFLRLLREAEESSKIRAPTTMKKFEDSEKAKKPVRSMIETRGEKPKEKAKNSKKKGAKKEGSDGPLATSKPVPAEKSGLPVGPENGVELSKEELIRRKREEFIQKHGRGMEKSNKSTKSDAPKEKGKKAPRVWELGGCANKEVLDYSTPTTNGTPEAALSEDINLIRGTGSGGQLQDLDCSSSDDEGAAQNSTKPSATKGTLGGMFGMLKGLVGSKSLSREDMESVLDKMRDHLIGKNVAADHCPFPGSAGLLTTKQSWDRERDCGNVTAPGAHPQTNQALQEFPEMTQFLQGHTGPLLRTGGIQGDTRMGIAPSMHQHKKALLNSPETTHFRSQTHYNLEQLRGNKFYTVKALEQQSSSHITKSYRYTQRKSGLRKQDNTTTLARA

SEQ ID NO: 798547 - protein, 122 aa, Homo sapiens
MLDFFTIFSKGGLVLWCFQGVSDSCTGPVNALIRSVLLQERGGNNSFTHEALTLKYKLDNQFELVFVVGFQKILTLTYVDKLIDDVHRLFRDKYRTEIQQQSALSLLNGTFDFQNDFLRLLR

SEQ ID NO: 798548 - protein, 138 aa, Homo sapiens
MLDFFTIFSKGGLVLWCFQGVSDSCTGPVNALIRSVLLQERGGNNSFTHEALTLKYKLDNQFELVFVVGFQKILTLTYVDKLIDDVHRLFRDKYRTEIQQQSALSLLNGTFDFQNDFLRLLREAGSSKIHAQPRDGIL

SEQ ID NO: 798549 - protein, 112 aa, Homo sapiens
MCFRVCEQPVFSVVQRQSEGACGSFQPHSPFSTAAICKEGLIMLQSLPTDPLPAGLPLPTQAPPSLCLQTQSYYSFDQWLEPNTRALLIISVVKSRLSLMSPSCIRLRDSSR

SEQ ID NO: 798550 - protein, 638 aa, Homo sapiens; identical to SEQ ID NO: 798535

SEQ ID NO: 798551 - protein, 104 aa, Homo sapiens
DSGVSRFIADTSHEALTLKYKLDNQFELVFVVGFQKILTLTYVDKLIDDVHRLFRDKYRTEIQQQSALSLLNGTFDFQNDFLRLLREAEESSKILCSCYNRVDK

SEQ ID NO: 798552 - protein, 516 aa, Homo sapiens
MLDFFTIFSKGGLVLWCFQGVSDSCTGPVNALIRSVLLQERGGNNSFTHEALTLKYKLDNQFELVFVVGFQKILTLTYVDKLIDDVHRLFRDKYRTEIQQQSALSLLNGTFDFQNDFLRLLREAEESSKIRAPTTMKKFEDSEKAKKPVRSMIETRGEKPKEKAKNSKKKGAKKEGSDGPLATSKPVPAEKSGLPVGPENGVELSKEELIRRKREEFIQKHGRGMEKSNKSTKSDAPKEKGKKAPRVWELGGCANKEVLDYSTPTTNGTPEAALSEDINLIRGTGSGGQLQDLDCSSSDDEGAAQNSTKPSATKGTLGGMFGMLKGLVGSKSLSREDMESVLDKMRDHLIAKNVAADIAVQLCESVANKLEGKVMGTFSTVTSTVKQALQESLVQILQPQRRVDMLRDIMDAQRRQRPYVVTFCGVNGVGKSTNLAKISFWLLENGFSVLIAACDTFRAGAVEQLRTHTRRLSALHPPEKHGGRTMVQLFEKGYGKDAAGIAMEAIAFGQVQQSLG

SEQ ID NO: 798553 - protein, 503 aa, Homo sapiens [sequence omitted]

SEQ ID NO: 798554 - protein, 234 aa, Homo sapiens
MLRDIMDAQRRQRPYVVTFCGVNGVGKSTNLAKISFWLLENGFSVLIAACDTFRAGAVEQLRTHTRRLSALHPPEKHGGRTMVQLFEKGYGKDAAGIAMEAIAFARNQGFDVVLVDTAGRMQDNAPLMTALAKLITVNTPDLVLFVGEALVGNEAVDQLVKFNRALADHSMAQTPRLIDGIVLTKFDTIDDKVGAAISMTYITSKPIVFVGTGQTYCDLRSLNAKAVVAALMKA

SEQ ID NO: 798555 - protein, 638 aa, Homo sapiens; identical to SEQ ID NO: 798535

SEQ ID NO: 798556 - protein, 145 aa, Homo sapiens
SGAQLHANLPTLPTRPRNQGFDVVLVDTAGRMQDNAPLMTALAKLITVNTPDLVLFVGEALVGNEAVDQLVKFNRALADHSMAQTPRLIDGIVLTKFDTIDDKVGAAISMTYITSKPIVFVGTGQTYCDLRSLNAKAVVAALMKA

SEQ ID NO: 798557 - protein, 638 aa, Homo sapiens; identical to SEQ ID NO: 798535

SEQ ID NO: 798558 - protein, 119 aa, Homo sapiens
RGGGGPAEGLPTKRRRGDTAAAADKPPRRPATTQPEGGGQPEAAAGTAGSTEPAPPGQTPRLIDGIVLTKFDTIDDKVGAAISMTYITSKPIVFVGTGQTYCDLRSLNAKAVVAALMKA

SEQ ID NO: 798559 - protein, 638 aa, Homo sapiens; identical to SEQ ID NO: 798535

SEQ ID NO: 798560 - protein, 117 aa, Homo sapiens; identical to SEQ ID NO: 798542

SEQ ID NO: 798561 - protein, 638 aa, Homo sapiens; identical to SEQ ID NO: 798535

SEQ ID NO: 798562 - protein, 638 aa, Homo sapiens; identical to SEQ ID NO: 798535

SEQ ID NO: 798563 - protein, 638 aa, Homo sapiens; identical to SEQ ID NO: 798535

SEQ ID NO: 798564 - protein, 591 aa, Homo sapiens
MLDFFTIFSKGGLVLWCFQGVSDSCTGPVNALIRSVLLQERGGNNSFTHEALTLKYKLDNQFELVFVVGFQKILTLTYVDKLIDDVHRLFRDKYRTEIQQQSALSLLNGTFDFQNDFLRLLREAEESSKIRAPTTMKKFEDSEKAKKPVRSMIETRGEKPKEKAKNSKKKGAKKEGSDGPLATSKPVPAEKSGLPVGPENGVELSKEELIRRKREEFIQKHGRGMEKSNKSTKSDAPKEKGKKAPRVWELGGCANKEVLDYSTPTTNGTPEAALSEDINLIRGTGSGGQLQDLDCSSSDDEGAAQNSTKPSATKGTLGGMFGMLKGLVGSKSLSREDMESVLDKMRDHLIAKNVAADIAVQLCESVANKLEGKVMGTFSTVTSTVKQALQESLVQILQPQRRVDMLRDIMDAQRRQRPYVVTFCGVNGVGKSTNLAKISFWLLENGFSVLIAACDTFRAGAVEQLRTHTRRLSALHPPEKHGGRTMVQLFEKGYGKDAAGIAMEAIAFARNQGFDVVLVDTAGRMQDNAPLMTALAKLITVNTPDLVLFVGEALVGNEAVDQLLNGIKFGKNNAINEPRCLSHRMVSQALL

SEQ ID NO: 798565 - protein, 313 aa, Homo sapiens
MLDFFTIFSKGGLVLWCFQGVSDSCTGPVNALIRSVLLQERGGNNSFTHEALTLKYKLDNQFELVFVVGFQKILTLTYVDKLIDDVHRLFRDKYRTEIQQQSALSLLNGTFDFQNDFLRLLREAEESSKIRAPTTMKKFEDSEKAKKPVRSMIETRGEKPKEKAKNSKKKGAKKEGSDGPLATSKPVPAEKSGLPVGPENGVELSKEELIRRKREEFIQKHGRGMEKSNKSTKSDAPKEKGKKAPRVWELGGCANKEVLDYSTPTTNGTPEAALSEDINLIRGTGSGGQLQDLDCSSSDDEEHKPLVKTCPVA

SEQ ID NO: 798566 - protein, 120 aa, Homo sapiens
MLDFFTIFSKGGLVLWCFQGVSDSCTGPVNALIRSVLLQERGGNNSFTHEALTLKYKLDNQFELVFVVGFQKILTLTYVDKLIDDVHRLFRDKYRTEIQQQSALSLLNGTFDITPLYSAW

SEQ ID NO: 798567 - protein, 120 aa, Homo sapiens; identical to SEQ ID NO: 798566

SEQ ID NO: 798568 - protein, 140 aa, Homo sapiens
MLDFFTIFSKGGLVLWCFQGVSDSCTGPVNALIRSVLLQERGGNNSFTHEALTLKYKLDNQFELVFVVGFQKILTLTYVDKLIDDVHRLFRDKYRTEIQQQSALSLLNGTFDFQNDFLRLLREAEESSKILCSCYNRVDK

SEQ ID NO: 798569 - protein, 75 aa, Homo sapiens
SSSFSCQLPKRSLDPKSTLLLSLSSGGSSADWIPIASERRGLEPAAGPSRMGQGTRNALPTGMAWRPSAKSPLFP

SEQ ID NO: 798570 - protein, 75 aa, Homo sapiens; identical to SEQ ID NO: 798569

SEQ ID NO: 798571 - protein, 129 aa, Homo sapiens
PRNFLDAVRARWCYLELKKLHASVKLLTMGQRNKLRGPKSRNVFHIASQKNFKAKNKAKPVTTNLKKINIMNEEKVNRVNKAFVNVQKELAHFAKSISLEPLQKELIPQQRHESKPVNVDEATRLMALL

SEQ ID NO: 798572 - protein, 110 aa, Homo sapiens
ARYPLVRETMGQRNKLRGPKSRNVFHIASQKNFKAKNKAKPVTTNLKKINIMNEEKVNRVNKAFVNVQKELAHFAKSISLEPLQKELIPQQRHESKPVNVDEATRLMALL

SEQ ID NO: 798573 - protein, 129 aa, Homo sapiens; identical to SEQ ID NO: 798571

SEQ ID NO: 798574 - protein, 138 aa, Homo sapiens
IGREKLGISTFHLYRSTVTLCSARCPCCTISASASTLLPLIITSQFLVISRLITVKMVIQRSIANFSRTNALVRETMGQRNKLRGPKSRNVFHIASQKNFKAKNKAKPVTTNLKKIPQQRHESKPVNVDEATRLMALL

SEQ ID NO: 798575 - protein, 124 aa, Homo sapiens
PRNFLDAVRARWCYLELKKLHASVKLLTMGQRNKLRGPKSRNVFHIASQKNFKAKNKAKPVTTNLKKINIMNEEKVNRVNKAFVNVQKELAHFAKSISLEPLQKELIPQQRHESRPVNVDEATR

SEQ ID NO: 798576 - protein, 105 aa, Homo sapiens
MFKTMGQRNKLRGPKSRNVFHIASQKNFKAKNKAKPVTTNLKKINIMNEEKVNRVNKAFVNVQKELAHFAKSISLEPLQKELIPQQRHESKPVNVDEATRLMALL

SEQ ID NO: 798577 - protein, 129 aa, Homo sapiens; identical to SEQ ID NO: 798571

SEQ ID NO: 798578 - protein, 64 aa, Homo sapiens
MAHKKPQINRRLIIRPAAAAHNRHARHKRTVLNEGHLVGGDNDTHHDTSRASNNTSQGEPHRSS

SEQ ID NO: 798579 - protein, 71 aa, Homo sapiens
PRNFLDAVRARWCYLELKKLHASVKLLTMGQRNKLRGPKSRNVFHIASQKNFKAKNKAKPVTTNLKKVSIS

SEQ ID NO: 798580 - protein, 500 aa, Homo sapiens
MSPGLLLLGSAVLLAFGLCCTFVHRARSRYEHIPGPPRPSFLLGHLPCFWKKDEVGGRVLQDVFLDWAKKYGPVVRVNVFHKTSVIVTSPESVKKFLMSTKYNKDSKMYRALQTVFGERLFGQGLVSECNYERWHKQRRVIDLAFSRSSLVSLMETFNEKAEQLVEILEAKADGQTPVSMQDMLTYTAMDILAKAAFGMETSMLLGAQKPLSQAVKLMLEGITASRNTLAKFLPGKRKQLREVRESIRFLRQVGRDWVQRRREALKRGEEVPADILTQILKAEEGAQDDEGLLDNFVTFFIAGHETSANHLAFTVMELSRQPEIVARLQAEVDEVIGSKRYLDFEDLGRLQYLSQVLKESLRLYPPAWGTFRLLEEETLIDGVRVPGNTPLLFSTYVMGRMDTYFEDPLTFNPDRFGPGAPKPRFTYFPFSLGHRSCIGQQFAQMEVKVVMAKLLQRLEFRLVPGQRFGLQEQATLKPLDPVLCTLRPRGWQPAPPPPPC

SEQ ID NO: 798581 - protein, 163 aa, Homo sapiens
MTTLDSNNNTGGVITYIGSSGSSPSRTSPESLYSDNSNGSFQSLTQGCPTYFPPSPTGSLTQDPARSFGSIPPSLSDDGSPSSSSSSSSSSSSFYNGSPPGSLQVAMEDSSRVSPSKSTSNITKLNGMVLLCKVCGDVASGFHYGVHACEGCKVRRTGGKGRG

SEQ ID NO: 798582 - protein, 54 aa, Homo sapiens
MVRFASLFNVKDQTVMFLSRTTYSLQELGAMGMGDLLSAMFDFSEKRKGILYNS

SEQ ID NO: 798583 - protein, 614 aa, Homo sapiens
MTTLDSNNNTGGVITYIGSSGSSPSRTSPESLYSDNSNGSFQSLTQGCPTYFPPSPTGSLTQDPARSFGSIPPSLSDDGSPSSSSSSSSSSSSFYNGSPPGSLQVAMEDSSRVSPSKSTSNITKLNGMVLLCKVCGDVASGFHYGVHACEGCKGFFRRSIQQNIQYKRCLKNENCSIVRINRNRCQQCRFKKCLSVGMSRDAVRFGRIPKREKQRMLAEMQSAMNLANNQLSSQCPLETSPTQHPTPGPMGPSPPPAPVPSPLVGFSQFPQQLTPPRSPSPEPTVEDVISQVARAHREIFTYAHDKLGSSPGNFNANHASGSPPATTPHRWENQGCPPAPNDNNTLAAQRHNEALNGLRQAPSSYPPTWPPGPAHHSCHQSNSNGHRLCPTHVYAAPEGKAPANSPRQGNSKNVLLACPMNMYPHGRSGRTVQEIWEDFSMSFTPAVREVVEFAKHIPGFRDLSQHDQVTLLKAGTFEVLMVRFASLFNVKDQTVMFLSRTTYSLQELGAMGMGDLLSAMFDFSEKLNSLALTEEELGLFTAVVLVSADRSGMENSASVEQLQETLLRALRALVLKNRPLETSRFTKLLLKLPDLRTLNNMHSEKLLSFRVDAQ

SEQ ID NO: 798584 - protein, 614 aa, Homo sapiens; identical to SEQ ID NO: 798583

SEQ ID NO: 798585 - protein, 508 aa, Homo sapiens [sequence omitted]

SEQ ID NO: 798586 - protein, 329 aa, Homo sapiens
MTTLDSNNNTGGVITYIGSSGSSPSRTSPESLYSDNSNGSFQSLTQGCPTYFPPSPTGSLTQDPARSFGSIPPSLSDDGSPSSSSSSSSSSSSFYNGSPPGSLQVAMEDSSRVSPSKSTSNITKLNGMVLLCKVCGDVASGFHYGVHACEGCKGFFRRSIQQNIQYKRCLKNENCSIVRINRNRCQQCRFKKCLSVGMSRDAVRFGRIPKREKQRMLAEMQSAMNLANNQLSSQCPLETSPTQHPTPGPMGPSPPPAPVPSPLVGFSQFPQQLTPPRSPSPEPTVEDVISQVARAHREIFTKLLLKLPDLRTLNNMHSEKLLSFRVDAQ

SEQ ID NO: 798587 - protein, 614 aa, Homo sapiens; identical to SEQ ID NO: 798583

SEQ ID NO: 798588 - protein, 212 aa, Homo sapiens [sequence omitted]

SEQ ID NO: 798589 - protein, 122 aa, Homo sapiens [sequence omitted]

SEQ ID NO: 798590 - protein, 614 aa, Homo sapiens; identical to SEQ ID NO: 798583

SEQ ID NO: 798591 - protein, 602 aa, Homo sapiens [sequence omitted]

SEQ ID NO: 798592 - protein, 602 aa, Homo sapiens [sequence omitted]

SEQ ID NO: 798593 - protein, 687 aa, Homo sapiens
MEEFVGLREGSSGNPVTLQELWGPCPLIRRGIRGGLEWLKQKLFRLGEDWYFLMTLGVLMALVSCAMDLAVESVVRAHQWLYREIGDSHLLRYLSWTVYPVALVSFSSGFSQSITPSSGGSGIPEVKTMLAGVVLEDYLDIKNFGAKVVGLSCTLACGSTLFLGKVGPFVHLSVMMAAYLGRVRTTTIGEPENKSKQNEMLVAAAAVGVATVFGAPFSGVLFSIEVMSSHFSVWDYWRGFFAATCGAFMFRLLAVFNSEQETITSLYKTSFRVDVPFDLPEIFFFVALGGLCGILGSAYLFCQRIFFGFIRNNRFSSKLLATSKPVYSALATLVLASITYPPSAGRFLASRLSMKQHLDSLFDNHSWALMTQNSSPPWPEELDPQHLWWEWYHPRFTIFGTLAFFLVMKFWMLILATTIPMPAGYFMPIFVYGAAIGRLFGETLSFIFPEGIVAGGITNPIMPGGYALAGAAAFSGAVTHTISTALLAFEVTGQIVHALPVLMAVLAANAIAQSCQPSFYDGTVIVKKLPYLPRILGRNIGSHRVRVEHFMNHSITTLAKDTPLEEVVKVVTSTDVAEYPLVESTESQILVGIVRRAQLVQALKAEPPSWAPGHQQCLQDILAAGCPTEPVTLKLSPETSLHEAHNLFELLNLHSLFVTSRGRAVGCVSWVEMKKAISNLTNPPAPK

SEQ ID NO: 798594 - protein, 687 aa, Homo sapiens; identical to SEQ ID NO: 798593

SEQ ID NO: 798595 - protein, 687 aa, Homo sapiens; identical to SEQ ID NO: 798593

SEQ ID NO: 798596 - protein, 432 aa, Homo sapiens
ESLNLPLENAWYYNDIAALEFQLFCCGSLKRSCSKTREFPQVACRLLVILCPHPSLNNRFSSKLLATSKPVYSALATLVLASITYPPSAGRFLASRLSMKQHLDSLFDNHSWALMTQNSSPPWPEELDPQHLWWEWYHPRFTIFGTLAFFLVMKFWMLILATTIPMPAGYFMPIFVYGAAIGRLFGETLSFIFPEGIVAGGITNPIMPGGYALAGAAAFSGAVTHTISTALLAFEVTGQIVHALPVLMAVLAANAIAQSCQPSFYDGTVIVKKLPYLPRILGRNIGSHRVRVEHFMNHSITTLAKDTPLEEVVKVVTSTDVAEYPLVESTESQILVGIVRRAQLVQALKAEPPSWAPGHQQCLQDILAAGCPTEPVTLKLSPETSLHEAHNLFELLNLHSLFVTSRGRAVGCVSWVEMKKAISNLTNPPAPK

SEQ ID NO: 798597 - protein, 636 aa, Homo sapiens
MEEFVGLREGSSGNPVTLQELWGPCPLIRRGIRGGLEWLKQKLFRLGEDWYFLMTLGVLMALVSCAMDLAVESVVRAHQWLYREIGDSHLLRYLSWTVYPVALVSFSSGFSQSITPSSGGSGIPEVKTMLAGVVLEDYLDIKNFGAKVVGLSCTLACGSTLFLGKVGPFVHLSVMMAAYLGRVRTTTIGEPENKSKQNEMLVAAAAVGVATVFGAPFSGVLFSIEVMSSHFSVWDYWRGFFAATCGAFMFRLLAVFNSEQETITSLYKTSFRVDVPFDLPEIFFFVALGGLCGILGSAYLFCQRIFFGFIRNNRFSSKLLATSKPVYSALATLVLASITYPPSAGRFLASRLSMKQHLDSLFDNHSWALMTQNSSPPWPEELDPQHLWWEWYHPRFTIFGTLAFFLVMKFWMLILATTIPMPAGYFMPIFVYGAAIGRLFGETLSFIFPEGIVAGGITNPIMPGGYALAGAAAFSGAVTHTISTALLAFEVTGQIVHALPVLMAVLAANAIAQSCQPSFYDGTVIVKKLPYLPRILGRNIGSHRVRVEHFMNHSITTLAKDTPLEEVVKVVTSTDVAEYPLVESTESQILVGIVRRAQLVQALKAEPPSWAPGHQQCLQDILAAGCPTEPYLPGAQ

SEQ ID NO: 798598 - protein, 445 aa, Homo sapiens
MEELVGLREGFSGDPVTLQELWGPCPHIRRAIQGGLEWLKQKVFRLGEDWYFLMTLGVLMALVSYAMNFAIGCVVRAHQWLYREIGDSHLLRYLSWTVYPVALVSFSSGFSQSITPSSGGSGIPELKTMLAGVILEDYLDIKNFGAKVVGLSCTLATGSTLFLGKVDGQGPFVHLSVMIAAYLGRVRTTTIGEPENKSKQNEMLVAAAAVGVATVFAAPFSGVLFSIEVMSSHFSVRDYWRGFFAATCGAFIFRLLAVFNSEQETITSLYKTSFRVDVPFDLPEIFFFVALGGICGVLSCAYLFCQRTFLSFIKTNRYSSKLLATSRLSMKQHLDSLFDNHSWALMTQNSSPPWPEELDPQHLWWEWYHPRFTIFGTLAFFLVMKFWMLILATTIPMPAGYFMPIFILGAAIGRLLGEALAVAFPEGIVTGGVTNPIMPGGYALA

SEQ ID NO: 798599 - protein, 382 aa, Homo sapiens
MEELVGLREGFSGDPVTLQELWGPCPHIRRAIQGGLEWLKQKVFRLGEDWYFLMTLGVLMALVSYAMNFAIGCVVRAHQWLYREIGDSHLLRYLSWTVYPVALVSFSSGFSQSITPSSGGSGIPELKTMLAGVILEDYLDIKNFGAKVVGLSCTLATGSTLFLGKVDGQGPFVHLSVMIAAYLGRVRTTTIGEPENKSKQNEMLVAAAAVGVATVFAAPFSGVLFSIEVMSSHFSVRDYWRGFFAATCGAFIFRLLAVFNSEQETITSLYKTSFRVDVPFDLPEIFFFVALGGICGVLSCAYLFCQRTFLSFIKTNRYSSKLLATRSEPVYSALATLLLASITYPPGVGHFLASRLSMKQHLDSLFDDGSCLERQKSHLGQS

SEQ ID NO: 798600 - protein, 219 aa, Homo sapiens
MEELVGLREGFSGDPVTLQELWGPCPHIRRAIQGGLEWLKQKVFRLGEDWYFLMTLGVLMALVSYAMNFAIGCVVRGFSQSITPSSGGESTVAMPVPSAKTFSDPRGLLMGGVGKGQPHFTDKGPGRVMWLAQRDTARRPDLDFWVTAGPTCFPGAPLGLDGRPGGRIFCEACSSGQCQGGASGGGTAPPGRSALPPAPGQQRGAQSSLSGGLRFHPGF

SEQ ID NO: 798601 - protein, 244 aa, Homo sapiens
MSSHFSVRDYWRGFFAATCGAFIFRLLAVFNSEQETITSLYKTSFRVDVPFDLPEIFFFVALGGICGVLSCAYLFCQRTFLSFIKTNRYSSKLLATRSEPVYSALATLLLASITYPPGVGHFLASRLSMKQHLDSLFDNHSWALMTQNSSPPWPEELDPQHLWWEWYHPRFTIFGTLAFFLVMKFWMLILATTIPMPAGYFMPIFILGAAIGRLLGEALAVAFPEGIVTGGVTNPIMPGGYALA

SEQ ID NO: 798602 - protein, 687 aa, Homo sapiens; identical to SEQ ID NO: 798593

SEQ ID NO: 798603 - protein, 658 aa, Homo sapiens
MEEFVGLREGSSGNPVTLQELWGPCPLIRRGIRGGLEWLKQKLFRLGEDWYFLMTLGVLMALVSCAMDLAVESVVRAHQWLYREIGDSHLLRYLSWTVYPVALVSFSSGFSQSITPSSGGSGIPEVKTMLAGVVLEDYLDIKNFGAKVVGLSCTLACGSTLFLGKVGPFVHLSVMMAAYLGRVRTTTIGEPENKSKQNEMLVAAAAVGVATVFGAPFSGVLFSIEVMSSHFSVWDYWRGFFAATCGAFMFRLLAVFNSEQETITSLYKTSFRVDVPFDLPEIFFFVALGGLCGILGSAYLFCQRIFFGFIRNNRFSSKLLATSKPVYSALATLVLASITYPPSAGRFLASRLSMKQHLDSLFDNHSWALMTQNSSPPWPEELDPQHLWWEWYHPRFTIFGTLAFFLVMKFWMLILATTIPMPAGYFMPIFVYGAAIGRLFGETLSFIFPEGIVAGGITNPIMPGGYALAGAAAFSGAVTHTISTALLAFEVTGQIVHALPVLMAVLAANAIAQSCQPSFYDGTVIVKKLPYLPRILGRNIGSHRVRVEHFMNHSITTLAKDTPLEEVVKVVTSTDVAEYPLVESTESQILVGIVRRAQLVQALKAEPPSWAPGHQQCLQDILAAGCPTEPVTLKLSPETSLHEAQMASGVVWFPVRGS

SEQ ID NO: 798604 - protein, 445 aa, Homo sapiens; identical to SEQ ID NO: 798598

SEQ ID NO: 798605 - protein, 457 aa, Homo sapiens
SRLVRSGGVMGLMEELVGLREGFSGDPVTLQELWGPCPHIRRAIQGGLEWLKQKVFRLGEDWYFLMTLGVLMALVSYAMNFAIGCVVRAHQWLYREIGDSHLLRYLSWTVYPVALVSFSSGFSQSITPSSGGSGIPELKTMLAGVILEDYLDIKNFGAKVVGLSCTLATGSTLFLGKVDGQGPFVHLSVMIAAYLGRVRTTTIGEPENKSKQNEMLVAAAAVGVATVFAAPFSGVLFSIEVMSSHFSVRDYWRGFFAATCGAFIFRLLAVFNSEQETITSLYKTSFRVDVPFDLPEIFFFVALGGICGVLSCAYLFCQRTFLSFIKTNRYSSKLLATSRLSMKQHLDSLFDNHSWALMTQNSSPPWPEELDPQHLWWEWYHPRFTIFGTLAFFLVMKFWMLILATTIPMPAGYFMPIFILGAAIGRLLGEALAVAFPEGIVTGGVTNPIMPGGYALA

SEQ ID NO: 798606 - protein, 284 aa, Homo sapiens
ISGWATYPRTCGKRRSSSISNGSGIPELKTMLAGVILEDYLDIKNFGAKVVGLSCTLATGSTLFLGKVDGQGPFVHLSVMIAAYLGRVRTTTIGEPENKSKQNEMLVAAAAVGVATVFAAPFSGVLFSIEVMSSHFSVRDYWRGFFAATCGAFIFRLLAVFNSEQETITSLYKTSFRVDVPFDLPEIFFFVALGGICGVLSCAYLFCQRTFLSFIKTNRYSSKLLATRSEPVYSALATLLLASITYPPGVGHFLASRLSMKQHLDSLFDDGSCLERQKSHLGQS

SEQ ID NO: 798607 - protein, 161 aa, Homo sapiens
PSTVLLVLESHCYSIPGTLEPETLLLFLGRACLLQLSSLTCIYTAGKMWLQDRIATFFFPKGMMLTTAALMLFFLHLGIFIRDVHNFCITYHYDHMSFHYTVVLMFSQVISICWAAMGSLYAEMTENNAQRSHALQPPVLGVSGHRVPGGAPLRPGESEQG

SEQ ID NO: 798608 - protein, 278 aa, Homo sapiens
PSTVLLVLESHCYSIPGTLEPETLLLFLGRACLLQLSSLTCIYTAGKMWLQDRIATFFFPKGMMLTTAALMLFFLHLGIFIRDVHNFCITYHYDHMSFHYTVVLMFSQVISICWAAMGSLYAEMTENKYVCFSALTILSEWQEGEGARGSGELWNPEMWQGVAREGYWGSWGALSPAQCSTEPCSSTACPWSFWPSSTGRSTTEAWGVGTGLRRGKQKAASGVLIKLLFISTCQLLHGARGRRLETREESKSRQMLDPRGLQAWPAATLVDLALGLGS

SEQ ID NO: 798609 - protein, 129 aa, Homo sapiens
MCYELDSIRILTTGSKSESSGEQEAECLKSSYGTELLDETISGIPHLQAMRTVLWALNCSRLTTMTTSVKMSRLRRRLRLRRTSLAWRVNWIQLSAGEAILSSLEKRGQNPVSPPEPVSCLPQVSEQVA

SEQ ID NO: 798610 - protein, 124 aa, Homo sapiens
ICRSRMQASLWMAPFQWHRDQLTSNDKEEYQHDGIEEPQDEAEDILMGHCGDQEHTQHGYPSGPGTKELAGCCLQGPETESATANKSTSSTPLLLLVPHNDDPLSAGSSQKDYDSPSPCDSHDK

SEQ ID NO: 798611 - protein, 115 aa, Homo sapiens
RDRDGAVFSHQWLAMRQSSGGSKQLPVRFFLGTLPRAVPCAKLHVPFTTGEEQRSEADTLKGCCLQGPETESATANKSTSSTPLLLLVPHNDDPLSAGSSQKDYDSPSPCDSHDK

SEQ ID NO: 798612 - protein, 89 aa, Homo sapiens
PGEGAAAGATAVGAERGPAPLGLQDLVHVVQVLLGGQDLGVVAHLPHFALDGFDLPPLEPLLQGGADCGRGRDKKLSTGCKVPSTQPLH

SEQ ID NO: 798613 - protein, 198 aa, Homo sapiens
GRSGAVSTFTSEVEDSKEENKWGEGRQGRGFGPASGPTGWVGVGRKMGTDGRRAQSQGSPTAPRLLQIVTTTPAISGDFPENSEHGVPDSVSQSWDVIWCQPFRGHWGQHPHLTLSWGKGSTIMACPPRSLPTGGAQLPSDTLPQPFSSLPPTLDNHPWACQLPLLRPFSYTKPSPIPSSDISSAPLQPPSSGFGIYC

SEQ ID NO: 798614 - protein, 172 aa, Homo sapiens
GRSGAVSTFTSEVEDSKEENKWGEGRQGRGFGPASGPTGWVGVGRKMGTDGRRAQSQGSPTAPRLLQIVTTTPAISGDFPENSEHGVPDSVSQSWDVIWCQPFRGHWGQHPHLTLSWGKGSTIMACPPRSLPTGMSSQPLRTHPTPELLKALTRGEATLLLAVEVLDDSRPG

SEQ ID NO: 798615 - protein, 264 aa, Homo sapiens
MFVPCGESAPDLAGFTLLMPAVSVGNVGQLAMDLIISTLNMSKIGYFYTDCLVPMVGNNPYATTEGNSTELSINAEVYSLPSRKLVALQLRSIFIKYKSKPFCEKLLSWVKSSGCARVIVLSSSHSYQRNDLQLRSTPFRYLLTPSMQKSVQNKIKSLNWEEMEKSRCIPEIDDSEFCIRIPGGGITKTLYDESCSKEIQMAVLLKFVSEGDNIPDALGLVEYLNEWLQILKPLSDDPTVSASRWKIPSSWRLLFGSGLPPALF

SEQ ID NO: 798616 - protein, 257 aa, Homo sapiens
WLNTSLSTPIFRPAVSVGNVGQLAMDLIISTLNMSKIGYFYTDCLVPMVGNNPYATTEGNSTELSINAEVYSLPSRKLVALQLRSIFIKYKSKPFCEKLLSWVKSSGCARVIVLSSSHSYQRNDLQLRSTPFRYLLTPSMQKSVQNKIKSLNWEEMEKSRCIPEIDDSEFCIRIPGGGITKTLYDESCSKEIQMAVLLKFVSEGDNIPDALGLVEYLNEWLQILKPLSDDPTVSASRWKIPSSWRLLFGSGLPPALF

SEQ ID NO: 798617 - protein, 206 aa, Homo sapiens
AARDARDDEEQQNLANAEVYSLPSRKLVALQLRSIFIKYKSKPFCEKLLSWVKSSGCARVIVLSSSHSYQRNDLQLRSTPFRYLLTPSMQKSVQNKIKSLNWEEMEKSRCIPEIDDSEFCIRIPGGGITKTLYDESCSKEIQMAVLLKFVSEGDNIPDALGLVEYLNEWLQILKPLSDDPTVSASRWKIPSSWRLLFGSGLPPALF

SEQ ID NO: 798618 - protein, 299 aa, Homo sapiens
KQLYRPNPGSRASAFLLPSFLPGPRLVPAGHPTATMFVPCGESAPDLAGFTLLMPAVSVGNVGQLAMDLIISTLNMSKIGYFYTDCLVPMVGNNPYATTEGNSTELSINAEVYSLPSRKLVALQLRSIFIKYKSKPFCEKLLSWVKSSGCARVIVLSSSHSYQRNDLQLRSTPFRYLLTPSMQKSVQNKIKSLNWEEMEKSRCIPEIDDSEFCIRIPGGGITKTLYDESCSKEIQMAVLLKFVSEGDNIPDALGLVEYLNEWLQILKPLSDDPTVSASRWKIPSSWRLLFGSGLPPALF

SEQ ID NO: 798619 - protein, 264 aa, Homo sapiens; identical to SEQ ID NO: 798615

SEQ ID NO: 798620 - protein, 264 aa, Homo sapiens; identical to SEQ ID NO: 798615

SEQ ID NO: 798621 - protein, 264 aa, Homo sapiens; identical to SEQ ID NO: 798615

SEQ ID NO: 798622 - protein, 240 aa, Homo sapiens
MFVPCGESAPDLAGFTLLMPAVSVGNVGQLAMDLIISTLNMSKIGYFYTDCLVPMVGNNPYATTEGNSTELSINAEVYSLPSRKLVALQLRSIFIKYKSKPFCEKLLSWVKSSGCARVIVLSSSHSYQRNDLQLRSTPFRYLLTPSMQKSVQNKIKSLNWEEMEKSRCIPEIDDSEFCIRIPGGGITKTLYDESCSKEIQMAVLLKFVSEGDNIPDALGLVEYLNEWLQILKPLVSSIIA

SEQ ID NO: 798623 - protein, 272 aa, Homo sapiens [sequence omitted]

SEQ ID NO: 798624 - protein, 175 aa, Homo sapiens
FSQWCAKYKSKPFCEKLLSWVKSSGCARVIVLSSSHSYQRNDLQLRSTPFRYLLTPSMQKSVQNKIKSLNWEEMEKSRCIPEIDDSEFCIRIPGGGITKTLYDESCSKEIQMAVLLKFVSEGDNIPDALGLVEYLNEWLQILKPLSDDPTVSASRWKIPSSWRLLFGSGLPPALF

SEQ ID NO: 798625 - protein, 111 aa, Homo sapiens
MVQSLNWEEMEKSRCIPEIDDSEFCIRIPGGGITKTLYDESCSKEIQMAVLLKFVSEGDNIPDALGLVEYLNEWLQILKPLSDDPTVSASRWKIPSSWRLLFGSGLPPALF

SEQ ID NO: 798626 - protein, 975 aa, Homo sapiens
MYNMRRLSLSPTFSMGFHLLVTVSLLFSHVDHVIAETEMEGEGNETGECTGSYYCKKGVILPIWEPQDPSFGDKIARATVYFVAMVYMFLGVSIIADRFMSSIEVITSQEKEITIKKPNGETTKTTVRIWNETVSNLTLMALGSSAPEILLSVIEVCGHNFTAGDLGPSTIVGSAAFNMFIIIALCVYVVPDGETRKIKHLRVFFVTAAWSIFAYTWLYIILSVISPGVVEVWEGLLTFFFFPICVVFAWVADRRLLFYKYVYKRYRAGKQRGMIIEHEGDRPSSKTEIEMDGKVVNSHVENFLDGALVLEVDERDQDDEEARREMARILKELKQKHPDKEIEQLIELANYQVLSQQQKSRAFYRIQATRLMTGAGNILKRHAADQARKAVSMHEVNTEVTENDPVSKIFFEQGTYQCLENCGTVALTIIRRGGDLTNTVFVDFRTEDGTANAGSDYEFTEGTVVFKPGDTQKEIRVGIIDDDIFEEDENFLVHLSNVKVSSEASEDGILEANHVSTLACLGSPSTATVTIFDDDHAGIFTFEEPVTHVSESIGIMEVKVLRTSGARGNVIVPYKTIEGTARGGGEDFEDTCGELEFQNDEIVKTISVKVIDDEEYEKNKTFFLEIGEPRLVEMSEKKALLLNELGGFTITGKYLFGSSQPVFRKVHAREHPILSTVITIADEYDDKQPLTSKEEEERRIAEMGRPILGEHTKLEVIIEESYEFKSTVDKLIKKTNLALVVGTNSWREQFIEAITVSAGEDDDDDECGEEKLPSCFDYVMHFLTVFWKVLFAFVPPTEYWNGWACFIVSILMIGLLTAFIGDLASHFGCTIGLKDSVTAVVFVALGTSVPDTFASKVAATQDQYADASIGNVTGSNAVNVFLGIGVAWSIAAIYHAANGEQFKVSPGTLAFSVTLFTIFAFINVGVLLYRRRPEIGGELGGPRTAKLLTSCLFVLLWLLYIFFSSLEAYCHIKGF

SEQ ID NO: 798627 - protein, 956 aa, Homo sapiens
MYNMRRLSLSPTFSMGFHLLVTVSLLFSHVDHVIAETEMEGEGNETGECTGSYYCKKGVILPIWEPQDPSFGDKIARATVYFVAMVYMFLGVSIIADRFMSSIEVITSQEKEITIKKPNGETTKTTVRIWNETVSNLTLMALGSSAPEILLSVIEVCGHNFTAGDLGPSTIVGSAAFNMFIIIALCVYVVPDGETRKIKHLRVFFVTAAWSIFAYTWLYIILSVISPGVVEVWEGLLTFFFFPICVVFAWVADRRLLFYKYVYKRYRAGKQRGMIIEHEGDRPSSKTEIEMDGKVVNSHVENFLDGALVLEVDERDQDDEEARREMARILKELKQKHPDKEIEQLIELANYQVLSQQQKSRAFYRIQATRLMTGAGNILKRHAADQARKAVSMHEVNTEVTENDPVSKIFFEQGTYQCLENCGTVALTIIRRGGDLTNTVFVDFRTEDGTANAGSDYEFTEGTVVFKPGDTQKEIRVGIIDDDIFEEDENFLVHLSNVKVSSEASEDGILEANHVSTLACLGSPSTATVTIFDDDHAGIFTFEEPVTHVSESIGIMEVKVLRTSGARGNVIVPYKTIEGTARGGGEDFEDTCGELEFQNDEIVKIITIRIFDREEYEKECSFSLVLEEPKWIRRGMKGFCQPVFRKVHAREHPILSTVITIADEYDDKQPLTSKEEEERRIAEMGRPILGEHTKLEVIIEESYEFKSTVDKLIKKTNLALVVGTNSWREQFIEAITVSAGEDDDDDECGEEKLPSCFDYVMHFLTVFWKVLFAFVPPTEYWNGWACFIVSILMIGLLTAFIGDLASHFGCTIGLKDSVTAVVFVALGTSVPDTFASKVAATQDQYADASIGNVTGSNAVNVFLGIGVAWSIAAIYHAANGEQFKVSPGTLAFSVTLFTIFAFINVGVLLYRRRPEIGGELGGPRTAKLLTSCLFVLLWLLYIFFSSLEAYCHIKGF

SEQ ID NO: 798628 - protein, 956 aa, Homo sapiens; identical to SEQ ID NO: 798627

SEQ ID NO: 798629 - protein, 956 aa, Homo sapiens; identical to SEQ ID NO: 798627

SEQ ID NO: 798630 - protein, 953 aa, Homo sapiens
MRRLSLSPTFSMGFHLLVTVSLLFSHVDHVIAETEMEGEGNETGECTGSYYCKKGVILPIWEPQDPSFGDKIARATVYFVAMVYMFLGVSIIADRFMSSIEVITSQEKEITIKKPNGETTKTTVRIWNETVSNLTLMALGSSAPEILLSVIEVCGHNFTAGDLGPSTIVGSAAFNMFIIIALCVYVVPDGETRKIKHLRVFFVTAAWSIFAYTWLYIILSVISPGVVEVWEGLLTFFFFPICVVFAWVADRRLLFYKYVYKRYRAGKQRGMIIEHEGDRPSSKTEIEMDGKVVNSHVENFLDGALVLEVDERDQDDEEARREMARILKELKQKHPDKEIEQLIELANYQVLSQQQKSRAFYRIQATRLMTGAGNILKRHAADQARKAVSMHEVNTEVTENDPVSKIFFEQGTYQCLENCGTVALTIIRRGGDLTNTVFVDFRTEDGTANAGSDYEFTEGTVVFKPGDTQKEIRVGIIDDDIFEEDENFLVHLSNVKVSSEASEDGILEANHVSTLACLGSPSTATVTIFDDDHAGIFTFEEPVTHVSESIGIMEVKVLRTSGARGNVIVPYKTIEGTARGGGEDFEDTCGELEFQNDEIVKIITIRIFDREEYEKECSFSLVLEEPKWIRRGMKGFCQPVFRKVHAREHPILSTVITIADEYDDKQPLTSKEEEERRIAEMGRPILGEHTKLEVIIEESYEFKSTVDKLIKKTNLALVVGTNSWREQFIEAITVSAGEDDDDDECGEEKLPSCFDYVMHFLTVFWKVLFAFVPPTEYWNGWACFIVSILMIGLLTAFIGDLASHFGCTIGLKDSVTAVVFVALGTSVPDTFASKVAATQDQYADASIGNVTGSNAVNVFLGIGVAWSIAAIYHAANGEQFKVSPGTLAFSVTLFTIFAFINVGVLLYRRRPEIGGELGGPRTAKLLTSCLFVLLWLLYIFFSSLEAYCHIKGF

SEQ ID NO: 798631 - protein, 953 aa, Homo sapiens; identical to SEQ ID NO: 798630

SEQ ID NO: 798632 - protein, 956 aa, Homo sapiens; identical to SEQ ID NO: 798627

SEQ ID NO: 798633 - protein, 932 aa, Homo sapiens
MYNMRRLSLSPTFSMGFHLLVTVSLLFSHVDHVIAETEMEGEGNETGECTGSYYCKKGVILPIWEPQDPSFGDKIARATVYFVAMVYMFLGVSIIADRFMSSIEVITSQEKEITIKKPNGETTKTTVRIWNETVSNLTLMALGSSAPEILLSVIEVCGHNFTAGDLGPSTIVGSAAFNMFIIIALCVYVVPDGETRKIKHLRVFFVTAAWSIFAYTWLYIILSVISPGVVEVWEGLLTFFFFPICVVFAWVADRRLLFYKYVYKRYRAGKQRGMIIEHEGDRPSSKTEIEMDGKVVNSHVENFLDGALVLEVDERDQDDEEARREMARILKELKQKHPDKEIEQLIELANYQVLSQQQKSRAFYRIQATRLMTGAGNILKRHAADQARKAVSMHEVNTEVTENDPVSKIFFEQGTYQCLENCGTVALTIIRRGGDLTNTVFVDFRTEDGTANAGSDYEFTEGTVVFKPGDTQKEIRVGIIDDDIFEEDENFLVHLSNVKVSSEASEDGILEANHVSTLACLGSPSTATVTIFDDDHAGIFTFEEPVTHVSESIGIMEVKVLRTSGARGNVIVPYKTIEGTARGGGEDFEDTCGELEFQNDEIVKIITIRIFDREEYEKECSFSLVLEETKMDKKRNERYEYDDKQPLTSKEEEERRIAEMGRPILGEHTKLEVIIEESYEFKSTVDKLIKKTNLALVVGTNSWREQFIEAITVSAGEDDDDDECGEEKLPSCFDYVMHFLTVFWKVLFAFVPPTEYWNGWACFIVSILMIGLLTAFIGDLASHFGCTIGLKDSVTAVVFVALGTSVPDTFASKVAATQDQYADASIGNVTGSNAVNVFLGIGVAWSIAAIYHAANGEQFKVSPGTLAFSVTLFTIFAFINVGVLLYRRRPEIGGELGGPRTAKLLTSCLFVLLWLLYIFFSSLEAYCHIKGF

SEQ ID NO: 798634 - protein, 964 aa, Homo sapiens
MYNMRRLSLSPTFSMGFHLLVTVSLLFSHVDHVIAETEMEGEGNETGECTGSYYCKKGVILPIWEPQDPSFGDKIARATVYFVAMVYMFLGVSIIADRFMSSIEVITSQEKEITIKKPNGETTKTTVRIWNETVSNLTLMALGSSAPEILLSVIEVCGHNFTAGDLGPSTIVGSAAFNMFIIIALCVYVVPDGETRKIKHLRVFFVTAAWSIFAYTWLYIILSVISPGVVEVWEGLLTFFFFPICVVFAWVADRRLLFYKYVYKRYRAGKQRGMIIEHEGDRPSSKTEIEMDGKVVNSHVENFLDGALVLEVDERDQDDEEARREMARILKELKQKHPDKEIEQLIELANYQVLSQQQKSRAFYRIQATRLMTGAGNILKRHAADQARKAVSMHEVNTEVTENDPVSKIFFEQGTYQCLENCGTVALTIIRRGGDLTNTVFVDFRTEDGTANAGSDYEFTEGTVVFKPGDTQKEIRVGIIDDDIFEEDENFLVHLSNVKVSSEASEDGILEANHVSTLACLGSPSTATVTIFDDDHAGIFTFEEPVTHVSESIGIMEVKVLRTSGARGNVIVPYKTIEGTARGGGEDFEDTCGELEFQNDEIVKIITIRIFDREEYEKECSFSLVLEEPKWIRRGMKGVRVNKDIPSSQPVFRKVHAREHPILSTVITIADEYDDKQPLTSKEEEERRIAEMGRPILGEHTKLEVIIEESYEFKSTVDKLIKKTNLALVVGTNSWREQFIEAITVSAGEDDDDDECGEEKLPSCFDYVMHFLTVFWKVLFAFVPPTEYWNGWACFIVSILMIGLLTAFIGDLASHFGCTIGLKDSVTAVVFVALGTSVPDTFASKVAATQDQYADASIGNVTGSNAVNVFLGIGVAWSIAAIYHAANGEQFKVSPGTLAFSVTLFTIFAFINVGVLLYRRRPEIGGELGGPRTAKLLTSCLFVLLWLLYIFFSSLEAYCHIKGF

SEQ ID NO: 798635 - protein, 158 aa, Homo sapiens
MYNMRRLSLSPTFSMGFHLLVTVSLLFSHVDHVIAETEMEGEGNETGECTGSYYCKKGVILPIWEPQDPSFGDKIARATVYFVAMVYMFLGVSIIADRFMSSIEVITSQEKEITIKKPNGETTKTTVRIWNETVSNLTLMALGSSAPEILLSVIEVCL

SEQ ID NO: 798636 - protein, 640 aa, Homo sapiens
MYNMRRLSLSPTFSMGFHLLVTVSLLFSHVDHVIAETEMEGEGNETGECTGSYYCKKGVILPIWEPQDPSFGDKIARATVYFVAMVYMFLGVSIIADRFMSSIEVITSQEKEITIKKPNGETTKTTVRIWNETVSNLTLMALGSSAPEILLSVIEVCGHNFTAGDLGPSTIVGSAAFNMFIIIALCVYVVPDGETRKIKHLRVFFVTAAWSIFAYTWLYIILSVISPGVVEVWEGLLTFFFFPICVVFAWVADRRLLFYKYVYKRYRAGKQRGMIIEHEGDRPSSKTEIEMDGKVVNSHVENFLDGALVLEVDERDQDDEEARREMARILKELKQKHPDKEIEQLIELANYQVLSQQQKSRAFYRIQATRLMTGAGNILKRHAADQARKAVSMHEVNTEVTENDPVSKIFFEQGTYQCLENCGTVALTIIRRGGDLTNTVFVDFRTEDGTANAGSDYEFTEGTVVFKPGDTQKEIRVGIIDDDIFEEDENFLVHLSNVKVSSEASEDGILEANHVSTLACLGSPSTATVTIFDDDHAGIFTFEEPVTHVSESIGIMEVKVLRTSGARGNVIVPYKTIEGTARGGGEDFEDTCGELEFQNDEIVKTISVKVIDDEEYEKNKTFFLEIGEPRLEAYCHIKGF

SEQ ID NO: 798637 - protein, 105 aa, Homo sapiens
MVVLRSSLELHNHSAASATGSLDLSSDFLSLEHIGRRRLRSAGAAQKKPAATTAKAGVSTGLRRAPRAVPGGTAGSPALGGAWGWAAPVRVTVVGGEVWSRTSKM

SEQ ID NO: 798638 - protein, 1220 aa, Homo sapiens
MLFDKLITNTAEAVLQKMDDMKKMRRQRMRELEDLGVFNETEESNLNMYTRGKQKDIQRTDEETTDNQEGSVESSEEGEDQEHEDDGEDEDDEDDDDDDDDDDDDDDEDDEDEEDGEEENQKRYYLRQRKATVYYQAPLEKPRHQRKPNIFYSGPASPARPRYRLSSAGPRSPYCKRMNRRRHAIHSSDSTSSSSSEDEQHFERRRKRSRNRAINRCLPLNFRKDELKGIYKDRMKIGASLADVDPMQLDSSVRFDSVGGLSNHIAALKEMVVFPLLYPEVFEKFKIQPPRGCLFYGPPGTGKTLVARALANECSQGDKRVAFFMRKGADCLSKWVGESERQLRLLFDQAYQMRPSIIFFDEIDGLAPVRSSRQDQIHSSIVSTLLALMDGLDSRGEIVVIGATNRLDSIDPALRRPGRFDREFLFSLPDKEARKEILKIHTRDWNPKPLDTFLEELAENCVGYCGADIKSICAEAALCALRRRYPQIYTTSEKLQLDLSSINISAKDFEVAMQKMIPASQRAVTSPGQALSTVVKPLLQNTVDKILEALQRVFPHAEFRTNKTLDSDISCPLLESDLAYSDDDVPSVYENGLSQKSSHKAKDNFNFLHLNRNACYQPMSFRPRILIVGEPGFGQGSHLAPAVIHALEKFTVYTLDIPVLFGVSTTSPEETCAQVIREAKRTAPSIVYVPHIHVWWEIVGPTLKATFTTLLQNIPSFAPVLLLATSDKPHSALPEEVQELFIRDYGEIFNVQLPDKEERTKFFEDLILKQAAKPPISKKKAVLQALEVLPVAPPPEPRSLTAEEVKRLEEQEEDTFRELRIFLRNVTHRLAIDKRFRVFTKPVDPDEVPDYVTVIKQPMDLSSVISKIDLHKYLTVKDYLRDIDLICSNALEYNPDRDPGDRLIRHRACALRDTAYAIIKEELDEDFEQLCEEIQESRKKRGCSSSKYAPSYYHVMPKQNSTLVGDKRSDPEQNEKLKTPSTPVACSTPAQLKRKIRKKSNWYLGTIKKRRKISQAKDDSQNAIDHKIESDTEETQDTSVDHNETGNTGESSVEENEKQQNASESKLELRNNSNTCNIENELEDSRKTTACTELRDKIACNGDASSSQIIHISDENEGKEMCVLRMTRARRSQVEQQQLITVEKALAILSQPTPSLVVDHERLKNLLKTVVKKSQNYNIFQLENLYAVISQCIYRHRKDHDKTSLIQKMEQEVENFSCSR

SEQ ID NO: 798639 - protein, 1390 aa, Homo sapiens
MVVLRSSLELHNHSAASATGSLDLSSDFLSLEHIGRRRLRSAGAAQKKPAATTAKAGDGSSVKEVETYHRTRALRSLRKDAQNSSDSSFEKNVEITEQLANGRHFTRQLARQQADKKKEEHREDKVIPVTRSLRARNIVQSTEHLHEDNGDVEVRRSCRIRSRYSGVNQSMLFDKLITNTAEAVLQKMDDMKKMRRQRMRELEDLGVFNETEESNLNMYTRGKQKDIQRTDEETTDNQEGSVESSEEGEDQEHEDDGEDEDDEDDDDDDDDDDDDDDEDDEDEEDGEEENQKRYYLRQRKATVYYQAPLEKPRHQRKPNIFYSGPASPARPRYRLSSAGPRSPYCKRMNRRRHAIHSSDSTSSSSSEDEQHFERRRKRSRNRAINRCLPLNFRKDELKGIYKDRMKIGASLADVDPMQLDSSVRFDSVGGLSNHIAALKEMVVFPLLYPEVFEKFKIQPPRGCLFYGPPGTGKTLVARALANECSQGDKRVAFFMRKGADCLSKWVGESERQLRLLFDQAYQMRPSIIFFDEIDGLAPVRSSRQDQIHSSIVSTLLALMDGLDSRGEIVVIGATNRLDSIDPALRRPGRFDREFLFSLPDKEARKEILKIHTRDWNPKPLDTFLEELAENCVGYCGADIKSICAEAALCALRRRYPQIYTTSEKLQLDLSSINISAKDFEVAMQKMIPASQRAVTSPGQALSTVVKPLLQNTVDKILEALQRVFPHAEFRTNKTLDSDISCPLLESDLAYSDDDVPSVYENGLSQKSSHKAKDNFNFLHLNRNACYQPMSFRPRILIVGEPGFGQGSHLAPAVIHALEKFTVYTLDIPVLFGVSTTSPEETCAQVIREAKRTAPSIVYVPHIHVWWEIVGPTLKATFTTLLQNIPSFAPVLLLATSDKPHSALPEEVQELFIRDYGEIFNVQLPDKEERTKFFEDLILKQAAKPPISKKKAVLQALEVLPVAPPPEPRSLTAEEVKRLEEQEEDTFRELRIFLRNVTHRLAIDKRFRVFTKPVDPDEVPDYVTVIKQPMDLSSVISKIDLHKYLTVKDYLRDIDLICSNALEYNPDRDPGDRLIRHRACALRDTAYAIIKEELDEDFEQLCEEIQESRKKRGCSSSKYAPSYYHVMPKQNSTLVGDKRSDPEQNEKLKTPSTPVACSTPAQLKRKIRKKSNWYLGTIKKRRKISQAKDDSQNAIDHKIESDTEETQDTSVDHNETGNTGESSVEENEKQQNASESKLELRNNSNTCNIENELEDSRKTTACTELRDKIACNGDASSSQIIHISDENEGKEMCVLRMTRARRSQVEQQQLITVEKALAILSQPTPSLVVDHERLKNLLKTVVKKSQNYNIFQLENLYAVISQCIYRHRKDHDKTSLIQKMEQEVENFSCSR

SEQ ID NO: 798640 - protein, 1380 aa, Homo sapiens
MVVLRSSLELHNHSAASATGSLDLSSDFLSLEHIGRRRLRSAGAAQKKPAATTAKAGDGSSVKEVETYHRTRALRSLRKDAQNSSDSSFEKNVEITEQLANGRHFTRQLARQQADKKKEEHREDKVIPVTRSLRARNIVQSTEHLHEDNGDVEVRRSCRIRSRYSGVNQSMLFDKLITNTAEAVLQKMDDMKKMRRQRMRELEDLGVFNETEESNLNMYTRGKQKDIQRTDEETTDNQEGSVESSEEGEDQEHEDDGEDEDDEDDDDDDDDDDDDDDEDDEDEEDGEEENQKRYYLRQRKATVYYQAPLEKPRHQRKPNIFYSGPASPARPRYRLSSAGPRSPYCKRMNRRRHAIHSSDSTSSSSSEDEQHFERRRKRSRNRAINRCLPLNFRKDELKGIYKDRMKIGASLADVDPMQLDSSVRFDSVGGLSNHIAALKEMVVFPLLYPEVFEKFKIQPPRGCLFYGPPGTGKTLVARALANECSQGDKRVAFFMRKGADCLSKWVGESERQLRLLFDQAYQMRPSIIFFDEIDGLAPVRSSRQDQIHSSIVSTLLALMDGLDSRGEIVVIGATNRLDSIDPALRRPGRFDREFLFSLPDKEARKEILKIHTRDWNPKPLDTFLEELAENCVGYCGADIKSICAEAALCALRRRYPQIYTTSEKLQLDLSSINISAKDFEVAMQKMIPASQRAVTSPGQALSTVVKPLLQNTVDKILEALQRVFPHAEFRTNKTLDSDISCPLLESDLAYSDDDVPSVYENGLSQKSSHKAKDNFNFLHLNRNACYQPMSFRPRILIVGEPGFGQGSHLAPAVIHALEKFTVYTLDIPVLFGVSTTSPEETCAQVIREAKRTAPSIVYVPHIHVWWEIVGPTLKATFTTLLQNIPSFAPVLLLATSDKPHSALPEEVQELFIRDYGEIFNVQLPDKEERTKFFEDLILKQAAKPPISKKKAVLQALEVLPVAPPPEPRSLTAEEVKRLEEQEEDTFRELRIFLRNVTHRLAIDKRFRVFTKPVDPDEVPDYVTVIKQPMDLSSVISKIDLHKYLTVKDYLRDIDLICSNALEYNPDRDPGDRLIRHRACALRDTAYAIIKEELDEDFEQLCEEIQESRKKRGCSSSKYAPSYYHVMPKQNSTLVGDKRSDPEQNEKLKTPSTPVACSTPAQLKRKIRKKSNWYLGTIKKRRKISQAKDDSQNAIDHKIESDTEETQDTSVDHNETGNTGESSVEENEKQQNASESKLELRNNSNTCNIENELEDSRKTTACTELRDKIACNGDASSSQIIHISDENEGKEMCVLRMTRARRSQVEQQQLITVEKALAILSQPTPSLVVDHERLKNLLKTVVKKSQNYNIFQLENLYAVISQCIYRHRKDHDKTSLIQVNS

SEQ ID NO: 798641 - protein, 316 aa, Homo sapiens
MARQYLLKHRLYAIIKEELDEDFEQLCEEIQESRKKRGCSSSKYAPSYYHVMPKQNSTLVGDKRSDPEQNEKLKTPSTPVACSTPAQLKRKIRKKSNWYLGTIKKRRKISQAKDDSQNAIDHKIESDTEETQDTSVDHNETGNTGESSVEENEKQQNASESKLELRNNSNTCNIENELEDSRKTTACTELRDKIACNGDASSSQIIHISDENEGKEMCVLRMTRARRSQVEQQQLITVEKALAILSQPTPSLVVDHERLKNLLKTVVKKSQNYNIFQLENLYAVISQCIYRHRKDHDKTSLIQKMEQEVENFSCSR

SEQ ID NO: 798642 - protein, 549 aa, Homo sapiens
MVVLRSSLELHNHSAASATGSLDLSSDFLSLEHIGRRRLRSAGAAQKKPAATTAKAGDGSSVKEVETYHRTRALRSLRKDAQNSSDSSFEKNVEITEQLANGRHFTRQLARQQADKKKEEHREDKVIPVTRSLRARNIVQSTEHLHEDNGDVEVRRSCRIRSRYSGVNQSMLFDKLITNTAEAVLQKMDDMKKMRRQRMRELEDLGVFNETEESNLNMYTRGKQKDIQRTDEETTDNQEGSVESSEEGEDQEHEDDGEDEDDEDDDDDDDDDDDDDDEDDEDEEDGEEENQKRYYLRQRKATVYYQAPLEKPRHQRKPNIFYSGPASPARPRYRLSSAGPRSPYCKRMNRRRHAIHSSDSTSSSSSEDEQHFERRRKRSRNRAINRCLPLNFRKDELKGIYKDRMKIGASLADVDPMQLDSSVRFDSVGGLSNHIAALKEMVVFPLLYPEVFEKFKIQPPRGCLFYGPPGTGKTLVARALANECSQGDKRVAFFMRKGADCLSKWVGESERQLRLLFDQAYQMRPSIIFFDEIDGLAPVRSSRQDQIHR

SEQ ID NO: 798643 - protein, 219 aa, Homo sapiens
MVVLRSSLELHNHSAASATGSLDLSSDFLSLEHIGRRRLRSAGAAQKKPAATTAKAGDGSSVKEVETYHRTRALRSLRKDAQNSSDSSFEKNVEITEQLANGRHFTRQLARQQADKKKEEHREDKVIPVTRSLRARNIVQSTEHLHEDNGDVEVRRSCRIRSRYSGVNQSMLFDKLITNTAEAVLQKMDDMKKMRRQRMRELEDLGVFNETEEVNIFFH

SEQ ID NO: 798644 - protein, 148 aa, Homo sapiens
FSQYALFLFLYFNHTKYCGFSLFILSYIRVFHSLNFRKWLNVLSSFFFKFLEAQLKRKIRKKSNWYLGTIKKRRKISQAKDDSQNAIDHKIESDTEETQDTSVDHNETGNTGESSVEENEKQQNASESKLELRNNSNTCNIENELEDS

SEQ ID NO: 798645 - protein, 939 aa, Homo sapiens
MVVLRSSLELHNHSAASATGSLDLSSDFLSLEHIGRRRLRSAGAAQKKPAATTAKAGDGSSVKEVETYHRTRALRSLRKDAQNSSDSSFEKNVEITEQLANGRHFTRQLARQQADKKKEEHREDKVIPVTRSLRARNIVQSTEHLHEDNGDVEVRRSCRIRSRYSGVNQSMLFDKLITNTAEAVLQKMDDMKKMRRQRMRELEDLGVFNETEESNLNMYTRGKQKDIQRTDEETTDNQEGSVESSEEGEDQEHEDDGEDEDDEDDDDDDDDDDDDDDEDDEDEEDGEEENQKRYYLRQRKATVYYQAPLEKPRHQRKPNIFYSGPASPARPRYRLSSAGPRSPYCKRMNRRRHAIHSSDSTSSSSSEDEQHFERRRKRSRNRAINRCLPLNFRKDELKGIYKDRMKIGASLADVDPMQLDSSVRFDSVGGLSNHIAALKEMVVFPLLYPEVFEKFKIQPPRGCLFYGPPGTGKTLVARALANECSQGDKRVAFFMRKGADCLSKWVGESERQLRLLFDQAYQMRPSIIFFDEIDGLAPVRSSRQDQIHSSIVSTLLALMDGLDSRGEIVVIGATNRLDSIDPALRRPGRFDREFLFSLPDKEARKEILKIHTRDWNPKPLDTFLEELAENCVGYCGADIKSICAEAALCALRRRYPQIYTTSEKLQLDLSSINISAKDFEVAMQKMIPASQRAVTSPGQALSTVVKPLLQNTVDKILEALQRVFPHAEFRTNKTLDSDISCPLLESDLAYSDDDVPSVYENGLSQKSSHKAKDNFNFLHLNRNACYQPMSFRPRILIVGEPGFGQGSHLAPAVIHALEKFTVYTLDIPVLFGVSTTSPEETCAQVIREAKRTAPSIVYVPHIHVWWEIVGPTLKATFTTLLQNIPSFAPVLLLATSDKPHSALPEEVIYVGRYHYTFKKSCFYHNNHNLLKKFKCCRSE

SEQ ID NO: 798646 - protein, 1390 aa, Homo sapiens; identical to SEQ ID NO: 798639

SEQ ID NO: 798647 - protein, 1390 aa, Homo sapiens; identical to SEQ ID NO: 798639

SEQ ID NO: 798648 - protein, 362 aa, Homo sapiens
MDLSSVISKIDLHKYLTVKDYLRDIDLICSNALEYNPDRDPGDRLIRHRACALRDTAYAIIKEELDEDFEQLCEEIQESRKKRGCSSSKYAPSYYHVMPKQNSTLVGDKRSDPEQNEKLKTPSTPVACSTPAQLKRKIRKKSNWYLGTIKKRRKISQAKDDSQNAIDHKIESDTEETQDTSVDHNETGNTGESSVEENEKQQNASESKLELRNNSNTCNIENELEDSRKTTACTELRDKIACNGDASSSQIIHISDENEGKEMCVLRMTRARRSQVEQQQLITVEKALAILSQPTPSLVVDHERLKNLLKTVVKKSQNYNIFQLENLYAVISQCIYRHRKDHDKTSLIQKMEQEVENFSCSR

SEQ ID NO: 798649 - protein, 1390 aa, Homo sapiens; identical to SEQ ID NO: 798639

SEQ ID NO: 798650 - protein, 178 aa, Homo sapiens
MGPAPVPPKRGDIENMLQPGAVPPWYLHPGVVRSSWAEPVTCSQARAHSKLTHVVVGVILFLQIVSIPPWLLHRAAHHGSRLHHRQPARGQDKRADEGRYHHRGQFCNLTTRLTYCHFCPILLLEASRYISPTLKGRWSHCGVHWKLPTRLRSSQTHPLAIWCGIGKKTKARYGGSCL

SEQ ID NO: 798651 - protein, 439 aa, Homo sapiens
APARRSVMLFPLQVAAVTSSVRDDPLEHCVSPRTRARSPEICKMADNLDEFIEEQKARLAEDKAELESDPPYMEMKGKLSAKLSENSKILISMAKENIPPNSQQTRGSLGIDYGLSLPLGEDYERKKHKLKEELRQDYRRYLTQERLKLERNKEYNQFLRGKEESSEKFRQVEKSTEPKSQRNKKPIGQVKPDLTSQIQTSCENSEGPRKDVLTPSEAYEELLNQRRLEEDRYRQLDDEIELRNRRIIKKANEEVGISNLKHQRFASKAGIPDRRFHRFNEDRVFDRRYHRPDQDPEVSEEMDERFRYESDFDRRLSRVYTNDGLPFASLPIHFGTNIELLMMMHTILWVRNNFDPSLAIMVRNDGVSWNYVMSVTTIKNCGIRGEDRDTRNETGDLRERTSKFFKVRLHTNSNHTYYMNPEGRKIGNTQGIQLELAKG

SEQ ID NO: 798652 - protein, 144 aa, Homo sapiens
APARRSVMLFPLQVAAVTSSVRDDPLEHCVSPRTRARSPEICKMADNLDEFIEEQKARLAEDKAELESDPPYMEMKGKLSAKLSENSKILISMAKENIPPNSQQTRGSLGIDYGLSLPLGEDYERKKHKLKEELRQDYRRYLTQ

SEQ ID NO: 798653 - protein, 466 aa, Homo sapiens
APARRSVMLFPLQVAAVTSSVRDDPLEHCVSPRTRARSPEICKMADNLDEFIEEQKARLAEDKAELESDPPYMEMKGKLSAKLSENSKILISMAKENIPPNSQQTRGSLGIDYGLSLPLGEDYERKKHKLKEELRQDYRRYLTQKNFLSTSETDPSTLGVSLPIGERLSAKERLKLERNKEYNQFLRGKEESSEKFRQVEKSTEPKSQRNKKPIGQVKPDLTSQIQTSCENSEGPRKDVLTPSEAYEELLNQRRLEEDRYRQLDDEIELRNRRIIKKANEEVGISNLKHQRFASKAGIPDRRFHRFNEDRVFDRRYHRPDQDPEVSEEMDERFRYESDFDRRLSRVYTNDGLPFASLPIHFGTNIELLMMMHTILWVRNNFDPSLAIMVRNDGVSWNYVMSVTTIKNCGIRGEDRDTRNETGDLRERTSKFFKVRLHTNSNHTYYMNPEGRKIGNTQGIQLELAKG

SEQ ID NO: 798654 - protein, 2004 aa, Homo sapiens
MVKLANPLYTEWILEAIKKVKKQKQRPSEERICNAVSSSHGLDRKTVLEQLELSVKDGTILKVSNKGLNSYKDPDNPGRIALPKPRNHGKLDNKQNVDWNKLIKRAVEGLAESGGSTLKSIERFLKGQKDVSALFGGSAASGFHQQLRLAIKRAIGHGRLLKDGPLYRLNTKATNVDGKESCESLSCLPPVSLLPHEKDKPVAEPIPICSFCLGTKEQNREKKPEELISCADCGNSGHPSCLKFSPELTVRVKALRWQCIECKTCSSCRDQGKNADNMLFCDSCDRGFHMECCDPPLTRMPKGMWICQICRPRKKGRKLLQKKAAQIKRRYTNPIGRPKNRLKKQNTVSKGPFSKVRTGPGRGRKRKITLSSQSASSSSEEGYLERIDGLDFCRDSNVSLKFNKKTKGLIDGLTKFFTPSPDGRKARGEVVDYSEQYRIRKRGNRKSSTSDWPTDNQDGWDGKQENEERLFGSQEIMTEKDMELFRDIQEQALQKVGVTGPPDPQVRCPSVIEFGKYEIHTWYSSPYPQEYSRLPKLYLCEFCLKYMKSRTILQQHMKKCGWFHPPANEIYRKNNISVFEVDGNVSTIYCQNLCLLAKLFLDHKTLYYDVEPFLFYVLTQNDVKGCHLVGYFSKEKHCQQKYNVSCIMILPQYQRKGYGRFLIDFSYLLSKREGQAGSPEKPLSDLGRLSYMAYWKSVILECLYHQNDKQISIKKLSKLTGICPQDITSTLHHLRMLDFRSDQFVIIRREKLIQDHMAKLQLNLRPVDVDPECLRWTPVIVSNSVVSEEEEEEAEEGENEEPQCQERELEISVGKSVSHENKEQDSYSVESEKKPEVMAPVSSTRLSKQVLPHDSLPANSQPSRRGRWGRKNRKTQERFGDKDSKLLLEETSSAPQEQYGECGEKSEATQEQYTESEEQLVASEEQPSQDGKPDLPKRRLSEGVEPWRGQLKKSPEALKCRLTEGSERLPRRYSEGDRAVLRGFSESSEEEEEPESPRSSSPPILTKPTLKRKKPFLHRRRRVRKRKHHNSSVVTETISETTEVLDEPFEDSDSERPMPRLEPTFEIDEEEEEEDENELFPREYFRRLSSQDVLRCQSSSKRKSKDEEEDEESDDADDTPILKPVSLLRKRDVKNSPLEPDTSTPLKKKKGWPKGKSRKPIHWKKRPGRKPGFKLSREIMPVSTQACVIEPIVSIPKAGRKPKIQESEETVEPKEDMPLPEERKEEEEMQAEAEEAEEGEEEDAASSEVPAASPADSSNSPETETKEPEVEEEEEKPRVSEEQRQSEEEQQELEEPEPEEEEDAAAETAQNDDHDADDEDDGHLESTKKKELEEQPTREDVKEEPGVQESFLDANMQKSREKIKDKEETELDSEEEQPSHDTSVVSEQMAGSEDDHEEDSHTKEELIELKEEEEIPHSELDLETVQAVQSLTQEESSEHEGAYQDCEETLAACQTLQSYTQADEDPQMSMVEDCHASEHNSPISSVQSHPSQSVRSVSSPNVPALESGYTQISPEQGSLSAPSMQNMETSPMMDVPSVSDHSQQVVDSGFSDLGSIESTTENYENPSSYDSTMGGSICGNSSSQSSCSYGGLSSSSSLTQSSCVVTQQMASMGSSCSMMQQSSVQPAANCSIKSPQSCVVERPPSNQQQQPPPPPPQQPQPPPPQPQPAPQPPPPQQQPQQQPQPQPQQPPPPPPPQQQPPLSQCSMNNSFTPAPMIMEIPESGSTGNISIYERIPGDFGAGSYSQPSATFSLAKLQQLTNTIMDPHAMPYSHSPAVTSYATSVSLSNTGLAQLAPSHPLAGTPQAQATMTPPPNLASTTMNLTSPLLQCNMSATNIGIPHTQRLQGQMPVKGHISIRSKSAPLPSAAAHQQQLYGRSPSAVAMQAGPRALAVQRGMNMGVNLMPTPAYNVNSMNMNTLNAMNSYRMTQPMMNSSYHSNPAYMNQTAQYPMQMQMGMMGSQAYTQQPMQPNPHGNMMYTGPSHHSYMNAAGVPKQSLNGPYMRR

SEQ ID NO: 798655 - protein, 1868 aa, Homo sapiens
VSRFDTSRIPQDENIKRAIGHGRLLKDGPLYRLNTKATNVDGKESCESLSCLPPVSLLPHEKDKPVAEPIPICSFCLGTKEQNREKKPEELISCADCGNSGHPSCLKFSPELTVRVKALRWQCIECKTCSSCRDQGKNADNMLFCDSCDRGFHMECCDPPLTRMPKGMWICQICRPRKKGRKLLQKKAAQIKRRYTNPIGRPKNRLKKQNTVSKGPFSKVRTGPGRGRKRKITLSSQSASSSSEEGYLERIDGLDFCRDSNVSLKFNKKTKGLIDGLTKFFTPSPDGRKARGEVVDYSEQYRIRKRGNRKSSTSDWPTDNQDGWDGKQENEERLFGSQEIMTEKDMELFRDIQEQALQKVGVTGPPDPQVRCPSVIEFGKYEIHTWYSSPYPQEYSRLPKLYLCEFCLKYMKSRTILQQHMKKCGWFHPPANEIYRKNNISVFEVDGNVSTIYCQNLCLLAKLFLDHKTLYYDVEPFLFYVLTQNDVKGCHLVGYFSKEKHCQQKYNVSCIMILPQYQRKGYGRFLIDFSYLLSKREGQAGSPEKPLSDLGRLSYMAYWKSVILECLYHQNDKQISIKKLSKLTGICPQDITSTLHHLRMLDFRSDQFVIIRREKLIQDHMAKLQLNLRPVDVDPECLRWTPVIVSNSVVSEEEEEEAEEGENEEPQCQERELEISVGKSVSHENKEQDSYSVESEKKPEVMAPVSSTRLSKQVLPHDSLPANSQPSRRGRWGRKNRKTQERFGDKDSKLLLEETSSAPQEQYGECGEKSEATQEQYTESEEQLVASEEQPSQDGKPDLPKRRLSEGVEPWRGQLKKSPEALKCRLTEGSERLPRRYSEGDRAVLRGFSESSEEEEEPESPRSSSPPILTKPTLKRKKPFLHRRRRVRKRKHHNSSVVTETISETTEVLDEPFEDSDSERPMPRLEPTFEIDEEEEEEDENELFPREYFRRLSSQDVLRCQSSSKRKSKDEEEDEESDDADDTPILKPVSLLRKRDVKNSPLEPDTSTPLKKKKGWPKGKSRKPIHWKKRPGRKPGFKLSREIMPVSTQACVIEPIVSIPKAGRKPKIQESEETVEPKEDMPLPEERKEEEEMQAEAEEAEEGEEEDAASSEVPAASPADSSNSPETETKEPEVEEEEEKPRVSEEQRQSEEEQQELEEPEPEEEEDAAAETAQNDDHDADDEDDGHLESTKKKELEEQPTREDVKEEPGVQESFLDANMQKSREKIKDKEETELDSEEEQPSHDTSVVSEQMAGSEDDHEEDSHTKEELIELKEEEEIPHSELDLETVQAVQSLTQEESSEHEGAYQDCEETLAACQTLQSYTQADEDPQMSMVEDCHASEHNSPISSVQSHPSQSVRSVSSPNVPALESGYTQISPEQGSLSAPSMQNMETSPMMDVPSVSDHSQQVVDSGFSDLGSIESTTENYENPSSYDSTMGGSICGNSSSQSSCSYGGLSSSSSLTQSSCVVTQQMASMGSSCSMMQQSSVQPAANCSIKSPQSCVVERPPSNQQQQPPPPPPQQPQPPPPQPQPAPQPPPPQQQPQQQPQPQPQQPPPPPPPQQQPPLSQCSMNNSFTPAPMIMEIPESGSTGNISIYERIPGDFGAGSYSQPSATFSLAKLQQLTNTIMDPHAMPYSHSPAVTSYATSVSLSNTGLAQLAPSHPLAGTPQAQATMTPPPNLASTTMNLTSPLLQCNMSATNIGIPHTQRLQGQMPVKGHISIRSKSAPLPSAAAHQQQLYGRSPSAVAMQAGPRALAVQRGMNMGVNLMPTPAYNVNSMNMNTLNAMNSYRMTQPMMNSSYHSNPAYMNQTAQYPMQMQMGMMGSQAYTQQPMQPNPHGNMMYTGPSHHSYMNAAGVPKQSLNGPYMRR

SEQ ID NO: 798656 - protein, 1334 aa, Homo sapiens
EDPVSSPFVEKPLSDLGRLSYMAYWKSVILECLYHQNDKQISIKKLSKLTGICPQDITSTLHHLRMLDFRSDQFVIIRREKLIQDHMAKLQLNLRPVDVDPECLRWTPVIVSNSVVSEEEEEEAEEGENEEPQCQERELEISVGKSVSHENKEQDSYSVESEKKPEVMAPVSSTRLSKQVLPHDSLPANSQPSRRGRWGRKNRKTQERFGDKDSKLLLEETSSAPQEQYGECGEKSEATQEQYTESEEQLVASEEQPSQDGKPDLPKRRLSEGVEPWRGQLKKSPEALKCRLTEGSERLPRRYSEGDRAVLRGFSESSEEEEEPESPRSSSPPILTKPTLKRKKPFLHRRRRVRKRKHHNSSVVTETISETTEVLDEPFEDSDSERPMPRLEPTFEIDEEEEEEDENELFPREYFRRLSSQDVLRCQSSSKRKSKDEEEDEESDDADDTPILKPVSLLRKRDVKNSPLEPDTSTPLKKKKGWPKGKSRKPIHWKKRPGRKPGFKLSREIMPVSTQACVIEPIVSIPKAGRKPKIQESEETVEPKEDMPLPEERKEEEEMQAEAEEAEEGEEEDAASSEVPAASPADSSNSPETETKEPEVEEEEEKPRVSEEQRQSEEEQQELEEPEPEEEEDAAAETAQNDDHDADDEDDGHLESTKKKELEEQPTREDVKEEPGVQESFLDANMQKSREKIKDKEETELDSEEEQPSHDTSVVSEQMAGSEDDHEEDSHTKEELIELKEEEEIPHSELDLETVQAVQSLTQEESSEHEGAYQDCEETLAACQTLQSYTQADEDPQMSMVEDCHASEHNSPISSVQSHPSQSVRSVSSPNVPALESGYTQISPEQGSLSAPSMQNMETSPMMDVPSVSDHSQQVVDSGFSDLGSIESTTENYENPSSYDSTMGGSICGNSSSQSSCSYGGLSSSSSLTQSSCVVTQQMASMGSSCSMMQQSSVQPAANCSIKSPQSCVVERPPSNQQQQPPPPPPQQPQPPPPQPQPAPQPPPPQQQPQQQPQPQPQQPPPPPPPQQQPPLSQCSMNNSFTPAPMIMEIPESGSTGNISIYERIPGDFGAGSYSQPSATFSLAKLQQLTNTIMDPHAMPYSHSPAVTSYATSVSLSNTGLAQLAPSHPLAGTPQAQATMTPPPNLASTTMNLTSPLLQCNMSATNIGIPHTQRLQGQMPVKGHISIRSKSAPLPSAAAHQQQLYGRSPSAVAMQAGPRALAVQRGMNMGVNLMPTPAYNVNSMNMNTLNAMNSYRMTQPMMNSSYHSNPAYMNQTAQYPMQMQMGMMGSQAYTQQPMQPNPHGNMMYTGPSHHSYMNAAGVPKQSLNGPYMRR

SEQ ID NO: 798657 - protein, 446 aa, Homo sapiens
TQGELQLASDVYLTGASCICGNSSSQSSCSYGGLSSSSSLTQSSCVVTQQMASMGSSCSMMQQSSVQPAANCSIKSPQSCVVERPPSNQQQQPPPPPPQQPQPPPPQPQPAPQPPPPQQQPQQQPQPQPQQPPPPPPPQQQPPLSQCSMNNSFTPAPMIMEIPESGSTGNISIYERIPGDFGAGSYSQPSATFSLAKLQQLTNTIMDPHAMPYSHSPAVTSYATSVSLSNTGLAQLAPSHPLAGTPQAQATMTPPPNLASTTMNLTSPLLQCNMSATNIGIPHTQRLQGQMPVKGHISIRSKSAPLPSAAAHQQQLYGRSPSAVAMQAGPRALAVQRGMNMGVNLMPTPAYNVNSMNMNTLNAMNSYRMTQPMMNSSYHSNPAYMNQTAQYPMQMQMGMMGSQAYTQQPMQPNPHGNMMYTGPSHHSYMNAAGVPKQSLNGPYMRR

SEQ ID NO: 798658 - protein, 1303 aa, Homo sapiens
MVKLANPLYTEWILEAIKKVKKQKQRPSEERICNAVSSSHGLDRKTVLEQLELSVKDGTILKVSNKGLNSYKDPDNPGRIALPKPRNHGKLDNKQNVDWNKLIKRAVEGLAESGGSTLKSIERFLKGQKDVSALFGGSAASGFHQQLRLAIKRAIGHGRLLKDGPLYRLNTKATNVDGKESCESLSCLPPVSLLPHEKDKPVAEPIPICSFCLGTKEQNREKKPEELISCADCGNSGHPSCLKFSPELTVRVKALRWQCIECKTCSSCRDQGKNADNMLFCDSCDRGFHMECCDPPLTRMPKGMWICQICRPRKKGRKLLQKKAAQIKRRYTNPIGRPKNRLKKQNTVSKGPFSKVRTGPGRGRKRKITLSSQSASSSSEEGYLERIDGLDFCRDSNVSLKFNKKTKGLIDGLTKFFTPSPDGRKARGEVVDYSEQYRIRKRGNRKSSTSDWPTDNQDGWDGKQENEERLFGSQEIMTEKDMELFRDIQEQALQKVGVTGPPDPQVRCPSVIEFGKYEIHTWYSSPYPQEYSRLPKLYLCEFCLKYMKSRTILQQHMKKCGWFHPPANEIYRKNNISVFEVDGNVSTIYCQNLCLLAKLFLDHKTLYYDVEPFLFYVLTQNDVKGCHLVGYFSKEKHCQQKYNVSCIMILPQYQRKGYGRFLIDFSYLLSKREGQAGSPEKPLSDLGRLSYMAYWKSVILECLYHQNDKQISIKKLSKLTGICPQDITSTLHHLRMLDFRSDQFVIIRREKLIQDHMAKLQLNLRPVDVDPECLRWTPVIVSNSVVSEEEEEEAEEGENEEPQCQERELEISVGKSVSHENKEQDSYSVESEKKPEVMAPVSSTRLSKQVLPHDSLPANSQPSRRGRWGRKNRKTQERFGDKDSKLLLEETSSAPQEQYGECGEKSEATQEQYTESEEQLVASEEQPSQDGKPDLPKRRLSEGVEPWRGQLKKSPEALKCRLTEGSERLPRRYSEGDRAVLRGFSESSEEEEEPESPRSSSPPILTKPTLKRKKPFLHRRRRVRKRKHHNSSVVTETISETTEVLDEPFEDSDSERPMPRLEPTFEIDEEEEEEDENELFPREYFRRLSSQDVLRCQSSSKRKSKDEEEDEESDDADDTPILKPVSLLRKRDVKNSPLEPDTSTPLKKKKGWPKGKSRKPIHWKKRPGRKPGFKLSREIMPVSTQACVIEPIVSIPKAGRKPKIQESEETVEPKEDMPLPEERKEEEEMQAEAEEAEEGEEEDAASSEVPAASPADSSNSPETETKEPEVEEEEEKPRVSEEQRQSEEEQQELESRPVVGPAH

SEQ ID NO: 798659 - protein, 906 aa, Homo sapiens
MVKLANPLYTEWILEAIKKVKKQKQRPSEERICNAVSSSHGLDRKTVLEQLELSVKDGTILKVSNKGLNSYKDPDNPGRIALPKPRNHGKLDNKQNVDWNKLIKRAVEGLAESGGSTLKSIERFLKGQKDVSALFGGSAASGFHQQLRLAIKRAIGHGRLLKDGPLYRLNTKATNVDGKESCESLSCLPPVSLLPHEKDKPVAEPIPICSFCLGTKEQNREKKPEELISCADCGNSGHPSCLKFSPELTVRVKALRWQCIECKTCSSCRDQGKNADNMLFCDSCDRGFHMECCDPPLTRMPKGMWICQICRPRKKGRKLLQKKAAQIKRRYTNPIGRPKNRLKKQNTVSKGPFSKVRTGPGRGRKRKITLSSQSASSSSEEGYLERIDGLDFCRDSNVSLKFNKKTKGLIDGLTKFFTPSPDGRKARGEVVDYSEQYRIRKRGNRKSSTSDWPTDNQDGWDGKQENEERLFGSQEIMTEKDMELFRDIQEQALQKVGVTGPPDPQVRCPSVIEFGKYEIHTWYSSPYPQEYSRLPKLYLCEFCLKYMKSRTILQQHMKKCGWFHPPANEIYRKNNISVFEVDGNVSTIYCQNLCLLAKLFLDHKTLYYDVEPFLFYVLTQNDVKGCHLVGYFSKEKHCQQKYNVSCIMILPQYQRKGYGRFLIDFSYLLSKREGQAGSPEKPLSDLGRLSYMAYWKSVILECLYHQNDKQISIKKLSKLTGICPQDITSTLHHLRMLDFRSDQFVIIRREKLIQDHMAKLQLNLRPVDVDPECLRWTPVIVSNSVVSEEEEEEAEEGENEEPQCQERELEISVGKSVSHENKEQDSYSVESEKKPEVMAPVSSTRLSKQVLPHDSLPANSQPSRRGRWGRKNRKTQERFGDKDSKLLLEETSSAPQEQYDSEDKRA

SEQ ID NO: 798660 - protein, 1953 aa, Homo sapiens
MVKLANPLYTEWILEAIKKVKKQKQRPSEERICNAVSSSHGLDRKTVLEQLELSVKDGTILKVSNKGLNSYKDPDNPGRIALPKPRNHGKLDNKQNVDWNKLIKRAVEGLAESGGSTLKSIERFLKGQKDVSALFGGSAASGFHQQLRLAIKRAIGHGRLLKDGPLYRLNTKATNVDGKESCESLSCLPPVSLLPHEKDKPVAEPIPICSFCLGTKEQNREKKPEELISCADCGNSGHPSCLKFSPELTVRVKALRWQCIECKTCSSCRDQGKNADNMLFCDSCDRGFHMECCDPPLTRMPKGMWICQICRPRKKGRKLLQKKAAQIKRRYTNPIGRPKNRLKKQNTVSKGPFSKVRTGPGRGRKRKITLSSQSASSSSEEGYLERIDGLDFCRDSNVSLKFNKKTKGLIDGLTKFFTPSPDGRKARGEVVDYSEQYRIRKRGNRKSSTSDWPTDNQDGWDGKQENEERLFGSQEIMTEKDMELFRDIQEQALQKVGVTGPPDPQVRCPSVIEFGKYEIHTWYSSPYPQEYSRLPKLYLCEFCLKYMKSRTILQQHMKKCGWFHPPANEIYRKNNISVFEVDGNVSTIYCQNLCLLAKLFLDHKTLYYDVEPFLFYVLTQNDVKGCHLVGYFSKEKHCQQKYNVSCIMILPQYQRKGYGRFLIDFSYLLSKREGQAGSPEKPLSDLGRLSYMAYWKSVILECLYHQNDKQISIKKLSKLTGICPQDITSTLHHLRMLDFRSDQFVIIRREKLIQDHMAKLQLNLRPVDVDPECLRWTPVIVSNSVVSEEEEEEAEEGENEEPQCQERELEISVGKSVSHENKEQDSYSVESEKKPEVMAPVSSTRLSKQVLPHDSLPANSQPSRRGRWGRKNRKTQERFGDKDSKLLLEETSSAPQEQYGECGEKSEATQEQYTESEEQLVASEEQPSQDGKPDLPKRRLSEGVEPWRGQLKKSPEALKCRLTEGSERLPRRYSEGDRAVLRGFSESSEEEEEPESPRSSSPPILTKPTLKRKKPFLHRRRRVRKRKHHNSSVVTETISETTEVLDEPFEDSDSERPMPRLEPTFEIDEEEEEEDENELFPREYFRRLSSQDVLRCQSSSKRKSKDEEEDEESDDADDTPILKPVSLLRKRDVKNSPLEPDTSTPLKKKKGWPKGKSRKPIHWKKRPGRKPGFKLSREIMPVSTQACVIEPIVSIPKAGRKPKIQESEETVEPKEDMPLPEERKEEEEMQAEAEEAEEGEEEDAASSEVPAASPADSSNSPETETKEPEVEEEEEKPRVSEEQRQSEEEQQELEEPEPEEEEDAAAETAQNDDHDADDEDDGHLESTKKKELEEQPTREDVKEEPGVQESFLDANMQKSREKIKDKEETELDSEEEQPSHDTSVVSEQMAGSEDDHEEDSHTKEELIELKEEEEIPHSELDLETVQAVQSLTQEESSEHEGAYQDCEETLAACQTLQSYTQADEDPQMSMVEDCHASEHNSPISSVQSHPSQSVRSVSSPNVPALESGYTQISPEQGSLSAPSMQNMETSPMMDVPSVSDHSQQVVDSGFSDLGSIESTTENYENPSSYDSTMGGSICGNSSSQSSCSYGGLSSSSSLTQSSCVVTQQMASMGSSCSMMQQSSVQPAANCSIKSPQSCVVERPPSNQQQQPPPPPPQQPQPPPPQPQPAPQPPPPQQQPQQQPQPQPQQPPPPPPPQQQPPLSQCSMNNSFTPAPMIMEIPESGSTGNISIYERIPGDFGAGSYSQPSATFSLAKLQQLTNTIMDPHAMPYSHSPAVTSYATSVSLSNTGLAQLAPSHPLAGTPQAQATMTPPPNLASTTMNLTSPLLQCNMSATNIGIPHTQRLQGQMPVKGHISIRSKSAPLPSAAAHQQQLYGRSPSAVAMQAGPRALAVQRGMNMGVNLMPTPAYNVNSMNMNTLNAMNSYRMTQPMMNSSYHSNPAYMNQTPETRRAT

SEQ ID NO: 798661 - protein, 520 aa, Homo sapiens [sequence omitted]

SEQ ID NO: 798662 - protein, 107 aa, Homo sapiens
MAHSQNSLELPININATQITTAYGHRALPKLKEELQSEDLQTRQKALMALCDLMHDPECIYKAMNIGCMENLKALLKDSNSMVRIKTTEVLHITASHSVGSSDRKGE

SEQ ID NO: 798663 - protein, 348 aa, Homo sapiens
MAHSQNSLELPININATQITTAYGHRALPKLKEELQSEDLQTRQKALMALCDLMHDPECIYKAMNIGCMENLKALLKDSNSMVRIKTTEVLHITASHSVGRYAFLEHDIVLALSFLLNDPSPVCRGNLYKAYMQLVQVPRGAQEIISKGLISSLVWKLQVEVEEEEFQEFILDTLVLCLQEDATEALGSNVVLVLKQKLLSANQNIRSKAARALLNVSISREGKKQVCHFDVIPILVHLLKDPVEHVKSNAAGALMFATVITEGKYAALEAQAIGLLLELLHSPMTIARLNATKALTMLAEAPEGRKALQTHVPTFRAMEVETYEKPQVAEALQRAARIAISVIEFKP

SEQ ID NO: 798664 - protein, 197 aa, Homo sapiens
MAHSQNSLELPININATQITTAYGHRALPKLKEELQSEDLQTRQKALMALCDLMHDPECIYKAMNIGCMENLKALLKDSNSMVRIKTTEVLHITASHSVGRYAFLEHDIVLALSFLLNDPSPVCRGNLYKAYMQLVQVPRAENPTINKRTLQRLMYNTCPARLAQDCHSLQNFFGAERQIVQITTFTLSKPDTKKTT

SEQ ID NO: 798665 - protein, 166 aa, Homo sapiens
MIQLKPSPFSLLCDLACVCAENEKADQSYRCCENIAKQNLGCCPHLSVPAPSQRSQPPLAVPGLLYLRKVEGAHVLAQEEAVQRDRPDQEEELLHRLPHKLGVQAVLAHGGVKVAQLLQDGGHGVAVRVVYARGALPEACGLQAGNALQALILQHSRNCGETGRLC

SEQ ID NO: 798666 - protein, 365 aa, Homo sapiens
MGPCSGSRLGPPEAESPSQPPKRRKKRYLRHDKPPYTYLAMIALVIQAAPSRRLKLAQIIRQVQAVFPFFREDYEGWKDSIRHNLSSNRCFRKVPKDPAKPQAKGNFWAVDVSLIPAEALRLQNTALCRRWQNGGARGAFAKDLGPYVLHGRPYRPPSPPPPPSEGFSIKSLLGGSGEGAPWPGLAPQSSPVPAGTGNSGEEAVPTPPLPSSERPLWPLCPLPGPTRVEGETVQGGAIGPSTLSPEPRAWPLHLLQGTAVPGGRSSGGHRASLWGQLPTSYLPIYTPNVVMPLAPPPTSCPQCPSTSPAYWGVAPETRGPPGLLCDLDALFQGVPPNKSIYDVWVSHPRDLAAPGPGWLLSWCSL

SEQ ID NO: 798667 - protein, 267 aa, Homo sapiens
MGPCSGSRLGPPEAESPSQPPKRRKKRYLRHDKPPYTYLAMIALVIQAAPSRRLKLAQIIRQVQAVFPFFREDYEGWKDSIRHNLSSNRCFRKVPKDPAKPQAKGNFWAVDVSLIPAEALRLQNTALCRRWQNGGARGAFAKDLGPYVLHGRPYRPPSPPPPPSEGFSIKSLLGGSGEGAPWPGLAPQSSPVPAGTGNSGEEAVPTPPLPSSERPLWPLCPLPGPTRVEGETVLGEGEPSGGSSLKSCPLSSVWKGGSTFFGKRVRE

SEQ ID NO: 798668 - protein, 365 aa, Homo sapiens; identical to SEQ ID NO: 798666

SEQ ID NO: 798669 - protein, 69 aa, Homo sapiens
VDTARGPRSRRLIGALPGLPSWAMDPSEAIRLCSSLALLDPSGWLGCSSSVCIDWSWDRSPHSRNRTRR

SEQ ID NO: 798670 - protein, 202 aa, Homo sapiens [sequence omitted]

SEQ ID NO: 798671 - protein, 538 aa, Homo sapiens
MTTPGKENFRLKSYKNKSLNPDEMRRRREEEGLQLRKQKREEQLFKRRNVATAEEETEEEVMSDGGFHEAQINNMEMAPGGVITSDMIEMIFSKSPEQQLSATQKFRKLLSKEPNPPIDEVISTPGVVARFVEFLKRKENCTLQFESAWVLTNIASGNSLQTRIVIQAGAVPIFIELLSSEFEDVQEQAVWALGNIAGDSTMCRDYVLDCNILPPLLQLFSKQNRLTMTRNAVWALSNLCRGKSPPPEFAKVSPCLNVLSWLLFVSDTDVLADACWALSYLSDGPNDKIQAVIDAGVCRRLVELLMHNDYKVVSPALRAVGNIVTGDDIQTQVILNCSALQSLLHLLSSPKESIKKEACWTISNITAGNRAQIQTVIDANIFPALISILQTAEFRTRKEAAWAITNATSGGSAEQIKYLVELGCIKPLCDLLTVMDSKIVQVALNGLENILRLGEQEAKRNGTGINPYCALIEEAYGLDKIEFLQSHENQEIYQKAFDLIEHYFGTEDEDSSIAPQVDLNQQQYIFQQCEAPMEGFQL

SEQ ID NO: 798672 - protein, 538 aa, Homo sapiens; identical to SEQ ID NO: 798671

SEQ ID NO: 798673 - protein, 538 aa, Homo sapiens; identical to SEQ ID NO: 798671

SEQ ID NO: 798674 - protein, 118 aa, Homo sapiens
MKTRRSTKRPLILLSITSGPKMKTAALHPRLTLTSSSTSSNSVRLLWKVSSFEAILCFHVPVSDQATQSSPLVEPTVLMELTSQMFSIILFALICLPCAPALLHTSGKPPALCGGIPF

SEQ ID NO: 798675 - protein, 538 aa, Homo sapiens; identical to SEQ ID NO: 798671

SEQ ID NO: 798676 - protein, 538 aa, Homo sapiens; identical to SEQ ID NO: 798671

SEQ ID NO: 798677 - protein, 142 aa, Homo sapiens
RSPGVIAIGNAGEARRGGAAWRGGGPEIMTTPGKENFRLKSYKNKSLNPDEMRRRREEEGLQLRKQKREEQLFKRRNVATAEEETEEEVMSDGGFHEAQITNFSNVFHNTVCAHLLALRTCSLTHIWKTSGSLWWNTLLIKG

SEQ ID NO: 798678 - protein, 494 aa, Homo sapiens
MTTPGKENFRLKSYKNKSLNPDEMRRRREEEGLQLRKQKREEQLFKRRNVATAEEETEEEVMSDGGFHEAQINNMEMAPGGVITSDMIEMIFSKSPEQQLSATQKFRKLLSKEPNPPIDEVISTPGVVARFVEFLKRKENCTLQFESAWVLTNIASGNSLQTRIVIQAGAVPIFIELLSSEFEDVQEQAVWALGNIAGDSTMCRDYVLDCNILPPLLQLFSKQNRLTMTRNAVWALSNLCRGKSPPPEFAKVSPCLNVLSWLLFVSDTDVLADACWALSYLSDGPNDKIQAVIDAGVCRRLVELLMHNDYKVVSPALRAVGNIVTGDDIQTQVILNCSALQSLLHLLSSPKESIKKEACWTISNITAGNRAQIQTVIDANIFPALISILQTAEFRTRKEAAWAITNATSGGSAEQIKYLVELGCIKPLCDLLTVMDSKIVQVALNGLENILRLGEQEAKRNGTGINPYCALIEEAYGKMLWLKKFMAKNELGHR

SEQ ID NO: 798679 - protein, 127 aa, Homo sapiens
EVSLAFARNQSGTGKVVSNRVLIQMEKGNQAYLNLNGKLDEEFESAWVLTNIASGNSLQTRIVIQAGAVPIFIELLSSEFEDVQEQAVWALGNIAGDSTMCRDYVLDCNILPPLLQLFSKRGKGPPP

SEQ ID NO: 798680 - protein, 538 aa, Homo sapiens; identical to SEQ ID NO: 798671

SEQ ID NO: 798681 - protein, 538 aa, Homo sapiens; identical to SEQ ID NO: 798671

SEQ ID NO: 798682 - protein, 333 aa, Homo sapiens
MTTPGKENFRLKSYKNKSLNPDEMRRRREEEGLQLRKQKREEQLFKRRNVATAEEETEEEVMSDGGFHEAQINNMEMAPGGVITSDMIEMIFSKSPEQQLSATQKFRKLLSKEPNPPIDEVISTPGVVARFVEFLKRKENCTLQFESAWVLTNIASGNSLQTRIVIQAGAVPIFIELLSSEFEDVQEQAVWALGNIAGDSTMCRDYVLDCNILPPLLQLFSKQNRLTMTRNAVWALSNLCRGKSPPPEFAKVSPCLNVLSWLLFVSDTDVLADACWALSYLSDGPNDKIQAVIDAGVCRRLVELLMHNDYKVVSPALRAVGNIVTGDDIQTQV

SEQ ID NO: 798683 - protein, 345 aa, Homo sapiens
MTTPGKENFRLKSYKNKSLNPDEMRRRREEEGLQLRKQKREEQLFKRRNVATAEEETEEEVMSDGGFHEAQINNMEMAPGGVITSDMIEMIFSKSPEQQLSATQKFRKLLSKEPNPPIDEVISTPGVVARFVEFLKRKENCTLQFESAWVLTNIASGNSLQTRIVIQAGAVPIFIELLSSEFEDVQEQAVWALGNIAGDSTMCRDYVLDCNILPPLLQLFSKQNRLTMTRNAVWALSNLCRGKSPPPEFAKVSPCLNVLSWLLFVSDTDVLADACWALSYLSDGPNDKIQAVIDAGVCRRLVELLMHNDYIVVDTLHSTFTSVWDNVTFINIFALLSHRIPRISV

SEQ ID NO: 798684 - protein, 373 aa, Homo sapiens
MTTPGKENFRLKSYKNKSLNPDEMRRRREEEGLQLRKQKREEQLFKRRNVATAEEETEEEVMSDGGFHEAQINNMEMAPGGVITSDMIEMIFSKSPEQQLSATQKFRKLLSKEPNPPIDEVISTPGVVARFVEFLKRKENCTLQFESAWVLTNIASGNSLQTRIVIQAGAVPIFIELLSSEFEDVQEQAVWALGNIAGDSTMCRDYVLDCNILPPLLQLFSKQNRLTMTRNAVWALSNLCRGKSPPPEFAKVSPCLNVLSWLLFVSDTDVLADACWALSYLSDGPNDKIQAVIDAGVCRRLVELLMHNDYKVVSPALRAVGNIVTGDDIQTQVILNCSALQSLLHLLSSPKESIKKEACWHLSQSGSVPYFQL

SEQ ID NO: 798685 - protein, 67 aa, Homo sapiens
MTPISKLSSTSKLYRLPRFQMPNSRIFSIKFVPLPTVVQKTSTLIFPQCLFQREARLSRLPAQRFST

SEQ ID NO: 798686 - protein, 103 aa, Homo sapiens
SKSKKTARTRLSPIAPAAGANRSLATAACACARRTAQRDVGGAAKSPDHLPARVEFPRSVSFPAPPRKVRSRETPRMKSGSVAQAGVCWHHLGSLQLPPPRLQ

SEQ ID NO: 798687 - protein, 136 aa, Homo sapiens
SPGNVCRRRRMRRLLSGCGWRWSEAWCSSLVSFCLSLSSLGPPARGTVITSPREVVRAARRWAAGSPGGRAGGAETSAGLMSALSARGPSLPNGTIVVRMLMPSVEPVVSYIRGSSPGPSQLPPLCKFITTERPQG

SEQ ID NO: 798688 - protein, 104 aa, Homo sapiens
TSTQLPPALSVVCWIPPLLRGIFQQFFPPWFCIFKVLPPFESTPFSISLTPLHRNYSCQATNDLHLALQSPFPGLFLFVLSVAFELASHCFLLDKLFFFSFCFS

SEQ ID NO: 798689 - protein, 107 aa, Homo sapiens
SPGNVCRRRRMRRLLSGCGWRWSEAWCSSLVSFCLSLSSLGPPARGTVITSPREVVRAARRWAAGSPGGRAGGAETSAGLMSALSARGPSLPVRAGHCRMAPLLCGC

SEQ ID NO: 798690 - protein, 120 aa, Homo sapiens
SKSKKTARTRLSPIAPAAGANRSLATAACACARRTAQRDVGGAAKSPDHLPARVEFPRSVSFPAPPRKVRSRETPRNGTIVVRMLMPSVEPVVSYIRGSSPGPSQLPPLCKFITTERPQG

SEQ ID NO: 798691 - protein, 216 aa, Homo sapiens
MSHQSFCARDKACTHILCGKNCSQSVHSPHKPALKLEKVSQCPECGKTFSRSSYLVRHQRIHTGEKPHKCSECGKGFSERSNLTAHLRTHTGERPYQCGQCGKSFNQSSSLIVHQRTHTGEKPYQCIVCGKRFNNSSQFSAHRRIHTGESPYKCAVCGKIFNNSSHFSAHRKTHTGEKPYRCSHCERGFTKNSALTRHQTVHMKAVLSSQEGRDAL

SEQ ID NO: 798692 - protein, 696 aa, Homo sapiens [sequence omitted]

SEQ ID NO: 798693 - protein, 567 aa, Homo sapiens
MAAVKSTEAHPSSNKDPTQGQKSALQGNSPDSEASRQRFRQFCYQEVTGPHEAFSKLWELCCQWLRPKTHSKEEILELLVLEQFLTILPEEIQTWVREQHPENGEEAVALVEDVQRAPGQQQQVPWGYEETKTLLAILSSSQFYGKLQTCQQNSQIYRAMAEGLWEQGFLRTPEQCRTKFKSLQLSYRKVRRGRVPEPCIFYEEMNALSGSWASAPPMASDAVPGQEGSDIEAGELNHQNGEPTEVEDGTVDGADRDEKDFRNPGQEVRKLDLPVLFPNRLGFEFKNEIKKENLKWDDSEEVEINKALQRKSRGVYWHSELQKGLESEPTSRRQCRNSPGESEEKTPSQEKMSHQSFCARDKACTHILCGKNCSQSVHSPHKPALKLEKVSQCPECGKTFSRSSYLVRHQRIHTGEKPHKCSECGKGFSERSNLTAHLRTHTGERPYQCGQCGKSFNQSSSLIVHQRTHTGEKPYQCIVCGKRFNNSSQFSAHRRIHTGESPYKCAVCGKIFNNSSHFSAHRKTHTGEKPYRCSHCERGFTKNSALTRHQTVHMKAVLSSQEGRDAL

SEQ ID NO: 798694 - protein, 641 aa, Homo sapiens
MAAVKSTEAHPSSNKDPTQGQKSALQGNSPDSEASRQRFRQFCYQEVTGPHEAFSKLWELCCQWLRPKTHSKEEILELLVLEQFLTILPEEIQTWVREQHPENGEEAVALVEDVQRAPGQQPGLLLRLPGTCLKTQVSTTRRQVLWSGQLGPRDQPCVTTELYPSVSKNGCAQALHKGPSTGVPPREKDSHVSLATGVPWGYEETKTLLAILSSSQFYGKLQTCQQNSQIYRAMAEGLWEQGFLRTPEQCRTKFKSLQLSYRKVRRGRVPEPCIFYEEMNALSGSWASAPPMASDAVPGQEGSDIEAGELNHQNGEPTEVEDGTVDGADRDEKDFRNPGQEVRKLDLPVLFPNRLGFEFKNEIKKENLKWDDSEEVEINKALQRKSRGVYWHSELQKGLESEPTSRRQCRNSPGESEEKTPSQEKMSHQSFCARDKACTHILCGKNCSQSVHSPHKPALKLEKVSQCPECGKTFSRSSYLVRHQRIHTGEKPHKCSECGKGFSERSNLTAHLRTHTGERPYQCGQCGKSFNQSSSLIVHQRTHTGEKPYQCIVCGKRFNNSSQFSAHRRIHTGESPYKCAVCGKIFNNSSHFSAHRKTHTGEKPYRCSHCERGFTKNSALTRHQTVHMKAVLSSQEGRDAL

SEQ ID NO: 798695 - protein, 138 aa, Homo sapiens
MAEGLWEQGFLRTPEQCRTKFKSLQLSYRKVRRGRVPEPCIFYEEMNALSGSWASAPPMASDAVPGQEGSDIEAGELNHQNGEPTEVEDGTVDGADRDEKDFRNPGQEVRKLDLPVLFPNRLGKTPLALMVKGWQSPL

SEQ ID NO: 798696 - protein, 696 aa, Homo sapiens [sequence omitted]

SEQ ID NO: 798697 - protein, 185 aa, Homo sapiens [sequence omitted]

SEQ ID NO: 798698 - protein, 1211 aa, Homo sapiens
VGAGAAAAVVVLAGAGAAGWRSGGRAGGLAGRTSGRRLKDQRDFGDQRRAWGDLGLGACEISLAFAGSSRRDRPMAGARSRDPWGASGICYLFGSLLVELLFSRAVAFNLDVMGALRKEGEPGSLFGFSVALHRQLQPRPQSWLLVGAPQALALPGQQANRTGGLFACPLSLEETDCYRVDIDQGADMQKESKENQWLGVSVRSQGPGGKIVTCAHRYEARQRVDQILETRDMIGRCFVLSQDLAIRDELDGGEWKFCEGRPQGHEQFGFCQQGTAAAFSPDSHYLLFGAPGTYNWKGLLFVTNIDSSDPDQLVYKTLDPADRLPGPAGDLALNSYLGFSIDSGKGLVRAEELSFVAGAPRANHKGAVVILRKDSASRLVPEVMLSGERLTSGFGYSLAVADLNSDGWPDLIVGAPYFFERQEELGGAVYVYLNQGGHWAGISPLRLCGSPDSMFGISLAVLGDLNQDGFPDIAVGAPFDGDGKVFIYHGSSLGVVAKPSQVLEGEAVGIKSFGYSLSGSLDMDGNQYPDLLVGSLADTAVLFRARPILHVSHEVSIAPRSIDLEQPNCAGGHSVCVDLRVCFSYIAVPSSYSPTVALDYVLDADTDRRLRGQVPRVTFLSRNLEEPKHQASGTVWLKHQHDRVCGDAMFQLQENVKDKLRAIVVTLSYSLQTPRLRRQAPGQGLPPVAPILNAHQPSTQRAEIHFLKQGCGEDKICQSNLQLVHARFCTRVSDTEFQPLPMDVDGTTALFALSGQPVIGLELMVTNLPSDPAQPQADGDDAHEAQLLVMLPDSLHYSGVRALDPAEKPLCLSNENASHVECELGNPMKRGAQVTFYLILSTSGISIETTELEVELLLATISEQELHPVSARARVFIELPLSIAGMAIPQQLFFSGVVRGERAMQSERDVGSKVKYEVTVSNQGQSLRTLGSAFLNIMWPHEIANGKWLLYPMQVELEGGQGPGQKGLCSPRPNILHLDVDSRDRRRRELEPPEQQEPGERQEPSMSWWPVSSAEKKKNITLDCARGTANCVVFSCPLYSFDRAAVLHVWGRLWNSTFLEEYSAVKSLEVIVRANITVKSSIKNLMLRDASTVIPVMVYLDPMAVVAEGVPWWVILLAVLAGLLVLALLVLLLWKMGFFKRAKHPEATVPQYHAVKIPREDRQQFKEEKTGTILRNNWGSPRREGPDAHPILAADGHPELGPDGHPGPGTA

SEQ ID NO: 798699 - protein, 1211 aa, Homo sapiens; identical to SEQ ID NO: 798698

SEQ ID NO: 798700 - protein, 1211 aa, Homo sapiens; identical to SEQ ID NO: 798698

SEQ ID NO: 798701 - protein, 1205 aa, Homo sapiens
VGAGAAAAVVVLAGAGAAGWRSGGRAGGLAGRTSGRRLKDQRDFGDQRRAWGDLGLGACEISLAFAGSSRRDRPMAGARSRDPWGASGICYLFGSLLVELLFSRAVAFNLDVMGALRKEGEPGSLFGFSVALHRQLQPRPQSWLLVGAPQALALPGQQANRTGGLFACPLSLEETDCYRVDIDQGADMQKESKENQWLGVSVRSQGPGGKIVTCAHRYEARQRVDQILETRDMIGRCFVLSQDLAIRDELDGGEWKFCEGRPQGHEQFGFCQQGTAAAFSPDSHYLLFGAPGTYNWKGLLFVTNIDSSDPDQLVYKTLDPADRLPGPAGDLALNSYLGFSIDSGKGLVRAEELSFVAGAPRANHKGAVVILRKDSASRLVPEVMLSGERLTSGFGYSLAVADLNSDGWPDLIVGAPYFFERQEELGGAVYVYLNQGGHWAGISPLRLCGSPDSMFGISLAVLGDLNQDGFPDIAVGAPFDGDGKVFIYHGSSLGVVAKPSQVLEGEAVGIKSFGYSLSGSLDMDGNQYPDLLVGSLADTAVLFRARPILHVSHEVSIAPRSIDLEQPNCAGGHSVCVDLRVCFSYIAVPSSYSPTVDADTDRRLRGQVPRVTFLSRNLEEPKHQASGTVWLKHQHDRVCGDAMFQLQENVKDKLRAIVVTLSYSLQTPRLRRQAPGQGLPPVAPILNAHQPSTQRAEIHFLKQGCGEDKICQSNLQLVHARFCTRVSDTEFQPLPMDVDGTTALFALSGQPVIGLELMVTNLPSDPAQPQADGDDAHEAQLLVMLPDSLHYSGVRALDPAEKPLCLSNENASHVECELGNPMKRGAQVTFYLILSTSGISIETTELEVELLLATISEQELHPVSARARVFIELPLSIAGMAIPQQLFFSGVVRGERAMQSERDVGSKVKYEVTVSNQGQSLRTLGSAFLNIMWPHEIANGKWLLYPMQVELEGGQGPGQKGLCSPRPNILHLDVDSRDRRRRELEPPEQQEPGERQEPSMSWWPVSSAEKKKNITLDCARGTANCVVFSCPLYSFDRAAVLHVWGRLWNSTFLEEYSAVKSLEVIVRANITVKSSIKNLMLRDASTVIPVMVYLDPMAVVAEGVPWWVILLAVLAGLLVLALLVLLLWKMGFFKRAKHPEATVPQYHAVKIPREDRQQFKEEKTGTILRNNWGSPRREGPDAHPILAADGHPELGPDGHPGPGTA

SEQ ID NO: 798702 - protein, 448 aa, Homo sapiens [sequence omitted]

SEQ ID NO: 798703 - protein, 1249 aa, Homo sapiens
VGAGAAAAVVVLAGAGAAGWRSGGRAGGLAGRTSGRRLKDQRDFGDQRRAWGDLGLGACEISLAFAGSSRRDRPMAGARSRDPWGASGICYLFGSLLVELLFSRAVAFNLDVMGALRKEGEPGSLFGFSVALHRQLQPRPQSWLLVGAPQALALPGQQANRTGGLFACPLSLEETDCYRVDIDQGADMQKESKENQWLGVSVRSQGPGGKIVTCAHRYEARQRVDQILETRDMIGRCFVLSQDLAIRDELDGGEWKFCEGRPQGHEQFGFCQQGTAAAFSPDSHYLLFGAPGTYNWKGLLFVTNIDSSDPDQLVYKTLDPADRLPGPAGDLALNSYLGFSIDSGKGLVRAEELSFVAGAPRANHKGAVVILRKDSASRLVPEVMLSGERLTSGFGYSLAVADLNSDGWPDLIVGAPYFFERQEELGGAVYVYLNQGGHWAGISPLRLCGSPDSMFGISLAVLGDLNQDGFPDIAVGAPFDGDGKVFIYHGSSLGVVAKPSQVLEGEAVGIKSFGYSLSGSLDMDGNQYPDLLVGSLADTAVLFRARPILHVSHEVSIAPRSIDLEQPNCAGGHSVCVDLRVCFSYIAVPSSYSPTVALDYVLDADTDRRLRGQVPRVTFLSRNLEEPKHQASGTVWLKHQHDRVCGDAMFQLQENVKDKLRAIVVTLSYSLQTPRLRRQAPGQGLPPVAPILNAHQPSTQRAEIHFLKQGCGEDKICQSNLQLVHARFCTRVSDTEFQPLPMDVDGTTALFALSGQPVIGLELMVTNLPSDPAQPQADGDDAHEAQLLVMLPDSLHYSGVRALDPAEKPLCLSNENASHVECELGNPMKRGAQVTFYLILSTSGISIETTELEVELLLATISEQELHPVSARARVFIELPLSIAGMAIPQQLFFSGVVRGERAMQSERDVGSKVKYEVTVSNQGQSLRTLGSAFLNIMWPHEIANGKWLLYPMQVELEGGQGPGQKGLCSPRPNILHLDVDSRDRRRRELEPPEQQEPGERQEPSMSWWPVSSAEKKKNITLDCARGTANCVVFSCPLYSFDRAAVLHVWGRLWNSTFLEEYSAVKSLEVIVRANITVKSSIKNLMLRDASTVIPVMVYLDPMAVVAEGVPWWVILLAVLAGLLVLALLVLLLWKCGFFHRSSQSSSFPTNYHRACLAVQPSAMEVGGPGTVEMGFFKRAKHPEATVPQYHAVKIPREDRQQFKEEKTGTILRNNWGSPRREGPDAHPILAADGHPELGPDGHPGPGTA

SEQ ID NO: 798704 - protein, 882 aa, Homo sapiens
MEERANVVGFSIDSGKGLVRAEELSFVAGAPRANHKGAVVILRKDSASRLVPEVMLSGERLTSGFGYSLAVADLNSDGWPDLIVGAPYFFERQEELGGAVYVYLNQGGHWAGISPLRLCGSPDSMFGISLAVLGDLNQDGFPDIAVGAPFDGDGKVFIYHGSSLGVVAKPSQVLEGEAVGIKSFGYSLSGSLDMDGNQYPDLLVGSLADTAVLFRARPILHVSHEVSIAPRSIDLEQPNCAGGHSVCVDLRVCFSYIAVPSSYSPTVALDYVLDADTDRRLRGQVPRVTFLSRNLEEPKHQASGTVWLKHQHDRVCGDAMFQLQENVKDKLRAIVVTLSYSLQTPRLRRQAPGQGLPPVAPILNAHQPSTQRAEIHFLKQGCGEDKICQSNLQLVHARFCTRVSDTEFQPLPMDVDGTTALFALSGQPVIGLELMVTNLPSDPAQPQADGDDAHEAQLLVMLPDSLHYSGVRALDPAEKPLCLSNENASHVECELGNPMKRGAQVTFYLILSTSGISIETTELEVELLLATISEQELHPVSARARVFIELPLSIAGMAIPQQLFFSGVVRGERAMQSERDVGSKVKYEVTVSNQGQSLRTLGSAFLNIMWPHEIANGKWLLYPMQVELEGGQGPGQKGLCSPRPNILHLDVDSRDRRRRELEPPEQQEPGERQEPSMSWWPVSSAEKKKNITLDCARGTANCVVFSCPLYSFDRAAVLHVWGRLWNSTFLEEYSAVKSLEVIVRANITVKSSIKNLMLRDASTVIPVMVYLDPMAVVAEGVPWWVILLAVLAGLLVLALLVLLLWKMGFFKRAKHPEATVPQYHAVKIPREDRQQFKEEKTGTILRNNWGSPRREGPDAHPILAADGHPELGPDGHPGPGTA

SEQ ID NO: 798705 - protein, 384 aa, Homo sapiens [sequence omitted]

SEQ ID NO: 798706 - protein, 109 aa, Homo sapiens [sequence omitted]

SEQ ID NO: 798707 - protein, 101 aa, Homo sapiens
AEGHLKPHLPMILLMETHNRLWSGLSLWGAMSALCINTEGDKHYVDADRGCRDLTVPWGPDCTHHPHHHVGEGCDPQRGGSKRHHEPFLPARLVAVGYSEV

SEQ ID NO: 798708 - protein, 76 aa, Homo sapiens
YPHPHTTFEVGTAMMDAHFTDVETEVLTGKVTWPKSHRDEVSLDLNAGQAPPRQVPHHLLWGKAALTWAAPGGFYP

SEQ ID NO: 798709 - protein, 128 aa, Homo sapiens
YPHPHTTFEVGTAMMDAHFTDVETEVLTGKVTWPKSHRDEVSLDLNAVDARTNGQARGGGGDDASRTPAGHASLDRDWNTDPHTRSLDRRYTDRGTYGYSQAPPRQVPHHLLWGKAALTWAAPGGFYP

SEQ ID NO: 798710 - protein, 706 aa, Homo sapiens
MASPADSCIQFTRHASDVLLNLNRLRSRDILTDVVIVVSREQFRAHKTVLMACSGLFYSIFTDQLKCNLSVINLDPEINPEGFCILLDFMYTSRLNLREGNIMAVMATAMYLQMEHVVDTCRKFIKASEAEMVSAIKPPREEFLNSRMLMPQDIMAYRGREVVENNLPLRSAPGCESRAFAPSLYSGLSTPPASYSMYSHLPVSSLLFSDEEFRDVRMPVANPFPKERALPCDSARPVPGEYSRPTLEVSPNVCHSNIYSPKETIPEEARSDMHYSVAEGLKPAAPSARNAPYFPCDKASKEEERPSSEDEIALHFEPPNAPLNRKGLVSPQSPQKSDCQPNSPTESCSSKNACILQASGSPPAKSPTDPKACNWKKYKFIVLNSLNQNAKPEGPEQAELGRLSPRAYTAPPACQPPMEPENLDLQSPTKLSASGEDSTIPQASRLNNIVNRSMTGSPRSSSESHSPLYMHPPKCTSCGSQSPQHAEMCLHTAGPTFPEEMGETQSEYSDSSCENGAFFCNECDCRFSEEASLKRHTLQTHSDKPYKCDRCQASFRYKGNLASHKTVHTGEKPYRCNICGAQFNRPANLKTHTRIHSGEKPYKCETCGARFVQVAHLRAHVLIHTGEKPYPCEICGTRFRHLQTLKSHLRIHTGEKPYHCEKCNLHFRHKSQLRLHLRQKHGAITNTKVQYRVSATDLPPELPKAC

SEQ ID NO: 798711 - protein, 650 aa, Homo sapiens
MASPADSCIQFTRHASDVLLNLNRLRSRDILTDVVIVVSREQFRAHKTVLMACSGLFYSIFTDQLKCNLSVINLDPEINPEGFCILLDFMYTSRLNLREGNIMAVMATAMYLQMEHVVDTCRKFIKASEAEMVSAIKPPREEFLNSRMLMPQDIMAYRGREVVENNLPLRSAPGCESRAFAPSLYSGLSTPPASYSMYSHLPVSSLLFSDEEFRDVRMPVANPFPKERALPCDSARPVPGEYSRPTLEVSPNVCHSNIYSPKETIPEEARSDMHYSVAEGLKPAAPSARNAPYFPCDKASKEEERPSSEDEIALHFEPPNAPLNRKGLVSPQSPQKSDCQPNSPTESCSSKNACILQASGSPPAKSPTDPKACNWKKYKFIVLNSLNQNAKPEGPEQAELGRLSPRAYTAPPACQPPMEPENLDLQSPTKLSASGEDSTIPQASRLNNIVNRSMTGSPRSSSESHSPLYMHPPKCTSCGSQSPQHAEMCLHTAGPTFPEEMGETQSEYSDSSCGEKPYRCNICGAQFNRPANLKTHTRIHSGEKPYKCETCGARFVQVAHLRAHVLIHTGEKPYPCEICGTRFRHLQTLKSHLRIHTGEKPYHCEKCNLHFRHKSQLRLHLRQKHGAITNTKVQYRVSATDLPPELPKAC

SEQ ID NO: 798712 - protein, 706 aa, Homo sapiens; identical to SEQ ID NO: 798710

SEQ ID NO: 798713 - protein, 389 aa, Homo sapiens
TLEDPLCSQISGSPQSPQKSDCQPNSPTESCSSKNACILQASGSPPAKSPTDPKACNWKKYKFIVLNSLNQNAKPEGPEQAELGRLSPRAYTAPPACQPPMEPENLDLQSPTKLSASGEDSTIPQASRLNNIVNRSMTGSPRSSSESHSPLYMHPPKCTSCGSQSPQHAEMCLHTAGPTFPEEMGETQSEYSDSSCENGAFFCNECDCRFSEEASLKRHTLQTHSDKPYKCDRCQASFRYKGNLASHKTVHTGEKPYRCNICGAQFNRPANLKTHTRIHSGEKPYKCETCGARFVQVAHLRAHVLIHTGEKPYPCEICGTRFRHLQTLKSHLRIHTGEKPYHCEKCNLHFRHKSQLRLHLRQKHGAITNTKVQYRVSATDLPPELPKAC

SEQ ID NO: 798714 - protein, 706 aa, Homo sapiens; identical to SEQ ID NO: 798710

SEQ ID NO: 798715 - protein, 105 aa, Homo sapiens
GSFTCEYQRGFSLDQTGSSCEDVDECEGYHRCPHGCQYIIGGYRCSCPQAHWQQHSGKQGTDICTTLAYLSAEARMHMGSSPGLGEARAAPVPRRENLPLWVFEQ

SEQ ID NO: 798716 - protein, 706 aa, Homo sapiens; identical to SEQ ID NO: 798710

SEQ ID NO: 798717 - protein, 591 aa, Homo sapiens [sequence omitted]

SEQ ID NO: 798718 - protein, 67 aa, Homo sapiens
GPSSLEPEPPNPRRSAYEDLEICRPVKKSCGFEGFWLARGSKNLGELTPSPPLPRSSGKVRSSNSEN

SEQ ID NO: 798719 - protein, 706 aa, Homo sapiens; identical to SEQ ID NO: 798710

SEQ ID NO: 798720 - protein, 706 aa, Homo sapiens; identical to SEQ ID NO: 798710

SEQ ID NO: 798721 - protein, 617 aa, Homo sapiens
MYTSRLNLREGNIMAVMATAMYLQMEHVVDTCRKFIKASEAEMVSAIKPPREEFLNSRMLMPQDIMAYRGREVVENNLPLRSAPGCESRAFAPSLYSGLSTPPASYSMYSHLPVSSLLFSDEEFRDVRMPVANPFPKERALPCDSARPVPGEYSRPTLEVSPNVCHSNIYSPKETIPEEARSDMHYSVAEGLKPAAPSARNAPYFPCDKASKEEERPSSEDEIALHFEPPNAPLNRKGLVSPQSPQKSDCQPNSPTESCSSKNACILQASGSPPAKSPTDPKACNWKKYKFIVLNSLNQNAKPEGPEQAELGRLSPRAYTAPPACQPPMEPENLDLQSPTKLSASGEDSTIPQASRLNNIVNRSMTGSPRSSSESHSPLYMHPPKCTSCGSQSPQHAEMCLHTAGPTFPEEMGETQSEYSDSSCENGAFFCNECDCRFSEEASLKRHTLQTHSDKPYKCDRCQASFRYKGNLASHKTVHTGEKPYRCNICGAQFNRPANLKTHTRIHSGEKPYKCETCGARFVQVAHLRAHVLIHTGEKPYPCEICGTRFRHLQTLKSHLRIHTGEKPYHCEKCNLHFRHKSQLRLHLRQKHGAITNTKVQYRVSATDLPPELPKAC

SEQ ID NO: 798722 - protein, 319 aa, Homo sapiens
MSGCLWPTPSPRSGHSHVIVPGQSLVSTPPMEPENLDLQSPTKLSASGEDSTIPQASRLNNIVNRSMTGSPRSSSESHSPLYMHPPKCTSCGSQSPQHAEMCLHTAGPTFPEEMGETQSEYSDSSCENGAFFCNECDCRFSEEASLKRHTLQTHSDKPYKCDRCQASFRYKGNLASHKTVHTGEKPYRCNICGAQFNRPANLKTHTRIHSGEKPYKCETCGARFVQVAHLRAHVLIHTGEKPYPCEICGTRFRHLQTLKSHLRIHTGEKPYHCEKCNLHFRHKSQLRLHLRQKHGAITNTKVQYRVSATDLPPELPKAC

SEQ ID NO: 798723 - protein, 165 aa, Homo sapiens
SDPTAGCTGPTFPEEMGETQSEYSDSSCGEKPYRCNICGAQFNRPANLKTHTRIHSGEKPYKCETCGARFVQVAHLRAHVLIHTGEKPYPCEICGTRFRHLQTLKSHLRIHTGEKPYHCEKCNLHFRHKSQLRLHLRQKHGAITNTKVQYRVSATDLPPELPKAC

SEQ ID NO: 798724 - protein, 148 aa, Homo sapiens
MAFLFPFFLVIGEKPYRCNICGAQFNRPANLKTHTRIHSGEKPYKCETCGARFVQVAHLRAHVLIHTGEKPYPCEICGTRFRHLQTLKSHLRIHTGEKPYHCEKCNLHFRHKSQLRLHLRQKHGAITNTKVQYRVSATDLPPELPKAC

SEQ ID NO: 798725 - protein, 721 aa, Homo sapiens
MASPADSCIQFTRHASDVLLNLNRLRSRDILTDVVIVVSREQFRAHKTVLMACSGLFYSIFTDQLKCNLSVINLDPEINPEGFCILLDFMYTSRLNLREGNIMAVMATAMYLQMEHVVDTCRKFIKASEAEMVSAIKPPREEFLNSRMLMPQDIMAYRGREVVENNLPLRSAPGCESRAFAPSLYSGLSTPPASYSMYSHLPVSSLLFSDEEFRDVRMPVANPFPKERALPCDSARPVPGEYSRPTLEVSPNVCHSNIYSPKETIPEEARSDMHYSVAEGLKPAAPSARNAPYFPCDKASKEEERPSSEDEIALHFEPPNAPLNRKGLVSPQSPQKSDCQPNSPTESCSSKNACILQASGSPPAKSPTDPKACNWKKYKFIVLNSLNQNAKPEGPEQAELGRLSPRAYTAPPACQPPMEPENLDLQSPTKLSASGEDSTIPQASRLNNIVNRSMTGSPRSSSESHSPLYMHPPKCTSCGSQSPQHAEMCLHTAGPTFPEEMGETQSEYSDSSCENGAFFCNECDCRFSEEASLKRHTLQTHSDKPYKCDRCQASFRYKGNLASHKTVHTGEKPYRCNICGAQFNRPANLKTHTRIHSGEKPYKCETCGARFVQVAHLRAHVLIHTGEKPYPCEICGTRFRHLQTLKSHLRIHTGEKPYHCEKCNLHFRHKSQLRLHLRQKHGAITNTKVQYRVSATDLPPEHPILRHACVITTPETGFGCV

SEQ ID NO: 798726 - protein, 668 aa, Homo sapiens
MASPADSCIQFTRHASDVLLNLNRLRSRDILTDVVIVVSREQFRAHKTVLMACSGLFYSIFTDQLKCNLSVINLDPEINPEGFCILLDFMYTSRLNLREGNIMAVMATAMYLQMEHVVDTCRKFIKASEAEMVSAIKPPREEFLNSRMLMPQDIMAYRGREVVENNLPLRSAPGCESRAFAPSLYSGLSTPPASYSMYSHLPVSSLLFSDEEFRDVRMPVANPFPKERALPCDSARPVPGEYSRPTLEVSPNVCHSNIYSPKETIPEEARSDMHYSVAEGLKPAAPSARNAPYFPCDKASKEEERPSSEDEIALHFEPPNAPLNRKGLVSPQSPQKSDCQPNSPTESCSSKNACILQASGSPPAKSPTDPKACNWKKYKFIVLNSLNQNAKPEGPEQAELGRLSPRAYTAPPACQPPMEPENLDLQSPTKLSASGEDSTIPQASRLNNIVNRSMTGSPRSSSESHSPLYMHPPKCTSCGSQSPQHAEMCLHTAGPTFPEEMGETQSEYSDSSCENGAFFCNECDCRFSEEASLKRHTLQTHSDKPYKCDRCQASFRYKGNLASHKTVHTGEKPYRCNICGAQFNRPANLKTHTRIHSGEKPYKCETCGARFVQVAHLRAHVLIHTGEKPYPCEICGTRFRHLQTLKSHLRIHTGEKPYHVRKPLEAAL

SEQ ID NO: 798727 - protein, 227 aa, Homo sapiens
MPLGPVGTLCSQEPGRLTAEPRGLGLPRPSIQARLSRSWESVPTASPASRSTEEKSRGQSRKKPSSEPTAHMAGETLRLLMAMPGPGGREASVPRCPCHPGHVVGALLPELKVCFCGWGPPGVRVGSRRRACRTTMRCQSISKMWPLRLHTKLPEEAAGKSTGQERSTPPRSRQSRTLPCPHDAILQGMRTEHCRSSQRPDPPGDAETHSQARGRCSGLGPHSGPRP

SEQ ID NO: 798728 - protein, 103 aa, Homo sapiens
STVTCHVSHLTGNKSLSVKFEFRSQNLRISSVVLTDHSLCETLSFCGHSGHHRICFLPEDKSCQVGKKFFKEEGRVFFCFSSLSLDCNIGEMSDGPAVNLGHG

SEQ ID NO: 798729 - protein, 102 aa, Homo sapiens
MAQDFSQHPQTGIIRRHRFYSPKPLSTTPRGQSFLLSRQAKVATWDPMLSPDFQPKSAFKLTWTAQPPCLSVTPSQGQTFHPNSPEGELPPDLTENTCPSQA

SEQ ID NO: 798730 - protein, 471 aa, Homo sapiens
  misc_feature (6)..(7): Xaa can be any naturally occurring amino acid
  misc_feature (10)..(10): Xaa can be any naturally occurring amino acid
MIPRHXXPPXSICSQEVEETVSTVDSGAPTDLAQLPTVLKQPCCSVMASGQFVNKLQEEVICPICLDILQKPVTIDCGHNFCLKCITQIGETSCGFFKCPLCKTSVRKNAIRFNSLLRNLVEKIQALQASEVQSKRKEATCPRHQEMFHYFCEDDGKFLCFVCRESKDHKSHNVSLIEEAAQNYQGQIQEQIQVLQQKEKETVQVKAQGVHRVDVFTDQVEHEKQRILTEFELLHQVLEEEKNFLLSRIYWLGHEGTEAGKHYVASTEPQLNDLKKLVDSLKTKQNMPPRQLLEDIKVVLCRSEEFQFLNPTPVPLELEKKLSEAKSRHDSITGSLKKFKDQLQADRKKDENRFFKSMNKNDMKSWGLLQKNNHKMNKTSEPGSSSAGGRTTSGPPNHHSSAPSHSLFRASSAGKVTFPVCLLASYDEISGQGASSQDTKTFDVALSEELHAALSEWLTAIRAWFCEVPSS

SEQ ID NO: 798731 - protein, 267 aa, Homo sapiens
MASGQFVNKLQEEVICPICLDILQKPVTIDCGHNFCLKCITQIGETSCGFFKCPLCKTSVRKNAIRFNSLLRNLVEKIQALQASEVQSKRKEATCPRHQEMFHYFCEDDGKFLCFVCRESKDHKSHNVSLIEEAAQNYQGQIQEQIQVLQQKEKETVQVKAQGVHRVDVFTDQVEHEKQRILTEFELLHQVLEEEKNFLLSRIYWLGHEGTEAGKHYVASTEPQLNDLKKLVDSLKTKQNMPPRQLLENWRKNSVKQNQDTTPSQGA

SEQ ID NO: 798732 - protein, 114 aa, Homo sapiens
MNKNDMKSWGLLQKNNHKMNKTSEPGSSSAGGRTTSGPPNHHSSAPSHSLFRASSAGKVTFPVCLLASYDEISGQGASSQDTKTFDVALSEELHAALSEWLTAIRAWFCEVPSS

SEQ ID NO: 798733 - protein, 97 aa, Homo sapiens
RSPTTVRAAPLFARSLMQRLSGLSAHETHHSTWASSQCRAVLFPPQGGPLESPHRLLRIRHSPSNPMSPTTLALPYIPTSPFSPNPSYQQGKLINEI

SEQ ID NO: 798734 - protein, 471 aa, Homo sapiens; identical to SEQ ID NO: 798730
  misc_feature (6)..(7): Xaa can be any naturally occurring amino acid
  misc_feature (10)..(10): Xaa can be any naturally occurring amino acid

SEQ ID NO: 798735 - protein, 367 aa, Homo sapiens
  misc_feature (6)..(7): Xaa can be any naturally occurring amino acid
MIPRHXXPPGSICSQEVEETVSTVDSGAPTDLAQLPTVLKQPCCSVMASGQFVNKLQEEVICPICLDILQKPVTIDCGHNFCLKCITQIGETSCGFFKCPLCKTSVRKNAIRFNSLLRNLVEKIQALQASEVQSKRKEATCPRHQEMFHYFCEDDGKFLCFVCRESKDHKSHNVSLIEEAAQNYQGQIQEQIQVLQQKEKETVQVKAQGVHRVDVFTDQVEHEKQRILTEFELLHQVLEEEKNFLLSRIYWLGHEGTEAGKHYVASTEPQLNDLKKLVDSLKTKQNMPPRQLLEDIKVVLCRSEEFQFLNPTPVPLELEKKLSEAKSRHDSITGSLKKFKDQLQADRKKDENRFFKSMNKNDMKSCK

SEQ ID NO: 798736 - protein, 425 aa, Homo sapiens
MASGQFVNKLQEEVICPICLDILQKPVTIDCGHNFCLKCITQIGETSCGFFKCPLCKTSVRKNAIRFNSLLRNLVEKIQALQASEVQSKRKEATCPRHQEMFHYFCEDDGKFLCFVCRESKDHKSHNVSLIEEAAQNYQGQIQEQIQVLQQKEKETVQVKAQGVHRVDVFTDQVEHEKQRILTEFELLHQVLEEEKNFLLSRIYWLGHEGTEAGKHYVASTEPQLNDLKKLVDSLKTKQNMPPRQLLEDIKVVLCRSEEFQFLNPTPVPLELEKKLSEAKSRHDSITGSLKKFKDQLQADRKKDENRFFKSMNKNDMKSWGLLQKNNHKMNKTSEPGSSSAGGRTTSGPPNHHSSAPSHSLFRASSAGKVTFPVCLLASYDEISGQGASSQDTKTFDVALSEELHAALSEWLTAIRAWFCEVPSS

SEQ ID NO: 798737 - protein, 455 aa, Homo sapiens
  misc_feature (6)..(7): Xaa can be any naturally occurring amino acid
  misc_feature (10)..(10): Xaa can be any naturally occurring amino acid
MIPRHXXPPXSICSQEVEETVSTVDSGAPTDLAQLPTVLKQPCCSVMASGQFVNKLQEEVICPICLDILQKPVTIDCGHNFCLKCITQIGETSCGFFKCPLCKTSVRKNAIRFNSLLRNLVEKIQALQASEVQSKRKEATCPRHQEMFHYFCEDDGKFLCFVCRESKDHKSHNVSLIEEAAQNYQGQIQEQIQVLQQKEKETVQVKAQGVHRVDVFTDQVEHEKQRILTEFELLHQVLEEEKNFLLSRIYWLGHEGTEAGKHYVASTEPQLNDLKKLVDSLKTKQNMPPRQLLEPTPVPLELEKKLSEAKSRHDSITGSLKKFKDQLQADRKKDENRFFKSMNKNDMKSWGLLQKNNHKMNKTSEPGSSSAGGRTTSGPPNHHSSAPSHSLFRASSAGKVTFPVCLLASYDEISGQGASSQDTKTFDVALSEELHAALSEWLTAIRAWFCEVPSS

SEQ ID NO: 798738 - protein, 313 aa, Homo sapiens
  misc_feature (6)..(7): Xaa can be any naturally occurring amino acid
MIPRHXXPPGSICSQEVEETVSTVDSGAPTDLAQLPTVLKQPCCSVMASGQFVNKLQEEVICPICLDILQKPVTIDCGHNFCLKCITQIGETSCGFFKCPLCKTSVRKNAIRFNSLLRNLVEKIQALQASEVQSKRKEATCPRHQEMFHYFCEDDGKFLCFVCRESKDHKSHNVSLIEEAAQNYQGQIQEQIQVLQQKEKETVQVKAQGVHRVDVFTDQVEHEKQRILTEFELLHQVLEEEKNFLLSRIYWLGHEGTEAGKHYVASTEPQLNDLKKLVDSLKTKQNMPPRQLLEDIKVVLCRYDGPPQMYFAY

SEQ ID NO: 798739 - protein, 196 aa, Homo sapiens
MASGQFVNKLQEEVICPICLDILQKPVTIDCGHNFCLKCITQIGETSCGFFKCPLCKTSVRKNAIRFNSLLRNLVEKIQALQASEVQSKRKEATCPRHQEMFHYFCEDDGKFLCFVCRESKDHKSHNVSLIEEAAQNYQGQIQEQIQVLQQKEKETVQVKAQGVHRVDVFTVRKTPSHDLWKQKHLCQSSWNPLLH

SEQ ID NO: 798740 - protein, 83 aa, Homo sapiens
RSPTTVRAAPLFARSLMQRLSGLSAHETHHSTWASSQCRAVLFPPQGGPLESPHRLLRIPPHPEDFRLPAPHLGPAHLGLLTE

SEQ ID NO: 798741 - protein, 103 aa, Homo sapiens
HQPAQPHLPRSEEFQFLNPTPVPLELEKKLSEAKSRHDSITGSLKKFKDQLQADRKKDENRFFKSMNKNDMKSWGLLQKNNHKMNKTSEPGSSSAGKSPVSEY

SEQ ID NO: 798742 - protein, 185 aa, Homo sapiens
MPPRQLLEDIKVVLCRSEEFQFLNPTPVPLELEKKLSEAKSRHDSITGSLKKFKDQLQADRKKDENRFFKSMNKNDMKSWGLLQKNNHKMNKTSEPGSSSAGGRTTSGPPNHHSSAPSHSLFRASSAGKVTFPVCLLASYDEISGQGASSQDTKTFDVALSEELHAALSEWLTAIRAWFCEVPSS

SEQ ID NO: 798743 - protein, 144 aa, Homo sapiens
RTQQTQNTLHLPLKNSSYERENLISGSNQTELSSGISESSHFIPYVRTNEIYYLDPDAPLSGPSTQDPQYQNSQDCGQKRQLFDSDCVRDPLLNPNMVKNRDRQQAILKGLSELRQGLLQKQKELESSLLPLAENQEESFGSSF

SEQ ID NO: 798744 - protein, 117 aa, Homo sapiens
RTQQTQNTLHLPLKNSSYERENLISGSNQTELSSGISESSHFIPYVRTNEIYYLDPDAPLSGPSTQDPQYQNSQDCGQKRQLFDSDCVRDPLLNPNMVKNRDRQQAILKGLSELRQV

SEQ ID NO: 798745 - protein, 113 aa, Homo sapiens
DHNAGCILDRVSLCRPSWSAAVLSQLTAASNSRGQAILPQLPVSEVTAQSLLSNTSCETTGMKGACVISQINQHMETEKDRFKVQGVFVASCAHVRCFIYNITTAGTEKKQRQ

SEQ ID NO: 798746 - protein, 125 aa, Homo sapiens
CGALGKRKSQMKLLPGSNFTSMFNTQVCCPDLPEEAGNAHGQRDKNEDFRRKEWGWQTCRPGARAGQPQAPSGYREEANGRGCPAGSREEHEGSGGRKVLPEGRAETVRDPGSEGPMTTMAVVHR

SEQ ID NO: 798747 - protein, 453 aa, Homo sapiens
MISQFFILSSKGDPLIYKDFRGDSGGRDVAELFYRKLTGLPGDESPVVMHHHGRHFIHIRHSGLYLVVTTSENVSPFSLLELLSRLATLLGDYCGSLGEGTISRNVALVYELLDEVLDYGYVQTTSTEMLRNFIQTEAVVSKPFSLFDLSSVGLFGAETQQSKVAPSSAASRPVLSSRSDQSQKNEVFLDVVERLSVLIASNGSLLKVDVQGEIRLKSFLPSGSEMRIGLTEEFCVGKSELRGYGPGIRVDEVSFHSSVNLDEFESHRILRLQPPQGELTVMRYQLSDDLPSPLPFRLFPSVQWDRGSGRLQVYLKLRCDLLSKSQALNVRLHLPLPRGVVSLSQELSSPEQKAELAEGALRWDLPRVQGGSQLSGLFQMDVPGPPGPPSHGLSTSASPLGLGPASLSFELPRHTCSGLQVRFLRLAFRPCGNANPHKWVRHLSHSDAYVIRI

SEQ ID NO: 798748 - protein, 103 aa, Homo sapiens
YPQHVCQGHEVSSQIVQQGLEVSFHSSVNLDEFESHRILRLQPPQGELTYCTAGRRVGRQPPRAGSWPAVWEQEGKDSSVYSFREWGTRTGMSWLVCFLKLRL

SEQ ID NO: 798749 - protein, 408 aa, Homo sapiens
MISQFFILSSKGDPLIYKDFRGDSGGRDVAELFYRKLTGLPGDESPVVMHHHGRHFIHIRHSGLYLVVTTSENVSPFSLLELLSRLATLLGDYCGSLGEGTISRNVALVYELLDEVLDYGYVQTTSTEMLRNFIQTEAVVSKPFSLFDLSSVGLFGAETQQSKVAPSSAASRPVLSSRSDQSQKNEVFLDVVERLSVLIASNGSLLKVDVQGEIRLKSFLPSGSEMRIGLTEEFCVGKSELRGYGPGIRVDEVSFHSSVNLDEFESHRILRLQPPQGELTVMRYQLSDDLPSPLPFRLFPSVQWDRGSGRLQVYLKLRCDLLSKSQALNVRLHLPLPRGVVSLSQELSSPEQKAELAEGALRWDLPRVQGGSQLSGLFQRPNIVSQLSQACDGAITSRPGRLLVHPAL

SEQ ID NO: 798750 - protein, 354 aa, Homo sapiens
MISQFFILSSKGDPLIYKDFRGDSGGRDVAELFYRKLTGLPGDESPVVMHHHGRHFIHIRHSGLYLVVTTSENVSPFSLLELLSRLATLLGDYCGSLGEGTISRNVALVYELLDEVLDYGYVQTTSTEMLRNFIQTEAVVSKPFSLFDLSSVGLFGAETQQSKVAPSSAASRPVLSSRSDQSQKNEVFLDVVERLSVLIASNGSLLKVDVQGEIRLKSFLPSGSEMRIGLTEEFCVGKSELRGYGPGIRVDEVSFHSSVNLDEFESHRILRLQPPQGELTVMRYQLSDDLPSPLPFRLFPSVQWDRGSGRLQVYLKLRCDLLSKSQALNVRLHLPLPRGVVSLSQERWSRDPLD

SEQ ID NO: 798751 - protein, 325 aa, Homo sapiens
MLRNFIQTEAVVSKPFSLFDLSSVGLFGAETQQSKVAPSSAASRPVLSSRSDQSQKNEVFLDVVERLSVLIASNGSLLKVDVQGEIRLKSFLPSGSEMRIGLTEEFCVGKSELRGYGPGIRVDEVSFHSSVNLDEFESHRILRLQPPQGELTVMRYQLSDDLPSPLPFRLFPSVQWDRGSGRLQVYLKLRCDLLSKSQALNVRLHLPLPRGVVSLSQELSSPEQKAELAEGALRWDLPRVQGGSQLSGLFQMDVPGPPGPPSHGLSTSASPLGLGPASLSFELPRHTCSGLQVRFLRLAFRPCGNANPHKWVRHLSHSDAYVIRI

SEQ ID NO: 798752 - protein, 460 aa, Homo sapiens
MISQFFILSSKGDPLIYKDFRGDSGGRDVAELFYRKLTGLPGDESPVVMVTSGGRRHHHGRHFIHIRHSGLYLVVTTSENVSPFSLLELLSRLATLLGDYCGSLGEGTISRNVALVYELLDEVLDYGYVQTTSTEMLRNFIQTEAVVSKPFSLFDLSSVGLFGAETQQSKVAPSSAASRPVLSSRSDQSQKNEVFLDVVERLSVLIASNGSLLKVDVQGEIRLKSFLPSGSEMRIGLTEEFCVGKSELRGYGPGIRVDEVSFHSSVNLDEFESHRILRLQPPQGELTVMRYQLSDDLPSPLPFRLFPSVQWDRGSGRLQVYLKLRCDLLSKSQALNVRLHLPLPRGVVSLSQELSSPEQKAELAEGALRWDLPRVQGGSQLSGLFQMDVPGPPGPPSHGLSTSASPLGLGPASLSFELPRHTCSGLQVRFLRLAFRPCGNANPHKWVRHLSHSDAYVIRI

SEQ ID NO: 798753 - protein, 409 aa, Homo sapiens
MISQFFILSSKGDPLIYKDFRGDSGGRDVAELFYRKLTGLPGDESPVVMHHHGRHFIHIRHSGLYLVVTTSENDYGYVQTTSTEMLRNFIQTEAVVSKPFSLFDLSSVGLFGAETQQSKVAPSSAASRPVLSSRSDQSQKNEVFLDVVERLSVLIASNGSLLKVDVQGEIRLKSFLPSGSEMRIGLTEEFCVGKSELRGYGPGIRVDEVSFHSSVNLDEFESHRILRLQPPQGELTVMRYQLSDDLPSPLPFRLFPSVQWDRGSGRLQVYLKLRCDLLSKSQALNVRLHLPLPRGVVSLSQELSSPEQKAELAEGALRWDLPRVQGGSQLSGLFQMDVPGPPGPPSHGLSTSASPLGLGPASLSFELPRHTCSGLQVRFLRLAFRPCGNANPHKWVRHLSHSDAYVIRI

SEQ ID NO: 798754 - protein, 244 aa, Homo sapiens
MISQFFILSSKGDPLIYKDFRGDSGGRDVAELFYRKLTGLPGDESPVVMHHHGRHFIHIRHSGLYLVVTTSENVSPFSLLELLSRLATLLGDYCGSLGEGTISRNVALVYELLDEVLDYGYVQTTSTEMLRNFIQTEAVVSKPFSLFDLSSVGLFGAETQQSKVAPSSAASRPVLSSRSDQSQKNEVFLDVVERLSVLIASNGSLLKVDVQGEIRLKSFLPSGSVVSDAGRTAVDQNLQTKLLF

SEQ ID NO: 798755 - protein, 32 aa, Homo sapiens
MISQFFILSSKGDPLIYKDCILDPWGWEGAEG

SEQ ID NO: 798756 - protein, 480 aa, Homo sapiens
AGTGLGCRDQAGQARLSPSSCLLSRTAMISQFFILSSKGDPLIYKDFRGDSGGRDVAELFYRKLTGLPGDESPVVMHHHGRHFIHIRHSGLYLVVTTSENVSPFSLLELLSRLATLLGDYCGSLGEGTISRNVALVYELLDEVLDYGYVQTTSTEMLRNFIQTEAVVSKPFSLFDLSSVGLFGAETQQSKVAPSSAASRPVLSSRSDQSQKNEVFLDVVERLSVLIASNGSLLKVDVQGEIRLKSFLPSGSEMRIGLTEEFCVGKSELRGYGPGIRVDEVSFHSSVNLDEFESHRILRLQPPQGELTVMRYQLSDDLPSPLPFRLFPSVQWDRGSGRLQVYLKLRCDLLSKSQALNVRLHLPLPRGVVSLSQELSSPEQKAELAEGALRWDLPRVQGGSQLSGLFQMDVPGPPGPPSHGLSTSASPLGLGPASLSFELPRHTCSGLQVRFLRLAFRPCGNANPHKWVRHLSHSDAYVIRI

SEQ ID NO: 798757 - protein, 310 aa, Homo sapiens [sequence omitted]

SEQ ID NO: 798758 - protein, 325 aa, Homo sapiens; identical to SEQ ID NO: 798751

SEQ ID NO: 798759 - protein, 325 aa, Homo sapiens; identical to SEQ ID NO: 798751

SEQ ID NO: 798760 - protein, 104 aa, Homo sapiens
MLRNFIQTEAVVSKPFSLFDLSSVGLFGAETQQSKVAPSSAASRPVLSSRSDQSQKNEVFLDVVERLSVLIASNGIPVARWMCQGRDQVKEVYLLRGLEDAHMS

SEQ ID NO: 798761 - protein, 244 aa, Homo sapiens
MLLLGAVLLLLALPGHDQETTTQGPGVLLPLPKGACTGWMAGIPGHPGHNGAPGRDGRDGTPGEKGEKGDPGLIGPKGDIGETGVPGAEGPRGFPGIQGRKGEPGEGAYVYRSAFSVGLETYVTIPNMPIRFTKIFYNQQNHYDGSTGKFHCNIPGLYYFAYHITVYMKDVKVSLFKKDKAMLFTYDQYQENNVDQASGSVLLHLEVGDQVWLQVYGEGERNGLYADNDNDSTFTGFLLYHDTN

SEQ ID NO: 798762 - protein, 244 aa, Homo sapiens; identical to SEQ ID NO: 798761

SEQ ID NO: 798763 - protein, 123 aa, Homo sapiens
MDLETELSPSTGYFFLVSGFLGKQPITNFLGVKLQVEEQLDQTWKTCPQFVYSIELCMLGAPGLSTLNRTSQPAAPVQHHGSPLQSCNFESGYSDVTQVLQGMNTPTLKPLACRCGRKGSCML

SEQ ID NO: 798764 - protein, 351 aa, Homo sapiens
MASTGSQASDIDEIFGFFNDGEPPTKKPRKLLPSLKTKKPRELVLVIGTGISAAVAPQVPALKSWKGLIQALLDAAIDFDLLEDEESKKFQKCLHEDKNLVHVAHDLIQKLSPRTSNVRSTFFKDCLYEVFDDLESKMEDSGKQLLQSVLHLMENGALVLTTNFDNLLELYAADQGKQLESLDLTDEKKVLEWAQEKRKLSVLHIHGVYTNPSGIVLHPAGYQNVLRNTEVMREIQKLYENKSFLFLGCGWTVDDTTFQALFLEAVKHKSDLEHFMLVRRGDVDEFKKLRENMLDKGIKVISYGDDYADLPEYFKRLTCEISTRGTSAGMVREGQLNGSSAAHSEIRGCST

SEQ ID NO: 798765 - protein, 351 aa, Homo sapiens; identical to SEQ ID NO: 798764

SEQ ID NO: 798766 - protein, 351 aa, Homo sapiens; identical to SEQ ID NO: 798764

SEQ ID NO: 798767 - protein, 250 aa, Homo sapiens
MRRAKSFRNVSMRTSNVRSTFFKDCLYEVFDDLESKMEDSGKQLLQSVLHLMENGALVLTTNFDNLLELYAADQGKQLESLDLTDEKKVLEWAQEKRKLSVLHIHGVYTNPSGIVLHPAGYQNVLRNTEVMREIQKLYENKSFLFLGCGWTVDDTTFQALFLEAVKHKSDLEHFMLVRRGDVDEFKKLRENMLDKGIKVISYGDDYADLPEYFKRLTCEISTRGTSAGMVREGQLNGSSAAHSEIRGCST

SEQ ID NO: 798768 - protein, 348 aa, Homo sapiens
MASTGSQASDIDEIFGFFNDGEPPTKKPRKLLPSLKTKKPRELVLVIGTGISAAVAPQVPALKSWKGLIQALLDAAIDFDLLEDEESKKFQKCLHEDKNLVHVAHDLIQKLSPRTSNVRSTFFKDCLYEVFDDLESKMEDSGKQLLQSVLHLMENGALVLTTNFDNLLELYAADQGKQLESLDLTDEKKVLSPAKLVGLYVCVQVLEWAQEKRKLSVLHIHGVYTNPSGIVLHPAGYQNVLRNTEVMREIQKLYENKSFLFLGCGWTVDDTTFQALFLEAVKHKSDLEHFMLVRRGDVDEFKKLRDLPEYFKRLTCEISTRGTSAGMVREGQLNGSSAAHSEIRGCST

SEQ ID NO: 798769 - protein, 220 aa, Homo sapiens
THNTPHKKQHRTTNGYGRGRVLIGRTLVLTTNFDNLLELYAADQGKQLESLDLTDEKKVLEWAQEKRKLSVLHIHGVYTNPSGIVLHPAGYQNVLRNTEVMREIQKLYENKSFLFLGCGWTVDDTTFQALFLEAVKHKSDLEHFMLVRRGDVDEFKKLRENMLDKGIKVISYGDDYADLPEYFKRLTCEISTRGTSAGMVREGQLNGSSAAHSEIRGCST

SEQ ID NO: 798770 - protein, 82 aa, Homo sapiens
MTFLFQTCLECVFTMSICCIFSFQREIQKLYENKSFLFLGCGWTVDDTTFQALFLEAVKHKSDLEHFMLVRRGDVDEFKKLR

SEQ ID NO: 798771 - protein, 351 aa, Homo sapiens; identical to SEQ ID NO: 798764

SEQ ID NO: 798772 - protein, 366 aa, Homo sapiens
MASTGSQASDIDEIFGFFNDGEPPTKKPRKLLPSLKTKKPRELVLVIGTGISAAVAPQVPALKSWKGLIQALLDAAIDFDLLEDEESKKFQKCLHEDKNLVHVAHDLIQKLSPRTSNVRSTFFKDCLYEVFDDLESKMEDSGKQLLQSVLHLMENGALVLTTNFDNLLELYAADQGKQLESLDLTDEKKVLSPAKLVGLYVCVQVLEWAQEKRKLSVLHIHGVYTNPSGIVLHPAGYQNVLRNTEVMREIQKLYENKSFLFLGCGWTVDDTTFQALFLEAVKHKSDLEHFMLVRRGDVDEFKKLRENMLDKGIKVISYGDDYADLPEYFKRLTCEISTRGTSAGMVREGQLNGSSAAHSEIRGCST

SEQ ID NO: 798773 - protein, 275 aa, Homo sapiens
MASTGSQASDIDEIFGFFNDGEPPTKKPRKLLPSLKTKKPRELVLVIGTGISAAVAPQVPALKSWKGLIQALLDAAIDFDLLEDEESKKFQKCLHEDKNLVHVAHDLIQKLSPVLEWAQEKRKLSVLHIHGVYTNPSGIVLHPAGYQNVLRNTEVMREIQKLYENKSFLFLGCGWTVDDTTFQALFLEAVKHKSDLEHFMLVRRGDVDEFKKLRENMLDKGIKVISYGDDYADLPEYFKRLTCEISTRGTSAGMVREGQLNGSSAAHSEIRGCST

SEQ ID NO: 798774 - protein, 106 aa, Homo sapiens
MKIEALPNQPPSQQMRHNYRLLASTVSAEMARNRQLIWELARQSEAHLDRPVVLGEQASAQREVASILCRKSVLAINQLAATVEGTISVLQQFNELLDHPLDPGRS

SEQ ID NO: 798775 - protein, 282 aa, Homo sapiens [sequence omitted]

SEQ ID NO: 798776 - protein, 282 aa, Homo sapiens [sequence omitted]

SEQ ID NO: 798777 - protein, 282 aa, Homo sapiens [sequence omitted]

SEQ ID NO: 798778 - protein, 229 aa, Homo sapiens
MEAAVKEEISVEDEAVDKNIFRDCNKIAFYRRQKQWLSKKSTYRALLDSVTTDEDSTRFQIINEASKVPLLAEIYGIEGNIFRLKINEETPLKPRFEVPDVLTSKPSTVRLISCSGDTGSLILADGKGDLKCHITANPFKVDLVSEEEVVISINSLGQLYFEHLQILHKQRAAKENEEETSVDTSQENQEDLGLWEEKFGKFVDIKANGPSSIGLDFSLHGFEHLYGIP

SEQ ID NO: 798779 - protein, 654 aa, Homo sapiens [sequence omitted]

SEQ ID NO: 798780 - protein, 171 aa, Homo sapiens
MGFEEGETHLIFPKKASVEQLQKIRDLIAIERSSRLDGSNKSHKVKSSQQPAASTQLPTTPSSNPSGLNQHTRNRQGQSSDPPSASTVAADSAILEVLQSNIQHVLVYENPALQEKALACIPVQELKRKSQEKLSRARKLDKDIITLRNFWKQDVDGVASGPIVLHCAAEL

SEQ ID NO: 798781 - protein, 221 aa, Homo sapiens
PAGRGPRPCRPRTPPLPAEDPAPAGGCGSCCALRRLLSVGRGERGAAAAPAGAQAWRRRHWAAPQARRPRPWLSSARTPRRPFWRPPSCCSPMLTTSSGAGQRGRTAGTGVGGPRHLVRPGTGASGLSFRGQRRPDRPGPGAGSAPNVRARRPGASGPGQVPPPLEKRKFLCSCDLAPAVRVLRVNWSPGSGAGRRRGRKACFRHCRSSRRLTASDIGTQR

SEQ ID NO: 798782 - protein, 357 aa, Homo sapiens
MAAAALGSSSGSASPAVAELCQNTPETFLEASKLLLTYADNILRNPNDEKYRSIRIGNTAFSTRLLPVRGAVECLFEMGFEEGETHLIFPKKASVEQLQKIRDLIAIERSSRLDGSNKSHKVKSSQQPAASTQLPTTPSSNPSGLNQHTRNRQGQSSDPPSASTVAADSAILEVLQSNIQHVLVYENPALQEKALACIPVQELKRKSQEKLSRARKLDKGINISDEDFLLLELLHWFKEEFFHWVNNVVPQVGPTKSKKSFCPDIPNWSRGNLGAAPTIRYSRIGHGEGARNAPDEPLTPQNSQGEQPDAVYLKQILQLSGRPNNEATLTQRQHTAQPPSREPRYRPPPPTRSGELH

SEQ ID NO: 798783 - protein, 654 aa, Homo sapiens [sequence omitted]

SEQ ID NO: 798784 - protein, 221 aa, Homo sapiens
MAAAALGSSSGSASPAVAELCQNTPETFLEASKLLLTYADNILRNPNDEKYRSIRIGNTAFSTRLLPVRGAVECLFEMGFEEGETHLIFPKKASVEQLQKIRDLIAIERSSRLDGSNKSHKVKSSQQPAASTQLPTTPSSNPSGLNQHTRNRQGQSSDPPSASTVAADSAILEVLQSNIQHVLVYENPALQEKALACIPVQELKRKSQEKLSRARKLDKGS

SEQ ID NO: 798785 - protein, 638 aa, Homo sapiens
MAAAALGSSSGSASPAVAELCQNTPETFLEASKLLLTYADNILRNPNDEKYRSIRIGNTAFSTRLLPVRGAVECLFEMGFEEGETHLIFPKKASVEQLQKIRDLIAIERSSRLDGSNKSHKVKSSQQPAASTQLPTTPSSNPSGLNQHTRNRQGQSSDPPSASTVAADSAILEVLQSNIQHVLVYENPALQEKALACIPVQELKRKSQEKLSRARKLDKGINISDEDFLLLELLHWFKEEFFHWVNNVLCSKCGGQTRSRDRSLLPSDDELKWGAKEVEDHYCDACQFSNRFPRYNNPEKLLETRCGRCGEWANCFTLCCRAVGFEARYVWDYTDHVWTEVYSPSQQRWLHCDACEDVCDKPLLYEIGWGKKLSYVIAFSKDEVVDVTWRYSCKHEEVIARRTKVKEALLRDTINGLNKQRQLFLSENRRKELLQRIIVELVEFISPKTPKPGELGGRISGSVAWRVARGEMGLQRKETLFIPCENEKISKQLHLCYNIVKDRYVRVSNNNQTISGWENGVWKMESIFRKVETDWHMVYLARKEGSSFAYISWKFECGSVGLKVDSISIRTSSQTFQTGTVEWKLRSDTAQVELTGGKHLPGELITKYIFTTLKTNCTYLRCSSFSYLRVINTISVKK

SEQ ID NO: 798786 - protein, 221 aa, Homo sapiens; identical to SEQ ID NO: 798784

SEQ ID NO: 798787 - protein, 203 aa, Homo sapiens
PAGRGPRPCRPRTPPLPAEDPAPAGGCGSCCALRRLLSVGRGERGAAAAPAGAQAWRRRHWAAPQARRPRPWLSSARTPRRPFWRPPSCCSPMLTTSSGAGQRGRTAGTGVGGPRHLVRPGTGASGLSFRGQRRPDRPGPGAGSAPNVRARRPGASGPGQVPPPLEVNWSPGSGAGRRRGRKACFRHCRSSRRLTASDIGTQR

SEQ ID NO: 798788 - protein, 636 aa, Homo sapiens
MAAAALGSSSGSASPAVAELCQNTPETFLEASKLLLTYADNILRNPNDEKYRSIRIGNTAFSTRLLPVRGAVECLFEMGFEEGETHLIFPKKASVEQLQKIRDLIAIERSSRLDGSNKSHKVKSSQQPAASTQLPTTPSSNPSGLNQHTRNRQGQSSDPPSASTVAADSAILEVLQSNIQHVLVYENPALQEKALACIPVQELKRKSQEKLSRARKLDKGINISDEDFLLLELLHWFKEEFFHWVNNVLCSKCGGQTRSRDRSLLPSDDELKWGAKEVEDHYCDACQFSNRFPRYNNPEKLLETRCGRCGEWANCFTLCCRAVGFEARYVWDYTELQRTLSLKLTTLKEIGKTFLRISKRQKLIQVVDVTWRYSCKHEEVIARRTKVKEALLRDTINGLNKQRQLFLSENRRKELLQRIIVELVEFISPKTPKPGELGGRISGSVAWRVARGEMGLQRKETLFIPCENEKISKQLHLCYNIVKDRYVRVSNNNQTISGWENGVWKMESIFRKVETDWHMVYLARKEGSSFAYISWKFECGSVGLKVDSISIRTSSQTFQTGTVEWKLRSDTAQVELTGDNSLHSYADFSGATEVILEAELSRGDGDVAWQHTQLFRQSLNDHEENCLEIIIKFSDL

SEQ ID NO: 798789 - protein, 636 aa, Homo sapiens
MAAAALGSSSGSASPAVAELCQNTPETFLEASKLLLTYADNILRNPNDEKYRSIRIGNTAFSTRLLPVRGAVECLFEMGFEEGETHLIFPKKASVEQLQKIRDLIAIERSSRLDGSNKSHKVKSSQQPAASTQLPTTPSSNPSGLNQHTRNRQGQSSDPPSASTVAADSAILEVLQSNIQHVLVYENPALQEKALACIPVQELKRKSQEKLSRARKLDKGINISDEDFLLLELLHWFKEEFFHWVNNVLCSKCGGQTRSRDRSLLPSDDELKWGAKEVEDHYCDACQFSNRFPRYNNPEKLLETRCGRCGEWANCFTLCCRAVGFEARYVWDYTDHVWTEVYSPSQQRWLHCDACEDVCDKPLLYEIGWGKKLSYVIAFSKDEVVDVTWRYSCKHEEVIARRTKVKEALLRDTINGLNKQRQLFLSENRRKELLQRIIVELVEFISPKTPKPGELGGRISGSVAWRVARGEMGLQRKETLFIPYRYVRVSNNNQTISGWENGVWKMESIFRKVETDWHMVYLARKEGSSFAYISWKFECGSVGLKVDSISIRTSSQTFQTGTVEWKLRSDTAQVELTGDNSLHSYADFSGATEVILEAELSRGDGDVAWQHTQLFRQSLNDHEENCLEIIIKFSDL

SEQ ID NO: 798790 - protein, 558 aa, Homo sapiens
MAAAALGSSSGSASPAVAELCQNTPETFLEASKLLLTYADNILRNPNDEKYRSIRIGNTAFSTRLLPVRGAVECLFEMGFEEGETHLIFPKKASVEQLQKIRDLIAIERSSRLDGSNKSHKVKSSQQPAASTQLPTTPSSNPSGLNQHTRNRQGQSSDPPSASTVAADSAILEVLQSNIQHVLVYENPALQEKALACIPVQELKRKSQEKLSRARKLDKGINISDEDFLLLELLHWFKEEFFHWVNNVLCSKCGGQTRSRDRSLLPSDDELKWGAKEVEDHYCDACQFSNRFPRYNNPEKLLETRCGRCGEWANCFTLCCRAVGFEARYVWDYTDHVWTEVYSPSQQRWLHCDACEDVCDKPLLYEIGWGKKLSYVIAFSKDEVVDVTWRYSCKHEEVIARRTKVKEALLRDTINGLNKQRQLFLSENRRKELLQRIIVELVEFISPKTPKPGELGGRISGSVAWRVARGEMGLQRKETLFIPCENEKISKQLHLCYNIVKDRYVRVSNNNQTISGWENGVWKMESIFRKVETDWHMITVFTPMLIFLVPLKLFWKQN

SEQ ID NO: 798791 - protein, 558 aa, Homo sapiens; identical to SEQ ID NO: 798790

SEQ ID NO: 798792 - protein, 165 aa, Homo sapiens
MAAAALGSSSGSASPAVAELCQNTPETFLEASKLLLTYADNILRNPNDEKYRSIRIGNTAFSTRLLPVRGAVECLFEMGFEEGETHLIFPKKASVEQLQKIRDLIAIERSSRLDGSNKSHKVKSSQQPAASTQLPTTPSSNPSGLNQHTRNRQGQIIFCLYFLEV

SEQ ID NO: 798793 - protein, 709 aa, Homo sapiens
DEEGDDEETGSGEEEEEEAEAAAGWERSEDARLLRAGLPPAAVPAAAARDRSGRRPPRPPPGRPRMRPSGDEDRARRRRRRRRRRDLLLSQLCFLASVALLLWSLSSLREQKELDLMDLVGEDRKWMMARKLMQVNDTLTSEDAGLRNSKNCTEPALHEFPNDIFTNEDRRQGAVVLHVLCAIYMFYALAIVCDDFFVPSLEKICERLHLSEDVAGATFMAAGSSAPELFTSVIGVFITKGDVGVGTIVGSAVFNILCIIGVCGLFAGQVVALSSWCLLRDSIYYTLSVIALIVFIYDEKVSWWESLVLVLMYLIYIVIMKYNACIHQCFERRTKGAGNMVNGLANNAEIDDSSNCDATVVLLKKANFHRKASVIMVDELLSAYPHQLSFSEAGLRIMITSHFPPKTRLSMASRMLINERQRLINSRAYTNGESEVAIKIPIKHTVENGTGPSSAPDRGVNGTRRDDVVAEAGNETENENEDNENDEEEEEDEDDDEGPYTPFDTPSGKLETVKWAFTWPLSFVLYFTVPNCNKPRWEKWFMVTFASSTLWIAAFSYMMVWMVTIIGYTLGIPDVIMGITFLAAGTSVPDCMASLIVARQGMGDMAVSNSIGSNVFDILIGLGLPWALQTLAVDYGSYIRLNSRGLIYSVGLLLASVFVTVFGVHLNKWQLDKKLGCGCLLLYGVFLCFSIMTEFNVFTFVNLPMCGDH

SEQ ID NO: 798794 - protein, 709 aa, Homo sapiens; identical to SEQ ID NO: 798793

SEQ ID NO: 798795 - protein, 149 aa, Homo sapiens
DEEGDDEETGSGEEEEEEAEAAAGWERSEDARLLRAGLPPAAVPAAAARDRSGRRPPRPPPGRPRMRPSGDEDRARRRRRRRRRRDLLLSQLCFLASVALLLWSLSSLREQKAVPACALLTRELEVLLVAVVGSLTLHQPPRPGIKLWW

SEQ ID NO: 798796 - protein, 458 aa, Homo sapiens
FWGFALLGSLLFGVFAGQVVALSSWCLLRDSIYYTLSVIALIVFIYDEKVSWWESLVLVLMYLIYIVIMKYNACIHQCFERRTKGAGNMVNGLANNAEIDDSSNCDATVVLLKKANFHRKASVIMVDELLSAYPHQLSFSEAGLRIMITSHFPPKTRLSMASRMLINERQRLINSRAYTNGESEVAIKIPIKHTVENGTGPSSAPDRGVNGTRRDDVVAEAGNETENENEDNENDEEEEEDEDDDEGPYTPFDTPSGKLETVKWAFTWPLSFVLYFTVPNCNKPRWEKWFMVTFASSTLWIAAFSYMMVWMVTIIGYTLGIPDVIMGITFLAAGTSVPDCMASLIVARQGMGDMAVSNSIGSNVFDILIGLGLPWALQTLAVDYGSYIRLNSRGLIYSVGLLLASVFVTVFGVHLNKWQLDKKLGCGCLLLYGVFLCFSIMTEFNVFTFVNLPMCGDH

SEQ ID NO: 798797 - protein, 523 aa, Homo sapiens
MAGHTQQPSGRGNPRPAPSPSPVPGTVPGASERVALKKEIGLLSACTIIIGNIIGSGIFISPKGVLEHSGSVGLALFVWVLGGGVTALGSLCYAELGVAIPKSGGDYAYVTEIFGGLAGFLLLWSAVLIMYPTSLAVISMTFSNYVLQPVFPNCIPPTTASRVLSMACLMLLTWVNSSSVRWATRIQDMFTGGKLLALSLIIGVGLLQIFQGHFEELRPSNAFAFWMTPSVGHLALAFLQGSFAFSGWNFLNYVTEEMVDARKNLPRAIFISIPLVTFVYTFTNIAYFTAMSPQELLSSNAVAVTFGEKLLGYFSWVMPVSVALSTFGGINGYLFTYSRLCFSGAREGHLPSLLAMIHVRHCTPIPALLVCCGATAVIMLVGDTYTLINYVSFINYLCYGVTILGLLLLRWRRPALHRPIKVNLLIPVAYLVFWAFLLVFSFISEPMVCGVGVIIILTGVPIFFLGVFWRSKPKCVHRLTESMTHWGQELCFVVYPQDAPEEEENGPCPPSLLPATDKPSKPQ

SEQ ID NO: 798798 - protein, 450 aa, Homo sapiens
RVPVSRAAMLPPFLPQHPQQTQEMETMSCSRGWVSGVLHPQELTLTPPLPVTRNLPRAIFISIPLVTFVYTFTNIAYFTAMSPQELLSSNAVAVVSGPLLGPWLLPRPLPRPYTWPLYCAHPDLRGEAAGLLFLGHACLRGSVNLRRDQWLPVHLLQVTALGRRGHGEGRLGCRCAPVMPWARGRDTCRGRGLPEAGMMIPHGNKCLITTGRQRKQEAGRLDEGENCPVGLLGPEQEVRGDSLRGTSGPKLRPRMWPVPISVPNARLCFSGAREGHLPSLLAMIHVRHCTPIPALLVCCGATAVIMLVGDTYTLINYVSFINYLCYGVTILGLLLLRWRRPALHRPIKVNLLIPVAYLVFWAFLLVFSFISEPMVCGVGVIIILTGVPIFFLGVFWRSKPKCVHRLTESMTHWGQELCFVVYPQDAPEEEENGPCPPSLLPATDKPSKPQ

SEQ ID NO: 798799 - protein, 505 aa, Homo sapiens
PQSRARSQRMRPPVGAVPAARAVSSRTDGPTGGRPDRRGSAGSGDAAGQRHGRPHAAAERAREPQACALALPSPRDRPRRLGAGGAQEGDRAAERLHHHHRFLLLWSAVLIMYPTSLAVISMTFSNYVLQPVFPNCIPPTTASRVLSMACLMLLTWVNSSSVRWATRIQDMFTGGKLLALSLIIGVGLLQIFQGHFEELRPSNAFAFWMTPSVGHLALAFLQGSFAFSGWNFLNYVTEEMVDARKNLPRAIFISIPLVTFVYTFTNIAYFTAMSPQELLSSNAVAVTFGEKLLGYFSWVMPVSVALSTFGGINGYLFTYSRLCFSGAREGHLPSLLAMIHVRHCTPIPALLVCCGATAVIMLVGDTYTLINYVSFINYLCYGVTILGLLLLRWRRPALHRPIKVNLLIPVAYLVFWAFLLVFSFISEPMVCGVGVIIILTGVPIFFLGVFWRSKPKCVHRLTESMTHWGQELCFVVYPQDAPEEEENGPCPPSLLPATDKPSKPQ

SEQ ID NO: 798800 - protein, 142 aa, Homo sapiens
LTAAMRYEPANSHFFKTEIQYEKLADAVRFLGCFSDLRKISAMNVFPSNTQPFQRLLEEDVISIESVSPTLRHCSKLFIYLYKVATDSFDSRAEQIPPCLTSESSLPSPWGTPALSRKRHAYHSVSTPPVYPPKNVADLKLH

SEQ ID NO: 798801 - protein, 222 aa, Homo sapiens
FTAAHDVCQYQNTHCAIMPSDAISHTAARARTERELQQSLAGRLGLPLIDEVVSPEPEPLNTSDFSDWSSFNASSTPGPEEVDSASAAPAFYSQAPRPPASPGRPEQHTVIHMGNPEPLTHAPRKVYDTRDDDRTPGLHGDCDDDKYRRRPALGWLARLLRSRAGSRKRPLTLLQRAGLLLLLGLLGFLALLALMSRLGRAAADSDPNLDPLMNPHIRVGPS

SEQ ID NO: 798802 - protein, 71 aa, Homo sapiens
VFTSSGSGGVAQGRDGVISARRTRKRRGSGGIIGAAGAEGRGAGALGRVVPALPRLEPSLPPFGTSAAADQ

SEQ ID NO: 798803 - protein, 310 aa, Homo sapiens
MGLCKCPKRKVTNLFCFEHRVNVCEHCLVANHAKCIVQSYLQWLQDSDYNPNCRLCNIPLASRETTRLVCYDLFHWACLNERAAQLPRNTAPAGYQCPSCNGPIFPPTNLAGPVASALREKLATVNWARAGLGLPLIDEVVSPEPEPLNTSDFSDWSSFNASSTPGPEEVDSASAAPAFYSQAPRPPASPGRPEQHTVIHMGNPEPLTHAPRKVYDTRDDDRTPGLHGDCDDDKYRRRPALGWLARLLRSRAGSRKRPLTLLQRAGLLLLLGLLGFLALLALMSRLGRAAADSDPNLDPLMNPHIRVGPS

SEQ ID NO: 798804 - protein, 304 aa, Homo sapiens
MGLCKCPKRKVTNLFCFEHRVNVCEHCLCIVQSYLQWLQDSDYNPNCRLCNIPLASRETTRLVCYDLFHWACLNERAAQLPRNTAPAGYQCPSCNGPIFPPTNLAGPVASALREKLATVNWARAGLGLPLIDEVVSPEPEPLNTSDFSDWSSFNASSTPGPEEVDSASAAPAFYSQAPRPPASPGRPEQHTVIHMGNPEPLTHAPRKVYDTRDDDRTPGLHGDCDDDKYRRRPALGWLARLLRSRAGSRKRPLTLLQRAGLLLLLGLLGFLALLALMSRLGRAAADSDPNLDPLMNPHIRVGPS

SEQ ID NO: 798805 - protein, 110 aa, Homo sapiens [sequence omitted]

SEQ ID NO: 798806 - protein, 310 aa, Homo sapiens; identical to SEQ ID NO: 798803

SEQ ID NO: 798807 - protein, 71 aa, Homo sapiens; identical to SEQ ID NO: 798802

SEQ ID NO: 798808 - protein, 310 aa, Homo sapiens; identical to SEQ ID NO: 798803

SEQ ID NO: 798809 - protein, 226 aa, Homo sapiens
EYDECRPREDSLKGLKGEVAFSSYPNLPPVASALREKLATVNWARAGLGLPLIDEVVSPEPEPLNTSDFSDWSSFNASSTPGPEEVDSASAAPAFYSQAPRPPASPGRPEQHTVIHMGNPEPLTHAPRKVYDTRDDDRTPGLHGDCDDDKYRRRPALGWLARLLRSRAGSRKRPLTLLQRAGLLLLLGLLGFLALLALMSRLGRAAADSDPNLDPLMNPHIRVGPS

SEQ ID NO: 798810 - protein, 103 aa, Homo sapiens
LVRGWVYIGRGGEWSLPFRASSHRYRPSEPVQRPIRSIMGLCKCPKRKVTNLFCFEHRVNVCEHCLVANHAKVGPSGERLSRALGGQGGIGFLQIHEGPRARM

SEQ ID NO: 798811 - protein, 410 aa, Homo sapiens
MLMPLCGLLWWWWCCCSGWYCYGLCAPAPQMLRHQGLLKCRCRMLFNDLKVFLLRRPPQAPLPMHGDPQPPGLAANNTLPALGAGGWAGWRGPREVVGREPPPVPPPPPLPPSSVEDDWGGPATEPPASLLSSASSDDFCKEKTEDRYSLGSSLDSGMRTPLCRICFQGPEQGELLSPCRCDGSVKCTHQPCLIKWISERGCWSCELCYYKYHVIAISTKNPLQWQAISLTVIEKVQVAAAILGSLFLIASISWLIWSTFSPSARWQRQDLLFQICYGMYGFMDVVCIGLIIHEGPSVYRIFKRWQAVNQQWKVLNYDKTKDLEDQKAGGRTNPRTSSSTQANIPSSEEETAGTPAPEQGPAQAAGHPSGPLSHHHCAYTILHILSHLRPHEQRSPPGSSRELVMRVTTV

SEQ ID NO: 798812 - protein, 752 aa, Homo sapiens
GIWEEKLADEGVRAVDPRPPPGRPASEEGLWVGQGPPLGPPLVAGRPKIGPFPLPRPYRISGCARPGPARPTQPSARARRGGAAGAAPRDPERPPRHIQTSAAPAPSQPSWDSRAHPTQRRNPGPPGPSADSTAHFPGPPHTSQPSGRSLPTRCRVPPALSRPGSPPPGPRGGPSQAPFEPRRRPGLGRTMRLRLRLLALLLLLLAPPARAPKPSAQDVSLGVDWLTRYGYLPPPHPAQAQLQSPEKLRDAIKVMQRFAGLPETGRMDPGTVATMRKPRCSLPDVLGVAGLVRRRRRYALSGSVWKKRTLTWRVRSFPQSSQLSQETVRVLMSYALMAWGMESGLTFHEVDSPQGQEPDILIDFARAFHQDSYPFDGLGGTLAHAFFPGEHPISGDTHFDDEETWTFGSKDGEGTDLFAVAVHEFGHALGLGHSSAPNSIMRPFYQGPVGDPDKYRLSQDDRDGLQQLYGKAPQTPYDKPTRKPLAPPPQPPASPTHSPSFPIPDRCEGNFDAIANIRGETFFFKGPWFWRLQPSGQLVSPRPARLHRFWEGLPAQVRVVQAAYARHRDGRILLFSGPQFWVFQDRQLEGGARPLTELGLPPGEEVDAVFSWPQNGKTYLVRGRQYWRYDEAAARPDPGYPRDLSLWEGAPPSPDDVTVSNAGDTYFFKGAHYWRFPKNSIKTEPDAPQPMGPNWLDCPAPSSGPRAPRPPKATPVSETCDCQCELNQAAGRWPAPIPLLLLPLLVGGVASR

SEQ ID NO: 798813 - protein, 752 aa, Homo sapiens; identical to SEQ ID NO: 798812

SEQ ID NO: 798814 - protein, 425 aa, Homo sapiens
GIWEEKLADEGVRAVDPRPPPGRPASEEGLWVGQGPPLGPPLVAGRPKIGPFPLPRPYRISGCARPGPARPTQPSARARRGGAAGAAPRDPERPPRHIQTSAAPAPSQPSWDSRAHPTQRRNPGPPGPSADSTAHFPGPPHTSQPSGRSLPTRCRVPPALSRPGSPPPGPRGGPSQAPFEPRRRPGLGRTMRLRLRLLALLLLLLAPPARAPKPSAQDVSLGVDWLTRYGYLPPPHPAQAQLQSPEKLRDAIKVMQRFAGLPETGRMDPGTVATMRKPRCSLPDVLGVAGLVRRRRRYALSGSVWKKRTLTWRVRSFPQSSQLSQETVRVLMSYALMAWGMESGLTFHEVDSPQGQEPDILIDFARAFHQDSYPFDGLGGTLAHAFFPGEHPISGDTHFDDEETWTFGSKGLSAAGAGAGRRLTG

SEQ ID NO: 798815 - protein, 94 aa, Homo sapiens
SHPLSPADGEGTDLFAVAVHEFGHALGLGHSSAPNSIMRPFYQGPVGDPDKYRLSQDDRDGLQQLYGRGRGTCRETIIAPSSVLCSKARGRTPA

SEQ ID NO: 798816 - protein, 143 aa, Homo sapiens
MACQELGHTAGVELQKINAKLHDGVCQRCKEVLEWRVKYSKYKPLSKPKKCVKCLQKTVKDSYHIMCRPCACELEVCAKCGKKEDIVIPLNKETEKIEHTENNLSSNHRRSCRRNEESDDDLDFDIDLEDTGGLLEPWRRRLK

SEQ ID NO: 798817 - protein, 157 aa, Homo sapiens
MSSQKGNVARSRPQKHQNTFSFKNDKFDKSVQTKKINAKLHDGVCQRCKEVLEWRVKYSKYKPLSKPKKCVKCLQKTVKDSYHIMCRPCACELEVCAKCGKKEDIVIPLNKETEKIEHTENNLSSNHRRSCRRNEESDDDLDFDIDLEDTGGDHQMN

SEQ ID NO: 798818 - protein, 73 aa, Homo sapiens
VEAAPRGVAWLNSREGRAMLFDLPEESRGLTQSRGGKAALVSSGSLTEASIPGSSSLVFFPLILLPAPGEGWL

SEQ ID NO: 798819 - protein, 73 aa, Homo sapiens; identical to SEQ ID NO: 798818

SEQ ID NO: 798820 - protein, 73 aa, Homo sapiens; identical to SEQ ID NO: 798818

SEQ ID NO: 798821 - protein, 73 aa, Homo sapiens; identical to SEQ ID NO: 798818

SEQ ID NO: 798822 - protein, 73 aa, Homo sapiens; identical to SEQ ID NO: 798818

SEQ ID NO: 798823 - protein, 73 aa, Homo sapiens; identical to SEQ ID NO: 798818

SEQ ID NO: 798824 - protein, 108 aa, Homo sapiens
MSSQKGNVARSRPQKHQNTFSFKNDKFDKSVQTKKINAKLHDGVCQRCKEVLEWRVKYSKYKPLSKPKKCWSLGNKSETPSQINKSNNKLKELKSSGQLIEALEVGVK

SEQ ID NO: 798825 - protein, 112 aa, Homo sapiens
KGTSGSLADVFANTRIENFSAPPDVTTTTSSSSSSSSIRPANIDLPPSGIVKGMHKGSNRSSLMDTADGVPVSSRVSTKIQQLLNTLKRPKRPPLKEFFVDDSEEIVEGSSK

SEQ ID NO: 798826 - protein, 1596 aa, Homo sapiens [sequence omitted]

SEQ ID NO: 798827 - protein, 1592 aa, Homo sapiens
VTCRLSGARELHCNLVGFFWGGNVSESNVSLIERRTGKKWSSRRSCRSDLFLNTSSCLHPWESDPSNWTTLFLEFWVAGDGLEEQEFSIKEANFTEGSLKLKIQTTKRAKKPPKNLENYICPPEIKITIKQSGDQKVSRAGKNSKATKEEERSHSKKKLLTASDLAASDLKGFQPQAYERPQKHSTLHYDTGLPQDFTGDTLKPKHQQKSSSQNHMDWSTNSDSGPVTQNCFISPESGRETASTSKIPALEPVASFAKAQGKKGSAGNTWSQLSNNNKDLLLGGVAPSPSSHSSPAPPSSSAECNGLQPLVDQDGGGTKEPPEPPTVGSKKKSSKKDVISQTIPNPDLDWVKNAQKAFDNTEGKREGYSADSAQEASPARQNVSSASNPENDSSHVRITIPIKAPSLDPTNHKRKKRQSIKAVVEKIMPEKALASGITMSSEVVNRILSNSEGNKKDPRVPKLSKMIENESPSVGLETGGNAEKVIPGGVSKPRKPPMVMTPPTCTDHSPSRKLPEIQHPKFAAKRRWTCSKPKPSTMLREAVMATSDKLMLEPPSAYPITPSSPLYTNTDSLTVITPVKKKRGRPKKQPLLTVETIHEGTSTSPVSPISREFPGTKKRKRRRNLAKLAQLVPGEDKPMSEMKFHKKVGKLGVLDKKTIKTINKMKTLKRKNILNQILSCSSSVALKAKAPPETSPGAAAIESKLGKQINVSKRGTIYIGKKRGRKPRAELPPPSEEPKTAIKHPRPVSSQPDVPAVPSNFQSLVASSPAAMHPLSTQLGGSNGNLSPASTETNFSELKTMPNLQPISALPTKTQKGIHSGTWKLSPPRLMANSPSHLCEIGSLKEITLSPVSESHSEETIPSDSGIGTDNNSTSDQAEKSSESRRRYSFDFCSLDNPEAIPSDTSTKNRHGHRQKHLIVDNFLAHESLKKPKHKRKRKSLQNRDDLQFLADLEELITKFQVFRISHRSYTFYHENPYPSIFRINFDHYYPVPYIQYDPLLYLRRTSDLKSKKKRGRPAKTNDTMTKVPFLQGFSYPIPSGSYYAPYGMPYTSMPMMNLGYYGQYPAPLYLSHTLGAASPFMRPTVPPPQFHTNSHIKMSGAAKHKAKHGVHLQGPVSMGLGDMQPSLNPPKVGSASLSSGRLHKRKHKHKHKHKEDRILGTHDNLSGLFAGKATGFSSHILSERLSSADKELPLVSEKNKHKEKQKHQHSEAGHKASKNNFEVDTLSTLSLSDAQHWTQAKEKGDLSSEPVDSCTKRYSGSGGDGGSTRSENLDVFSEMNPSNDKWDSDVSGSKRRSYEGFGTYREKDIQAFKMNRKERSSYDSSMSPGMPSPHLKVDQTAVHSKNEGSVPTMMTRKKPAAVDSVTIPPAPVLSLLAASAATSDAVGSSLKKRFKRREIEAIQCEVRKMCNYTKILSTKKNLDHVNKILKAKRLQRQSKTGNNFVKKRRGRPRKQPTQFDEDSRDQMPVLEKCIDLPSKRGQKPSLSPLVLEPAASQDTIMATIEAVIHMAREAPPLPPPPPPPLPPPPPPPLPPPPPLPKTPRGGKRKHKPQAPAQPPQQSPPQQPLPQEEEVKAKRQRKSRGSESEVLP

SEQ ID NO: 798828 - protein, 1206 aa, Homo sapiens
GFLLCHPGLLPASIPIKAPSLDPTNHKRKKRQSIKAVVEKIMPEKALASGITMSSEVVNRILSNSEGNKKDPRVPKLSKMIENESPSVGLETGGNAEKVIPGGVSKPRKPPMVMTPPTCTDHSPSRKLPEIQHPKFAAKRRWTCSKPKPSTMLREAVMATSDKLMLEPPSAYPITPSSPLYTNTDSLTVITPVKKKRGRPKKQPLLTVETIHEGTSTSPVSPISREFPGTKKRKRRRNLAKLAQLVPGEDKPMSEMKFHKKVGKLGVLDKKTIKTINKMKTLKRKNILNQILSCSSSVALKAKAPPETSPGAAAIESKLGKQINVSKRGTIYIGKKRGRKPRAELPPPSEEPKTAIKHPRPVSSQPDVPAVPSNFQSLVASSPAAMHPLSTQLGGSNGNLSPASTETNFSELKTMPNLQPISALPTKTQKGIHSGTWKLSPPRLMANSPSHLCEIGSLKEITLSPVSESHSEETIPSDSGIGTDNNSTSDQAEKSSESRRRYSFDFCSLDNPEAIPSDTSTKNRHGHRQKHLIVDNFLAHESLKKPKHKRKRKSLQNRDDLQFLADLEELITKFQVFRISHRSYTFYHENPYPSIFRINFDHYYPVPYIQYDPLLYLRRTSDLKSKKKRGRPAKTNDTMTKVPFLQGFSYPIPSGSYYAPYGMPYTSMPMMNLGYYGQYPAPLYLSHTLGAASPFMRPTVPPPQFHTNSHIKMSGAAKHKAKHGVHLQGPVSMGLGDMQPSLNPPKVGSASLSSGRLHKRKHKHKHKHKEDRILGTHDNLSGLFAGKATGFSSHILSERLSSADKELPLVSEKNKHKEKQKHQHSEAGHKASKNNFEVDTLSTLSLSDAQHWTQAKEKGDLSSEPVDSCTKRYSGSGGDGGSTRSENLDVFSEMNPSNDKWDSDVSGSKRRSYEGFGTYREKDIQAFKMNRKERSSYDSSMSPGMPSPHLKVDQTAVHSKNEGSVPTMMTRKKPAAVDSVTIPPAPVLSLLAASAATSDAVGSSLKKRFKRREIEAIQCEVRKMCNYTKILSTKKNLDHVNKILKAKRLQRQSKTGNNFVKKRRGRPRKQPTQFDEDSRDQMPVLEKCIDLPSKRGQKPSLSPLVLEPAASQDTIMATIEAVIHMAREAPPLPPPPPPPLPPPPPPPLPPPPPLPKTPRGGKRKHKPQAPAQPPQQSPPQQPLPQEEEVKAKRQRKSRGSESEVLP

SEQ ID NO: 798829 - protein, 1596 aa, Homo sapiens [sequence omitted]

SEQ ID NO: 798830 - protein, 1380 aa, Homo sapiens
MESRETLSSSRQRGGESDFLPVSSAKPPAAPGCAGEPLLSTPGPGKGIPVGGERMEPEEEDELGSGRDVDSNSNADSEKWVAGDGLEEQEFSIKEANFTEGSLKLKIQTTKRAKKPPKNLENYICPPEIKITIKQSGDQKVSRAGKNSKATKEEERSHSKKKLLTASDLAASDLKGFQPQAYERPQKHSTLHYDTGLPQDFTGDTLKPKHQQKSSSQNHMDWSTNSDSGPVTQNCFISPESGRETASTSKIPALEPVASFAKAQGKKGSAGNTWSQLSNNNKDLLLGGVAPSPSSHSSPAPPSSSAECNGLQPLVDQDGGGTKEPPEPPTVGSKKKSSKKDVISQTIPNPDLDWVKNAQKAFDNTEGKREGYSADSAQEASPARQNVSSASNPENDSSHVRITIPIKAPSLDPTNHKRKKRQSIKAVVEKIMPEKALASGITMSSEVVNRILSNSEGNKKDPRVPKLSKMIENESPSVGLETGGNAEKVIPGGVSKPRKPPMVMTPPTCTDHSPSRKLPEIQHPKFAAKRRWTCSKPKPSTMLREAVMATSDKLMLEPPSAYPITPSSPLYTNTDSLTVITPVKKKRGRPKKQPLLTVETIHEGTSTSPVSPISREFPGTKKRKRRRNLAKLAQLVPGEDKPMSEMKFHKKVGKLGVLDKKTIKTINKMKTLKRKNILNQILSCSSSVALKAKAPPETSPGAAAIESKLGKQINVSKRGTIYIGKKRGRKPRAELPPPSEEPKTAIKHPRPVSSQPDVPAVPSNFQSLVASSPAAMHPLSTQLGGSNGNLSPASTETNFSELKTMPNLQPISALPTKTQKGIHSGTWKLSPPRLMANSPSHLCEIGSLKEITLSPVSESHSEETIPSDSGIGTDNNSTSDQAEKSSESRRRYSFDFCSLDNPEAIPSDTSTKNRHGHRQKHLIVDNFLAHESLKKPKHKRKRKSLQNRDDLQFLADLEELITKFQVFRISHRSYTFYHENPYPSIFRINFDHYYPVPYIQYDPLLYLRRTSDLKSKKKRGRPAKTNDTMTKVPFLQGFSYPIPSGSYYAPYGMPYTSMPMMNLGYYGQYPAPLYLSHTLGAASPFMRPTVPPPQFHTNSHIKMSGAAKHKAKHGVHLQGPVSMGLGDMQPSLNPPKVGSASLSSGRLHKRKHKHKHKHKEDRILGTHDNLSGLFAGKATGFSSHILSERLSSADKELPLVSEKNKHKEKQKHQHSEAGHKASKNNFEVDTLSTLSLSDAQHWTQAKEKGDLSSEPVDSCTKRYSGSGGDGGSTRSENLDVFSEMNPSNDKWDSDVSGSKRRSYEGFGTYREKDIQAFKMNRKERSSYDSSMSPGKAVFLQKWIIKLFHCWALHLRHICGTLCSLVCKEVGIKLKWVSLHI

SEQ ID NO: 798831 - protein, 1080 aa, Homo sapiens
MESRETLSSSRQRGGESDFLPVSSAKPPAAPGCAGEPLLSTPGPGKGIPVGGERMEPEEEDELGSGRDVDSNSNADSEKWVAGDGLEEQEFSIKEANFTEGSLKLKIQTTKRAKKPPKNLENYICPPEIKITIKQSGDQKVSRAGKNSKATKEEERSHSKKKLLTASDLAASDLKGFQPQAYERPQKHSTLHYDTGLPQDFTGDTLKPKHQQKSSSQNHMDWSTNSDSGPVTQNCFISPESGRETASTSKIPALEPVASFAKAQGKKGSAGNTWSQLSNNNKDLLLGGVAPSPSSHSSPAPPSSSAECNGLQPLVDQDGGGTKEPPEPPTVGSKKKSSKKDVISQTIPNPDLDWVKNAQKAFDNTEGKREGYSADSAQEASPARQNVSSASNPENDSSHVRITIPIKAPSLDPTNHKRKKRQSIKAVVEKIMPEKALASGITMSSEVVNRILSNSEGNKKDPRVPKLSKMIENESPSVGLETGGNAEKVIPGGVSKPRKPPMVMTPPTCTDHSPSRKLPEIQHPKFAAKRRWTCSKPKPSTMLREAVMATSDKLMLEPPSAYPITPSSPLYTNTDSLTVITPVKKKRGRPKKQPLLTVETIHEGTSTSPVSPISREFPGTKKRKRRRNLAKLAQLVPGEDKPMSEMKFHKKVGKLGVLDKKTIKTINKMKTLKRKNILNQILSCSSSVALKAKAPPETSPGAAAIESKLGKQINVSKRGTIYIGKKRGRKPRAELPPPSEEPKTAIKHPRPVSSQPDVPAVPSNFQSLVASSPAAMHPLSTQLGGSNGNLSPASTETNFSELKTMPNLQPISALPTKTQKGIHSGTWKLSPPRLMANSPSHLCEIGSLKEITLSPVSESHSEETIPSDSGIGTDNNSTSDQAEKSSESRRRYSFDFCSLDNPEAIPSDTSTKNRHGHRQKHLIVDNFLAHESLKKPKHKRKRKSLQNRDDLQFLADLEELITKFQVFRISHRSYTFYHENPYPSIFRINFDHYYPVPYIQYDPLLYLRRTSDLKSKKKRGRPAKTNDTMTKVPFLQGFSYPIPSGSYYAPYGMPYTSMPMMNLGYYGQYPAPLYLSRLVA

SEQ ID NO: 798832 - protein, 485 aa, Homo sapiens [sequence omitted]

SEQ ID NO: 798833 - protein, 485 aa, Homo sapiens [sequence omitted]

SEQ ID NO: 798834 - protein, 432 aa, Homo sapiens
MAGFSELKETEKWNIKPESKYFMTRNSSTIIAFAVGGQYVPGNGFSLIGAHTDSPCLRVKRRSRRSQVGFQQVGVETYGGGIWSTWFDRDLTLAGRVIVKCPTSGRLEQQLVHVERPILRIPHLAIHLQRNINENFGPNTEMHLVPILATAIQEELEKGTPEPGPLNAVDERHHSVLMSLLCAHLGLSPKDIVEMELCLADTQPAVLGGAYDEFIFAPRLDNLHSCFCALQALIDSCAGPGSLATEPHVRMVTLYDNEEVGSESAQGAQSLLTELVLRRISASCQHPTAFEEAIPKSFMISADMAHAVHPNYLDKHEENHRPLFHKGPVIKVNSKQRYASNAVSEALIREVANKVKVPLQDLMVRNDTPCGTTIGPILASRLGLRVLDLGSPQLAMHSIREMACTTGVLQTLTLFKGFFELFPSLSHNLLVD

SEQ ID NO: 798835 - protein, 379 aa, Homo sapiens
MLSLSLSLSLSLSLSLSLSLSLSLSLSLSRSTWFDRDLTLAGRVIVKCPTSGRLEQQLVHVERPILRIPHLAIHLQRNINENFGPNTEMHLVPILATAIQEELEKGTPEPGPLNAVDERHHSVLMSLLCAHLGLSPKDIVEMELCLADTQPAVLGGAYDEFIFAPRLDNLHSCFCALQALIDSCAGPGSLATEPHVRMVTLYDNEEVGSESAQGAQSLLTELVLRRISASCQHPTAFEEAIPKSFMISADMAHAVHPNYLDKHEENHRPLFHKGPVIKVNSKQRYASNAVSEALIREVANKVKVPLQDLMVRNDTPCGTTIGPILASRLGLRVLDLGSPQLAMHSIREMACTTGVLQTLTLFKGFFELFPSLSHNLLVD

SEQ ID NO: 798836 - protein, 277 aa, Homo sapiens [sequence omitted]

SEQ ID NO: 798837 - protein, 97 aa, Homo sapiens
DAVGRPTRRGRVGEEVANKVKVPLQDLMVRNDTPCGTTIGPILASRLGLRVLDLGSPQLAMHSIREMACTTGVLQTLTLFKGFFELFPSLSHNLLVD

SEQ ID NO: 798838 - protein, 296 aa, Homo sapiens
GLKLSTEFQPWVWVSRWGRAEAEVAMNGKARKEAVQTAAKELLKFVNRSPSPFHAVAECRNRLLQAGFSELKETEKWNIKPESKYFMTRNSSTIIAFAVGGQYVPGNGFSLIGAHTDSPCLRVKRRSRRSQVGFQQVGVETYGGGIWSTWFDRDLTLAGRVIVKCPTSGRLEQQLVHVERPILRIPHLAIHLQRNINENFGPNTEMHLVPILATAIQEELEKGTPEPGPLNAVDERHHSVLMSLLCAHLGLSPKDIVEMELCLADTQPAVLGGAYDEFIFAPRLDNLHSCFCALQA

SEQ ID NO: 798839 - protein, 432 aa, Homo sapiens; identical to SEQ ID NO: 798834

SEQ ID NO: 798840 - protein, 471 aa, Homo sapiens
MNGKARKEAVQTAAKELLKFVNRSPSPFHAVAECRNRLLQAGFSELKETEKWNIKPESKYFMTRNSSTIIAFAVGGQYVPGNGFSLIGAHTDSPCLRVKRRSRRSQVGFQQVGVETYGGGIWSTWFDRDLTLAGRVIVKCPTSGRLEQQLVHVERPILRIPHLAIHLQRNINENFGPNTEMHLVPILATAIQEELEKGTPEPGPLNAVDERHHSVLMSLLCAHLGLSPKDIVEMELCLADTQPAVLGGAYDEFIFAPRLDNLHSCFCALQALIDSCAGPGSLATEPHVRMVTLYDNEEVGSESAQGAQSLLTELVLRRISASCQHPTAFEEAIPKSFMISADMAHAVHPNYLDKHEENHRPLFHKGPVIKVNSKQRYASNAVSEALIREVANKVKVPLQDLMVRNDTPCGTTIGPILASRLGLRVLDLGSPQLAMHSIREMACTTGVLQTLTLFKGFFELFPSLSHNLLVD

SEQ ID NO: 798841 - protein, 525 aa, Homo sapiens
ASWGPRQGKDPAKKAHGSGLSTPALGGGEQVTMARSLSIMFVPNSWLNGYHKVAMNGKARKEAVQTAAKELLKFVNRSPSPFHAVAECRNRLLQAGFSELKETEKWNIKPESKYFMTRNSSTIIAFAVGGQYVPGNGFSLIGAHTDSPCLRVKRRSRRSQVGFQQVGVETYGGGIWSTWFDRDLTLAGRVIVKCPTSGRLEQQLVHVERPILRIPHLAIHLQRNINENFGPNTEMHLVPILATAIQEELEKGTPEPGPLNAVDERHHSVLMSLLCAHLGLSPKDIVEMELCLADTQPAVLGGAYDEFIFAPRLDNLHSCFCALQALIDSCAGPGSLATEPHVRMVTLYDNEEVGSESAQGAQSLLTELVLRRISASCQHPTAFEEAIPKSFMISADMAHAVHPNYLDKHEENHRPLFHKGPVIKVNSKQRYASNAVSEALIREVANKVKVPLQDLMVRNDTPCGTTIGPILASRLGLRVLDLGSPQLAMHSIREMACTTGVLQTLTLFKGFFELFPSLSHNLLVD

SEQ ID NO: 798842 - protein, 432 aa, Homo sapiens; identical to SEQ ID NO: 798834

SEQ ID NO: 798843 - protein, 422 aa, Homo sapiens
  misc_feature (10)..(10): Xaa can be any naturally occurring amino acid
CAHLGLCPKXIVEMELCLADTQPAVLGGAYDEFIFAQLFPTRTAPVCVVKRRSRRSQVGFQQVGVETYGGGIWSTWFDRDLTLAGRVIVKCPTSGRLEQQLVHVERPILRIPHLAIHLQRNINENFGPNTEMHLVPILATAIQEELEKGTPEPGPLNAVDERHHSVLMSLLCAHLGLSPKDIVEMELCLADTQPAVLGGAYDEFIFAPRLDNLHSCFCALQALIDSCAGPGSLATEPHVRMVTLYDNEEVGSESAQGAQSLLTELVLRRISASCQHPTAFEEAIPKSFMISADMAHAVHPNYLDKHEENHRPLFHKGPVIKVNSKQRYASNAVSEALIREVANKVKVPLQDLMVRNDTPCGTTIGPILASRLGLRVLDLGSPQLAMHSIREMACTTGVLQTLTLFKGFFELFPSLSHNLLVD

SEQ ID NO: 798844 - protein, 449 aa, Homo sapiens
MSGHSPTRGAMQVAMNGKARKEAVQTAAKELLKFVNRSPSPFHAVAECRNRLLQAGFSELKETEKWNIKPESKYFMTRNSSTIIAFAVGGQYVPGNGFSLIGAHTDSPCLRVKRRSRRSQVGFQQVGVETYGGGIWSTWFDRDLTLAGRVIVKCPTSGRLEQQLVHVERPILRIPHLAIHLQRNINENFGPNTEMHLVPILATAIQEELEKGTPEPGPLNAVVLGGAYDEFIFAPRLDNLHSCFCALQALIDSCAGPGSLATEPHVRMVTLYDNEEVGSESAQGAQSLLTELVLRRISASCQHPTAFEEAIPKSFMISADMAHAVHPNYLDKHEENHRPLFHKGPVIKVNSKQRYASNAVSEALIREVANKVKVPLQDLMVRNDTPCGTTIGPILASRLGLRVLDLGSPQLAMHSIREMACTTGVLQTLTLFKGFFELFPSLSHNLLVD

SEQ ID NO: 798845 - protein, 328 aa, Homo sapiens
MSGHSPTRGAMQVAMNGKARKEAVQTAAKELLKFVNRSPSPFHAVAECRNRLLQAGFSELKETEKWNIKPESKYFMTRNSSTIIAFAVGGQYVPGNGFSLIGAHTDSPCLRVKRRSRRSQVGFQQVGVETYGGGIWSTWFDRDLTLAGRVIVKCPTSGRLEQQLVHVERPILRIPHLAIHLQRNINENFGPNTEMHLVPILATAIQEELEKGTPEPGPLNAVDERHHSVLMSLLCAHLGLSPKDIVEMELCLADTQPAVLGGAYDEFIFAPRLDNLHSCFCALQALIDSCAGPGSLATEPHVRMVTLYDNEEGFFELFPSLSHNLLVD

SEQ ID NO: 798846 - protein, 328 aa, Homo sapiens; identical to SEQ ID NO: 798845

SEQ ID NO: 798847 - protein, 134 aa, Homo sapiens [sequence omitted]

SEQ ID NO: 798848 - protein, 115 aa, Homo sapiens
MSEVGEGWTGSSSRRSLLPPLVLHLGNGLNGLPSFHPQNGCPALPSEILFCTGPPSELLWADKAVSHPPKIPSHPLSGAAKRRAQSISYHPSSSTSQQSLVLLDCEHIIRKKDYH

SEQ ID NO: 798849 - protein, 458 aa, Homo sapiens
MSGHSPTRGAMQVAMNGKARKEAVQTAAKELLKFVNRSPSPFHAVAECRNRLLQAGFSELKETEKWNIKPESKYFMTRNSSTIIAFAVGGQYVPGNGFSLIGAHTDSPCLRVKRRSRRSQVGFQQVGVETYGGGIWSTWFDRDLTLAGRVIVKCPTSGRLEQQLVHVERPILRIPHLAIHLQRNINENFGPNTEMHLVPILATAIQEELEKGTPEPGPLNAVDERHHSVLMSLLCAHLGLSPKDIVEMELCLADTQPAVLGGAYDEFIFAPRLDNLHSCFCALQALIDSCAGPGSLATEPHVRMVTLYDNEEVGSESAQGAQSLLTELVLRRISASCQHPTAFEEAIPKSFMISADMAHAVHPNYLDKHEENHRPLFHKGPVIKVNSKQRYASNAVSEALIREVANKVKVPLQDLGSPQLAMHSIREMACTTGVLQTLTLFKGFFELFPSLSHNLLVD

SEQ ID NO: 798850 - protein, 460 aa, Homo sapiens
ISLPGGLSVVTGPSFVHYAVAECRNRLLQAGFSELKETEKWNIKPESKYFMTRNSSTIIAFAVGGQYVPGNGFSLIGAHTDSPCLRVKRRSRRSQVGFQQVGVETYGGGIWSTWFDRDLTLAGRVIVKCPTSGRLEQQLVHVERPILRIPHLAIHLQRNINENFGPNTEMHLVPILATAIQEELEKGTPEPGPLNAVDERHHSVLMSLLCAHLGLSPKDIVEMELCLADTQPAVLGGAYDEFIFAPRLDNLHSCFCALQALIDSCAGPGSLATEPHVRMVTLYDNEEVGSESAQGAQSLLTELVLRRISASCQHPTAFEEAIPKSFMISADMAHAVHPNYLDKHEENHRPLFHKGPVIKVNSKQRYASNAVSEALIREVANKVKVPLQDLMVRNDTPCGTTIGPILASRLGLRVLDLGSPQLAMHSIREMACTTGVLQTLTLFKGFFELFPSLSHNLLVD

SEQ ID NO: 798851 - protein, 499 aa, Homo sapiens
MSGHSPTRGAMQVAMNGKARKEAVQTAAKELLKFVNRSPSPFHAVAECRNRLLQAGFSELKETEKWNIKPESKYFMTRNSSTIIAFAVGGQYVPGNGFSLIGAHTDSPCLRVKRRSRRSQVGFQQVGVETYGGGIWSTWFDRDLTLAGRVIVKCPTSGRLEQQLVHVERPILRIPHLAIHLQRNINENFGPNTEMHLVPILATAIQEELEKGTPEPGPLNAVDERHHSVLMSLLCAHLGLSPKDIVEMELCLADTQPAVLGGAYDEFIFAPRLDNLHSCFCALQALIDSCAGPGSLATEPHVRMVTLYDNEEVGSESAQGAQSLLTELVLRRISASCQHPTAFEEAIPKSFMISADMAHAVHPNYLDKHEENHRPLFHKGPDQGGKGPNVVGPTGYYNPSVTPEKLFTKEPLNPQIYHQPLNQLADLAFNIVLLLKPPSIAEPRVNYTKVYLLRPLRAGTHPCQGGTAAVAGDAPHSSPILSATRAAQKHKQQGARRRM

SEQ ID NO: 798852 - protein, 323 aa, Homo sapiens
MSGHSPTRGAMQVAMNGKARKEAVQTAAKELLKFVNRSPSPFHAVAECRNRLLQAGFSELKETEKWNIKPESKYFMTRNSSTIIAFAVGGQYVPGNGFSLIGAHTDSPCLRVKRRSRRSQVGFQQVGVETYGGGIWSTWFDRDLTLAGRVIVKCPTSGRLEQQLVHVERPILRIPHLAIHLQRNINENFGPNTEMHLVPILATAIQEELEKGTPEPGPLNAVDERHHSVLMSLLCAHLGLSPKDIVEMELCLADTQPAVLGGAYDEFIFAPRLDNLHSCFCALQALIRFLCKAWVLARTSSGLFPLYETKVGLNAQASLLKTV

SEQ ID NO: 798853 - protein, 122 aa, Homo sapiens
FPLGLSLPLPHLDSPQGPVIKVNSKQRYASNAVSEALIREVANKVKVPLQDLMVRNDTPCGTTIGPILASRLGLRVLDLGSPQLAMHSIREMACTTGVLQTLTLFKGFFELFPSLSHNLLVD

SEQ ID NO: 798854 - protein, 110 aa, Homo sapiens
MWGQVSYKPLGSKSILRWHTISHNCIKKGFSLTSIKTKYLGEEETQVRGSRSHSTKDAISDTHPSLESYGTYFNIPTNTGQQRRQWLIFIIPQALTTGPTGSCKKKKMNE

SEQ ID NO: 798855 - protein, 529 aa, Homo sapiens
FHEASPWQVKKEDTIVPPNLRSRSWETLPSVEKKTPGPPFGTQIWKGLCIESKQLVSAPGAILKSPSVLQMRQFIQHEVIKNEVKLRLQVSLKDYINYILKKEDELQEMMVKDSRTEEERGNAADLLKLVMSFPKMEETTKSHVTEVAAHLTDLFKQSLATPPKCPPDTFGKDFFEKTWRHTASSKRWKEKIDKTRKEIETTQNYLMDIKNRIIPPFFKSELNQLYQSQYNHLDSLSKKLPSFTKKNEDANETAVQDTSDLNLDFKPHKVSEQKSSSVPSLPKPEISADKKDFTAQNQTENLTKSPEEAESYEPVKIPTQSLLQDVAGQTRKEKVKLPHYLLSSKPKSQPLAKVQDSVGGKVNTSSVASAAINNAKSSLFGFHLLPSSVKFGVLKEGHTYATVVKLKNVGVDFCRFKVKQPPPSTGLKVTYKPGPVAAGMQTELNIELFATAVGEDGAKGSAHISHNIEIMTEHEVLFLPVEATVLTSSNYDKRPKDFPQGKENPMVQRTSTIYSSTLGVFMSRKVSPH

SEQ ID NO: 798856 - protein, 529 aa, Homo sapiens; identical to SEQ ID NO: 798855

SEQ ID NO: 798857 - protein, 529 aa, Homo sapiens; identical to SEQ ID NO: 798855

SEQ ID NO: 798858 - protein, 415 aa, Homo sapiens
FHEASPWQVKKEDTIVPPNLRSRSWETLPSVEKKTPGPPFGTQIWKGLCIESKQLVSAPGAILKSPSVLQMRQFIQHEVIKNEVKLRLQVSLKDYINYILKKEDELQEMMVKDSRTEEERGNAADLLKLVMSFPKMEETTKSHVTEVAAHLTDLFKQSLATPPKCPPDTFGKDFFEKTWRHTASSKRWKEKIDKTRKEIETTQNYLMDIKNRIIPPFFKSELNQLYQSQYNHLDSLSKKLPSFTKKNEDANETAVQDTSDLNLDFKPHKVSEQKSSSVPSLPKPEISADKKDFTAQNQTENLTKSPEEAESYEPVKIPTQSLLQDVAGQTRKEKVKLPHYLLSSKPKSQPLAKVQDSVGGKVNTSSVASAAINNAKSSLFGFHLLPSSVKFGVLKEGHTYATVVKLKNVGVDFCR

SEQ ID NO: 798859 - protein, 35 aa, Homo sapiens
MVATGGLGDGARLDAGSRSPVVRRLLMHSVQRGGG

SEQ ID NO: 798860 - protein, 35 aa, Homo sapiens; identical to SEQ ID NO: 798859

SEQ ID NO: 798861 - protein, 134 aa, Homo sapiens
HNIVKYPQCRQHALMTIQQLVLSPNGDDDMGTLLGLMHSAPPTELQLKTDILRALLSVLRESHRSRTVFRKVGGFVYITSLLVAMERSLSCPPKNGWEKVNQNQVFELLHTVFCTLTAAMRYEPANSHFFKTEI

SEQ ID NO: 798862 - protein, 354 aa, Homo sapiens
MGPVSLLPKYQKLNTWNGDLAKMTHLQAGLSPETIEKARLELNENPDVLHQDIQQVRDMIITRPDIGFLRTDDAFILRFLRARKFHQADAFRLLAQYFQYRQLNLDMFKNFKADDPGIKRALIDGFPGVLENRDHYGRKILLLFAANWDQSRNSFTDILRAILLSLEVLIEDPELQINGFILIIDWSNFSFKQASKLTPSILKLAIEGLQDSFPARFGGVHFVNQPWYIHALYTLIKPFLKDKTRKRIFLHGNNLNSLHQLIHPEFLPSEFGGTLPPYDMGTWARTLLGPDYSDENDYTHTSYNAMHVKHTSSNLERECSPKLMKRSQSVVEAGTLKHEEKGENENTQPLLALD

SEQ ID NO: 798863 - protein, 354 aa, Homo sapiens; identical to SEQ ID NO: 798862

SEQ ID NO: 798864 - protein, 232 aa, Homo sapiens
MGPVSLLPKYQKLNTWNGDLAKMTHLQAGLSPETIEKARLELNENPDVLHQDIQQVRDMIITRPDIGFLRTDDAFILRFLRARKFHQADAFRLLAQYFQYRQLNLDMFKNFKADDPGIKRALIDGFPGVLENRDHYGRKILLLFAANWDQSRNSFTDILRAILLSLEVLIEDPELQINGFILIIDWSNFSFKQASKLTPSILKLAIEGLQKMDKINAEDLFRRTVMPELVIH

SEQ ID NO: 798865 - protein, 326 aa, Homo sapiens
MGPVSLLPKYQKLNTWNGDLAKMTHLQAGLSPETIEKARLELNENPDVLHQDIQQVRDMIITRPDIGFLRTDDAFILRFLRARKFHQADAFRLLAQYFQYRQLNLDMFKNFKADDPGIKRALIDGFPGVLENRDHYGRKILLLFAANWDQSRNSFTDILRAILLSLEVLIEDPELQINGFILIIDWSNFSFKQASKLTPSILKLAIEGLQDSFPARFGGVHFVNQPWYIHALYTLIKPFLKDKTRKRIFLHGNNLNSLHQLIHPEFLPSEFGGTLPPYDMGTWARTLLGPDYSDENDYTHTSYNAMHVKHTSSNLERECSPKLMKR

SEQ ID NO: 798866 - protein, 92 aa, Homo sapiens
TPPTKITAPCGARALIHSFLEKSEPEPARIGDLTHPVQQRGHLQKYIPKARLGGRVKELLHRHPSCHPAVIGSPNRRSGASDKWLHFNYRLE

SEQ ID NO: 798867 - protein, 367 aa, Homo sapiens
MGPVSLLPKYQKLNTWNGDLAKMTHLQAGLSPETIEKARLELNENPDVLHQDIQQVRDMIITRPDIGFLRTDDAFILRFLRARKFHQADAFRLLAQYFQYRQLNLDMFKNFKADDPGIKRALIDGFPGVLENRDHYGRKILLLFAANWDQSRNSFTDILRAILLSLEVLIEDPELQINGFILIIDWSNFSFKQASKLTPSILKLAIEGLQDSFPARFGGVHFVNQPWYIHALYTLIKPFLKDKTRKRIFLHGNNLNSLHQLIHPEFLPSEFGGTLPPYDMGTWARTLLGPDYSDENDYTHTSYNAMHVKHTSSNLERECSPKLMKSSEGWKGKIKVLARSQSVVEAGTLKHEEKGENENTQPLLALD

SEQ ID NO: 798868 - protein, 191 aa, Homo sapiens
MGPVSLLPKYQKLNTWNGDLAKMTHLQAGLSPETIEKARLELNENPDVLHQDIQQVRDMIITRPDIGFLRTDDAFILRFLRARKFHQADAFRLLAQYFQYRQLNLDMFKNFKADDPGIKRALIDGFPGVLENRDHYGRKILLLFAANWDQSRNSFTDILRAILLSLEVLIEDPELQINGFILIFPSNKPPN

SEQ ID NO: 798869 - protein, 224 aa, Homo sapiens
MSSYFVNSTFPVTLASGQESFLGQLPLYSSGYADPLRHYPAPYGPGPGQDKGFATSSYYPPAGGGYGRAAPCDYGPAPAFYREKESACALSGADEQPPFHPEPRKSDCAQDKSVFGETEEQKCSTPVYPWMQRMNSCNSSSFGPSGRRGRQTYTRYQTLELEKEFHYNRYLTRRRRIEIAHALCLTERQIKIWFQNRRMKWKKESKLLSASQLSAEEEEEKQAE

SEQ ID NO: 798870 - protein, 140 aa, Homo sapiens
MSSYFVNSTFPVTLASGQESFLGQLPLYSSGYADPLRHYPAPYGPGPGQDKGFATSSYYPPAGGGYGRAAPCDYGPAPAFYREKESACALSGADEQPPFHPEPRKSDCAQDKSVFGETEEQKCSTPVYPWMQRMNSCNSE

SEQ ID NO: 798871 - protein, 110 aa, Homo sapiens
MCCVCSLVLALDVKYFDDDDDDDDDNNNNNNNNNNNNKDVKTRRSVTSNPPLPFFPLSSTPSLSIFPEPEFFSKGESPGPPKRALFDWEVTAEIKAGAISPAQAPALRFP

SEQ ID NO: 798872 - protein, 110 aa, Homo sapiens; identical to SEQ ID NO: 798871

SEQ ID NO: 798873 - protein, 140 aa, Homo sapiens; identical to SEQ ID NO: 798870

SEQ ID NO: 798874 - protein, 118 aa, Homo sapiens
NYQEGSKPTTGRRMISSLCPDLLGQFLLLENPIAQAILKSFGIVEGTGVRVAGRIGIRQIKPPRLRDTPHSFTPYHQVRRGLVSFPSAPSPAKGEQLHTRTRQNVLGSHPRRRLSRSS

SEQ ID NO: 798875 - protein, 212 aa, Homo sapiens
LGFSGTQRSQWFWPPRACPSPSCHPSLVSASGYCPSAVLLPGADIAGFPAALACEAVALRDVLVSIGPGISAEAGEGEETARETQKRQFTEKCLLSPFGDIFEIKGLWVETPKMRETPPSPGSLPENAQVSRHSRRREPRSTGRQFCGFNAVGYSCWFLRDTDSITCVVLVWDVWISVEEKIAMCVSDMITFQTFLGPDMVIVKKLLSAFLF

SEQ ID NO: 798876 - protein, 140 aa, Homo sapiens; identical to SEQ ID NO: 798870

SEQ ID NO: 798877 - protein, 224 aa, Homo sapiens; identical to SEQ ID NO: 798869

SEQ ID NO: 798878 - protein, 224 aa, Homo sapiens; identical to SEQ ID NO: 798869

SEQ ID NO: 798879 - protein, 110 aa, Homo sapiens; identical to SEQ ID NO: 798871

SEQ ID NO: 798880 - protein, 153 aa, Homo sapiens
SQSALGRRNLPQAPGPGVQGPLSCQGPGRCGPQRRGRGLSRGRSCKQPQRPGLASKSRASQAQPRAAQAPSLPRGRRARGPGHRRGVGSPPRRAPGARGAAPGAEKGEVRTYLSLLSTPSWIHLSTSPQSIMGPTATRMALRLHKTNFLFLHQ

SEQ ID NO: 798881 - protein, 127 aa, Homo sapiens
EFTKPLEDQTVEEGATAVLECEVSRENAKVKWFKNGTEILKSKKYEIVADGRVRKLVIHDCTPEDIKTYTCDAKDFKTSCNLNVVPPHVEFLRPLTDLQVREKEMARFECELSRENAKVCDCIPVIL

SEQ ID NO: 798882 - protein, 288 aa, Homo sapiens
MNNLSFSELCCLFCCPPCPGKIASKLAFLPPDPTYTLMCDESGSRWTLHLSERADWQYSSREKDAIECFMTRTSKGNRIACMFVRCSPNAKYTLLFSHGNAVDLGQMSSFYIGLGSRINCNIFSYDYSGYGASSGKPTEKNLYADIEAAWLALRTRYGIRPENVIIYGQSIGTVPSVDLAARYESAAVILHSPLTSGMRVAFPDTKKTYCFDAFPNIDKISKITSPVLIIHGTEDEVIDFSHGLALFERCQRPVEPLWVEGAGHNDVELYGQYLERLKQFVSQELVNL

SEQ ID NO: 798883 - protein, 288 aa, Homo sapiens; identical to SEQ ID NO: 798882

SEQ ID NO: 798884 - protein, 288 aa, Homo sapiens; identical to SEQ ID NO: 798882

SEQ ID NO: 798885 - protein, 293 aa, Homo sapiens
MNNLSFSELCCLFCCPPCPGKIASKLAFLPPDPTYTLMCDESGSRWTLHLSERADWQYSSREKDAIECFMTRTSKGNRIACMFVRCSPNAKYTLLFSHGNAVDLGQMSSFYIGLGSRINCNIFSYDYSGYGASSGKPTEKNLYADIEAAWLALRTRYGIRPENVIIYGQSIGTVPSVDLAARYESAAVILHSPLTSGMRVAFPDTKKTYCFDAFPNIDKISKITSPVLIIHGTEDEVIDFSHGLALFERCQRPVEPLWVEGAGHNDVELYGQYLERLKQFVSQELVQKHKEGK

SEQ ID NO: 798886 - protein, 288 aa, Homo sapiens; identical to SEQ ID NO: 798882

SEQ ID NO: 798887 - protein, 74 aa, Homo sapiens
ATGLRRPEPGSTEETRRLLGQGGERSVGREESVEPPFHSLRERIGRAHEPSNPWLKHPLPKPGYFLSVATPMKL

SEQ ID NO: 798888 - protein, 77 aa, Homo sapiens
GLLGCGDQSPAPLKKPAGCWGRAAKGQSAERSPWSHRFIASGKGSGVLTSPLTHGLNTRFLSLVPEYITCGDKHEDV

SEQ ID NO: 798889 - protein, 101 aa, Homo sapiens
ATGLRRPEPGSTEETRRLLGQGGERSVGREESVEPPFHSLRERIGRAHEPSNPWLKHPLPKPGFLCLCLKNMVPCEILHVEESFTLRELSGYNYFRQILGT

SEQ ID NO: 798890 - protein, 77 aa, Homo sapiens; identical to SEQ ID NO: 798888

SEQ ID NO: 798891 - protein, 77 aa, Homo sapiens; identical to SEQ ID NO: 798888

SEQ ID NO: 798892 - protein, 77 aa, Homo sapiens; identical to SEQ ID NO: 798888

SEQ ID NO: 798893 - protein, 77 aa, Homo sapiens; identical to SEQ ID NO: 798888

SEQ ID NO: 798894 - protein, 286 aa, Homo sapiens
CRSPTAEPGLLSSRRARTIQHRLRRVPPSSGSDWLTHGKREKPGPLETRLLEERKYCVDVRLSKGGSEFSSEVAPVRQQGSVAGARAGVVSLLGCRSSWTAAMELSAEYLREKLQRDLEAEHVLDPSMTIHCDMVITYGLDQLENCQTCGTNYIISVLNLLTLIVEQINTKLPSSFVEKLFIPSSKLLFLRYHKEKEVVAVAHAVYQAMLSLKNIPVLETAYKLILGEMTCALNNLLHSLQLPEACSEIKHEAFKNHVFNVDNAKFVVKFDLSALTTIGNAKNSSL

SEQ ID NO: 798895 - protein, 185 aa, Homo sapiens
VGSGRFGRRLALLWAAALGHVVSGKVMSRRAPGSRLSSGGTNYSRSWNDWQPRTDSASADPGNLKYSSSRDRGGSSSYGLQPSNSAVVSRQRHDDTRVHADIQNDEKGGYSVNGGSGENTYGRKSLGQELRVNNVTSPEFTSVQHGSRALATKDMRKSQERSMSYCDESRLSNLLRRITREDDRD

SEQ ID NO: 798896 - protein, 193 aa, Homo sapiens
MRCVTAANQVFFSEAVLTAANECVGVLLGSLDPSMTIHCDMVITYGLDQLENCQTCGTNYIISVLNLLTLIVEQINTKLPSSFVEKLFIPSSKLLFLRYHKEKEVVAVAHAVYQAMLSLKNIPVLETAYKLILGEMTCALNNLLHSLQLPEACSEIKHEAFKNHVFNVDNAKFVVKFDLSALTTIGNAKNSSL

SEQ ID NO: 798897 - protein, 193 aa, Homo sapiens; identical to SEQ ID NO: 798896

SEQ ID NO: 798898 - protein, 193 aa, Homo sapiens; identical to SEQ ID NO: 798896

SEQ ID NO: 798899 - protein, 193 aa, Homo sapiens; identical to SEQ ID NO: 798896

SEQ ID NO: 798900 - protein, 197 aa, Homo sapiens
MWRWRTRPSTVAPVASESWWCRPSSRGNRCFRDTLDPSMTIHCDMVITYGLDQLENCQTCGTNYIISVLNLLTLIVEQINTKLPSSFVEKLFIPSSKLLFLRYHKEKEVVAVAHAVYQAMLSLKNIPVLETAYKLILGEMTCALNNLLHSLQLPEACSEIKHEAFKNHVFNVDNAKFVVKFDLSALTTIGNAKNSSL

SEQ ID NO: 798901 - protein, 193 aa, Homo sapiens; identical to SEQ ID NO: 798896

SEQ ID NO: 798902 - protein, 159 aa, Homo sapiens
MTIHCDMVITYGLDQLENCQTCGTNYIISVLNLLTLIVEQINTKLPSSFVEKLFIPSSKLLFLRYHKEKEVVAVAHAVYQAMLSLKNIPVLETAYKLILGEMTCALNNLLHSLQLPEACSEIKHEAFKNHVFNVDNAKFVVKFDLSALTTIGNAKNSSL

SEQ ID NO: 798903 - protein, 193 aa, Homo sapiens; identical to SEQ ID NO: 798896

SEQ ID NO: 798904 - protein, 193 aa, Homo sapiens; identical to SEQ ID NO: 798896

SEQ ID NO: 798905 - protein, 185 aa, Homo sapiens; identical to SEQ ID NO: 798895

SEQ ID NO: 798906 - protein, 185 aa, Homo sapiens; identical to SEQ ID NO: 798895

SEQ ID NO: 798907 - protein, 185 aa, Homo sapiens; identical to SEQ ID NO: 798895

SEQ ID NO: 798908 - protein, 193 aa, Homo sapiens; identical to SEQ ID NO: 798896

SEQ ID NO: 798909 - protein, 193 aa, Homo sapiens; identical to SEQ ID NO: 798896

SEQ ID NO: 798910 - protein, 185 aa, Homo sapiens; identical to SEQ ID NO: 798895

SEQ ID NO: 798911 - protein, 193 aa, Homo sapiens; identical to SEQ ID NO: 798896

SEQ ID NO: 798912 - protein, 347 aa, Homo sapiens
CRSPTAEPGLLSSRRARTIQHRLRRVPPSSGSDWLTHGKREKPGPLETRLLEERKYCVDVRLSKGGSEFSSEVAPVRQQGSVAGARAGVVSLLGCRSSWTAAMELSAEYLREKLQRDLEAEHVEVEDTTLNRCSCSFRVLVVSAKFEGKPLLQRHRLVNACLAEELPHIHAFEQKTLTPDQLGTLDPSMTIHCDMVITYGLDQLENCQTCGTNYIISVLNLLTLIVEQINTKLPSSFVEKLFIPSSKLLFLRYHKEKEVVAVAHAVYQAMLSLKNIPVLETAYKLILGEMTCALNNLLHSLQLPEACSEIKHEAFKNHVFNVDNAKFVVKFDLSALTTIGNAKNSSL

SEQ ID NO: 798913 - protein, 185 aa, Homo sapiens; identical to SEQ ID NO: 798895

SEQ ID NO: 798914 - protein, 114 aa, Homo sapiens
MTIHCDMVITYGLDQLENCQTCGTNYIISVLNLLTLIVEQINTKLPSSFVEKLFIPSSKLLFLRYHKEKEHAQLIFVFLMETGFHHVGQAGLELQTSSDPPTSASQSAGITGLS

SEQ ID NO: 798915 - protein, 105 aa, Homo sapiens
EWAGWGGVSLVWQGSYQGSSCQDAQPNSGLLQASVITLYTMFVTWSALSSIPGKYGPRLKEAWPRSWVSISLLWGWGPSQVTGTSLLQPILRLSPPMRWEGPVCS

SEQ ID NO: 798916 - protein, 108 aa, Homo sapiens
MGIEVRSYVHGHKAVVLKMSEMDWSYRVRARVEVRGHNWDIRPGAKMEVTRLGTRLMGKMVCSRPGETRKMISTWTAVWVKICASWAGLLLYLWTLVAPLLLRNRDFS

SEQ ID NO: 798917 - protein, 476 aa, Homo sapiens
DPEVRAPPRRRRAPKPGAAAMGACLGACSLLSCASCLCGSAPCILCSCCPASRNSTVSRLIFTFFLFLGVLVSIIMLSPGVESQLYKLPWVCEEGAGIPTVLQGHIDCGSLLGYRAVYRMCFATAAFFFFFTLLMLCVSSSRDPRAAIQNGFWFFKFLILVGLTVGAFYIPDGSFTNIWFYFGVVGSFLFILIQLVLLIDFAHSWNQRWLGKAEECDSRAWYAGLFFFTLLFYLLSIAAVALMFMYYTEPSGCHEGKVFISLNLTFCVCVSIAAVLPKVQDAQPNSGLLQASVITLYTMFVTWSALSSIPEQKCNPHLPTQLGNETVVAGPEGYETQWWDAPSIVGLIIFLLCTLFISLRSSDHRQVNSLMQTEECPPMLDATQQQQQQVAACEGRAFDNEQDGVTYSYSFFHFCLVLASLHVMMTLTNWYKPGETRKMISTWTAVWVKICASWAGLLLYLWTLVAPLLLRNRDFS

SEQ ID NO: 798918 - protein, 456 aa, Homo sapiens
MGACLGACSLLSCASCLCGSAPCILCSCCPASRNSTVSRLIFTFFLFLGVLVSIIMLSPGVESQLYKLPWVCEEGAGIPTVLQGHIDCGSLLGYRAVYRMCFATAAFFFFFTLLMLCVSSSRDPRAAIQNGFWFFKFLILVGLTVGAFYIPDGSFTNIWFYFGVVGSFLFILIQLVLLIDFAHSWNQRWLGKAEECDSRAWYAGLFFFTLLFYLLSIAAVALMFMYYTEPSGCHEGKVFISLNLTFCVCVSIAAVLPKVQDAQPNSGLLQASVITLYTMFVTWSALSSIPEQKCNPHLPTQLGNETVVAGPEGYETQWWDAPSIVGLIIFLLCTLFISLRSSDHRQVNSLMQTEECPPMLDATQQQQQQVAACEGRAFDNEQDGVTYSYSFFHFCLVLASLHVMMTLTNWYKPGETRKMISTWTAVWVKICASWAGLLLYLWTLVAPLLLRNRDFS

SEQ ID NO: 798919 - protein, 401 aa, Homo sapiens
MLSPGVESQLYKLPWVCEEGAGIPTVLQGHIDCGSLLGYRAVYRMCFATAAFFFFFTLLMLCVSSSRDPRAAIQNGFWFFKFLILVGLTVGAFYIPDGSFTNIWFYFGVVGSFLFILIQLVLLIDFAHSWNQRWLGKAEECDSRAWYAGLFFFTLLFYLLSIAAVALMFMYYTEPSGCHEGKVFISLNLTFCVCVSIAAVLPKVQDAQPNSGLLQASVITLYTMFVTWSALSSIPEQKCNPHLPTQLGNETVVAGPEGYETQWWDAPSIVGLIIFLLCTLFISLRSSDHRQVNSLMQTEECPPMLDATQQQQQQVAACEGRAFDNEQDGVTYSYSFFHFCLVLASLHVMMTLTNWYKPGETRKMISTWTAVWVKICASWAGLLLYLWTLVAPLLLRNRDFS

SEQ ID NO: 798920 - protein, 469 aa, Homo sapiens
  misc_feature (57)..(57): Xaa can be any naturally occurring amino acid
MGACLGACSLLSCASCLCGSAPCILCSCCPASRNSTVSRLIFTFFLFLGVPRCSHPXYCLMPAVAFGKEVKAFFNLDGFGLPWVCEEGAGIPTVLQGHIDCGSLLGYRAVYRMCFATAAFFFFFTLLMLCVSSSRDPRAAIQNGFWFFKFLILVGLTVGAFYIPDGSFTNIWFYFGVVGSFLFILIQLVLLIDFAHSWNQRWLGKAEECDSRAWYAGLFFFTLLFYLLSIAAVALMFMYYTEPSGCHEGKVFISLNLTFCVCVSIAAVLPKVQDAQPNSGLLQASVITLYTMFVTWSALSSIPEQKCNPHLPTQLGNETVVAGPEGYETQWWDAPSIVGLIIFLLCTLFISLRSSDHRQVNSLMQTEECPPMLDATQQQQQQVAACEGRAFDNEQDGVTYSYSFFHFCLVLASLHVMMTLTNWYKPGETRKMISTWTAVWVKICASWAGLLLYLWTLVAPLLLRNRDFS

SEQ ID NO: 798921 - protein, 300 aa, Homo sapiens
LVVLLSWWCCCPGGAAVLLVLLIDFAHSWNQRWLGKAEECDSRAWYAGLFFFTLLFYLLSIAAVALMFMYYTEPSGCHEGKVFISLNLTFCVCVSIAAVLPKVQDAQPNSGLLQASVITLYTMFVTWSALSSIPEQKCNPHLPTQLGNETVVAGPEGYETQWWDAPSIVGLIIFLLCTLFISLRSSDHRQVNSLMQTEECPPMLDATQQQQQQVAACEGRAFDNEQDGVTYSYSFFHFCLVLASLHVMMTLTNWYKPGETRKMISTWTAVWVKICASWAGLLLYLWTLVAPLLLRNRDFS

SEQ ID NO: 798922 - protein, 476 aa, Homo sapiens; identical to SEQ ID NO: 798917

SEQ ID NO: 798923 - protein, 566 aa, Homo sapiens
MGACLGACSLLSCASCLCGSAPCILCSCCPASRNSTVSRLIFTFFLFLGVLVSIIMLSPGVESQLYKLPWVCEEGAGIPTVLQGHIDCGSLLGYRAVYRMCFATAAFFFFFTLLMLCVSSSRDPRAAIQNGFWFFKFLILVGLTVGAFYIPDGSFTNIWFYFGVVGSFLFILIQLVLLIDFAHSWNQRWLGKAEECDSRAWYAGLFFFTLLFYLLSIAAVALMFMYYTEPSGCHEGKVFISLNLTFCVCVSIAAVLPKVQDAQPNSGLLQASVITLYTMFVTWSALSSIPGKYGPRLKEAWPRSWVSISLLWGWGPSQVTGTSLLQPILRLSPPMRWEGPVLFLSCLSALVTAERSVAVDLSGWLCICLSIRGGSLAILRATWLPRPGLHGLRVIVLPSPEQKCNPHLPTQLGNETVVAGPEGYETQWWDAPSIVGLIIFLLCTLFISLRSSDHRQVNSLMQTEECPPMLDATQQQQQQVAACEGRAFDNEQDGVTYSYSFFHFCLVLASLHVMMTLTNWYKPGETRKMISTWTAVWVKICASWAGLLLYLWTLVAPLLLRNRDFS

SEQ ID NO: 798924 - protein, 401 aa, Homo sapiens
DPEVRAPPRRRRAPKPGAAAMGACLGACSLLSCASCLCGSAPCILCSCCPASRNSTVSRLIFTFFLFLGVLVSIIMLSPGVESQLYKLPWVCEEGAGIPTVLQGHIDCGSLLGYRAVYRMCFATAAFFFFFTLLMLCVSSSRDPRAAIQNGFWFFKFLILVGLTVGAFYIPDGSFTNIWFYFGVVGSFLFILIQLVLLIDFAHSWNQRWLGKAEECDSRAWYAGLFFFTLLFYLLSIAAVALMFMYYTEPSGCHEGKVFISLNLTFCVCVSIAAVLPKVQDAQPNSGLLQASVITLYTMFVTWSALSSIPEQKCNPHLPTQLGNETVVAGPEGYETQWWDAPSIVGLIIFLLCTLFISLRSSDHRQVNSLMQTEECPPMLDATQQQQHHQDSSTTRTHTSS

SEQ ID NO: 798925 - protein, 350 aa, Homo sapiens
MGACLGACSLLSCASCLCGSAPCILCSCCPASRNSTVSRLIFTFFLFLGVLVSIIMLSPGVESQLYKLPWVCEEGAGIPTVLQGHIDCGSLLGYRAVYRMCFATAAFFFFFTLLMLCVSSSRDPRAAIQNGFWFFKFLILVGLTVGAFYIPDGSFTNIWFYFGVVGSFLFILIQLVLLIDFAHSWNQRWLGKAEECDSRAWYAGLFFFTLLFYLLSIAAVALMFMYYTEPSGCHEGKVFISLNLTFCVCVSIAAVLPKVQDAQPNSGLLQASVITLYTMFVTWSALSSIPEQKCNPHLPTQLGNETVVAGPEGYETQWWDAPSIVGLIIFLLCTLFIRYGQVWILGKDRD

SEQ ID NO: 798926 - protein, 106 aa, Homo sapiens
MQTEECPPMLDATQQQQQQVAACEGRAFDNEQDGVTYSYSFFHFCLVLASLHVMMTLTNWYKPGETRKMISTWTAVWVKICASWAGLLLYLWTLVAPLLLRNRDFS

SEQ ID NO: 798927 - protein, 190 aa, Homo sapiens
RRHQMAGCEAASAEVAVAQEEWGYQGPQVEEQPTQLGNETVVAGPEGYETQWWDAPSIVGLIIFLLCTLFISLRSSDHRQVNSLMQTEECPPMLDATQQQQQQVAACEGRAFDNEQDGVTYSYSFFHFCLVLASLHVMMTLTNWYKPGETRKMISTWTAVWVKICASWAGLLLYLWTLVAPLLLRNRDFS

SEQ ID NO: 798928 - protein, 379 aa, Homo sapiens
DPEVRAPPRRRRAPKPGAAAMGACLGACSLLSCASCLCGSAPCILCSCCPASRNSTVSRLIFTFFLFLGVLVSIIMLSPGVESQLYKLPWVCEEGAGIPTVLQGHIDCGSLLGYRAVYRMCFATAAFFFFFTLLMLCVSSSRDPRAAIQNGFWFFKFLILVGLTVGAFYIPDGSFTNIWFYFGVVGSFLFILIQLVLLIDFAHSWNQRWLGKAEECDSRAWYAGLFFFTLLFYLLSIAAVALMFMYYTEPSGCHEGKVFISLNLTFCVCVSIAAVLPKVQDAQPNSGLLQASVITLYTMFVTWSALSSIPEQKCNPQLSISDERAPLSSGSTGAGLLERAGNSHHSGASGTEALVFLITTPRKTDQIIDFVTIRISQNL

SEQ ID NO: 798929 - protein, 141 aa, Homo sapiens
MARKSLGVESAEVIFLLLHLFISLRSSDHRQVNSLMQTEECPPMLDATQQQQQQVAACEGRAFDNEQDGVTYSYSFFHFCLVLASLHVMMTLTNWYKPGETRKMISTWTAVWVKICASWAGLLLYLWTLVAPLLLRNRDFS

SEQ ID NO: 798930 - protein, 456 aa, Homo sapiens; identical to SEQ ID NO: 798918

SEQ ID NO: 798931 - protein, 483 aa, Homo sapiens
DRLGGAGGISAEAAPRRRRAPKPGAAAMGACLGACSLLSCASCLCGSAPCILCSCCPASRNSTVSRLIFTFFLFLGVLVSIIMLSPGVESQLYKLPWVCEEGAGIPTVLQGHIDCGSLLGYRAVYRMCFATAAFFFFFTLLMLCVSSSRDPRAAIQNGFWFFKFLILVGLTVGAFYIPDGSFTNIWFYFGVVGSFLFILIQLVLLIDFAHSWNQRWLGKAEECDSRAWYAGLFFFTLLFYLLSIAAVALMFMYYTEPSGCHEGKVFISLNLTFCVCVSIAAVLPKVQDAQPNSGLLQASVITLYTMFVTWSALSSIPEQKCNPHLPTQLGNETVVAGPEGYETQWWDAPSIVGLIIFLLCTLFISLRSSDHRQVNSLMQTEECPPMLDATQQQQQQVAACEGRAFDNEQDGVTYSYSFFHFCLVLASLHVMMTLTNWYKPGETRKMISTWTAVWVKICASWAGLLLYLWTLVAPLLLRNRDFS

SEQ ID NO: 798932 - protein, 456 aa, Homo sapiens; identical to SEQ ID NO: 798918

SEQ ID NO: 798933 - protein, 382 aa, Homo sapiens
AAAYYYYIRGHIDCGSLLGYRAVYRMCFATAAFFFFFTLLMLCVSSSRDPRAAIQNGFWFFKFLILVGLTVGAFYIPDGSFTNIWFYFGVVGSFLFILIQLVLLIDFAHSWNQRWLGKAEECDSRAWYAGLFFFTLLFYLLSIAAVALMFMYYTEPSGCHEGKVFISLNLTFCVCVSIAAVLPKVQDAQPNSGLLQASVITLYTMFVTWSALSSIPEQKCNPHLPTQLGNETVVAGPEGYETQWWDAPSIVGLIIFLLCTLFISLRSSDHRQVNSLMQTEECPPMLDATQQQQQQVAACEGRAFDNEQDGVTYSYSFFHFCLVLASLHVMMTLTNWYKPGETRKMISTWTAVWVKICASWAGLLLYLWTLVAPLLLRNRDFS

SEQ ID NO: 798934 - protein, 111 aa, Homo sapiens
ICNGGLQWREGRGLPLLPLALGHPQLYQMSEHQESSIINEDTELGDAYVLRSWSLHTRSTSCCVMPVSKIRLCRRKLLPGTGGEGWGWGHLLAAPCPPSPPPLRLHQEPPP

SEQ ID NO: 798935 - protein, 139 aa, Homo sapiens
RNEIGDSEPLDSRDTWLINKDQIQDLSAKLKPYEKKDWRHAPRFVTPLKPHTVLRGQDCTMTCAFLGNPRPTVTLYKGDVNITANSKFWYNSTSGVCTLVIPTCTLKDSGDYSVLVENELGKDRSSCTLTVYDMRVLNP

SEQ ID NO: 798936 - protein, 155 aa, Homo sapiens
RNEIGDSEPLDSRDTWLINKDQIQDLSAKLKPYEKKDWRHAPRFVTPLKPHTVLRGQDCTMTCAFLGNPRPTVTLYKGDVNITANSKFWYNSTSGVCTLVIPTCTLKDSGDYSVLVENELGKDRSSCTLTVYDKDDKSVVASITESLQKKSKHLM

SEQ ID NO: 798937 - protein, 387 aa, Homo sapiens
VREDWKHVGVWLISAPGDKENLQALERMNTVTSKSNLSYNTKFAIPDFKVGTLDSLVGLSDELGKLDTFAESLIRRMAQSVVEVMEDSKGKVQEHLLANGVDLTSFVTHFEWDMAKYPVKQPLVSVVDTIAKQLAQIEMDLKSRTAAYNTLKTNLENLEKKSMGNLFTRTLSDIVSKEDFVLDSEYLVTLLVIVPKPNYSQWQKTYESLSDMVVPRSTKLITEDKEGGLFTVTLFRKVIEDFKTKAKENKFTVREFYYDEKEIEREREEMARLLSDKKQQYGPLLRWLKVNFSEAFIAWIHIKALRVFVESVLRYGLPVNFQAVLLQPHKKSSTKRLREVLNSVFRHLDEVAATSILDASVEIPGLQLNNQDYFPYVYFHIDLSLLD

SEQ ID NO: 798938 - protein, 433 aa, Homo sapiens
VREDWKHVGVWLISAPGDKENLQALERMNTVTSKSNLSYNTKFAIPDFKVGTLDSLVGLSDELGKLDTFAESLIRRMAQSVVEVMEDSKGKVQEHLLANGVDLTSFVTHFEWDMAKYPVKQPLVSVVDTIAKQLAQIEMDLKSRTAAYNTLKTNLENLEKKSMGNLFTRTLSDIVSKEDFVLDSEYLVTLLVIVPKPNYSQWQKTYESLSDMVVPRSTKLITEDKEGGLFTVTLFRKVIEDFKTKAKENKFTVREFYYDEKEIEREREEMARLLSDKKQQYQTSCVALKKGSSTFPDHKVKVTPLGNPDRPAAGQTDRERESEGEGEGPLLRWLKVNFSEAFIAWIHIKALRVFVESVLRYGLPVNFQAVLLQPHKKSSTKRLREVLNSVFRHLDEVAATSILDASVEIPGLQLNNQDYFPYVYFHIDLSLLD

SEQ ID NO: 798939 - protein, 331 aa, Homo sapiens
MSSTPHDPFYSSPFGPFYRRHTPYMVQPEYRIYEMNKRLQSRTEDSDNLWWDAFATEFFEDDATLTLSFCLEDGPKRYTIGRTLIPRYFSTVFEGGVTDLYYILKHSKESYHNSSITVDCDQCTMVTQHGKPMFTKVCTEGRLILEFTFDDLMRIKTWHFTIRQYRELVPRSILAMHAQDPQVLDQLSKNITRMGLTNFTLNYLRLCVILEPMQELMSRHKTYNLSPRDCLKTCLFQKWQRMVAPPAEPTRQPTTKRRKRKNSTSSTSNSSAGNNANSTGSKKKTTAANLSLSSQVPGLGAIPNCSLNPGRDGDLCHSTAVTPSGQFKEKH

SEQ ID NO: 798940 - protein, 329 aa, Homo sapiens
MIICYISWSTLHFRCHIIGNYDDDDDDDDDTLILDSISKLNNDSDNLWWDAFATEFFEDDATLTLSFCLEDGPKRYTIGRTLIPRYFSTVFEGGVTDLYYILKHSKESYHNSSITVDCDQCTMVTQHGKPMFTKVCTEGRLILEFTFDDLMRIKTWHFTIRQYRELVPRSILAMHAQDPQVLDQLSKNITRMGLTNFTLNYLRLCVILEPMQELMSRHKTYNLSPRDCLKTCLFQKWQRMVAPPAEPTRQPTTKRRKRKNSTSSTSNSSAGNNANSTGSKKKTTAANLSLSSQVPGLGAIPNCSLNPGRDGDLCHSTAVTPSGQFKEKH

SEQ ID NO: 798941 - protein, 207 aa, Homo sapiens
MVTQHGKPMFTKVCTEGRLILEFTFDDLMRIKTWHFTIRQYRELVPRSILAMHAQDPQVLDQLSKNITRMGLTNFTLNYLRLCVILEPMQELMSRHKTYNLSPRDCLKTCLFQKWQRMVAPPAEPTRQPTTKRRKRKNSTSSTSNSSAGNNANSTGSKKKTTAANLSLSSQVPGLGAIPNCSLNPGRDGDLCHSTAVTPSGQFKEKH

SEQ ID NO: 798942 - protein, 276 aa, Homo sapiens
PPIPPCCPKYTYKTQTSVLLVRPAIGRTLIPRYFSTVFEGGVTDLYYILKHSKESYHNSSITVDCDQCTMVTQHGKPMFTKVCTEGRLILEFTFDDLMRIKTWHFTIRQYRELVPRSILAMHAQDPQVLDQLSKNITRMGLTNFTLNYLRLCVILEPMQELMSRHKTYNLSPRDCLKTCLFQKWQRMVAPPAEPTRQPTTKRRKRKNSTSSTSNSSAGNNANSTGSKKKTTAANLSLSSQVPGLGAIPNCSLNPGRDGDLCHSTAVTPSGQFKEKH

SEQ ID NO: 798943 - protein, 373 aa, Homo sapiens
MSSTPHDPFYSSPFGPFYRRHTPYMVQPEYRIYEMNKRLQSRTEDSDNLWWDAFATEFFEDDATLTLSFCLEDGPKRYTIGRTLIPRYFSTVFEGGVTDLYYILKHSKESYHNSSITVDCDQCTMVTQHGKPMFTKVCTEGRLILEFTFDDLMRIKTWHFTIRQYRELVPRSILAMHAQDPQVLDQLSKNITRMGLTNFTLNYLRLCVILEPMQELMSRHKTYNLSPRDCLKTCLFQKWQRMVAPPAEPTRQPTTKRRKRKNSTSSTSNSSAGNNANSTGSKKKTTAANLSLSSQVPDVMVVGEPTLMGGEFGDEDERLITRLENTQYDAANGMDDEEDFNNSPALGNNSPWNSKPPATQETKSENPPPQASQ

SEQ ID NO: 798944 - protein, 331 aa, Homo sapiens; identical to SEQ ID NO: 798939

SEQ ID NO: 798945 - protein, 349 aa, Homo sapiens
MVQPEYRIYEMNKRLQSRTEDSDNLWWDAFATEFFEDDATLTLSFCLEDGPKRYTIGRTLIPRYFSTVFEGGVTDLYYILKHSKESYHNSSITVDCDQCTMVTQHGKPMFTKVCTEGRLILEFTFDDLMRIKTWHFTIRQYRELVPRSILAMHAQDPQVLDQLSKNITRMGLTNFTLNYLRLCVILEPMQELMSRHKTYNLSPRDCLKTCLFQKWQRMVAPPAEPTRQPTTKRRKRKNSTSSTSNSSAGNNANSTGSKKKTTAANLSLSSQVPDVMVVGEPTLMGGEFGDEDERLITRLENTQYDAANGMDDEEDFNNSPALGNNSPWNSKPPATQETKSENPPPQASQ

SEQ ID NO: 798946 - protein, 116 aa, Homo sapiens
MIICYISWSTLHFRCHIIGNYDDDDDDDDDTLILDSISKLNNDSDNLWWDAFATEFFEDDATLTLSFCLEDGPKRYRTKNLRPIGEKMNINGKWCCCQNLLFGDWRRELFYTIKNY

SEQ ID NO: 798947 - protein, 331 aa, Homo sapiens; identical to SEQ ID NO: 798939

SEQ ID NO: 798948 - protein, 192 aa, Homo sapiens
MSSTPHDPFYSSPFGPFYRRHTPYMVQPEYRIYEMNKRLQSRTEDSDNLWWDAFATEFFEDDATLTLSFCLEDGPKRYTIGRTLIPRYFSTVFEGGVTDLYYILKHSKESYHNSSITVDCDQCTMVTQHGKPMFTKVCTEGRLILEFTFDDLMRIKTWHFTIRQYRELVPRSILAMHVVCNIGANAGTDVET

SEQ ID NO: 798949 - protein, 359 aa, Homo sapiens
MSSTPHDPFYSSPFGPFYRRHTPYMVQPEYRIYEMNKRLQSRTEGHIIGNYDDDDDDDDDTLILDSISKLNNDSDNLWWDAFATEFFEDDATLTLSFCLEDGPKRYTIGRTLIPRYFSTVFEGGVTDLYYILKHSKESYHNSSITVDCDQCTMVTQHGKPMFTKVCTEGRLILEFTFDDLMRIKTWHFTIRQYRELVPRSILAMHAQDPQVLDQLSKNITRMGLTNFTLNYLRLCVILEPMQELMSRHKTYNLSPRDCLKTCLFQKWQRMVAPPAEPTRQPTTKRRKRKNSTSSTSNSSAGNNANSTGSKKKTTAANLSLSSQVPGLGAIPNCSLNPGRDGDLCHSTAVTPSGQFKEKH

SEQ ID NO: 798950 - protein, 257 aa, Homo sapiens
  misc_feature (8)..(8): Xaa can be any naturally occurring amino acid
FYKESNMXCFLFQFCLFYSIGRTLIPRYFSTVFEGGVTDLYYILKHSKESYHNSSITVDCDQCTMVTQHGKPMFTKVCTEGRLILEFTFDDLMRIKTWHFTIRQYRELVPRSILAMHAQDPQVLDQLSKNITRMGLTNFTLNYLRLCVILEPMQELMSRLPEDLLVSEVAEDGGSASRTHKATNNQTEKKEKFHQQHFQQQRWEQCKQHWQQEEDHSCKPESVQSGTWARSDPELQPQPWEGWRPVSFNSSDPFWPI

SEQ ID NO: 798951 - protein, 744 aa, Homo sapiens
MDSVAFEDVAVNFTHEEWALLGPSQKNLYRDVMRETIRNLNCIGMKWENQNIDDQHQNLRRNPRCDVVERFGKSKDGSQCGETLSQIRNSIVNKNTPARVDACGSSVNGEVIMGHSSLNCYIRVDTGHKHRECHEYAEKSYTHKQCGKGLSYRHSFQTCERPHTGKKPYDCKECGKTFSSPGNLRRHMVVKGGDGPYKCELCGKAFFWPSLLRMHERTHTGEKPYECKQCSKAFPVYSSYLRHEKIHTGEKPYECKQCSKAFPDYSSYLRHERTHTGEKPYKCKQCGKAFSVSGSLRVHERIHTGEKPYTCKQCGKAFCHLGSFQRHMIMHSGDGPHKCKICGKGFDFPGSARIHEGTHTLEKPYECKQCGKLLSHRSSFRRHMMAHTGDGPHKCTVCGKAFDSPSVFQRHERTHTGEKPYECKQCGKAFRTSSSLRKHETTHTGEQPYKCKCGKAFSDLFSFQSHETTHSEEEPYECKECGKAFSSFKYFCRHERTHSEEKSYECQICGKAFSRFSYLKTHERTHTAEKPYECKQCRKAFFWPSFLLRHERTHTGERPYECKHCGKAFSRSSFCREHERTHTGEKPYEYSVTFEDVAVNFTQEEWTLLDPSQKKLYRDVMWETFRNLATIGTKQKEWNIEEQYKNQGRNLRNHMVERLCESKEGSHGGEGFSQIANLSLNKKTPSGGKLWESSVCGKVLSHHSSLNRHIRSYTRHKLYKCQEYGEKPYKCKKCGKPFSYLQSL

SEQ ID NO: 798952 - protein, 80 aa, Homo sapiens
RVPENCQSGARQRGGCDVPGASGLFTLVTSVPYSVTERRPGTSVVAFVALGPTLTTGVGRTRDTAQPGNGPVLWNFLGLP

SEQ ID NO: 798953 - protein, 154 aa, Homo sapiens
MALCYGTFWGYPKMLEAANLMEGLVDIGPWVTLPRGQPEVLEWGLPKDQDSVAFEDVAVNFTHEEWALLGPSQKNLYRDVMRETIRNLNCIGMKWENQNIDDQHQNLRRNPRLSETWLQNFILIHYGHLVALSDGGLLQFSTGQGLPVTQAGVQ

SEQ ID NO: 798954 - protein, 617 aa, Homo sapiens
MFQDSVAFEDVAVNFTHEEWALLGPSQKNLYRDVMRETIRNLNCIGMKWENQNIDDQHQNLRRNPRCDVVERFGKSKDGSQCGETLSQIRNSIVNKNTPARVDACGSSVNGEVIMGHSSLNCYIRVDTGHKHRECHEYAEKSYTHKQCGKGLSYRHSFQTCERPHTGKKPYDCKECGKTFSSPGNLRRHMVVKGGDGPYKCELCGKAFFWPSLLRMHERTHTGEKPYECKQCSKAFPVYSSYLRHEKIHTGEKPYECKQCSKAFPDYSSYLRHERTHTGEKPYKCKQCGKAFSVSGSLRVHERIHTGEKPYTCKQCGKAFCHLGSFQRHMIMHSGDGPHKCKICGKGFDFPGSARIHEGTHTLEKPYECKQCGKLLSHRSSFRRHMMAHTGDGPHKCTVCGKAFDSPSVFQRHERTHTGEKPYECKQCGKAFRTSSSLRKHETTHTGEQPYKCKCGKAFSDLFSFQSHETTHSEEEPYECKECGKAFSSFKYFCRHERTHSEEKSYECQICGKAFSRFSYLKTHERTHTAEKPYECKQCRKAFFWPSFLLRHERTHTGERPYECKHCGKAFSRSSFCREHERTHTGEKPYECKECGKAFSSLSSFNRHKRTHWKDIL

SEQ ID NO: 798955 - protein, 157 aa, Homo sapiens
MALCYGTFWGYPKMLEAANLMEGLVDIGPWVTLPRGQPEVLEWGLPKDQDSVAFEDVAVNFTHEEWALLGPSQKNLYRDVMRETIRNLNCIGMKWENQNIDDQHQNLRRNPRVAACYMQEDWFQYTLSIPKSTDASSFIKWNIRMYLPTFSVYSINV

SEQ ID NO: 798956 - protein, 121 aa, Homo sapiens
MFQDSVAFEDVAVNFTHEEWALLGPSQKNLYRDVMRETIRNLNCIGMKWENQNIDDQHQNLRRNPREVACHIAKDWSQYTGCPHLPNSLFPFILSELCKYSATFSGFFKLTFAKKKSITQR

SEQ ID NO: 798957 - protein, 323 aa, Homo sapiens
MKPVHERSQECLPPKKRDLPVTSEDMGRTTSCSTNHTPSSDASEWSRGVVVAGQSQAGARVSLGGDGAEAITGLTVDQYGMLYKVAVPPATFSPTGLPSVVNMSPLPPTFNVASSLIQHPGIHYPPLHYAQLPSTSLQFIGSPYSLPYAVPPNFLPSPLLSPSANLATSHLPHFVPYASLLAEGATPPPQAPSPAHSFNKAPSATSPSGQLPHHSSTQPLDLAPGRMPIYYQMSRLPAGYTLHETPPAGASPVLTPQESQSALEAAAANGGQRPRERNLVRRESEALDSPNSKGEGQGLVPVVECVVDGQLFSGSQTPRVEVA

SEQ ID NO: 798958 - protein, 140 aa, Homo sapiens
MKPVHERSQECLPPKKRDLPVTSEDMGRTTSCSTNHTPSSDASEWSRGVVVAGQSQAGARVSLGGDGAEAITGLTVDQYGMLYKVAVPPATFSPTGLPSVVNMSPLPPTFNVASSLIQHPGIHYPPLHYAQRSWTVHDPG

SEQ ID NO: 798959 - protein, 1687 aa, Homo sapiens [sequence omitted]

SEQ ID NO: 798960 - protein, 104 aa, Homo sapiens
KLFILTNKFMGGGGGGGGGGGGGGGDGGGRGGGGGGGGGGGGEERRAKQKFQVVKHVRRHHPDQADPNQGVGKDPTTPTVHLHDVQLEDPSPPAPAAPHTGPEG

SEQ ID NO: 798961 - protein, 1687 aa, Homo sapiens [sequence omitted]

SEQ ID NO: 798962 - protein, 1645 aa, Homo sapiens
MTDPLLDSQPASSTGEMDGLCPELLLIPPPLSNRGILGPVQSPCPSRDPAPIPTEPGCLLVEATATEEGPGNMEIIVETVAGTLTPGAPGETPAPKLPPGEREPSQEAGTPLPGQETAEEENVEKEEKSDTQKDSQKAVDKGQGAQRLEGDVVSGTESLFKTHMCPECKRCFKKRTHLVEHLHLHFPDPSLQCPNCQKFFTSKSKLKTHLLRELGEKAHHCPLCHYSAVERNALNRHMASMHEDISNFYSDTYACPVCREEFRLSQALKEHLKSHTAAAAAEPLPLRCFQEGCSYAAPDRKAFIKHLKETHGVRAVECRHHSCPMLFATAEAMEAHHKSHYAFHCPHCDFACSNKHLFRKHKKQGHPGSEELRCTFCPFATFNPVAYQDHVGKMHAHEKIHQCPECNFATAHKRVLIRHMLLHTGEKPHKCELCDFTCRDVSYLSKHMLTHSNTKDYMCTECGYVTKWKHYLRVHMRKHAGDLRYQCNQCSYRCHRADQLSSHKLRHQGKSLMCEVCAFACKRKYELQKHMASQHHPGTPAPLYPCHYCSYQSRHKQAVLSHENCKHTRLREFHCALCDYRTFSNTTLLFHKRKAHGYVPGDQAWQLRYASQEPEGAMQGPTPPPDSEPSNQLSARPEGPGHEPGTVVDPSLDQALPEMSEEVNTGRQEGSEAPHGGDLGGSPSPAEVEEGSCTLHLEALGVELESVTEPPLEEVTETAPMEFRPLGLEGPDGLEGPELSSFEGIGTSDLGAEENPLLEKPVSEPSTNPPSLEEAPNNWVGTFKTTPPAETAPLPPLPESESLLKALRRQDKEQAEALVLEGRVQMVVIQGEGRAFRCPHCPFITRREKALNLHSRTGCQGRREPLLCPECGASFKQQRGLSTHLLKKCPVLLRKNKGLPRPDSPIPLQPVLPGTQASEDTESGKPPPASQEAELLLPKDAPLELPREPEETEEPLATVSGSPVPPAGNSLPTEAPKKHCFDPVPPAGNSSPTEAPKKHHLDPVPPAGNSSPTEALKKHRFEQGKFHCNSCPFLCSRLSSITSHVAEGCRGGRGGGGKRGTPQTQPDVSPLSNGDSAPPKNGSTESSSGDGDTVLVQKQKGARFSCPTCPFSCQQERALRTHQIRGCHLQCGDCGFTCKQSRCMQQHRRLKHEGVKPHQCPFCDFSTTRRYRLEAHQSRHTGIGRIPCSSCPQTFGTNSKLRLHRLRVHDKTPTHFCPLCDYSGYLRHDITRHVNSCHQGTPAFACSQCEAQFSSETALKQHALRRHPEPAQPAPGSPAETTEGPLHCSRCGLLCPSPASLRGHTRKQHPRLECGACQEAFPSRLALDEHRRQQHFSHRCQLCDFAARERVGLVKHYLEQHEETSAAVAASDGDGDAGQPPLHCPFCDFTCRHQLVLDHHVKGHGGTRLYKCTDCAYSTKNRQKITWHSRIHTGEKPYHCHLCPYACADPSRLKYHMRIHKEERKYLCPECGYKCKWVNQLKYHMTKHTGLKPYQCPECEYCTNRADALRVHQETRHREARAFMCEQCGKAFKTRFLLRTHLRKHSEAKPYVCNVCHRAFRWAAGLRHHALTHTDRHPFFCRLCNYKAKQKFQVVKHVRRHHPDQADPNQGVGKDPTTPTVHLHDVQLEDPSPPAPAAPHTGPEG

SEQ ID NO: 798963 - protein, 189 aa, Homo sapiens
MRIHKEERKYLCPECGYKCKWVNQLKYHMTKHTGLKPYQCPECEYCTNRADALRVHQETRHREARAFMCEQCGKAFKTRFLLRTHLRKHSEAKPYVCNVCHRAFRWAAGLRHHALTHTDRHPFFCRLCNYKAKQKFQVVKHVRRHHPDQADPNQGVGKDPTTPTVHLHDVQLEDPSPPAPAAPHTGPEG

SEQ ID NO: 798964 - protein, 806 aa, Homo sapiens
MTDPLLDSQPASSTGEMDGLCPELLLIPPPLSNRGILGPVQSPCPSRDPAPIPTEPGCLLVEATATEEGPGNMEIIVETVAGTLTPGAPGETPAPKLPPGEREPSQEAGTPLPGQETAEEENVEKEEKSDTQKDSQKAVDKGQGAQRLEGDVVSGTESLFKTHMCPECKRCFKKRTHLVEHLHLHFPDPSLQCPNCQKFFTSKSKLKTHLLRELGEKAHHCPLCHYSAVERNALNRHMASMHEDISNFYSDTYACPVCREEFRLSQALKEHLKSHTAAAAAEPLPLRCFQEGCSYAAPDRKAFIKHLKETHGVRAVECRHHSCPMLFATAEAMEAHHKSHYAFHCPHCDFACSNKHLFRKHKKQGHPGSEELRCTFCPFATFNPVAYQDHVGKMHAHEKIHQCPECNFATAHKRVLIRHMLLHTGEKPHKCELCDFTCRDVSYLSKHMLTHSNTKDYMCTECGYVTKWKHYLRVHMRKHAGDLRYQCNQCSYRCHRADQLSSHKLRHQGKSLMCEVCAFACKRKYELQKHMASQHHPGTPAPLYPCHYCSYQSRHKQAVLSHENCKHTRLREFHCALCDYRTFSNTTLLFHKRKAHGYVPGDQAWQLRYASQEPEGAMQGPTPPPDSEPSNQLSARPEGPGHEPGTVVDPSLDQALPEMSEEVNTGRQEGSEAPHGGDLGGSPSPAEVEEGSCTLHLEALGVELESVTEPPLEEVTETAPMEFRPLGLEGPDGLEGPELSSFEGIGTSDLGAEENPLLEKPVSEPSTNPPSLEEAPNNWVGTFKTTPLLRQHPCPHYLSQSHYSRP

SEQ ID NO: 798965 - protein, 1687 aa, Homo sapiens [sequence omitted]

SEQ ID NO: 798966 - protein, 1687 aa, Homo sapiens [sequence omitted]

SEQ ID NO: 798967 - protein, 1687 aa, Homo sapiens [sequence omitted]

SEQ ID NO: 798968 - protein, 1503 aa, Homo sapiens
MTDPLLDSQPASSTGEMDGLCPELLLIPPPLSNRGILGPVQSPCPSRDPAPIPTEPGCLLVEATATEEGPGNMEIIVETVAGTLTPGAPGETPAPKLPPGEREPSQEAGTPLPGQETAEEENVEKEEKSDTQKDSQKAVDKGQGAQRLEGDVVSGTESLFKTHMCPECKRCFKKRTHLVEHLHLHFPDPSLQCPNCQKFFTSKSKLKTHLLRELGEKAHHCPLCHYSAVERNALNRHMASMHEDISNFYSDTYACPVCREEFRLSQALKEHLKSHTAAAAAEPLPLRCFQEGCSYAAPDRKAFIKHLKETHGVRAVECRHHSCPMLFATAEAMEAHHKSHYAFHCPHCDFACSNKHLFRKHKKQGHPGSEELRCTFCPFATFNPVAYQDHVGKMHAHEKIHQCPECNFATAHKRVLIRHMLLHTGEKPHKCELCDFTCRDVSYLSKHMLTHSNTKDYMCTECGYVTKWKHYLRVHMRKHAGDLRYQCNQCSYRCHRADQLSSHKLRHQGKSLMCEVCAFACKRKYELQKHMASQHHPGTPAPLYPCHYCSYQSRHKQAVLSHENCKHTRLREFHCALCDYRTFSNTTLLFHKRKAHGYVPGDQAWQLRYASQEPEGAMQGPTPPPDSEPSNQLSARPEGPGHEPGTVVDPSLDQALPEMSEEVNTGRQEGSEAPHGGDLGGSPSPAEVEEGSCTLHLEALGVELESVTEPPLEEVTETAPMEFRPLGLEGPDGLEGPELSSFEGIGTSDLGAEENPLLEKPVSEPSTNPPSLEEAPNNWVGTFKTTPPAETAPLPPLPESESLLKALRRQDKEQAEALVLEGRVQMVVIQGEGRAFRCPHCPFITRREKALNLHSRTGCQGRREPLLCPECGASFKQQRGLSTHLLKKCPVLLRKNKGLPRPDSPIPLQPVLPGTQASEDTESGKPPPASQEAELLLPKDAPLELPREPEETEEPLATVSGSPVPPAGNSLPTEAPKKHCFDPVPPAGNSSPTEAPKKHHLDPVPPAGNSSPTEALKKHRFEQGKFHCNSCPFLCSRLSSITSHVAEGCRGGRGGGGKRGTPQTQPDVSPLSNGDSAPPKNGSTESSSGDGDTVLVQKQKGARFSCPTCPFSCQQERALRTHQIRGCPLEESGELHCSLCPFTAPAATALRLHQKRRHPTAAPARGPRPHLQCGDCGFTCKQSRCMQQHRRLKHEGVKPHQCPFCDFSTTRRYRLEAHQSRHTGIGRIPCSSCPQTFGTNSKLRLHRLRVHDKTPTHFCPLCDYSGYLRHDITRHVNSCHQGTPAFACSQCEAQFSSETALKQHALRRHPEPAQPAPGSPAETTEGPLHCSRCGLLCPSPASLRGHTRKQHPRLECGACQEAFPSRLALDEHRRQQHFSHRCQLCDFAARERVGLVKHYLEQHEETSAAVAASDGDGDAGQPPLHCPFCDFTCRHQLVLDHHVKGHGGTRLYKCTDCAYSTKNRQKITWHSRIHTGEKPYHCHLCPYACADPSRLKVMSEDMG

SEQ ID NO: 798969 - protein, 105 aa, Homo sapiens
MLIEGWRSGAQPSTKLLAVCPARASCVLGSNPESKTFLTPPPNPGLSLLLQSLEILSSILTLLPRNCSQGLSKNPVSTTLGLAGLSRSDLVFPCPSFLCITYFTH

SEQ ID NO: 798970 - protein, 243 aa, Homo sapiens
GHSGDSDWLGRWADWLGRWVGEFPLPRAIGQVPKLSCMDSQQEDLRFPGMWVSLYFGILGLCSVITGGCIIFLHWRKNLRREEHAQQWVEVMRAATFTYSPLLYWINKRRRYGMNAAINTGPAPAVTKTETEVQNPDVLWDLDIPEGRSHADQDSNPKAEAPAPLQPALQLAPQQPQARSPFPLPIFQEVPFAPPLCNLPPLLNHSVSYPLATCPERNVLFHSLLNLAQEDHSFNAKPFPSEL

SEQ ID NO: 798971 - protein, 152 aa, Homo sapiens
MRAATFTYSPLLYWINKRRRYGMNAAINTGPAPAVTKTETEVQNPDVLWDLDIPEGRSHADQDSNPKAEAPAPLQPALQLAPQQPQARSPFPLPIFQEVPFAPPLCNLPPLLNHSVSYPLATCPERNVLFHSLLNLAQEDHSFNAKPFPSEL

SEQ ID NO: 798972 - protein, 207 aa, Homo sapiens
MWLPPHHLRAQFTLWVSLYFGILGLCSVITGGCIIFLHWRKNLRREEHAQQWVEVMRAATFTYSPLLYWINKRRRYGMNAAINTGPAPAVTKTETEVQNPDVLWDLDIPEGRSHADQDSNPKAEAPAPLQPALQLAPQQPQARSPFPLPIFQEVPFAPPLCNLPPLLNHSVSYPLATCPERNVLFHSLLNLAQEDHSFNAKPFPSEL

SEQ ID NO: 798973 - protein, 130 aa, Homo sapiens
MNAAINTGPAPAVTKTETEVQNPDVLWDLDIPEGRSHADQDSNPKAEAPAPLQPALQLAPQQPQARSPFPLPIFQEVPFAPPLCNLPPLLNHSVSYPLATCPERNVLFHSLLNLAQEDHSFNAKPFPSEL

SEQ ID NO: 798974 - protein, 72 aa, Homo sapiens
SVPLSVSNQKKNLTVRTRVRGCEDCRLLARPTPSSVRRWTGKATTVAWPYFLILTAFVCHERLHDLEPVNLR

SEQ ID NO: 798975 - protein, 105 aa, Homo sapiens
MFHSAAVPPAWSPGELTRVKRLPGRLVLAAAQPTCANTATGTGKSLERVEKHQTLNRCRERSDSCRARRGPYTKATTIIGLGRDGGKRGAKSPKHIHSLMCFSEL

SEQ ID NO: 798976 - protein, 82 aa, Homo sapiens
SMKEKLSLTKVKLLERELLLRLSRLPPLLKARSLQLGDVSEFMSDASDFRWVTGISTESSGPARSQEAGQEPAAHSAATAHS

SEQ ID NO: 798977 - protein, 37 aa, Homo sapiens
MGSLADISETEDSMEASCYCNVYIKSKVPQVKTMRKL

SEQ ID NO: 798978 - protein, 37 aa, Homo sapiens; identical to SEQ ID NO: 798977

SEQ ID NO: 798979 - protein, 199 aa, Homo sapiens
MNRGGGSPSAAANYLLCTNCRKVLRKDKRIRVSQPLTRGPSAFIPEKEVVQANTVDERTNFLVEEYSTSGRLDNITQVMSLHTQYLESFLRSQFYMLRMDGPLPLPYRHYIAIMAAARHQCSYLINMHVDEFLKTGGIAEWLNGLEYVPQRLKNLNEINKLLAHRPWLITKEHIQKLVKTGENNWSLPELVHACGTSWH

SEQ ID NO: 798980 - protein, 121 aa, Homo sapiens
MSLHTQYLESFLRSQFYMLRMDGPLPLPYRHYIAIMAAARHQCSYLINMHVDEFLKTGGIAEWLNGLEYVPQRLKNLNEINKLLAHRPWLITKEHIQKLVKTGENNWSLPELVHACGTSWH

SEQ ID NO: 798981 - protein, 122 aa, Homo sapiens
MTSPEIASLSWGQMKVKGSNTTYKDCKVWPGGSRTWDWRETGTEHSPGVQPADVKEVVEKGVQTLVIGRGMSEALKVPSSTVEYLKKHGIDVRVLQTEQAVKEYNALVAQGVRVGGVFHSTC

SEQ ID NO: 798982 - protein, 122 aa, Homo sapiens; identical to SEQ ID NO: 798981

SEQ ID NO: 798983 - protein, 104 aa, Homo sapiens
MTSPEIASLSWGQMKVKGSNTTYKDCKVWPGGSRTWDWRETGTEHSPGVQPADVKEVVEKGVQTLVIGRGMSEALKAPTQQLPSGVHVRAVVQFHLATASWHIL

SEQ ID NO: 798984 - protein, 122 aa, Homo sapiens; identical to SEQ ID NO: 798981

SEQ ID NO: 798985 - protein, 122 aa, Homo sapiens; identical to SEQ ID NO: 798981

SEQ ID NO: 798986 - protein, 141 aa, Homo sapiens
MRVEPSWPNQLLKTSVKFLMTSPEIASLSWGQMKVKGSNTTYKDCKVWPGGSRTWDWRETGTEHSPGVQPADVKEVVEKGVQTLVIGRGMSEALKVPSSTVEYLKKHGIDVRVLQTEQAVKEYNALVAQGVRVGGVFHSTC

SEQ ID NO: 798987 - protein, 122 aa, Homo sapiens; identical to SEQ ID NO: 798981

SEQ ID NO: 798988 - protein, 122 aa, Homo sapiens; identical to SEQ ID NO: 798981

SEQ ID NO: 798989 - protein, 151 aa, Homo sapiens
ADQLQGVFPGAVGERRSRSSAGSTSVKFLMTSPEIASLSWGQMKVKGSNTTYKDCKVWPGGSRTWDWRETGTEHSPGVQPADVKEVVEKGVQTLVIGRGMSEALKVPSSTVEYLKKHGIDVRVLQTEQAVKEYNALVAQGVRVGGVFHSTC

SEQ ID NO: 798990 - protein, 104 aa, Homo sapiens; identical to SEQ ID NO: 798983

SEQ ID NO: 798991 - protein, 117 aa, Homo sapiens
ADQLQGVFPGAVGERRSRSSAGSTSVKFLMTSPEIASLSWGQMKVKGSNTTYKDCKVWPGGSRTWDWRETGTEHSPGVQPADVKEVVEKGVQTLVIGRGMSEALKDGIQGAQLDLNC

SEQ ID NO: 798992 - protein, 122 aa, Homo sapiens; identical to SEQ ID NO: 798981

SEQ ID NO: 798993 - protein, 196 aa, Homo sapiens
LDRSSAGSFWRLGSPRPVGSHLTSVKFLMTSPEIASLSWGQMKVKGSNTTYKDCKVWPGGSRTWDWRETGTESLTLLPRLECSGAISAHCNLHLPGSCHSPASASQVAGTTGACHHTQHSPGVQPADVKEVVEKGVQTLVIGRGMSEALKVPSSTVEYLKKHGIDVRVLQTEQAVKEYNALVAQGVRVGGVFHSTC

SEQ ID NO: 798994 - protein, 1670 aa, Homo sapiens [sequence omitted]

SEQ ID NO: 798995 - protein, 1635 aa, Homo sapiens
MATAVETEACQPTDASWESGGGGDDEMKQALPELESSQQNGGGGGLNIAEPSGGAGREENAGAEAAQSLSHEQPQDSSEAGAAALPRGPEEPERPVRRSFQIPRKSREKKALFQPLTPGSREFEDVVNILHSSYLEPTSVTNFNYRRACLVHNELLEKEFTEKRRELKFDGRLDKELSESYAFLMVDRYQVQTICEKGLHVGQSKITILGSPSMGVYLSRYADLLQANPLDTGAMGDVVIFKIMKGKIKSIYDPMGVKSLESMLNKSALDPTPKHECHVSKNANRITSLLAYRAYELTQYYFYEYGFDELRRRPRHVCPYAVVSFTYKDDIQTPKFVPSSRSNSFNTDEKHRPEKLDVETVMSIDHLKQKIPPALFYKETYLGPNEVLKNGMYCSLYEVVEKTRIGSNMESLLQKLDREKLVLVKPLGDRGYLFLLSPYQMVPPYEYQTAKSRVLHALFLFQEPRSIVTSQKGSTNAAPQERHESMPDVLKIAQFLQFSLIQCRKEFKNISAINFHSVVEKYVSEFFKRGFGSGKREFIMFPYDSRLDDKKFLYSAPRNKSHIDTCLHAYIFRPEVYQLPICKLKELFEENRKLQQFSPLSDYEGQEEEMNGTKMKFGKRNNSRGEAIISGKQRSSHSLDYDKDRVKELINLIQCRKKSVGGDSDTEDMRSKTVLKRKLEDLPENMRKLAKTSNLSENCHLYEESPQPIGSLGHDADLRRQQQDTCNSGIADIHRLFNWLSETLANARHSDASLTDTVNKALGLSTDDAYEELRQKHEYELNSTPDKKDYEQPTCAKVENAQFKGTQSLLLEVDATSKYSVAISTSEVGTDHKLHLKEDPNLISVNNFEDCSLCPSVPIEHGFRRQQSKSNNVEETEIHWKLIPITGGNARSPEDQLGKHGEKQTPGMKSPEEQLVCVPPQEAFPNDPRVINRQRSSDYQFPSSPFTDTLKGTTEDDVLTGQVEEQCVPAAEAEPPAVSETTERTVLGEYNLFSRKIEEILKQKNVSYVSRVSTPIFSTQEKMKRLSEFIYSKTSKAGVQEFVDGLHEKLNTIIIKASAKGGNLPPVSPNDSGAKIASNPLERHVIPVSSSDFNNKHLLEPLCSDPLKDTNSDEQHSTSALTEVEMNQPQHATELMVTSDHIVPGDMAREPVEETTKSPSDVNISAQPALSNFISQLEPEVFNSLVKIMKDVQKNTVKFYIHEEEESVLCKEIKEYLIKLGNTECHPEQFLERRSKLDKLLIIIQNEDIAGFIHKIPGLVTLKKLPCVSFAGVDSLDDVKNHTYNELFVSGGFIVSDESILNPEVVTVENLKNFLTFLEELSTPEGKWQWKVHCKFQKKLKELGRLNAKALSLLTLLNVYQKKHLVEILSYHNCDSQTRNAPELDCLIRLQAQNIQQRHIVFLTEKNIKMLSSYTDNGIVVATAEDFMQNFKNLVGYHNSITEENLPQLGANENLESQSALLENDEKDEEDMSLDSGDEISHIEVCSNFHSEIWEKETKGSRGTDQKKNTQIELQSSPDVQNSLLEDKTYLDSEERTSIDIVCSEGENSNSTEQDSYSNFQVYHSQLNMSHQFSHFNVLTHQTFLGTPYALSSSQSQENENYFLSAYTESLDRDKSPPPLSWGKSDSSRPYSQEK

SEQ ID NO: 798996 - protein, 1397 aa, Homo sapiens
IPRKSREKKALFQPLTPGSREFEDVVNILHSSYLEPTSVTNFNYRRACLVHNELLEKEFTEKRRELKFDGRLDKELSESYAFLMVDRYQVQTICEKGLHVGQSKITILGSPSMDLEKLDVETVMSIDHLKQKIPPALFYKETYLGPNEVLKNGMYCSLYEVVEKTRIGSNMESLLQKLDREKLVLVKPLGDRGYLFLLSPYQMVPPYEYQTAKSRVLHALFLFQEPRSIVTSQKGSTNAAPQERHESMPDVLKIAQFLQFSLIQCRKEFKNISAINFHSVVEKYVSEFFKRGFGSGKREFIMFPYDSRLDDKKFLYSAPRNKSHIDTCLHAYIFRPEVYQLPICKLKELFEENRKLQQFSPLSDYEGQEEEMNGTKMKFGKRNNSRGEAIISGKQRSSHSLDYDKDRVKELINLIQCRKKSVGGDSDTEDMRSKTVLKRKLEDLPENMRKLAKTSNLSENCHLYEESPQPIGSLGHDADLRRQQQDTCNSGIADIHRLFNWLSETLANARHSDASLTDTVNKALGLSTDDAYEELRQKHEYELNSTPDKKDYEQPTCAKVENAQFKGTQSLLLEVDATSKYSVAISTSEVGTDHKLHLKEDPNLISVNNFEDCSLCPSVPIEHGFRRQQSKSNNVEETEIHWKLIPITGGNARSPEDQLGKHGEKQTPGMKSPEEQLVCVPPQEAFPNDPRVINRQRSSDYQFPSSPFTDTLKGTTEDDVLTGQVEEQCVPAAEAEPPAVSETTERTVLGEYNLFSRKIEEILKQKNVSYVSRVSTPIFSTQEKMKRLSEFIYSKTSKAGVQEFVDGLHEKLNTIIIKASAKGGNLPPVSPNDSGAKIASNPLERHVIPVSSSDFNNKHLLEPLCSDPLKDTNSDEQHSTSALTEVEMNQPQHATELMVTSDHIVPGDMAREPVEETTKSPSDVNISAQPALSNFISQLEPEVFNSLVKIMKDVQKNTVKFYIHEEEESVLCKEIKEYLIKLGNTECHPEQFLERRSKLDKLLIIIQNEDIAGFIHKIPGLVTLKKLPCVSFAGVDSLDDVKNHTYNELFVSGGFIVSDESILNPEVVTVENLKNFLTFLEELSTPEGKWQWKVHCKFQKKLKELGRLNAKALSLLTLLNVYQKKHLVEILSYHNCDSQTRNAPELDCLIRLQAQNIQQRHIVFLTEKNIKMLSSYTDNGIVVATAEDFMQNFKNLVGYHNSITEENLPQLGANENLESQSALLENDEKDEEDMSLDSGDEISHIEVCSNFHSEIWEKETKGSRGTDQKKNTQIELQSSPDVQNSLLEDKTYLDSEERTSIDIVCSEGENSNSTEQDSYSNFQVYHSQLNMSHQFSHFNVLTHQTFLGTPYALSSSQSQENENYFLSAYTESLDRDKSPPPLSWGKSDSSRPYSQEK

SEQ ID NO: 798997 - protein, 1609 aa, Homo sapiens
MATAVETEACQPTDASWESGGGGDDEMKQALPELESSQQNGGGGGLNIAEPSGGAGREENAGAEAAQSLSHEQPQDSSEAGAAALPRGPEEPERPVRRSFQIPRKSREKKALFQPLTPGSREFEDVVNILHSSYLEPTSVTNFNYRRACLVHNELLEKEFTEKRRELKFDGRLDKELSESYAFLMVDRYQVQTICEKGLHVGQSKITILGSPSMGVYLSRYADLLQANPLDTGAMGDVVIFKIMKGKIKSIYDPMGVKSLESMLNKSALDPTPKHECHVSKNANRITSLLAYRAYELTQYYFYEYGFDELRRRPRHVCPYAVVSFTYKDDIQTPKFVPSSRSNSFNTDRNIDKYNYTLWKGQLLNKGKLLCYISLRSATRAFLPIKLPEKLDVETVMSIDHLKQKIPPALFYKETYLGPNEVLKNGMYCSLYEVVEKTRIGSNMESLLQKLDREKLVLVKPLGDRGYLFLLSPYQMVPPYEYQTAKSRVLHALFLFQEPRSIVTSQKGSTNAAPQERHESMPDVLKIAQFLQFSLIQCRKEFKNISAINFHSVVEKYVSEFFKRGFGSGKREFIMFPYDSRLDDKKFLYSAPRNKSHIDTCLHAYIFRPEVYQLPICKLKELFEENRKLQQFSPLSDYEGQEEEMNGTKMKFGKRNNSRGEAIISGKQRSSHSLDYDKDRVKELINLIQCRKKSVGGDSDTEDMRSKTVLKRKLEDLPENMRKLAKTSNLSENCHLYEESPQPIGSLGHDADLRRQQQDTCNSGIADIHRLFNWLSETLANARHSDASLTDTVNKALGLSTDDAYEELRQKHEYELNSTPDKKDYEQPTCAKVENAQFKGTQSLLLEVDATSKYSVAISTSEVGTDHKLHLKEDPNLISVNNFEDCSLCPSVPIEHGFRRQQSKSNNVEETEIHWKLIPITDTLKGTTEDDVLTGQVEEQCVPAAEAEPPAVSETTERTVLGEYNLFSRKIEEILKQKNVSYVSRVSTPIFSTQEKMKRLSEFIYSKTSKAGVQEFVDGLHEKLNTIIIKASAKGGNLPPVSPNDSGAKIASNPLERHVIPVSSSDFNNKHLLEPLCSDPLKDTNSDEQHSTSALTEVEMNQPQHATELMVTSDHIVPGDMAREPVEETTKSPSDVNISAQPALSNFISQLEPEVFNSLVKIMKDVQKNTVKFYIHEEEESVLCKEIKEYLIKLGNTECHPEQFLERRSKLDKLLIIIQNEDIAGFIHKIPGLVTLKKLPCVSFAGVDSLDDVKNHTYNELFVSGGFIVSDESILNPEVVTVENLKNFLTFLEELSTPEGKWQWKVHCKFQKKLKELGRLNAKALSLLTLLNVYQKKHLVEILSYHNCDSQTRNAPELDCLIRLQAQNIQQRHIVFLTEKNIKMLSSYTDNGIVVATAEDFMQNFKNLVGYHNSITEENLPQLGANENLESQSALLENDEKDEEDMSLDSGDEISHIEVCSNFHSEIWEKETKGSRGTDQKKNTQIELQSSPDVQNSLLEDKTYLDSEERTSIDIVCSEGENSNSTEQDSYSNFQVYHSQLNMSHQFSHFNVLTHQTFLGTPYALSSSQSQENENYFLSAYTESLDRDKSPPPLSWGKSDSSRPYSQEK

SEQ ID NO: 798998 - protein, 164 aa, Homo sapiens [sequence omitted]

SEQ ID NO: 798999 - protein, 352 aa, Homo sapiens
MATAVETEACQPTDASWESGGGGDDEMKQALPELESSQQNGGGGGLNIAEPSGGAGREENAGAEAAQSLSHEQPQDSSEAGAAALPRGPEEPERPVRRSFQIPRKSREKKALFQPLTPGSREFEDVVNILHSSYLEPTSVTNFNYRRACLVHNELLEKEFTEKRRELKFDGRLDKELSESYAFLMVDRYQVQTICEKGLHVGQSKITILGSPSMGVYLSRYADLLQANPLDTGAMGDVVIFKIMKGKIKSIYDPMGVKSLESMLNKSALDPTPKHECHVSKNANRITSLLAYRAYELTQYYFYEYGFDELRRRPRHVCPYAVVSFTYKDDIQTPKFVPSSRINSFFSDRNIL

SEQ ID NO: 799000 - protein, 89 aa, Homo sapiens
IEIKVRTKNPVHPQVLLDTEGVSLNIQCFFFVVVFLFFFGDGVSLCRPSWSTVVQSHCKLCLPGSHHSPASTSRMAGTTGTHHHAWLTN

SEQ ID NO: 799001 - protein, 192 aa, Homo sapiens
MATAVETEACQPTDASWESGGGGDDEMKQALPELESSQQNGGGGGLNIAEPSGGAGREENAGAEAAQSLSHEQPQDSSEAGAAALPRGPEEPERPVRRSFQIPRKSREKKALFQPLTPGSREFEDVVNILHSSYLEPTSVTNFNYRRACLVHNELLEKEFTEKRRELKFDGRLDKELSESYAFLMVDRYQVS

SEQ ID NO: 799002 - protein, 1233 aa, Homo sapiens [sequence omitted]

SEQ ID NO: 799003 - protein, 1233 aa, Homo sapiens [sequence omitted]

SEQ ID NO: 799004 - protein, 1512 aa, Homo sapiens [sequence omitted]

SEQ ID NO: 799005 - protein, 1512 aa, Homo sapiens [sequence omitted]

SEQ ID NO: 799006 - protein, 442 aa, Homo sapiens
MATAVETEACQPTDASWESGGGGDDEMKQALPELESSQQNGGGGGLNIAEPSGGAGREENAGAEAAQSLSHEQPQDSSEAGAAALPRGPEEPERPVRRSFQIPRKSREKKALFQPLTPGSREFEDVVNILHSSYLEPTSVTNFNYRRACLVHNELLEKEFTEKRRELKFDGRLDKELSESYAFLMVDRYQVQTICEKGLHVGQSKITILGSPSMGVYLSRYADLLQANPLDTGAMGDVVIFKIMKGKIKSIYDPMGVKSLESMLNKSALDPTPKHECHVSKNANRITSLLAYRAYELTQYYFYEYGFDELRRRPRHVCPYAVVSFTYKDDIQTPKFVPSSRSNSFNTDRNIDKYNYTLWKGQLLNKGKLLCYISLRSATRAFLPIKLPEKLDVETVMSIDHLKQKIPPALFYKETYLGPNEVLKNGMYCSLYEVVEKTRIVK

SEQ ID NO: 799007 - protein, 596 aa, Homo sapiens
MATAVETEACQPTDASWESGGGGDDEMKQALPELESSQQNGGGGGLNIAEPSGGAGREENAGAEAAQSLSHEQPQDSSEAGAAALPRGPEEPERPVRRSFQIPRKSREKKALFQPLTPGSREFEDVVNILHSSYLEPTSVTNFNYRRACLVHNELLEKEFTEKRRELKFDGRLDKELSESYAFLMVDRYQVQTICEKGLHVGQSKITILGSPSMGVYLSRYADLLQANPLDTGAMGDVVIFKIMKGKIKSIYDPMGVKSLESMLNKSALDPTPKHECHVSKNANRITSLLAYRAYELTQYYFYEYGFDELRRRPRHVCPYAVVSFTYKDDIQTPKFVPSSRSNSFNTDRNIDKYNYTLWKGQLLNKGKLLCYISLRSATRAFLPIKLPEKLDVETVMSIDHLKQKIPPALFYKETYLGPNEVLKNGMYCSLYEVVEKTRIGSNMESLLQKLDREKLVLVKPLGDRGYLFLLSPYQMVPPYEYQTAKSRVLHALFLFQEPRSIVTSQKGSTNAAPQERHESMPDVLKIAQFLQFSLIQCRKEFKNISAINFHSVVEKYVSEFFKRGFGSGKREFIMFPYDSRLDDKKFLYSAPTSYW

SEQ ID NO: 799008 - protein, 188 aa, Homo sapiens [sequence omitted]

SEQ ID NO: 799009 - protein, 227 aa, Homo sapiens
PTLNPNPQGIQKSSGAPKSPPLFSAPLAPPLRAERVCALCPSAAPPRSSLPPKVPPHLHFSLTPKYPEESQYFLLSAASQILTVLSQWFSDFILPLGYLFGTLMSSPPSGHPDLTLTASPRLTLVLIDEPGVPGVKWLTVTDFIPSHHSEVVLPAWEQPRHCVLVAEDTLGCRVPGGCACIPLHDDVVSLTVLLHIWAVVPAICQVRWKIRWGKSQAAGVLESENYF

SEQ ID NO: 799010 - protein, 80 aa, Homo sapiens
VKWLTVTDFIPSHHSEVVLPAWEQPRHCVLVAEDTLGCRVPGGCACIPLHDDVVSLTVLLHIWAVVPGQSHCVGDFLKQP

SEQ ID NO: 799011 - protein, 357 aa, Homo sapiens
MTALPGPLWLLGLALCALGGGGPGLRPPPGCPQRRLGARERRDVQREILAVLGLPGRPRPRAPPAASRLPASAPLFMLDLYHAMAGDDDEDGAPAERRLGRADLVMSFVNMVERDRALGHQEPHWKEFRFDLTQIPAGEAVTAAEFRIYKVPSIHLLNRTLHVSMFQVVQEQSNRESDLFFLDLQTLRAGDEGWLVLDVTAASDCWLLKRHKDLGLRLYVETEDGHSVDPGLAGLLGQRAPRSQQPFVVTFFRASPSPIRTPRAVRPLRRRQPKKSNELPQANRLPGIFDDVHGSHGRQVCRRHELYVSFQDLGWLDWVIAPQGYSAYYCEGECSFPLDSCMNATNHAILQSLEVQR

SEQ ID NO: 799012 - protein, 402 aa, Homo sapiens
MTALPGPLWLLGLALCALGGGGPGLRPPPGCPQRRLGARERRDVQREILAVLGLPGRPRPRAPPAASRLPASAPLFMLDLYHAMAGDDDEDGAPAERRLGRADLVMSFVNMVERDRALGHQEPHWKEFRFDLTQIPAGEAVTAAEFRIYKVPSIHLLNRTLHVSMFQVVQEQSNRESDLFFLDLQTLRAGDEGWLVLDVTAASDCWLLKRHKDLGLRLYVETEDGHSVDPGLAGLLGQRAPRSQQPFVVTFFRASPSPIRTPRAVRPLRRRQPKKSNELPQANRLPGIFDDVHGSHGRQVCRRHELYVSFQDLGWLDWVIAPQGYSAYYCEGECSFPLDSCMNATNHAILQSLVHLMKPDAVPKACCAPTKLSATSVLYYDSSNNVILRKHRNMVVKACGCH

SEQ ID NO: 799013 - protein, 402 aa, Homo sapiens; identical to SEQ ID NO: 799012

SEQ ID NO: 799014 - protein, 111 aa, Homo sapiens
GQERKGRAERVGACRLTGIARMADRAPRQPTSLGSSPQRCGSPPSAPPPPPDRGERIEDCLAPLCPPVVGGRGGCALSRFLPVDLSLLRSSRTAAVELVAGGVCRSPSQEN

SEQ ID NO: 799015 - protein, 157 aa, Homo sapiens
MPAQIVLLTVSEAEAEAESDESAGKWGRGGGRQAPPLPWVHGGSLPLVRRRPAVAGPLLWSWSQAVCAGRLVRRTSPRLTVREWTDTGIVPLRERSGTPDLQEVGSEASRTGAPPGGFLPGVELPTWDPRKIGVVVCFLLLLTLLGFLEFHTTVHMR

SEQ ID NO: 799016 - protein, 296 aa, Homo sapiens
MNRWYVKPLETSSSKVKAKTIVMIPDSQKLLRCELESLKSQLQAQTKAFEFLNHSVTMLEKESCLQQIKIQQLEEVLSPTGRQGEKEEHKWGMEQGRQELYGALTQGLQGLEKTLRDSEEMQRARTTRCLQLLAQEIRDSKKFLWEELELVREEVTFIYQKLQAQEDEISENLVNIQKMQKTQVKCRKILTKMKQQGHETAACPETEEIPQGASGCWKDDLQKELSDIWSAVHVLQNSIDSLTLCSGACPKASSLRGHKGHQCLSPPLPSWDSDSDSDQDLSQPPFSKSGRSFPPA

SEQ ID NO: 799017 - protein, 291 aa, Homo sapiens
MIPDSQKLLRCELESLKSQLQAQTKAFEFLNHSVTMLEKESCLQQIKIQQLEEVLSPTGRQGEKEEHKWGMEQGRQELYGALTQGLQGLEKTLRDSEEMQRARTTRCLQLLAQEIRDSKKFLWEELELVREEVTFIYQKLQAQEDEISENLVNIQKMQKTQVKCRKILTKMKQQGHETAACPETEEIPQGASGCWKDDLQKELSDIWSAVHVLQNSIDSLTLCSGACPKASSLRGHKGHQCLSPPLPSWDSDSDSDQDLSQPPFSKSGRSFPPGADPPQSPPPPISLLTCP

SEQ ID NO: 799018 - protein, 291 aa, Homo sapiens; identical to SEQ ID NO: 799017

SEQ ID NO: 799019 - protein, 229 aa, Homo sapiens [sequence omitted]

SEQ ID NO: 799020 - protein, 135 aa, Homo sapiens
MQKTQVKCRKILTKMKQQGHETAACPETEEIPQGASGCWKDDLQKELSDIWSAVHVLQNSIDSLTLCSGACPKASSLRGHKGHQCLSPPLPSWDSDSDSDQDLSQPPFSKSGRSFPPGADPPQSPPPPISLLTCP

SEQ ID NO: 799021 - protein, 214 aa, Homo sapiens
MNRWYVKPLETSSSKVKAKTIVMIPDSQKLLRCELESLKSQLQAQTKAFEFLNHSVTMLEKESCLQQIKIQQLEEVLSPTGRQGEKEEHKWGMEQGRQELYGALTQGLQGLEKTLRDSEEMQRARTTRCLQLLAQEIRDSKKFLWEELELVREEVTFIYQKLQAQEDEISENLVNIQKMQKTQVKCRKGLSQGLEPKRPQGAPVPEPSTPLLGL

SEQ ID NO: 799022 - protein, 141 aa, Homo sapiens
MNRWYVKPLETSSSKVKAKTIVMIPDSQKLLRCELESLKSQLQAQTKAFEFLNHSVTMLEKESCLQQIKIQQLEEVLSPTGRQGEKEEHKWGMEQGRQELYGALTQGLQGLEKTLRDSEEMQRARTTRCLQLLAQEIRDRS

SEQ ID NO: 799023 - protein, 313 aa, Homo sapiens
MNRWYVKPLETSSSKVKAKTIVMIPDSQKLLRCELESLKSQLQAQTKAFEFLNHSVTMLEKESCLQQIKIQQLEEVLSPTGRQGEKEEHKWGMEQGRQELYGALTQGLQGLEKTLRDSEEMQRARTTRCLQLLAQEIRDSKKFLWEELELVREEVTFIYQKLQAQEDEISENLVNIQKMQKTQVKCRKILTKMKQQGHETAACPETEEIPQGASGCWKDDLQKELSDIWSAVHVLQNSIDSLTLCSGACPKASSLRGHKGHQCLSPPLPSWDSDSDSDQDLSQPPFSKSGRSFPPGADPPQSPPPPISLLTCP

SEQ ID NO: 799024 - protein, 141 aa, Homo sapiens; identical to SEQ ID NO: 799022

SEQ ID NO: 799025 - protein, 203 aa, Homo sapiens
MIPDSQKLLRCELESLKSQLQAQTKAFEFLNHSVTMLEKESCLQQIKIQQLEEAQEDEISENLVNIQKMQKTQVKCRKILTKMKQQGHETAACPETEEIPQGASGCWKDDLQKELSDIWSAVHVLQNSIDSLTLCSGACPKASSLRGHKGHQCLSPPLPSWDSDSDSDQDLSQPPFSKSGRSFPPGADPPQSPPPPISLLTCP

SEQ ID NO: 799026 - protein, 127 aa, Homo sapiens
MNRWYVKPLETSSSKVKAKTIVMIPDSQKLLRCELESLKSQLQAQTKAFEFLNHSVTMLEKESCLQQIKIQQLEEVLSPTGRQGEKEEHKWGMEQGRQELYGALTQGLQGLEKTLRDSEGRMTSRRN

SEQ ID NO: 799027 - protein, 104 aa, Homo sapiens
MNRWYVALPRTRLWKRTAHWSRTPEPETLGCPASGDTVRTADCRPGWGSGPSPHEAAPSPSPDLQKQCCNDQDILKRHHNVAKVTPTRETPSMQKTTAIYCCGA

SEQ ID NO: 799028 - protein, 104 aa, Homo sapiens
MLHDCWGRGQNRGKLCSGGGTAPREHPEPEEHRDAADKEEDEVGDEEGSCRRERGRAEPHPGSSSASILSDPPPPTNPPSTILFLISLLTLSKGPLLPACSPEC

SEQ ID NO: 799029 - protein, 139 aa, Homo sapiens
QLARAGLGRPARSRGRWGGQSRFRPSLGWARSGRTGQQPHSHSEAPCPLPHFPPAHGARLGAAARAGLRSEPSGLPVKWRIGETFPSQAPPPHKPPTPTATSWRPQHTCRTWPCFWGSVAFGNERFRRNCPSDSRTQPY

SEQ ID NO: 799030 - protein, 81 aa, Homo sapiens
NLLEQGWVDRRAPGDGGGGSPGFGHRWGGLGAAAPGSNPTPTRRPPALSPTSPRPMVRGWEPPPGLDCVLTTQGVSNLAVP

SEQ ID NO: 799031 - protein, 544 aa, Homo sapiens
MRSRHPRRAISEGHKSEGTMPPNKEASGLSSSPAGLICLPPISEELQLVWTQAAQTSELDSNEHLLKTFSYFPYPSLADIALLCLRYGLQMEKVKTWFMAQRLRCGISWSSEEIEETRARVVYRRDQLHFKSLLSFTHHAGRPPEEVPPPPVPAPEQVGIGIGPPTLSKPTQTKGLKVEPEEPSQMPPLPQSHQKLKESLMTPGSGAFPYQSDFWQHLQSSGLSKEQAGRGPNQSHGIGTASWNHSTTVPQPQARDKPPPIALIASSCKEESASSVTPSSSSTSSSFQVLANGATAASKPLQPLGCVPQSVSPSEQALPPHLEPAWPQGLRHNSVPGRVGPTEYLSPDMQRQRKTKRKTKEQLAILKSFFLQCQWARREDYQKLEQITGLPRPEIIQWFGDTRYALKHGQLKWFRDNAVPGAPSFQDPAIPTPPPSTRSLNERAETPPLPIPPPPPDIQPLERYWAAHQQLRETDIPQLSQASRLSTQQVLDWFDSRLPQPAEVVVCLDEEEEEEEEELPEDDEEEEEEEEDDDDDDDDVIIQD

SEQ ID NO: 799032 - protein, 579 aa, Homo sapiens
NLLEQGWVDRRAPGDGGGGSPGFGHRWGGLGAAAPGSNPTPTRRPPALSPTSPRPMVRGWEPPPGLDCAISEGHKSEGTMPPNKEASGLSSSPAGLICLPPISEELQLVWTQAAQTSELDSNEHLLKTFSYFPYPSLADIALLCLRYGLQMEKVKTWFMAQRLRCGISWSSEEIEETRARVVYRRDQLHFKSLLSFTHHAGRPPEEVPPPPVPAPEQVGIGIGPPTLSKPTQTKGLKVEPEEPSQMPPLPQSHQKLKESLMTPGSGAFPYQSDFWQHLQSSGLSKEQAGRGPNQSHGIGTASWNHSTTVPQPQARDKPPPIALIASSCKEESASSVTPSSSSTSSSFQVLANGATAASKPLQPLGCVPQSVSPSEQALPPHLEPAWPQGLRHNSVPGRVGPTEYLSPDMQRQRKTKRKTKEQLAILKSFFLQCQWARREDYQKLEQITGLPRPEIIQWFGDTRYALKHGQLKWFRDNAVPGAPSFQDPAIPTPPPSTRSLNERAETPPLPIPQLSQASRLSTQQVLDWFDSRLPQPAEVVVCLDEEEEEEEEELPEDDEEEEEEEEDDDDDDDDVIIQD

SEQ ID NO: 799033 - protein, 70 aa, Homo sapiens
NLLEQGWVDRRAPGDGGGGSPGFGHRWGGLGAAAPGSNPTPTRRPPALSPTSPRPMVRGWEPPPGLDCGE

SEQ ID NO: 799034 - protein, 604 aa, Homo sapiens
NLLEQGWVDRRAPGDGGGGSPGFGHRWGGLGAAAPGSNPTPTRRPPALSPTSPRPMVRGWEPPPGLDCAISEGHKSEGTMPPNKEASGLSSSPAGLICLPPISEELQLVWTQAAQTSELDSNEHLLKTFSYFPYPSLADIALLCLRYGLQMEKVKTWFMAQRLRCGISWSSEEIEETRARVVYRRDQLHFKSLLSFTHHAGRPPEEVPPPPVPAPEQVGIGIGPPTLSKPTQTKGLKVEPEEPSQMPPLPQSHQKLKESLMTPGSGAFPYQSDFWQHLQSSGLSKEQAGRGPNQSHGIGTASWNHSTTVPQPQARDKPPPIALIASSCKEESASSVTPSSSSTSSSFQVLANGATAASKPLQPLGCVPQSVSPSEQALPPHLEPAWPQGLRHNSVPGRVGPTEYLSPDMQRQRKTKRKTKEQLAILKSFFLQCQWARREDYQKLEQITGLPRPEIIQWFGDTRYALKHGQLKWFRDNAVPGAPSFQDPAIPTPPPSTRSLNERAETPPLPIPPPPPDIQPLERYWAAHQQLRETDIPQLSQASRLSTQQVLDWFDSRLPQPAEVVVCLDEEEEEEEEELPEDDEEEEEEEEDDDDDDDDVIIQD

SEQ ID NO: 799035 - protein, 565 aa, Homo sapiens
RRIKIKDGDATGHDISEGRRSYRAYGLLGIQEPTTRSSHRLNGAGGLTAELPRMAQSALYAAHHALRCAGQDTHGDRGELDSNEHLLKTFSYFPYPSLADIALLCLRYGLQMEKVKTWFMAQRLRCGISWSSEEIEETRARVVYRRDQLHFKSLLSFTHHAGRPPEEVPPPPVPAPEQVGIGIGPPTLSKPTQTKGLKVEPEEPSQMPPLPQSHQKLKESLMTPGSGAFPYQSDFWQHLQSSGLSKEQAGRGPNQSHGIGTASWNHSTTVPQPQARDKPPPIALIASSCKEESASSVTPSSSSTSSSFQVLANGATAASKPLQPLGCVPQSVSPSEQALPPHLEPAWPQGLRHNSVPGRVGPTEYLSPDMQRQRKTKRKTKEQLAILKSFFLQCQWARREDYQKLEQITGLPRPEIIQWFGDTRYALKHGQLKWFRDNAVPGAPSFQDPAIPTPPPSTRSLNERAETPPLPIPPPPPDIQPLERYWAAHQQLRETDIPQLSQASRLSTQQVLDWFDSRLPQPAEVVVCLDEEEEEEEEELPEDDEEEEEEEEDDDDDDDDVIIQD

SEQ ID NO: 799036 - protein, 188 aa, Homo sapiens
FSISAPPTLLFPSLPPFRFRRSRLLSAELFSEPVGGREGGVEELGFAGARAAAPLPESSGALERRRNKTAGGREREGRMEESHFNSNPYFWPSIPTVSGQIENTMFINKMKDQLLPEKGCGLAPPHYPTLLTVPASVSLPSGISMDTESKSDQLTPHSQASVTQNITVVPVPSTGLMTAGEQLCSSPI

SEQ ID NO: 799037 - protein, 593 aa, Homo sapiens
FSISAPPTLLFPSLPPFRFRRSRLLSAELFSEPVGGREGGVEELGFAGARAAAPLPESSGALERRRNKTAGGREREGRMEESHFNSNPYFWPSIPTVSGQIENTMFINKMKDQLLPEKGCGLAPPHYPTLLTVPASVSLPSGISMDTESKSDQLTPHSQASVTQNITVVPVPSTGLMTAGVSCSQRWRREGSQSRGPGLVITSPSGSLVTTASSAQTFPISAPMIVSALPPGSQALQVVPDLSKKVASTLTEEGGGGGGGGGSVAPKPPRGRKKKRMLESGLPEMNDPYVLSPEDDDDHQKDGKTYRCRMCSLTFYSKSEMQIHSKSHTETKPHKCPHCSKTFANSSYLAQHIRIHSGAKPYSCNFCEKSFRQLSHLQQHTRIHTGDRPYKCAHPGCEKAFTQLSNLQSHRRQHNKDKPFKCHNCHRAYTDAASLEVHLSTHTVKHAKVYTCTICSRAYTSETYLMKHMRKHNPPDLQQQVQAAAAAAAVAQAQAQAQAQAQAQAQAQAQAQASQASQQQQQQQQQQQQQQQPPPHFQSPGAAPQGGGGGDSNPNPPPQCSFDLTPYKTAEHHKDICLTVTTSTIQVEHLASS

SEQ ID NO: 799038 - protein, 593 aa, Homo sapiens
MEESHFNSNPYFWPSIPTVSGQIENTMFINKMKDQLLPEKGCGLAPPHYPTLLTVPASVSLPSGISMDTESKSDQLTPHSQASVTQNITVVPVPSTGLMTAGEQLCSSPSEVLIFHDQYPRLEGSKDMGSGYVFDYSIKFLLSAYCVPSNVLGIVGDDKEVEDAVPAFEEVTFFPSLNQGVSCSQRWRREGSQSRGPGLVITSPSGSLVTTASSAQTFPISAPMIVSALPPGSQALQVVPDLSKKVASTLTEEGGGGGGGGGSVAPKPPRGRKKKRMLESGLPEMNDPYVLSPEDDDDHQKDGKTYRCRMCSLTFYSKSEMQIHSKSHTETKPHKCPHCSKTFANSSYLAQHIRIHSGAKPYSCNFCEKSFRQLSHLQQHTRIHTGDRPYKCAHPGCEKAFTQLSNLQSHRRQHNKDKPFKCHNCHRAYTDAASLEVHLSTHTVKHAKVYTCTICSRAYTSETYLMKHMRKHNPPDLQQQVQAAAAAAAVAQAQAQAQAQAQAQAQAQAQAQASQASQQQQQQQQQQQQQQQPPPHFQSPGAAPQGGGGGDSNPNPPPQCSFDLTPYKTAEHHKDICLTVTTSTIQVEHLASS

SEQ ID NO: 799039 - protein, 576 aa, Homo sapiens [sequence omitted]

SEQ ID NO: 799040 - protein, 667 aa, Homo sapiens
FSISAPPTLLFPSLPPFRFRRSRLLSAELFSEPVGGREGGVEELGFAGARAAAPLPGECKGRAARRGGHPLPRAPALRVSRARSVRVSVWVCLAPEVRARALRLALFPLPRPFLVLPPSSAPSFPSKRRPSRALAQALAPPQPSPPESSGALERRRNKTAGGREREGRMEESHFNSNPYFWPSIPTVSGQIENTMFINKMKDQLLPEKGCGLAPPHYPTLLTVPASVSLPSGISMDTESKSDQLTPHSQASVTQNITVVPVPSTGLMTAGPGLVITSPSGSLVTTASSAQTFPISAPMIVSALPPGSQALQVVPDLSKKVASTLTEEGGGGGGGGGSVAPKPPRGRKKKRMLESGLPEMNDPYVLSPEDDDDHQKDGKTYRCRMCSLTFYSKSEMQIHSKSHTETKPHKCPHCSKTFANSSYLAQHIRIHSGAKPYSCNFCEKSFRQLSHLQQHTRIHTGDRPYKCAHPGCEKAFTQLSNLQSHRRQHNKDKPFKCHNCHRAYTDAASLEVHLSTHTVKHAKVYTCTICSRAYTSETYLMKHMRKHNPPDLQQQVQAAAAAAAVAQAQAQAQAQAQAQAQAQAQAQASQASQQQQQQQQQQQQQQQPPPHFQSPGAAPQGGGGGDSNPNPPPQCSFDLTPYKTAEHHKDICLTVTTSTIQVEHLASS

SEQ ID NO: 799041 - protein, 370 aa, Homo sapiens
MIVSALPPGSQALQVVPDLSKKVASTLTEEGGGGGGGGGSVAPKPPRGRKKKRMLESGLPEMNDPYVLSPEDDDDHQKDGKTYRCRMCSLTFYSKSEMQIHSKSHTETKPHKCPHCSKTFANSSYLAQHIRIHSGAKPYSCNFCEKSFRQLSHLQQHTRIHTGDRPYKCAHPGCEKAFTQLSNLQSHRRQHNKDKPFKCHNCHRAYTDAASLEVHLSTHTVKHAKVYTCTICSRAYTSETYLMKHMRKHNPPDLQQQVQAAAAAAAVAQAQAQAQAQAQAQAQAQAQAQASQASQQQQQQQQQQQQQQQPPPHFQSPGAAPQGGGGGDSNPNPPPQCSFDLTPYKTAEHHKDICLTVTTSTIQVEHLASS

SEQ ID NO: 799042 - protein, 490 aa, Homo sapiens
MEESHFNSNPYFWPSIPTVSGQIENTMFINKMKDQLLPEKGCGLAPPHYPTLLTVPASVSLPSGISMDTESKSDQLTPHSQASVTQNITVVPVPSTGLMTAGVSCSQRWRREGSQSRGPGLVITSPSGSLVTTASSAQTFPISAPMIVSALPPGSQALQVVPDLSKKVASTLTEEGGGGGGGGGSVAPKPPRGRKKKRMLESGLPEMNDPYVLSPEDDDDHQKDGKTYRCRMCSLTFYSKSEMQIHSKSHTETKPHKCPHCSKTFANSSYLAQHIRIHSGAKPYSCNFCEKSFRQLSHLQQHTRIHTGDRPYKCAHPGCEKAFTQLSNLQSHRRQHNKDKPFKCHNCHRAYTDAASLEVHLSTHTVKHAKVYTCTICSRAYTSETYLMKHMRKHNPPDLQQQVQAAAAAAAVAQAQAQAQAQAQAQAQAQAQAQASQASQQQQQQQQQQQQQQQPPPHFQSPGAAPQGGGGFHSYYFLLIFIIYFVRPLF

SEQ ID NO: 799043 - protein, 338 aa, Homo sapiens
MEESHFNSNPYFWPSIPTVSGQIENTMFINKMKDQLLPEKGCGLAPPHYPTLLTVPASVSLPSGISMDTESKSDQLTPHSQASVTQNITVVPVPSTGLMTAGVSCSQRWRREGSQSRGPGLVITSPSGSLVTTASSAQTFPISAPMIVSALPPGSQALQVVPDLSKKVASTLTEEGGGGGGGGGSVAPKPPRGRKKKRMLESGLPEMNDPYVLSPEDDDDHQKDGKTYRCRMCSLTFYSKSEMQIHSKSHTETKPHKCPHCSKTFANSSYLAQHIRIHSGAKPYSCNFCEKSFRQLSHLQQHTRIHTGDRPYKCAHPGCEKAFTQLSNLQSLITSEFR

SEQ ID NO: 799044 - protein, 125 aa, Homo sapiens
MRKHNPPDLQQQVQAAAAAAAVAQAQAQAQAQAQAQAQAQAQAQASQASQQQQQQQQQQQQQQQPPPHFQSPGAAPQGGGGGDSNPNPPPQCSFDLTPYKTAEHHKDICLTVTTSTIQVEHLASS

SEQ ID NO: 799045 - protein, 159 aa, Homo sapiens
MIVSALPPGSQALQVVPDLSKKVASTLTEEGGGGGGGGGSVAPKPPRGRKKKRMLESGLPEMNDPYVLSPEDDDDHQKDGKTYRCRMCSLTFYSKSEMQIHSKSHTETKPHKCPHCSKTFANSSYLAQHIRIHSGAKPYSCNFCEKSFRQLSHLQQHTR

SEQ ID NO: 799046 - protein, 515 aa, Homo sapiens [sequence omitted]

SEQ ID NO: 799047 - protein, 546 aa, Homo sapiens
MEESHFNSNPYFWPSIPTVSGQIENTMFINKMKDQLLPEKGCGLAPPHYPTLLTVPASVSLPSGISMDTESKSDQLTPHSQASVTQNITVVPVPSTGLMTAGVSCSQRWRREGSQSRGPGLVITSPSGSLVTTASSAQTFPISAPMIVSALPPGSQALQVVPDLSKKVASTLTEEGGGGGGGGGSVAPKPPRGRKKKRMLESGLPEMNDPYVLSPEDDDDHQKDGKTYRSEGNCGTGNGQSLGLMDSVPGSTTNLLCDPGCRMCSLTFYSKSEMQIHSKSHTETKPHKCPHCSKTFANSSYLAQHIRIHSGAKPYSCNFCEKSFRQLSHLQQHTRIHTGDRPYKCAHPGCEKAFTQLSNLQSHRRQHNKDKPFKCHNCHRAYTDAASLEVHLSTHTVKHAKVYTCTICSRAYTSETYLMKHMRKHNPPDLQQQVQAAAAAAAVAQAQAQAQAQAQAQAQAQAQAQASQASQQQQQQQQQQQQQQQPPPHFQSPGAAPQGGGGGDSNPNPPPQCSFDLTPYKTAEHHKDICLTVTTSTIQVEHLASS

SEQ ID NO: 799048 - protein, 683 aa, Homo sapiens
FSISAPPTLLFPSLPPFRFRRSRLLSAELFSEPVGGREGGVEELGFAGARAAAPLPGECKGRAARRGGHPLPRAPALRVSRARSVRVSVWVCLAPEVRARALRLALFPLPRPFLVLPPSSAPSFPSKRRPSRALAQALAPPQPSPPESSGALERRRNKTAGGREREGRMEESHFNSNPYFWPSIPTVSGQIENTMFINKMKDQLLPEKGCGLAPPHYPTLLTVPASVSLPSGISMDTESKSDQLTPHSQASVTQNITVVPVPSTGLMTAGVSCSQRWRREGSQSRGPGLVITSPSGSLVTTASSAQTFPISAPMIVSALPPGSQALQVVPDLSKKVASTLTEEGGGGGGGGGSVAPKPPRGRKKKRMLESGLPEMNDPYVLSPEDDDDHQKDGKTYRCRMCSLTFYSKSEMQIHSKSHTETKPHKCPHCSKTFANSSYLAQHIRIHSGAKPYSCNFCEKSFRQLSHLQQHTRIHTGDRPYKCAHPGCEKAFTQLSNLQSHRRQHNKDKPFKCHNCHRAYTDAASLEVHLSTHTVKHAKVYTCTICSRAYTSETYLMKHMRKHNPPDLQQQVQAAAAAAAVAQAQAQAQAQAQAQAQAQAQAQASQASQQQQQQQQQQQQQQQPPPHFQSPGAAPQGGGGGDSNPNPPPQCSFDLTPYKTAEHHKDICLTVTTSTIQVEHLASS

SEQ ID NO: 799049 - protein, 515 aa, Homo sapiens [sequence omitted]

SEQ ID NO: 799050 - protein, 125 aa, Homo sapiens; identical to SEQ ID NO: 799044

SEQ ID NO: 799051 - protein, 125 aa, Homo sapiens; identical to SEQ ID NO: 799044

SEQ ID NO: 799052 - protein, 69 aa, Homo sapiens
RRSARGGGGVLARVFHTRLPGVRELTRGVVISRGKAGRKKKRRQKKKRLLSGQKVTMPSGQTFVSGEVG

SEQ ID NO: 799053 - protein, 123 aa, Homo sapiens [sequence omitted]

SEQ ID NO: 799054 - protein, 177 aa, Homo sapiens
DGGEKAFTLALLAFSLGPSSCSQMWGLSGQSFGRTLTPTLKMRSTWGCCSRTLFSASADTAKRSGDAGRAPQVLVNEGGGFDRASGSFVAPVRGVYSFRFHVVKVYNRQTVQVSLMLNTWPVISAFANDPDVTREAATSSVLLPLDPGDRVSLRLRRGNLLGGWKYSSFSGFLIFPL

SEQ ID NO: 799055 - protein, 177 aa, Homo sapiens; identical to SEQ ID NO: 799054

SEQ ID NO: 799056 - protein, 370 aa, Homo sapiens
MSRRKQTNPNKVHCDSEGDEEETTQDEVSSHTSEEDGGVVKVEKELENTEQPVGGNEVVEHEVTGNLNSDPLLELCQCPLCQLDCGSREQLIAHVYQHTAAVVSAKSYMCPVCGRALSSPGSLGRHLLIHSEDQRSNCAVCGARFTSHATFNSEKLPEVLNMESLPTVHNEGPSSAEGKDIAFSPPVYPAGILLVCNNCAAYRKLLEAQTPSVRKWALRRQNEPLEVRLQRLERERTAKKSRRDNETPEEREVRRMRDREAKRLQRMQETDEQRARRLQRDREAMRLKRANETPEKRQARLIREREAKRLKRRLEKMDMMLRAQFGQDPSAMAALAAEMNFFQLPVSGVELDSQLLGKMAFEEQNSSSLH

SEQ ID NO: 799057 - protein, 209 aa, Homo sapiens
MESLPTVHNEGPSSAEGKDIAFSPPVYPAGILLVCNNCAAYRKLLEAQTPSVRKWALRRQNEPLEVRLQRLERERTAKKSRRDNETPEEREVRRMRDREAKRLQRMQETDEQRARRLQRDREAMRLKRANETPEKRQARLIREREAKRLKRRLEKMDMMLRAQFGQDPSAMAALAAEMNFFQLPVSGVELDSQLLGKMAFEEQNSSSLH

SEQ ID NO: 799058 - protein, 209 aa, Homo sapiens; identical to SEQ ID NO: 799057

SEQ ID NO: 799059 - protein, 412 aa, Homo sapiens
MSRRKQTNPNKVHWDQVFAGLEEQARQAMMKTDFPGDLGSQRQAIQQLRDQDSSSSDSEGDEEETTQDEVSSHTSEEDGGVVKVEKELENTEQPVGGNEVVEHEVTGNLNSDPLLELCQCPLCQLDCGSREQLIAHVYQHTAAVVSAKSYMCPVCGRALSSPGSLGRHLLIHSEDQRSNCAVCGARFTSHATFNSEKLPEVLNMESLPTVHNEGPSSAEGKDIAFSPPVYPAGILLVCNNCAAYRKLLEAQTPSVRKWALRRQNEPLEVRLQRLERERTAKKSRRDNETPEEREVRRMRDREAKRLQRMQETDEQRARRLQRDREAMRLKRANETPEKRQARLIREREAKRLKRRLEKMDMMLRAQFGQDPSAMAALAAEMNFFQLPVSGVELDSQLLGKMAFEEQNSSSLH

SEQ ID NO: 799060 - protein, 262 aa, Homo sapiens
MCPVCGRALSSPGSLGRHLLIHSEDQRSNCAVCGARFTSHATFNSEKLPEVLNMESLPTVHNEGPSSAEGKDIAFSPPVYPAGILLVCNNCAAYRKLLEAQTPSVRKWALRRQNEPLEVRLQRLERERTAKKSRRDNETPEEREVRRMRDREAKRLQRMQETDEQRARRLQRDREAMRLKRANETPEKRQARLIREREAKRLKRRLEKMDMMLRAQFGQDPSAMAALAAEMNFFQLPVSGVELDSQLLGKMAFEEQNSSSLH

SEQ ID NO: 799061 - protein, 412 aa, Homo sapiens; identical to SEQ ID NO: 799059

SEQ ID NO: 799062 - protein, 370 aa, Homo sapiens; identical to SEQ ID NO: 799056

SEQ ID NO: 799063 - protein, 370 aa, Homo sapiens; identical to SEQ ID NO: 799056

SEQ ID NO: 799064 - protein, 262 aa, Homo sapiens; identical to SEQ ID NO: 799060

SEQ ID NO: 799065 - protein, 209 aa, Homo sapiens; identical to SEQ ID NO: 799057

SEQ ID NO: 799066 - protein, 209 aa, Homo sapiens; identical to SEQ ID NO: 799057

SEQ ID NO: 799067 - protein, 412 aa, Homo sapiens; identical to SEQ ID NO: 799059

SEQ ID NO: 799068 - protein, 462 aa, Homo sapiens
RAGARAARSRRPRRHLFPPPSVCLLLALSVCSAAPRLPATGSARPGAPSARRGPVPERPGPAGLGCGPGSIVRRSVCPEAGPRDPERSAAPRRRIQITWIQSSLLCSVGTAPELEVSILQGGSNISSRETGKDQSSCIRETCPVGNRQIQIKFTVTGNLNSDPLLELCQCPLCQLDCGSREQLIAHVYQHTAAVVSAKSYMCPVCGRALSSPGSLGRHLLIHSEDQRSNCAVCGARFTSHATFNSEKLPEVLNMESLPTVHNEGPSSAEGKDIAFSPPVYPAGILLVCNNCAAYRKLLEAQTPSVRKWALRRQNEPLEVRLQRLERERTAKKSRRDNETPEEREVRRMRDREAKRLQRMQETDEQRARRLQRDREAMRLKRANETPEKRQARLIREREAKRLKRRLEKMDMMLRAQFGQDPSAMAALAAEMNFFQLPVSGVELDSQLLGKMAFEEQNSSSLH

SEQ ID NO: 799069 - protein, 219 aa, Homo sapiens
MESLPTVHNEGPSSAEGKDIAFSPPVYPAGILLVCNNCAAYRKLLEAQTPSVRKWALRRQNEPLEVRLQRLERERTAKKSRRDNETPEEREVRRMRDREAKRLQRMQETDEQRARRLQRDREAMRLKRANETPEKRQARLIREREAKRLKRRLEKMDMMLRAQFGQDPSAMAALAAEMNFFQLPVSGVELDSQLLGKMAFEEQNSSSLLNPPLGGLFHN

SEQ ID NO: 799070 - protein, 514 aa, Homo sapiens
MKEAGQMQNLESARAGRSVSTQTGSMTGQIPRLSKVNLFTLLSLWMELFPAEAQRQKSQKNEEGKHGPLGDNEERTRVSTDKRQVKRTGLVVVKNMKIVGLHCSSEDLHAGQIALIKHGSRLKNCDLYFSRKPCSACLKMIVNAGVNRISYWPADPEISLLTEASSSEDAKLDAKAVERLKSNSRAHVCVLLQPLVCYMVQFVEETSYKCDFIQKITKTLPDANTDFYYECKQERIKEYEMLFLVSNEEMHKQILMTIGLENLCENPYFSNLRQNMKDLILLLATVASSVPNFKHFGFYRSNPEQINEIHNQSLPQEIARHCMVQARLLAYRTEDHKTGVGAVIWAEGKSRSCDGTGAMYFVGCGYNAFPVGSEYADFPHMDDKQKDREIRKFRYIIHAEQNALTFRCQEIKPEERSMIFVTKCPCDECVPLIKGAGIKQIYAGDVDVGKKKADISYMRFGELEGVSKFTWQLNPSGAYGLEQNEPERRENGVLRPVPQKEEQHQDKKLRLGIH

SEQ ID NO: 799071 - protein, 469 aa, Homo sapiens
MELFPAEAQRQKSQKNEEGKHGPLGDNEERTRVSTDKRQVKRTGLVVVKNMKIVGLHCSSEDLHAGQIALIKHGSRLKNCDLYFSRKPCSACLKMIVNAGVNRISYWPADPEISLLTEASSSEDAKLDAKAVERLKSNSRAHVCVLLQPLVCYMVQFVEETSYKCDFIQKITKTLPDANTDFYYECKQERIKEYEMLFLVSNEEMHKQILMTIGLENLCENPYFSNLRQNMKDLILLLATVASSVPNFKHFGFYRSNPEQINEIHNQSLPQEIARHCMVQARLLAYRTEDHKTGVGAVIWAEGKSRSCDGTGAMYFVGCGYNAFPVGSEYADFPHMDDKQKDREIRKFRYIIHAEQNALTFRCQEIKPEERSMIFVTKCPCDECVPLIKGAGIKQIYAGDVDVGKKKADISYMRFGELEGVSKFTWQLNPSGAYGLEQNEPERRENGVLRPVPQKEEQHQDKKLRLGIH

SEQ ID NO: 799072 - protein, 316 aa, Homo sapiens
MVQFVEETSYKCDFIQKITKTLPDANTDFYYECKQERIKEYEMLFLVSNEEMHKQILMTIGLENLCENPYFSNLRQNMKDLILLLATVASSVPNFKHFGFYRSNPEQINEIHNQSLPQEIARHCMVQARLLAYRTEDHKTGVGAVIWAEGKSRSCDGTGAMYFVGCGYNAFPVGSEYADFPHMDDKQKDREIRKFRYIIHAEQNALTFRCQEIKPEERSMIFVTKCPCDECVPLIKGAGIKQIYAGDVDVGKKKADISYMRFGELEGVSKFTWQLNPSGAYGLEQNEPERRENGVLRPVPQKEEQHQDKKLRLGIH

SEQ ID NO: 799073 - protein, 316 aa, Homo sapiens; identical to SEQ ID NO: 799072

SEQ ID NO: 799074 - protein, 316 aa, Homo sapiens; identical to SEQ ID NO: 799072

SEQ ID NO: 799075 - protein, 396 aa, Homo sapiens
MKRGPEYLLTKDRKPCSACLKMIVNAGVNRISYWPADPEISLLTEASSSEDAKLDAKAVERLKSNSRAHVCVLLQPLVCYMVQFVEETSYKCDFIQKITKTLPDANTDFYYECKQERIKEYEMLFLVSNEEMHKQILMTIGLENLCENPYFSNLRQNMKDLILLLATVASSVPNFKHFGFYRSNPEQINEIHNQSLPQEIARHCMVQARLLAYRTEDHKTGVGAVIWAEGKSRSCDGTGAMYFVGCGYNAFPVGSEYADFPHMDDKQKDREIRKFRYIIHAEQNALTFRCQEIKPEERSMIFVTKCPCDECVPLIKGAGIKQIYAGDVDVGKKKADISYMRFGELEGVSKFTWQLNPSGAYGLEQNEPERRENGVLRPVPQKEEQHQDKKLRLGIH

SEQ ID NO: 799076 - protein, 514 aa, Homo sapiens; identical to SEQ ID NO: 799070

SEQ ID NO: 799077 - protein, 316 aa, Homo sapiens; identical to SEQ ID NO: 799072

SEQ ID NO: 799078 - protein, 514 aa, Homo sapiens; identical to SEQ ID NO: 799070

SEQ ID NO: 799079 - protein, 514 aa, Homo sapiens; identical to SEQ ID NO: 799070

SEQ ID NO: 799080 - protein, 110 aa, Homo sapiens
MRTRSGHSRFLHRLPPLATGVGDVGAAAVHGAQPTAAATPRALAAGSPEPGVGWDHCGGRRRVPRSRARSTCVLSGQWRGRRASTPRRHAGFRSPRQYSVVNHLSWDNQN

SEQ ID NO: 799081 - protein, 87 aa, Homo sapiens
KTTEGASFLPPCEEDKNKNEVTSPQGSVKATHKISSYLLVDDVWRHIASVTGHTSDGFTATPGGHEGVFQGHISNLTERTGSDQYPN

SEQ ID NO: 799082 - protein, 111 aa, Homo sapiens
LPFLETDSAVQKELRNQTPAPSAAQTSAPSKYHRTRSGGARDERYRSDIHTEAVQAALAKHKEQKMALPMPTKRRSTFVQSPADACTPPDTSSASEDEGSLRRQAALSAAL

SEQ ID NO: 799083 - protein, 99 aa, Homo sapiens
GSRWRVLVCGRGWSRCFSVTGAWPGQSCRRHPPATASVDGRVLGRRVLAGTTERGGVRSLESSVPGNSPLTTPCPALGPARGPNHWKAVAGNGRLCRRS

SEQ ID NO: 799084 - protein, 129 aa, Homo sapiens
MSHLQSLLLDTLLGTKHVDSAALIKIQERSLCVASPGFNVTPSDVRTLVNGFAKNPLQARREGLYFKGKDYRCVRADEYSLYAKNENTGVVVVKTHLYLLVATYTEGMYPSICVEATESLGDYLRKKGS

SEQ ID NO: 799085 - protein, 86 aa, Homo sapiens
GRPGRASPRGPREREERRARVAEAGAAGTRSAGLLRAGASSRSTAPGVTCWSLPAREENVAALRDAPDPGLGAVAGSPGEQQRREF

SEQ ID NO: 799086 - protein, 216 aa, Homo sapiens
MWPPCGTLRTLALARSRGARACSGDGGVSYTQGQSPEPRTREYFYYVDHQGQLFLDDSKMKNFITCFKDPQFLVTFFSRLRPNRSGRYEAAFPFLSPCGRERNFLRCEDRPVVFTHLLTADHGPPRLSYCGGGEALAVPFEPARLLPLAANGRLYHPAPERAGGVGLVRSALAFELSACFEYGPGAPALPSHVRWQGRRLALTMDLAPLLLAARSP

SEQ ID NO: 799087 - protein, 295 aa, Homo sapiens
MWPPCGTLRTLALARSRGARACSGDGGVSYTQGQSPEPRTREYFYYVDHQGQLFLDDSKMKNFITCFKGNAVPALSSPFFLPSGQPLMGSPTLPTGPAHQGVGVLRSGAPLSEAGRTSYRRRLPSVWSWARRPWEPSALSTRTLHPPDPQFLVTFFSRLRPNRSGRYEAAFPFLSPCGRERNFLRCEDRPVVFTHLLTADHGPPRLSYCGGGEALAVPFEPARLLPLAANGRLYHPAPERAGGVGLVRSALAFELSACFEYGPGAPALPSHVRWQGRRLALTMDLAPLLLAARSP

SEQ ID NO: 799088 - protein, 199 aa, Homo sapiens
MWPPCGTLRTLALARSRGARACSGDGGVSYTQGQSPEPRTREYFYYVDHQGQLFLDDSKMKNFITCFKDPQFLVTFFSRLRPNRSGRYEAAFPFLSPCGRERNFLRCEDRPVVFTHLLTADHGPPRLSYCGGGEALAVPFEPARLLPLAANGRLYHPAPERAGGVGLVRSALAFELRSSSAVSSEAKNLLHLRSLPGGG

SEQ ID NO: 799089 - protein, 216 aa, Homo sapiens; identical to SEQ ID NO: 799086

SEQ ID NO: 799090 - protein, 216 aa, Homo sapiens; identical to SEQ ID NO: 799086

SEQ ID NO: 799091 - protein, 216 aa, Homo sapiens; identical to SEQ ID NO: 799086

SEQ ID NO: 799092 - protein, 260 aa, Homo sapiens
GELGRSGPRLLHGPRPCCVVQLRTLSYKSPAPALTSRRCQGDTRAALPFFGSPVKRQLHVREAAGQVVSAEEVVQLITNLKRGKRCGKELADQGAELFLDDSKMKNFITCFKDPQFLVTFFSRLRPNRSGRYEAAFPFLSPCGRERNFLRCEDRPVVFTHLLTADHGPPRLSYCGGGEALAVPFEPARLLPLAANGRLYHPAPERAGGVGLVRSALAFELSACFEYGPGAPALPSHVRWQGRRLALTMDLAPLLLAARSP

SEQ ID NO: 799093 - protein, 610 aa, Homo sapiens
MWPPCGTLRTLALARSRGARACSGDGGVSYTQGQSPEPRTREYFYYVDHQGQLFLDDSKMKNFITCFKDPQFLVTFFSRLRPNRSGRYEAAFPFLSPCGRERNFLRCEDRPVVFTHLLTADHGPPRLSYCGGGEALAVPFEPARLLPLAANGRLYHPAPERAGGVGLVRSALAFELSACFEYGPGAPALPSHVRWQGRRLALTMDLAPLLLAARSPERGQGKGGRPRAPLAPLPRDSTPRKARATRARGSLVRLRARPRPHPALSLVLPRPGPPGHPGSATARAPRAPDSGALRDWPALETSGTGGGRGALVRVRERPPPPPSPATARARPPPARRGSRSPRERQEGTRLRLNRGRAGGGTGPREMALRAPALLPLLLLLLPLRAAGCPAACRCYSATVECGALRLRVVPLGIPPGTQTLFLQDNNIARLEPGALAPLAALRRLYLHNNSLRALEAGAFRAQPRLLELALTSNRLRGLRSGAFVGLAQLRVLYLAGNQLARLLDFTFLHLPRLQELHLQENSIELLEDQALAGLSSLALLDLSRNQLGTISREALQPLASLQVLRLTENPWRCDCALHWLGAWIKEGGQRLLTSRDRKIMCAEPPRLALQ

SEQ ID NO: 799094 - protein, 893 aa, Homo sapiens
GWCRWRRRGSAGQEASGKMDPAPSLGCSLKDVKWSSVAVPLDLLVSTYRLPQIARLDNGECVEGLRENDYLLIHSCRQWTTITAHSLEEGHYVIGPKIEIPVHYAGQFKLLEQDRDIKEPVQYFNSVEEVAKAFPERVYVMEDITFNVKVASGECNEDTEVYNITLCTGDELTLMGQAEILYAKTFKEKSRLNTIFKKIGKLNSISKLGKGKMPCLICMNHRTNESISLPFQCKGRFSTRSPLELQMQEGEHTIRNIVEKTRLPVNVTVPSPPPRNPYDLHFIREGHRYKFVNIQTKTVVVCCVLRNNKILPMHFPLHLTVPKFSLPEHLVKGESWPETLVHHWLGICQEQFDIDEYSRAVRDVKTDWNEECKSPKKGRCSGHNHVPNSLSYARDELTQSFHRLSVCVYGNNLHGNSEVNLHGCRDLGGDWAPFPHDILPYQDSGDSGSDYLFPEASEESAGIPGKSELPYEELWLEEGKPSHQPLTRSLSEKNRCDQFRGSVRSKCATSPLPIPGTLGAAVKSSDTALPPPPVPPKSEAVREECRLLNAPPVPPRSAKPLSTSPSIPPRTVKPARQQTRSPSPTLSYYSSGLHNIVTKTDTNPSESTPVSCYPCNRVKTDSVDLKSPFGSPSAEAVSSRLSWPNHYSGASESQTRSDFLLDPSRSYSYPRQKTPGTPKRNCPAPFDFDGCELLASPTSPVTAEFSSSVSGCPKSASYSLESTDVKSLAAGVTKQSTSCPALPPRAPKLVEEKVASETSPLPLKIDGAEEDPKSGSPDLSEDQYFVKKGMQDIFSASYPFSSPLHLQLAPRSCGDGSPWQPPADLSGLSIEEVSKSLRFIGLSEDVISFFVTEKIDGNLLVQLTEEILSEDFKLSKLQVKKIMQFINGWRPKI

SEQ ID NO: 799095 - protein, 893 aa, Homo sapiens; identical to SEQ ID NO: 799094

SEQ ID NO: 799096 - protein, 753 aa, Homo sapiens
MEDITFNVKVASGECNEDTEVYNITLCTGDELTLMGQAEILYAKTFKEKSRLNTIFKKIGKLNSISKLGKGKMPCLICMNHRTNESISLPFQCKGRFSTRSPLELQMQEGEHTIRNIVEKTRLPVNVTVPSPPPRNPYDLHFIREGHRYKFVNIQTKTVVVCCVLRNNKILPMHFPLHLTVPKFSLPEHLVKGESWPETLVHHWLGICQEQFDIDEYSRAVRDVKTDWNEECKSPKKGRCSGHNHVPNSLSYARDELTQSFHRLSVCVYGNNLHGNSEVNLHGCRDLGGDWAPFPHDILPYQDSGDSGSDYLFPEASEESAGIPGKSELPYEELWLEEGKPSHQPLTRSLSEKNRCDQFRGSVRSKCATSPLPIPGTLGAAVKSSDTALPPPPVPPKSEAVREECRLLNAPPVPPRSAKPLSTSPSIPPRTVKPARQQTRSPSPTLSYYSSGLHNIVTKTDTNPSESTPVSCYPCNRVKTDSVDLKSPFGSPSAEAVSSRLSWPNHYSGASESQTRSDFLLDPSRSYSYPRQKTPGTPKRNCPAPFDFDGCELLASPTSPVTAEFSSSVSGCPKSASYSLESTDVKSLAAGVTKQSTSCPALPPRAPKLVEEKVASETSPLPLKIDGAEEDPKSGSPDLSEDQYFVKKGMQDIFSASYPFSSPLHLQLAPRSCGDGSPWQPPADLSGLSIEEVSKSLRFIGLSEDVISFFVTEKIDGNLLVQLTEEILSEDFKLSKLQVKKIMQFINGWRPKI

SEQ ID NO: 799097 - protein, 554 aa, Homo sapiens
GWCRWRRRGSAGQEASGKMDPAPSLGCSLKDVKWSSVAVPLDLLVSTYRLPQIARLDNGECVEGLRENDYLLIHSCRQWTTITAHSLEEGHYVIGPKIEIPVHYAGQFKLLEQDRDIKEPVQYFNSVEEVAKAFPERVYVMEDITFNVKVASGECNEDTEVYNITLCTGDELTLMGQAEILYAKTFKEKSRLNTIFKKIGKLNSISKLGKGKMPCLICMNHRTNESISLPFQCKGRFSTRSPLELQMQEGEHTIRNIVEKTRLPVNVTVPSPPPRNPYDLHFIREGHRYKFVNIQTKTVVVCCVLRNNKILPMHFPLHLTVPKFSLPEHLVKGESWPETLVHHWLGICQEQFDIDEYSRAVRDVKTDWNEECKSPKKGRCSGHNHVPNSLSYARDELTQSFHRLSVCVYGNNLHGNSEVNLHGCRDLGGDWAPFPHDILPYQDSGDSGSDYLFPEASEESAGIPGKSELPYEELWLEEGKPSHQPLTRSLSEKNRCDQFRGSVRSKCATSPLPIPGTLGAAVKSSDTALPPPPVPPKSEARQGFITLPRLVSKS

SEQ ID NO: 799098 - protein, 698 aa, Homo sapiens
GWCRWRRRGSAGQEASGKMDPAPSLGCSLKDVKWSSVAVPLDLLVSTYRLPQIARLDNGECVEGLRENDYLLIHSCRQWTTITAHSLEEGHYVIGPKIEIPVHYAGQFKLLEQDRDIKEPVQYFNSVEEVAKAFPERVYVMEDITFNVKVASGECNEDTEVYNITLCTGDELTLMGQAEILYAKTFKEKSRLNTIFKKIGKLNSISKLGKGKMPCLICMNHRTNESISLPFQCKGRFSTRSPLELQMQEGEHTIRNIVEKTRLPVNVTVPSPPPRNPYDLHFIREGHRYKFVNIQTKTVVVCCVLRNNKILPMHFPLHLTVPKFSLPEHLVKGESWPETLVHHWLGICQEQFDIDEYSRAVRDVKTDWNEECKSPKKGRCSGHNHVPNSLSYARDELTQSFHRLSVCVYGNNLHGNSEVNLHGCRDLGGDWAPFPHDILPYQDSGDSGSDYLFPEASEESAGIPGKSELPYEELWLEEGKPSHQPLTRSLSEKNRCDQFRGSVRSKCATSPLPIPGTLGAAVKSSDTALPPPPVPPKSEAVREECRLLNAPPVPPRSAKPLSTSPSIPPRTVKPARQQTRSPSPTLSYYSSGLHNIMEEPMSWEEKMPHQSEKFRGKGQLDSPGNNPGAAISSHKSASGSFHFDTSRQHLQADNTFDQDLKWKGSHWLSTLNFHPDRSPLLTITVEWSFPFVWILPGL

SEQ ID NO: 799099 - protein, 415 aa, Homo sapiens
ARGGGDPYSDLSKGVLRCRTVEDVLTPLEDCFMLDASTVLDFGVLASIMESGYTRIPVFEDEQSNIVDILYVKDLAFVDPDDCTPLKTITRFYNHPVHFVFHDTKLDAMLEEFKKGKSHLAIVQKVNNEGEGDPFYEVLGLVTLEDVIEEIIKSEILDESDMYTEDTVVKRKPASLMAPLKRKEEFSLFKVSDDEYKVTISPQLLLATQRFLSREVDVFSPLRISEKVLLHLLKHPSVNQEVRFDESNRLATHHYLYQRSQPVDYFILILQGRVEVEIGKEGLKFENGAFTYYGVSALTVPSSVHQSPVSSLQPIRHDLQPDPGDGTHSSAYCPDYTVRALSDLQLIKVTRLQYLNALLATRAQNLPQSPENTDLQVIPGSQTRLLGEKTTTAAGSSHSRPGVPVEGSPGRNPGV

SEQ ID NO: 799100 - protein, 392 aa, Homo sapiens
MPEAVHIGDLLRLLKYPDVIQELKFDEHYKYYARHYLYTRNKPADYFILILQGKVEVEAGKENMKFETGAFSYYGTMALTSVPSGKSHLAIVQKVNNEGEGDPFYEVLGLVTLEDVIEEIIKSEILDESDMYTDNRSRKRVSEKNKRDFSAFKDADNELKVKISPQLLLAAHRFLATEVSQFSPSLISEKILLRLLKYPDVIQELKFDEHNKYYARHYLYTRNKPADYFILILQGKVEVEAGKENMKFETGAFSYYGTMALTSVPSDRSPAHPTPLSRSASLSYPDRTDVSTAATLAGSSNQFGSSVLGQYISDFSVRALVDLQYIKITRQQYQNGLLASRMENSPQFPIDGCTTHMENLAEKSELPVVDETTTLLNERNSLLHKASHENAI

SEQ ID NO: 799101 - protein, 727 aa, Homo sapiens
MRLASCNKSCGTNPDGIIFVSEGSTVNLRLYGYSLGNISSNLISFTEVDDAETLHKSTSCLELTKDLVVQQLVNVSRGNTSGVLVVLTKFLRRSESMKLYALCTRAQPDGPWLKWTDKDSLLFMVEEPGRFLPLWLHILLITVLLVLSGIFSGLNLGLMALDPMELRIVQNCGTEKERRYARKIEPIRRKGNYLLCSLLLGNVLVNTSLTILLDNLIGSGLMAVASSTIGIVIFGEILPQALCSRHGLAVGANTILLTKFFMLLTFPLSFPISKLLDFFLGQEIRTVYNREKLMEMLKVTEPYNDLVKEELNMIQGALELRTKTVEDIMTQLQDCFMIRSDAILDFNTMSEIMESGYTRIPVFEDEQSNIVDILYVKDLAFVDPDDCTPLKTITRFYNHPVHFVFHDTKLDAMLEEFKKGKSHLAIVQKVNNEGEGDPFYEVLGLVTLEDVIEEIIKSEILDESDMYTDNRSRKRVSEKNKRDFSAFKDADNELKVKISPQLLLAAHRFLATEVSQFSPSLISEKILLRLLKYPDVIQELKFDEHNKYYARHYLYTRNKPADYFILILQGKVEVEAGKENMKFETGAFSYYGTMALTSVPSDRSPAHPTPLSRSASLSYPDRTDVSTAATLAGSSNQFGSSVLGQYISDFSVRALVDLQYIKITRQQYQNGLLASRMENSPQFPIDGCTTHMENLAEKSELPVVDETTTLLNERNSLLHKASHENAI

SEQ ID NO: 799102 - protein, 727 aa, Homo sapiens; identical to SEQ ID NO: 799101

SEQ ID NO: 799103 - protein, 126 aa, Homo sapiens
MRVRVGIGVAFGMTTSALPADRSPAHPTPLSRSASLSYPDRTDVSTAATLAGSSNQFGSSVLGQYISDFSVRALVDLQYIKVSASLPCLGSAIFCSGISYYFHPPNPAWWAQTRDAFFFWRWGLAL

SEQ ID NO: 799104 - protein, 339 aa, Homo sapiens
LQEPAERAPRGAPQPLQGIWWRLGWPRPPGSTGPSSPRGGSPLDAGPRARTPTGPGPRAPGKPASRSPGPRRAGALRGAHRPQTCVAVQGVAMSSVFGKPRAGSGPQSAPLEVNLAILGRRGAGKSEDTYSSEETVDHQPVHLRVMDTADLDTPRNCERYLNWAHAFLVVYSVDSRQSFDSSSSYLELLALHAKETQRSIPALLLGNKLDMAQYRQVTKAEGVALAGRFGCLFFEVSACLDFEHVQHVFHEAVREARRELEKSPLTRPLFISEERALPHQAPLTARHGLASCTFNTLSTINLKEMPTVAQAKLVTVKSSRAQSKRKAPTLTLLKGFKIF

SEQ ID NO: 799105 - protein, 358 aa, Homo sapiens
LQEPAERAPRGAPQPLQGIWWRLGWPRPPGSTGPSSPRGGSPLDAGPRARTPTGPGPRAPGKPASRSPGPRRAGALRGAHRPQTCVAVQGVAMSSVFGKPRAGSGPQSAPLEVNLAILGRRGAGKSALTVKFLTKRFISEYDPNLEDTYSSEETVDHQPVHLRVMDTADLDTPRNCERYLNWAHAFLVVYSVDSRQSFDSSSSYLELLALHAKETQRSIPALLLGNKLDMAQYRQVTKAEGVALAGRFGCLFFEVSACLDFEHVQHVFHEAVREARRELEKSPLTRPLFISEERALPHQAPLTARHGLASCTFNTLSTINLKEMPTVAQAKLVTVKSSRAQSKRKAPTLTLLKGFKIF

SEQ ID NO: 799106 - protein, 358 aa, Homo sapiens; identical to SEQ ID NO: 799105

SEQ ID NO: 799107 - protein, 167 aa, Homo sapiens [sequence omitted]

SEQ ID NO: 799108 - protein, 101 aa, Homo sapiens
SPQGSEVDPGGARSRLSASCVLSRVETGVDPGAPVPRHRLLQFLQTVPIPPRVARRDLEFAMLRAVSTWRFRLDPSCSGARLGGPRSLSFLASLGCGTKTI

SEQ ID NO: 799109 - protein, 102 aa, Homo sapiens
TFFLLYKCFISIQYLEDSYKQDAFNSMVADEHQEGTSMSFHPRNLTMDTLVIKGLVSPQDTVTDQRPHHPSSGAGPAGTGSFCDTCCITRLGERTQLPELTE

SEQ ID NO: 799110 - protein, 102 aa, Homo sapiens; identical to SEQ ID NO: 799109

SEQ ID NO: 799111 - protein, 177 aa, Homo sapiens
ERLCLPERGTRRPGGGGRSDAAMAPRALPGSAVLAAAVFVGGAVSSPLVAPDNGSSRTLHSRTETTPSPSNDTGNGHPEYIAYALVPVFFIMGLFGVLICHLLKKKGYRCTTEAEQDIEEEKVEKIELNDSVNENSDTVGQIVHYIMKNEGVNILVFQNNSVFLSFIKNLLRRVKIY

SEQ ID NO: 799112 - protein, 180 aa, Homo sapiens
ERLCLPERGTRRPGGGGRSDAAMAPRALPGSAVLAAAVFVGGAVSSPLVAPDNGSSRTLHSRTETTPSPSNDTGNGHPEYIAYALVPVFFIMGLFGVLICHLLKKKGYRCTTEAEQDIEEEKVEKIELNDSVNENSDTVGQIVHYIMKNEANADVLKAMVADNSLYDPESHRARPVNECL

SEQ ID NO: 799113 - protein, 293 aa, Homo sapiens
ERLCLPERGTRRPGGGGRSDAAMAPRALPGSAVLAAAVFVGGAVSSPLVAPDNGSSRTLHSRTETTPSPSNDTGNGHPEYIAYALVPVFFIMGLFGVLICHLLKKKGYRCTTEAEQDIEEEKVEKIELNDSVNENSDTVGQIVHYIMKNEANADVLKAMVADNSLYDPESPVTPSTPGSPPVSPGPLSPGGTPGKHVCGHHLHTVGGVVERDVCHRCRHKRWHFIKPTNKSRESRPRRQGEVTVLSVGRFRVTKVEHKSNQKERRSLMSVSGAETVNGEVPATPVKRERSGTE

SEQ ID NO: 799114 - protein, 69 aa, Homo sapiens
MFMPLYSTLGDREPVSNKPTKNCRATGFVTSFVELFDFSKQCAWIILIKTKTVFERDRTLTNILFLLFE

SEQ ID NO: 799115 - protein, 271 aa, Homo sapiens
MWELRSIAFSRAVFAEFLATLLFVFFGLGSALNWPQALPSVLQIAMAFGLGIGTLVQALGHISGAHINPAVTVACLVGCHVSVLRAAFYVAAQLLGAVAGAALLHEITPADIRGDLAVNALSNSTTAGQAVTVELFLTLQLVLCIFASTDERRGENPGTPALSIGFSVALGHLLGIHYTGCSMNPARSLAPAVVTGKFDDHWVFWIGPLVGAILGSLLYNYVLFPPAKSLSERLAVLKGLEPDTDWEEREVRRRQSVELHSPQSLPRGTKA

SEQ ID NO: 799116 - protein, 624 aa, Homo sapiens
MAEASRWHRGGASKHKLHYRKEVEITTTLQELLLYFIFLINLCILTFGMVNPHMYYLNKVMSSLFLDTSVPGEERTNFKSIRSITDFWKFMEGPLLEGLYWDSWYNNQQLYNLKNSSRIYYENILLGVPRVRQLKVRNNTCKVYSSFQSLMSECYGKYTSANEDLSNFGLQINTEWRYSTSNTNSPWHWGFLGVYRNGGYIFTLSKSKSETKNKFIDLRLNSWITRGTRVIFIDFSLYNANVNLFCIIRLVAEFPATGGILTSWQFYSVKLLRYVSYYDYFIASCEITFCIFLFVFTTQEVKKIKEFKSAYFKSIWNWLELLLLLLCFVAVSFNTYYNVQIFLLLGQLLKSTEKYSDFYFLACWHIYYNNIIAITIFFAWIKIFKFISFNKTMSQLSSTLSRCVKDIVGFAIMFFIIFFAYAQLGFLVFGSQVDDFSTFQNSIFAQFRIVLGDFNFAGIQQANPILGPIYFITFIFFVFFVLLNMFLAIINDTYSEVKADYSIGRRPDFELGKMIKQSYKNVLEKFRLKKAQKDEDKKTKGSGDLAEQARREGFDENEIQNAEQMKKWKERLEKKYYSMEIQDDYQPVTQEEFRELFLYAVELEKELHYINLKLNQVVRKVSAL

SEQ ID NO: 799117 - protein, 564 aa, Homo sapiens
MSSLFLDTSVPGEERTNFKSIRSITDFWKFMEGPLLEGLYWDSWYNNQQLYNLKNSSRIYYENILLGVPRVRQLKVRNNTCKVYSSFQSLMSECYGKYTSANEDLSNFGLQINTEWRYSTSNTNSPWHWGFLGVYRNGGYIFTLSKSKSETKNKFIDLRLNSWITRGTRVIFIDFSLYNANVNLFCIIRLVAEFPATGGILTSWQFYSVKLLRYVSYYDYFIASCEITFCIFLFVFTTQEVKKIKEFKSAYFKSIWNWLELLLLLLCFVAVSFNTYYNVQIFLLLGQLLKSTEKYSDFYFLACWHIYYNNIIAITIFFAWIKIFKFISFNKTMSQLSSTLSRCVKDIVGFAIMFFIIFFAYAQLGFLVFGSQVDDFSTFQNSIFAQFRIVLGDFNFAGIQQANPILGPIYFITFIFFVFFVLLNMFLAIINDTYSEVKADYSIGRRPDFELGKMIKQSYKNVLEKFRLKKAQKDEDKKTKGSGDLAEQARREGFDENEIQNAEQMKKWKERLEKKYYSMEIQDDYQPVTQEEFRELFLYAVELEKELHYINLKLNQVVRKVSAL

SEQ ID NO: 799118 - protein, 609 aa, Homo sapiens
MAEASRWHRGGASKHKLHYRKEVEITTTLQELLLYFIFLINLCILTFGMVNPHMYYLNKVMSSLFLDTSVPGEERTNFKSIRSITDFWKFMEGPLLEGLYWDSWYNNQQLYNLKNSSRIYYENILLGVPRVRQLKVRNNTCKVYSSFQSLMSECYGKYTSANEDLSNFGLQINTEWRYSTSNTNSPWHWGFLGVYRNGGYIFTLSKSKSETKNKFIDLRLNSWITRGTRVIFIDFSLYNANVNLFCIIRLVAEFPATGGILTSWQFYSVKLLRYVSYYDYFIASCEITFCIFLFVFTTQEVKKIKEFKSAYFKSIWNWLELLLLLLCFVAVSFNTYYNVQIFLLLGQLLKSTEKYSDFYFLACWHIYYNNIIAITIFFAWIKIFKFISFNKTMSQLSSTLSRCVKDIVGFAIMFFIIFFAYAQLGFLVFGSQVDDFSTFQNSIFAQFRIVLGDFNFAGIQQANPILGPIYFITFIFFVFFVLLNMFLAIINDTYSEVKADYSIGRRPDFELGKMIKQSYKNVLEKFRLKKAQKDEDKKTKGSGDLAEQARREGFDENEIQNAEQMKKWKERLEKKYYSMEIQDDYQPVTQEEFRDGTTTKYKMRFSLSA

SEQ ID NO: 799119 - protein, 624 aa, Homo sapiens; identical to SEQ ID NO: 799116

SEQ ID NO: 799120 - protein, 57 aa, Homo sapiens
MRGFTCFVFCFFILRLARRHHDIKSVSGRAQWLKPVIPTLWEAEAGGSQGQEIETIL

SEQ ID NO: 799121 - protein, 310 aa, Homo sapiens
MRECISVHVGQAGVQMGNACWELYCLEHGIQPDGQMPSDKTIGGGDDSFTTFFCETGAGKHVPRAVFVDLEPTVIDEIRNGPYRQLFHPEQLITGKEDAANNYARGHYTIGKEIIDPVLDRIRKLSDQCTGLQGFLVFHSFGGGTGSGFTSLLMERLSVDYGKKSKLEFSIYPAPQVSTAVVEPYNSILTTHTTLEHSDCAFMVDNEAIYDICRRNLDIERPTYTNLNRLISQIVSSITASLRFDGALNVDLTEFQTNLVPYPHSLGDYASLFAEGSRARGGDPCVGFHQVGARGCRRAGGRLFAQTFGA

SEQ ID NO: 799122 - protein, 161 aa, Homo sapiens
RQFSLRPVTPTQRETHRPDSPCVNASQSTWGRQVSRWAMPAGSSIAWNMGFSLMGRCPVTRPLVEGTTPSPPSSVKLVLENTYPGQFLWIWSLRSLIAEAWARLDHKFDLMYAKRAFVHWYVGEGMEEGEFSEAREDMAALEKDYEEVGIDSYEDEDEGEE

SEQ ID NO: 799123 - protein, 91 aa, Homo sapiens
PLFIGTSLLIGTSLFIGTHTTLEHSDCAFMVDNEAIYDICRRNLDIERPTYTNLNRLISQIVSSITASLRFDGALNVDLTEFQTNLVPYPR

SEQ ID NO: 799124 - protein, 448 aa, Homo sapiens
MRECISVHVGQAGVQMGNACWELYCLEHGIQPDGQMPSDKTIGGGDDSFTTFFCETGAGKHVPRAVFVDLEPTVIDEIRNGPYRQLFHPEQLITGKEDAANNYARGHYTIGKEIIDPVLDRIRKLSDQCTGLQGFLVFHSFGGGTGSGFTSLLMERLSVDYGKKSKLEFSIYPAPQVSTAVVEPYNSILTTHTTLEHSDCAFMVDNEAIYDICRRNLDIERPTYTNLNRLISQIVSSITASLRFDGALNVDLTEFQTNLVPYPRIHFPLATYAPVISAEKAYHEQLSVAEITNACFEPANQMVKCDPRHGKYMACCLLYRGDVVPKDVNAAIAAIKTKRSIQFVDWCPTGFKVGINYQPPTVVPGGDLAKVQRAVCMLSNTTAIAEAWARLDHKFDLMYAKRAFVHWYVGEGMEEGEFSEAREDMAALEKDYEEVGIDSYEDEDEGEE

SEQ ID NO: 799125 - protein, 361 aa, Homo sapiens
MRECISVHVGQAGVQMGNACWELYCLEHGIQPDGQMPSDKTIGGGDDSFTTFFCETGAGKHVPRAVFVDLEPTVIDEIRNGPYRQLFHPEQLITGKEDAANNYARGHYTIGKEIIDPVLDRIRKLSDQCTGLQGFLVFHSFGGGTGSGFTSLLMERLSVDYGKKSKLEFSIYPAPQVSTAVVEPYNSILTTHTTLEHSDCAFMVDNEAIYDICRRNLDIERPTYTNLNRLISQIVSSITASLRFDGALNVDLTEFQTNLVPYPRIHFPLATYAPVISAEKAYHEQLSVAEITNACFEPANQMVKCDPRHGKYMACCLLYRGDVVPKDVNAAIAAIKTKRSIQFVDWSDKRVPMNGILKNSQ

SEQ ID NO: 799126 - protein, 448 aa, Homo sapiens; identical to SEQ ID NO: 799124

SEQ ID NO: 799127 - protein, 448 aa, Homo sapiens; identical to SEQ ID NO: 799124

SEQ ID NO: 799128 - protein, 310 aa, Homo sapiens; identical to SEQ ID NO: 799121

SEQ ID NO: 799129 - protein, 433 aa, Homo sapiens
MGNACWELYCLEHGIQPDGQMPSDKTIGGGDDSFTTFFCETGAGKHVPRAVFVDLEPTVIDEIRNGPYRQLFHPEQLITGKEDAANNYARGHYTIGKEIIDPVLDRIRKLSDQCTGLQGFLVFHSFGGGTGSGFTSLLMERLSVDYGKKSKLEFSIYPAPQVSTAVVEPYNSILTTHTTLEHSDCAFMVDNEAIYDICRRNLDIERPTYTNLNRLISQIVSSITASLRFDGALNVDLTEFQTNLVPYPRIHFPLATYAPVISAEKAYHEQLSVAEITNACFEPANQMVKCDPRHGKYMACCLLYRGDVVPKDVNAAIAAIKTKRSIQFVDWCPTGFKVGINYQPPTVVPGGDLAKVQRAVCMLSNTTAIAEAWARLDHKFDLMYAKRAFVHWYVGEGMEEGEFSEAREDMAALEKDYEEVGIDSYEDEDEGEE

SEQ ID NO: 799130 - protein, 537 aa, Homo sapiens
HSRPESPGRQGWKGRGEGQLWPYGKDRLACSRPKSEHLDDRCLQDAGAGETRPATAPCISAEALGSPACLLKTRKEWLKPESRLLIPAGQRECISVHVGQAGVQMGNACWELYCLEHGIQPDGQMPSDKTIGGGDDSFTTFFCETGAGKHVPRAVFVDLEPTVIDEIRNGPYRQLFHPEQLITGKEDAANNYARGHYTIGKEIIDPVLDRIRKLSDQCTGLQGFLVFHSFGGGTGSGFTSLLMERLSVDYGKKSKLEFSIYPAPQVSTAVVEPYNSILTTHTTLEHSDCAFMVDNEAIYDICRRNLDIERPTYTNLNRLISQIVSSITASLRFDGALNVDLTEFQTNLVPYPRIHFPLATYAPVISAEKAYHEQLSVAEITNACFEPANQMVKCDPRHGKYMACCLLYRGDVVPKDVNAAIAAIKTKRSIQFVDWCPTGFKVGINYQPPTVVPGGDLAKVQRAVCMLSNTTAIAEAWARLDHKFDLMYAKRAFVHWYVGEGMEEGEFSEAREDMAALEKDYEEVGIDSYEDEDEGEE

SEQ ID NO: 799131 - protein, 454 aa, Homo sapiens
SPLSIPQRECISVHVGQAGVQMGNACWELYCLEHGIQPDGQMPSDKTIGGGDDSFTTFFCETGAGKHVPRAVFVDLEPTVIDEIRNGPYRQLFHPEQLITGKEDAANNYARGHYTIGKEIIDPVLDRIRKLSDQCTGLQGFLVFHSFGGGTGSGFTSLLMERLSVDYGKKSKLEFSIYPAPQVSTAVVEPYNSILTTHTTLEHSDCAFMVDNEAIYDICRRNLDIERPTYTNLNRLISQIVSSITASLRFDGALNVDLTEFQTNLVPYPRIHFPLATYAPVISAEKAYHEQLSVAEITNACFEPANQMVKCDPRHGKYMACCLLYRGDVVPKDVNAAIAAIKTKRSIQFVDWCPTGFKVGINYQPPTVVPGGDLAKVQRAVCMLSNTTAIAEAWARLDHKFDLMYAKRAFVHWYVGEGMEEGEFSEAREDMAALEKDYEEVGIDSYEDEDEGEE

SEQ ID NO: 799132 - protein, 475 aa, Homo sapiens
LGCRMAPILPGTRRVTSGASPQVPLPFWRECISVHVGQAGVQMGNACWELYCLEHGIQPDGQMPSDKTIGGGDDSFTTFFCETGAGKHVPRAVFVDLEPTVIDEIRNGPYRQLFHPEQLITGKEDAANNYARGHYTIGKEIIDPVLDRIRKLSDQCTGLQGFLVFHSFGGGTGSGFTSLLMERLSVDYGKKSKLEFSIYPAPQVSTAVVEPYNSILTTHTTLEHSDCAFMVDNEAIYDICRRNLDIERPTYTNLNRLISQIVSSITASLRFDGALNVDLTEFQTNLVPYPRIHFPLATYAPVISAEKAYHEQLSVAEITNACFEPANQMVKCDPRHGKYMACCLLYRGDVVPKDVNAAIAAIKTKRSIQFVDWCPTGFKVGINYQPPTVVPGGDLAKVQRAVCMLSNTTAIAEAWARLDHKFDLMYAKRAFVHWYVGEGMEEGEFSEAREDMAALEKDYEEVGIDSYEDEDEGEE

SEQ ID NO: 799133 - protein, 448 aa, Homo sapiens; identical to SEQ ID NO: 799124

SEQ ID NO: 799134 - protein, 460 aa, Homo sapiens
SFRNLTLLTTTANRECISVHVGQAGVQMGNACWELYCLEHGIQPDGQMPSDKTIGGGDDSFTTFFCETGAGKHVPRAVFVDLEPTVIDEIRNGPYRQLFHPEQLITGKEDAANNYARGHYTIGKEIIDPVLDRIRKLSDQCTGLQGFLVFHSFGGGTGSGFTSLLMERLSVDYGKKSKLEFSIYPAPQVSTAVVEPYNSILTTHTTLEHSDCAFMVDNEAIYDICRRNLDIERPTYTNLNRLISQIVSSITASLRFDGALNVDLTEFQTNLVPYPRIHFPLATYAPVISAEKAYHEQLSVAEITNACFEPANQMVKCDPRHGKYMACCLLYRGDVVPKDVNAAIAAIKTKRSIQFVDWCPTGFKVGINYQPPTVVPGGDLAKVQRAVCMLSNTTAIAEAWARLDHKFDLMYAKRAFVHWYVGEGMEEGEFSEAREDMAALEKDYEEVGIDSYEDEDEGEE

SEQ ID NO: 799135 - protein, 394 aa, Homo sapiens
AGCESAEGTRLNVRRTARTHHDEIRNGPYRQLFHPEQLITGKEDAANNYARGHYTIGKEIIDPVLDRIRKLSDQCTGLQGFLVFHSFGGGTGSGFTSLLMERLSVDYGKKSKLEFSIYPAPQVSTAVVEPYNSILTTHTTLEHSDCAFMVDNEAIYDICRRNLDIERPTYTNLNRLISQIVSSITASLRFDGALNVDLTEFQTNLVPYPRIHFPLATYAPVISAEKAYHEQLSVAEITNACFEPANQMVKCDPRHGKYMACCLLYRGDVVPKDVNAAIAAIKTKRSIQFVDWCPTGFKVGINYQPPTVVPGGDLAKVQRAVCMLSNTTAIAEAWARLDHKFDLMYAKRAFVHWYVGEGMEEGEFSEAREDMAALEKDYEEVGIDSYEDEDEGEE

SEQ ID NO: 799136 - protein, 374 aa, Homo sapiens
PVPIRSGVDRQLFHPEQLITGKEDAANNYARGHYTIGKEIIDPVLDRIRKLSDQCTGLQGFLVFHSFGGGTGSGFTSLLMERLSVDYGKKSKLEFSIYPAPQVSTAVVEPYNSILTTHTTLEHSDCAFMVDNEAIYDICRRNLDIERPTYTNLNRLISQIVSSITASLRFDGALNVDLTEFQTNLVPYPRIHFPLATYAPVISAEKAYHEQLSVAEITNACFEPANQMVKCDPRHGKYMACCLLYRGDVVPKDVNAAIAAIKTKRSIQFVDWCPTGFKVGINYQPPTVVPGGDLAKVQRAVCMLSNTTAIAEAWARLDHKFDLMYAKRAFVHWYVGEGMEEGEFSEAREDMAALEKDYEEVGIDSYEDEDEGEE

SEQ ID NO: 799137 - protein, 529 aa, Homo sapiens
MRECISVHVGQAGVQMGNACWELYCLEHGIQPDGQMPSDKTIGGGDDSFTTFFCETGAGKHVPRAVFVDLEPTVIDEIRNGPYRQLFHPEQLITGKEDAANNYARGHYTIGKEIIDPVLDRIRKLVRVCLGREGTFETVLMVRNIFFQTPFRRSSLTIHGLECGAAMASSVFALTADVSYSFMEPGDRVPQAPPLPKLFFLVLAFQSDQCTGLQGFLVFHSFGGGTGSGFTSLLMERLSVDYGKKSKLEFSIYPAPQVSTAVVEPYNSILTTHTTLEHSDCAFMVDNEAIYDICRRNLDIERPTYTNLNRLISQIVSSITASLRFDGALNVDLTEFQTNLVPYPRIHFPLATYAPVISAEKAYHEQLSVAEITNACFEPANQMVKCDPRHGKYMACCLLYRGDVVPKDVNAAIAAIKTKRSIQFVDWCPTGFKVGINYQPPTVVPGGDLAKVQRAVCMLSNTTAIAEAWARLDHKFDLMYAKRAFVHWYVGEGMEEGEFSEAREDMAALEKDYEEVGIDSYEDEDEGEE

SEQ ID NO: 799138 - protein, 353 aa, Homo sapiens
GSNYTVLRLSCISDIGSTRIDPVLDRIRKLSDQCTGLQGFLVFHSFGGGTGSGFTSLLMERLSVDYGKKSKLEFSIYPAPQVSTAVVEPYNSILTTHTTLEHSDCAFMVDNEAIYDICRRNLDIERPTYTNLNRLISQIVSSITASLRFDGALNVDLTEFQTNLVPYPRIHFPLATYAPVISAEKAYHEQLSVAEITNACFEPANQMVKCDPRHGKYMACCLLYRGDVVPKDVNAAIAAIKTKRSIQFVDWCPTGFKVGINYQPPTVVPGGDLAKVQRAVCMLSNTTAIAEAWARLDHKFDLMYAKRAFVHWYVGEGMEEGEFSEAREDMAALEKDYEEVGIDSYEDEDEGEE

SEQ ID NO: 799139 - protein, 627 aa, Homo sapiens
MRECISVHVGQAGVQMGNACWELYCLEHGIQPDGQMPSDKTIGGGDDSFTTFFCETGAGKHVPRAVFVDLEPTVIGEEEVGTKLKGVEHDSKLLPGERGYLDQAFLALKIPSRTSSCRRQADLRLAWAAGLGFSHTLVSQAGRRMSPSMHLATATTLGEEVPAEHSFVVFALPDEIRNGPYRQLFHPEQLITGKEDAANNYARGHYTIGKEIIDPVLDRIRKLVRVCLGREGTFETVLMVRNIFFQTPFRRSSLTIHGLECGAAMASSVFALTADVSYSFMEPGDRVPQAPPLPKLFFLVLAFQSDQCTGLQGFLVFHSFGGGTGSGFTSLLMERLSVDYGKKSKLEFSIYPAPQVSTAVVEPYNSILTTHTTLEHSDCAFMVDNEAIYDICRRNLDIERPTYTNLNRLISQIVSSITASLRFDGALNVDLTEFQTNLVPYPRIHFPLATYAPVISAEKAYHEQLSVAEITNACFEPANQMVKCDPRHGKYMACCLLYRGDVVPKDVNAAIAAIKTKRSIQFVDWCPTGFKVGINYQPPTVVPGGDLAKVQRAVCMLSNTTAIAEAWARLDHKFDLMYAKRAFVHWYVGEGMEEGEFSEAREDMAALEKDYEEVGIDSYEDEDEGEE

SEQ ID NO: 799140 - protein, 299 aa, Homo sapiens
MRECISVHVGQAGVQMGNACWELYCLEHGIQPDGQMPSDKTIGGGDDSFTTFFCETGAGKHVPRAVFVDLEPTVIDEIRNGPYRQLFHPEQLITGKEDAANNYARGHYTIGKEIIDPVLDRIRKLSDQCTGLQGFLVFHSFGGGTGSGFTSLLMERLSVDYGKKSKLEFSIYPAPQVSTAVVEPYNSILTTHTTLEHSDCAFMVDNEAIYDICRRNLDIERPTYTNLNRLISQIVSSITASLRFDGALNVDLTEFQTNLVPYPHSRGPMQFLEGPRAAGGPRLWPPVLCPGIASNVRNP

SEQ ID NO: 799141 - protein, 448 aa, Homo sapiens; identical to SEQ ID NO: 799124

SEQ ID NO: 799142 - protein, 448 aa, Homo sapiens; identical to SEQ ID NO: 799124

SEQ ID NO: 799143 - protein, 135 aa, Homo sapiens
SPPSPRLNSVGSRALDTVLTPGHPPPSWPRWSLALASAERSGAPAAPTPSSVPPRAAAPATWPRRWLGRGDSRAPPQPAAPTRAPPHRWPSPRPTRASQAQPHLLPREDSDPPKAGGGGGGGRGGRSWRSRGLAR

SEQ ID NO: 799144 - protein, 239 aa, Homo sapiens
NTSCSPRRHPRAAAPPALPPSTRGSPSQLGGPPPFCPARSGRRRPPRLAPSSRVPGPAVGAGRARRGRGPRLVPQRMSCRGRGAGGRWNSTSWSTGCKLPASPRRVSRCSPTGLIKLAFLFSKTRCKFFSLTETPEDYTIIVDEEGFLELPSSEHLSVADATWLALNVVSGGGSFSSSQPIGMTKIAKSVIAPLADQNISVFMLSTYQTDFILVLKRDLPFVTHTLSSEFTILWSVARL

SEQ ID NO: 799145 - protein, 227 aa, Homo sapiens
NTSCSPRRHPRAAAPPALPPSTRGSPSQLGGPPPFCPARSGRRRPPRLAPSSRVPGPAVGAGRARRGRGPRLVPQRMSCRGRGAGGRWNSTSWSTGCKLPASPRRVSRCSPTGLIKLAFLFSKTRCKFFSLTETPEDYTIIVDEEGFLELPSSEHLSVADATWLALNVVSGGGSFSSSQPIGMTKIAKSVIAPLADQNISVFMLSTYQTDFILQSAGITGLSHRTQP

SEQ ID NO: 799146 - protein, 71 aa, Homo sapiens
MTRTPYPAPFALNTALISDREEKTHRTSRVGFTGHPERMGGSFQAGKRKRDGVKRNGWRQGAWHRGRDRGG

SEQ ID NO: 799147 - protein, 698 aa, Homo sapiens
MPSEGRCWETLKALRSSDKGRLCYYRDWLLRREDVLEECMSLPKLSSYSGWVVEHVLPHMQENQPLSETSPSSTSASALDQPSFVPKSPDASSAFSPASPATPNGTKGKDESQHTESMVLQSSRGIKVEGCVRMYELVHRMKGTEGLRLWQEEQERKVQALSEMASEQLKRFDEWKELKQHKEFQDLREVMEKSSREALGHQEKLKAEHRHRAKILNLKLREAEQQRVKQAEQERLRKEEGQIRLRALYALQEEMLQLSQQLDASEQHKALLKVDLAAFQTRGNQLCSLISGIIRASSESSYPTAESQAEAERALREMRDLLMNLGQEITRACEDKRRQDEEEAQVKLQEAQMQQGPEAHKEPPAPSQGPGGKQNEDLQVKVQDITMQWYQQLQDASMQCVLTFEGLTNSKDSQAKKIKMDLQKAATIPVSQISTIAGSKLKEIFDKIHSLLSGKPVQSGGRSVSVTLNPQGLDFVQYKLAEKFVKQGEEEVASHHEAAFPIAVVASGIWELHPRVGDLILAHLHKKCPYSVPFYPTFKEGMALEDYQRMLGYQVKDSKVEQQDNFLKRMSGMIRLYAAIIQLRWPYGNRQEIHPHGLNHGWRWLAQILNMEPLSDVTATLLFDFLEVCGNALMKQYQVQFWKMLILIKEDYFPRIEAITSSGQMGSFIRLKQFLEKCLQHKDIPVPKGFLTSSFWRS

SEQ ID NO: 799148 - protein, 279 aa, Homo sapiens [sequence omitted]

SEQ ID NO: 799149 - protein, 659 aa, Homo sapiens
MPSEGRCWETLKALRSSDKGRLCYYRDWLLRREDVLEECMSLPKLSSYSGWVVEHVLPHMQENQPLSETSPSSTSASALDQPSFVPKSPDASSAFSPASPATPNGTKGKDESQHTESMVLQSSRGIKVEGCVRMYELVHRMKGTEGLRLWQEEQERKVQALSEMASEQLKRFDEWKELKQHKEFQDLREVMEKSSREALGHQEKLKAEHRHRAKILNLKLREAEQQRVKQAEQERLRKEEGQIRLRALYALQEEMLQLSQQLDASEQHKALLKVDLAAFQTRGNQLCSLISGIIRASSESSYPTAESQAEAERALREMRDLLMNLGQEITRACEDKRRQDEEEAQVKLQEAQMQQGPEAHKEPPAPSQGPGGKQNEDLQVKVQDITMQWYQQLQDASMQCVLTFEGLTNSKDSQAKKIKMDLQKAATIPVSQISTIAGSKLKEIFDKIHSLLSGKPVQSGGRSVSVTLNPQGLDFVQYKLAEKFVKQGEEEVASHHEAAFPIAVVASGIWELHPRVGDLILAHLHKKCPYSVPFYPTFKEGMALEDYQRMLGYQVKDSKVEQQDNFLKRMSGMIRLYAAIIQLRWPYGNRQEIHPHGLNHGWRWLAQILNMEPLSDVTATLLFDFLEVCGNALMKQYQVQFWKMLILIKEDYFPRYQAC

SEQ ID NO: 799150 - protein, 378 aa, Homo sapiens
MPSEGRCWETLKALRSSDKGRLCYYRDWLLRREDVLEECMSLPKLSSYSGWVVEHVLPHMQENQPLSETSPSSTSASALDQPSFVPKSPDASSAFSPASPATPNGTKGKDESQHTESMVLQSSRGIKVEGCVRMYELVHRMKGTEGLRLWQEEQERKVQALSEMASEQLKRFDEWKELKQHKEFQDLREVMEKSSREALGHQEKLKAEHRHRAKQRVKQAEQERLRKEEGQIRLRALYALQEEMLQLSQQLDASEQHKALLKVDLAAFQTRGNQLCSLISGIIRASSESSYPTAESQAEAERALREMRDLLMNLGQEITRACEDKRRQDEEEAQVKLQEAQMQQGPEAHKEPPAPSQGPGGKQNEDFQVNVQTSMRGT

SEQ ID NO: 799151 - protein, 135 aa, Homo sapiens [sequence omitted]

SEQ ID NO: 799152 - protein, 659 aa, Homo sapiens; identical to SEQ ID NO: 799149

SEQ ID NO: 799153 - protein, 701 aa, Homo sapiens
MPIIPTLCEAEAGRVLEASSSWEPGLVSHTCNPSTLDVLEECMSLPKLSSYSGWVVEHVLPHMQENQPLSETSPSSTSASALDQPSFVPKSPDASSAFSPASPATPNGTKGKDESQHTESMVLQSSRGIKVEGCVRMYELVHRMKGTEGLRLWQEEQERKVQALSEMASEQLKRFDEWKELKQHKEFQDLREVMEKSSREALGHQEKLKAEHRHRAKILNLKLREAEQQRVKQAEQERLRKEEGQIRLRALYALQEEMLQLSQQLDASEQHKALLKVDLAAFQTRGNQLCSLISGIIRASSESSYPTAESQAEAERALREMRDLLMNLGQEITRACEDKRRQDEEEAQVKLQEAQMQQGPEAHKEPPAPSQGPGGKQNEDLQVKVQDITMQWYQQLQDASMQCVLTFEGLTNSKDSQAKKIKMDLQKAATIPVSQISTIAGSKLKEIFDKIHSLLSGKPVQSGGRSVSVTLNPQGLDFVQYKLAEKFVKQGEEEVASHHEAAFPIAVVASGIWELHPRVGDLILAHLHKKCPYSVPFYPTFKEGMALEDYQRMLGYQVKDSKVEQQDNFLKRMSGMIRLYAAIIQLRWPYGNRQEIHPHGLNHGWRWLAQILNMEPLSDVTATLLFDFLEVCGNALMKQYQVQFWKMLILIKEDYFPRIEAITSSGQMGSFIRLKQFLEKCLQHKDIPVPKGFLTSSFWRS

SEQ ID NO: 799154 - protein, 698 aa, Homo sapiens; identical to SEQ ID NO: 799147

SEQ ID NO: 799155 - protein, 107 aa, Homo sapiens
MLISSMDSCSRSQNPARSWAVGRGLASGFCGPDGDQWGQLSRGLSCSPQPPNKQGSSGPCQHPRGLLRPSVWGRNRSSWPWCDSDTERSPIHSQVSAHRSPGQGCPP

SEQ ID NO: 799156 - protein, 1427 aa, Homo sapiens [sequence omitted]

SEQ ID NO: 799157 - protein, 1175 aa, Homo sapiens
MLLPSDVARLVLGYLQQENLISTCQTFILESSDLKEYAEHCTDEGFIPACLLSLFGKNLTTILNEYVAMKTKETSNNVPAIMSSLWKKLDHTLSQIRSMQSSPRFAGSQRARTRTGIAEIKRQRKLASQTAPASAELLTLPYLSGQFTTPPSTGTQVTRPSGQISDPSRSYFVVVNHSQSQDTVTTGEALNVIPGAQEKKAHASLMSPGRRKSESQRKSTTLSGPHSTIRNFQDPNAFAVEKQMVIENAREKILSNKSLQEKLAENINKFLTSDNNIAQVPKQTDNNPTEPETSIDEFLGLPSEIHMSEEAIQDILEQTESDPAFQALFDLFDYGKTKNNKNISQSISSQPMESNPSIVLADETNLAVKGSFETEESDGQSGQPAFCTSYQNDDPLNALKNSNNHDVLRQEDQENFSQISTSIQKKAFKTAVPTEQKCDIDITFESVPNLNDFNQRGNSNAECNPHCAELYTNQMSTETEMAIGIEKNSLSSNVPSESQLQPDQPDIPITSFVSLGCEANNENLILSGKSSQLLSQDTSLTGKPSKKSQFCENSNDTVKLKINFHGSKSSDSSEIHKSKIEINVLEPVMSQLSNCQDNSCLQSEILPVSVESSHLNVSGQVEIHLGDSLSSTKQPSNDSASVELNHTENEAQASKSENSQEPSSSVKEENTIFLSLGGNANCEKVALTPPEGTPVENSHSLPPESVCSSVGDSHPESQNTDDKPSSNNSAEIDASNIVSLKVIISDDPFVSSDTELTSAVSSINGENLPTIILSSPTKSPTKNAELVKCLSSEETVGAVVYAEVGDSASMEQSLLTFKSEDSAVNNTQNEDGIAFSANVTPCVSKDGGYIQLMPATSTAFGNSNNILIATCVTDPTALGTSVSQSNVVVLPGNSAPMTAQPLPPQLQTPPRSNSVFAVNQAVSPNFSQGSAIIIASPVQPVLQGMVGMIPVSVVGQNGNNFSTPPRQVLHMPLTAPVCNRSIPQFPVPPKSQKAQGLRNKPCIGKQVNNLVDSSGHSVGCHAQKTEVSDKSIATDLGKKSEETTVPFPEESIVPAAKPCHRRVLCFDSTTAPVANTQGPNHKMVSQNKERNAVSFPNLDSPNVSSTLKPPSNNAIKREKEKPPLPKILSKSESAISRHTTIRETQSEKKVSPTEIVLESFHKATANKENGDILSS

SEQ ID NO: 799158 - protein, 1277 aa, Homo sapiens
MIELGTESRPSGQISDPSRSYFVVVNHSQSQDTVTTGEALNVIPGAQEKKAHASLMSPGRRKSESQRKSTTLSGPHSTIRNFQDPNAFAVEKQMVIENAREKILSNKSLQEKLAENINKFLTSDNNIAQVPKQTDNNPTEPETSIDEFLGLPSEIHMSEEAIQDILEQTESDPAFQALFDLFDYGKTKNNKNISQSISSQPMESNPSIVLADETNLAVKGSFETEESDGQSGQPAFCTSYQNDDPLNALKNSNNHDVLRQEDQENFSQISTSIQKKAFKTAVPTEQKCDIDITFESVPNLNDFNQRGNSNAECNPHCAELYTNQMSTETEMAIGIEKNSLSSNVPSESQLQPDQPDIPITSFVSLGCEANNENLILSGKSSQLLSQDTSLTGKPSKKSQFCENSNDTVKLKINFHGSKSSDSSEIHKSKIEINVLEPVMSQLSNCQDNSCLQSEILPVSVESSHLNVSGQVEIHLGDSLSSTKQPSNDSASVELNHTENEAQASKSENSQEPSSSVKEENTIFLSLGGNANCEKVALTPPEGTPVENSHSLPPESVCSSVGDSHPESQNTDDKPSSNNSAEIDASNIVSLKVIISDDPFVSSDTELTSAVSSINGENLPTIILSSPTKSPTKNAELVKCLSSEETVGAVVYAEVGDSASMEQSLLTFKSEDSAVNNTQNEDGIAFSANVTPCVSKDGGYIQLMPATSTAFGNSNNILIATCVTDPTALGTSVSQSNVVVLPGNSAPMTAQPLPPQLQTPPRSNSVFAVNQAVSPNFSQGSAIIIASPVQPVLQGMVGMIPVSVVGQNGNNFSTPPRQVLHMPLTAPVCNRSIPQFPVPPKSQKAQGLRNKPCIGKQVNNLVDSSGHSVGCHAQKTEVSDKSIATDLGKKSEETTVPFPEESIVPAAKPCHRRVLCFDSTTAPVANTQGPNHKMVSQNKERNAVSFPNLDSPNVSSTLKPPSNNAIKREKEKPPLPKILSKSESAISRHTTIRETQSEKKVSPTEIVLESFHKATANKENELCSDVERQKNPENSKLSIGQQNGGLRSEKSIASLQEMTKKQGTSSNNKNVLSVGTAVKDLKQEQTKSASSLITTEMLQDIQRHSSVSRLADSSDLPVPRTPGSGAGEKHKEEPIDIIKAPSSRRFSEDSSTSKVMVPPVTPDLPACSPASETGSENSVNMAAHTLMILSRAAISRTTSATPLKDNTQQFRASSRSTTKKRKIEELDERERNSRPSSKNLTNSSIPMKKKKIKKKKLPSSFPAGMDVDKFLLSLHYDE

SEQ ID NO: 799159 - protein, 276 aa, Homo sapiens
FLSLGGNANCEKVALTPPEGTPVENSHSLPPESVCSSVGDSHPESQNTDDKPSSNNSAEIDASNIVSLKVIISDDPFVSSDTELTSAVSSINGENLPTIILSSPTKSPTKNAELVKCLSSEETVGAVVYAEVGDSASMEQSLLTFKSEDSAVNNTQNEDGIAFSANVTPCVSKDGGYIQLMPATSTAFGNSNNILIATCVTDPTALGTSVSQSNVVVLPGNSAPMTAQPLPPQLQTPPRSNSVFAVNQAVSPNFSQGNFNNIIEICFSGLGSNFFC

SEQ ID NO: 799160 - protein, 1427 aa, Homo sapiens [sequence omitted]

SEQ ID NO: 799161 - protein, 1427 aa, Homo sapiens [sequence omitted]

SEQ ID NO: 799162 - protein, 1427 aa, Homo sapiens [sequence omitted]

SEQ ID NO: 799163 - protein, 480 aa, Homo sapiens
  misc_feature (473)..(473): Xaa can be any naturally occurring amino acid
MLLPSDVARLVLGYLQQENLISTCQTFILESSDLKEYAEHCTDEGFIPACLLSLFGKNLTTILNEYVAMKTKETSNNVPAIMSSLWKKLDHTLSQIRSMQSSPRFAGSQRARTRTGIAEIKRQRKLASQTAPASAELLTLPYLSGQFTTPPSTGTQVTRPSGQISDPSRSYFVVVNHSQSQDTVTTGEALNVIPGAQEKKAHASLMSPGRRKSESQRKSTTLSGPHSTIRNFQDPNAFAVEKQMVIENAREKILSNKSLQEKLAENINKFLTSDNNIAQVPKQTDNNPTEPETSIDEFLGLPSEIHMSEEAIQDILEQTESDPAFQALFDLFDYGKTKNNKNISQSISSQPMESNPSIVLADETNLAVKGSFETEESDGQSGQPAFCTSYQNDDPLNALKNSNNHDVLRQEDQENFSQISTSIQKKAFKTAVPTEQKCDIDITFESVPNLNDFNQRGNSNAECNPHCAEFFPXPQFSLET

SEQ ID NO: 799164 - protein, 110 aa, Homo sapiens
QCALETFLAFHLLLICFTSCRCGVGSQVVASHGHGAFGPARLPGGAGRRLPHQTRGSRRRRLPGVAEPLLRLSSPLPHPGHSAVVSAGAGRADGDPWGSPPTAPLHRGRG

SEQ ID NO: 799165 - protein, 523 aa, Homo sapiens
PRRGLASTATCKSAQLDFCAGSRSCLLSLWQPSSWSLKMETNESTEGSRSRSRSLDIQPSSEGLGPTSEPFPSSDDSPRSALAAATAAAAAAASAAAATAAFTTAKAAALSTKTPAPCSEFMEPSSDPSLLGEPCAGPGFTHNIAHGSLGFEPVYVSCIAQDTCTTTDHSSNPGPVPGSSSGPVLGSSSGAGHGSGSGSGPGCGSVPGSGSGPGPGSGPGSGPGHGSGSHPGPASGPGPDTGPDSELSPCIPPGFRNLVADRVPNYTSWSQHCPWEPQKQPPWEFLQVLEPGARGLWKPPDIKGKLMVCYETLPRGQCLLYNWEEERATNHLDQVPSMQDGSESFFFRHGHRGLLTMQLKSPMPSSTTQKDSYQPPGNVYWPLRGKREAMLEMLLQHQICKEVQAEQEPTRKLFEVESVTHHDYRMELAQAGTPAPTKPHDYRQEQPETFWIQRAPQLPGVSNIRTLDTPFRKNCSFSTPVPLSLGKLLPYEPENYPYQLGEISSLPCPGGRLGGGGGRMTPF

SEQ ID NO: 799166 - protein, 400 aa, Homo sapiens
PRRGLASTATCKSAQLDFCAGSRSCLLSLWQPSSWSLKMETNESTEGSRSRSRSLDIQPSSEGLGPTSEPFPSSDDSPRSALAAATAAAAAAASAAAATAAFTTAKAAALSTKTPAPCSEFMEPSSDPSLLGEPCAGPGFTHNIAHGSLGFEPVYVSCIAQDTCTTTDHSSNPGPVPGSSSGPVLGSSSGAGHGSGSGSGPGCGSVPGSGSGPGPGSGPGSGPGHGSGSHPGPASGPGPDTGPDSELSPCIPPGFRNLVADRVPNYTSWSQHCPWEPQKQPPWEFLQVLEPGARGLWKPPDIKGKLMVCYETLPRGQCLLYNWEEERATNHLDQVPSMQDGSESFFFRHGHRGLLTMQLKSPMPSSTTQKDSYQPPGNVYWPLRGKREAMLEMLLQHQIW

SEQ ID NO: 799167 - protein, 444 aa, Homo sapiens
PRRGLASTATCKSAQLDFCAGSRSCLLSLWQPSSWSLKMETNESTEGSRSRSRSLDIQPSSEGLGPTSEPFPSSDDSPRSALAAATAAAAAAASAAAATAAFTTAKAAALSTKTPAPCSEFMEPSSDPSLLGEPCAGPGFTHNIAHGSLGFEPVYVSCIAQDTCTTTDHSSNPGPVPGSSSGPVLGSSSGAGHGSGSGSGPGCGSVPGSGSGPGPGSGPGSGPGHGSGSHPGPASGPGPDTGPDSELSPCIPPGFRNLVADRVPNYTSWSQHCPWEPQKQPPWEFLQVLEPGARGLWKPPDIKGKLMVCYETLPRGQCLLYNWEEERATNHLDQVPSMQDGSESFFFRHGHRGLLTMQLKSPMPSSTTQKDSYQPPGNVYWPLRGKREAMLEMLLQHQICKEVQAEQEPTRKLFEVESVTHHDYRMELAQAGTPAPTKHLVNTQ

SEQ ID NO: 799168 - protein, 107 aa, Homo sapiens
PRRGLASTATCKSAQLDFCAGSRSCLLSLWQPSSWSLKMETNESTEGSRSRSRSLDIQPSSEGLGPTSEPFPSSDDSPREPPTTWIKSQACRMALRVFSSDTDTGDC

SEQ ID NO: 799169 - protein, 141 aa, Homo sapiens
GSGSGPGCGSVPGSGSGPGPGSGPGSGPGHGSGSHPGPASGPGPDTGPDSELSPCIPPGFRNLVADRVPNYTSWSQHCPWEPQKQPPWEFLQVLEPGARGLWKPPDIKGKLMVCYETLPRGQCLLYNWEEEVLKFWPAPFS

SEQ ID NO: 799170 - protein, 464 aa, Homo sapiens
PRRGLASTATCKSAQLDFCAGSRSCLLSLWQPSSWSLKMETNESTEGSRSRSRSLDIQPSSEGLGPTSEPFPSSDDSPRSALAAATAAAAAAASAAAATAAFTTAKAAALSTKTPAPCSEFMEPSSDPSLLGEPCAGPGFTHNIAHGSLGFEPVYVSCIAQDTCTTTDHSSNPGPVPGSSSGPVLGSSSGAGHGSGSGSGPGCGSVPGSGSGPGPGSGPGSGPGHGSGSHPGPASGPGPDTGPDSELSPCIPPGFRNLVADRVPNYTSWSQHCPWEPQKQPPWEFLQVLEPGARGLWKPPDIKGKLMVCYETLPRGQCLLYNWEEERATNHLDQVPSMQDGSESFFFRHGHRGLLTMQLKSPMPSSTTQKDSYQPPGNVYWPLRGKREAMLEMLLQHQICKEVQAEQEPTRKLFEVESVTHHDYRMELAQAGTPAPTKPHDYRQEQPETFWIQRAPQLPVCEGD

SEQ ID NO: 799171 - protein, 517 aa, Homo sapiens
PRRGLASTATCKSAQLDFCAGSRSCLLSLWQPSSWSLKMETNESTEGSRSRSRSLDIQPSSEGLGPTSEPFPSSDDSPRSALAAATAAAAAAASAAAATAAFTTAKAAALSTKTPAPCSEFMEPSSDPSLLGEPCAGPGFTHNIAHGSLGFEPVYVSCIAQDTCTTTDHSSNPGPVPGSSSGPVLGSSSGAGHGSGSGSGPGCGSVPGSGSGPGPGSGPGSGPGHGSGSHPGPASGPGPDTGPDSELSPCIPPGFRNLVADRVPNYTSWSQHCPWEPQKQPPWEFLQVLEPGARGLWKPPDIKGKLMVCYETLPRGQCLLYNWEEERATNHLDQVPSMQDGSESFFFRHGHRGLLTMQLKSPMPSSTTQKDSYQPPGNVYWPLRGKREAMLEMLLQHQICKEVQAEQEPTRKLFEVESVTHHDYRMELAQAGTPAPTKEQPETFWIQRAPQLPGVSNIRTLDTPFRKNCSFSTPVPLSLGKLLPYEPENYPYQLGEISSLPCPGGRLGGGGGRMTPF

SEQ ID NO: 799172 - protein, 186 aa, Homo sapiens
MQDGSESFFFRHGHRGLLTMQLKSPMPSSTTQKDSYQPPGNVYWPLRGKREAMLEMLLQHQICKEVQAEQEPTRKLFEVESVTHHDYRMELAQAGTPAPTKPHDYRQEQPETFWIQRAPQLPGVSNIRTLDTPFRKNCSFSTPVPLSLGKLLPYEPENYPYQLGEISSLPCPGGRLGGGGGRMTPF

SEQ ID NO: 799173 - protein, 133 aa, Homo sapiens
MALTPLGLHSKEVQAEQEPTRKLFEVESVTHHDYRMELAQAGTPAPTKPHDYRQEQPETFWIQRAPQLPGVSNIRTLDTPFRKNCSFSTPVPLSLGKLLPYEPENYPYQLGEISSLPCPGGRLGGGGGRMTPF

SEQ ID NO: 799174 - protein, 915 aa, Homo sapiens
MRKSSSPSLSNCNSVLANKIFGIPLDELQQGGHPDNEVPFIVRHVVDYIEEHGGLEQQGLFQVNGNAETVEWLRQRYDSGEEVDLVKEADVPSAISLLRFFLQELPEPVIPGSLHIHLMQLSQDYNNEDEFGRKLRFLLQQLPPVNYSLLKFLCRFLANVASHHEEIWSANSLAAVFGPDVFHIYTDVEDMKEQEIVSRIMAGLLENYYEFFENEEEDFSSNDLSSITEQVNELSEEEEEDEKLEHIEELPEEGAEKSNDMPEVVQLRMTENILESNSVTATSTHISPISILPASTDILERTIRAAVEQHLFDLQSSIDHDLKNLQQQSVVCNNEAESIHCDGEGSNNQIDIADDIINASESNRDCSKPVASTNLDNEAMQQDCVFENEENTQSVGILLEPCSDRGDSEDGCLEREEYLLFDSDKLSHLILDSSSKICDLNANTESEVPGGQSVGVQGEAACVSIPHLDLKNVSDGDKWEEPFPAFKSWQEDSESGEAQLSPQAGRMNHHPLEEDCPPVLSHRSLDFGQSQRFLHDPEKLDSSSKALSFTRIRRSSFSSKDEKREDRTPYQLVKKLQKKIRQFEEQFERERNSKPSYSDIAANPKVLKWMTELTKLRKQIKDAKHKNSDGEFVPQTRPRSNTLPKSFGSSLDHEDEENEDEPKVIQKEKKPSKEATLELILKRLKEKRIERCLPEDIKKMTKDHLVEEKASLQKSLLYYESQHGRPVTKEERHIVKPLYDRYRLVKQMLTRASITPVLGSPSTKRRGQMLQPIIEGETAHFFEEIKEEEEDGVNLSSELGDMLKTAVQVQSSLENSESDVEENQEKLALDLRLSSSRAASMPELLEQLWKARAEKKKLRKTLREFEEAFYQQNGRNAQKEDRVPVLEEYREYKKIKAKLRLLEVLISKQDSSKSI

SEQ ID NO: 799175 - protein, 915 aa, Homo sapiens; identical to SEQ ID NO: 799174

SEQ ID NO: 799176 - protein, 797 aa, Homo sapiens
MQLSQDYNNEDEFGRKLRFLLQQLPPVNYSLLKFLCRFLANVASHHEEIWSANSLAAVFGPDVFHIYTDVEDMKEQEIVSRIMAGLLENYYEFFENEEEDFSSNDLSSITEQVNELSEEEEEDEKLEHIEELPEEGAEKSNDMPEVVQLRMTENILESNSVTATSTHISPISILPASTDILERTIRAAVEQHLFDLQSSIDHDLKNLQQQSVVCNNEAESIHCDGEGSNNQIDIADDIINASESNRDCSKPVASTNLDNEAMQQDCVFENEENTQSVGILLEPCSDRGDSEDGCLEREEYLLFDSDKLSHLILDSSSKICDLNANTESEVPGGQSVGVQGEAACVSIPHLDLKNVSDGDKWEEPFPAFKSWQEDSESGEAQLSPQAGRMNHHPLEEDCPPVLSHRSLDFGQSQRFLHDPEKLDSSSKALSFTRIRRSSFSSKDEKREDRTPYQLVKKLQKKIRQFEEQFERERNSKPSYSDIAANPKVLKWMTELTKLRKQIKDAKHKNSDGEFVPQTRPRSNTLPKSFGSSLDHEDEENEDEPKVIQKEKKPSKEATLELILKRLKEKRIERCLPEDIKKMTKDHLVEEKASLQKSLLYYESQHGRPVTKEERHIVKPLYDRYRLVKQMLTRASITPVLGSPSTKRRGQMLQPIIEGETAHFFEEIKEEEEDGVNLSSELGDMLKTAVQVQSSLENSESDVEENQEKLALDLRLSSSRAASMPELLEQLWKARAEKKKLRKTLREFEEAFYQQNGRNAQKEDRVPVLEEYREYKKIKAKLRLLEVLISKQDSSKSI

SEQ ID NO: 799177 - protein, 915 aa, Homo sapiens; identical to SEQ ID NO: 799174

SEQ ID NO: 799178 - protein, 915 aa, Homo sapiens; identical to SEQ ID NO: 799174

SEQ ID NO: 799179 - protein, 915 aa, Homo sapiens; identical to SEQ ID NO: 799174

SEQ ID NO: 799180 - protein, 142 aa, Homo sapiens
EKRLPGPPMLRSQSQARARSRGSRSALGAPPRPRPPRPSRPPAPPAPHCARVCGAGRKGRRSRAGAGTEAWRAGLGRFRACQGKAGEEAGGGRREERSNGVLLRFDILKRSLDSLPGAGMAACAMVGDQRGARAGAGERGGR

SEQ ID NO: 799181 - protein, 222 aa, Homo sapiens
MAASVRQARSLLGVAATLAPGSRGYRARPPPRRRPGPRWPDPEDLLTPRWQLGPRYAAKQFARYGAASGVVPGSLWPSPEQLRELEAEEREWYPSLATMQESLRVKQLAEEQKRREREQHIAECMAKMPQMIVNWQQQQRENWEKAQADKERRARLQAEAQELLGYQVDPRSARFQELLQDLEKKERKRLKEEKQKRKKEARAAALAAAVAQDPAASGAPSS

SEQ ID NO: 799182 - protein, 222 aa, Homo sapiens; identical to SEQ ID NO: 799181

SEQ ID NO: 799183 - protein, 233 aa, Homo sapiens
RTRLVEPGVIRRGASVRQARSLLGVAATLAPGSRGYRARPPPRRRPGPRWPDPEDLLTPRWQLGPRYAAKQFARYGAASGVVPGSLWPSPEQLRELEAEEREWYPSLATMQESLRVKQLAEEQKRREREQHIAECMAKMPQMIVNWQQQQRENWEKAQADKERRARLQAEAQELLGYQVDPRSARFQELLQDLEKKERKRLKEEKQKRKKEARAAALAAAVAQDPAASGAPSS

SEQ ID NO: 799184 - protein, 86 aa, Homo sapiens
VIYDPYDTRYAAKQFARYGAASGVVPGSLWPSPEQLRELEAEEREWYPSLATMQESLRVKQLAEEQKRRERSSTSRSALSIGIHQK

SEQ ID NO: 799185 - protein, 233 aa, Homo sapiens; identical to SEQ ID NO: 799183

SEQ ID NO: 799186 - protein, 222 aa, Homo sapiens; identical to SEQ ID NO: 799181

SEQ ID NO: 799187 - protein, 222 aa, Homo sapiens; identical to SEQ ID NO: 799181

SEQ ID NO: 799188 - protein, 192 aa, Homo sapiens
RLLSWRYPLCNPEDLLTPRWQLGPRYAAKQFARYGAASGVVPGSLWPSPEQLRELEAEEREWYPSLATMQESLRVKQLAEEQKRREREQHIAECMAKMPQMIVNWQQQQRENWEKAQADKERRARLQAEAQELLGYQVDPRSARFQELLQDLEKKERKRLKEEKQKRKKEARAAALAAAVAQDPAASGAPSS

SEQ ID NO: 799189 - protein, 126 aa, Homo sapiens
RTRLVEPGVIRRGASVRQARSLLGVAATLAPGSRGYRARPPPRRRPGPRWPDPEDLLTPRWQLGPRYAAKQFARYGAASGVVPGSLWPSPEQLREGAAHRRVHGQDATDDCELAAAAAGELGEGPG

SEQ ID NO: 799190 - protein, 109 aa, Homo sapiens
GLASQPTSFSCAGCSLPSNIELQVLQFWDSDWLSLSACRQPIVGPCDHILPEEIPWSLKWFCISTEIYKSGCLLPLSHFSSSCSSSSIGSSVSSGVGIKKCGLRGGLLT

SEQ ID NO: 799191 - protein, 285 aa, Homo sapiens
MLYLIGLGLGDAKDITVKGLEVVRRCSRVYLEAYTSVLTVGKEALEEFYGRKLVVADREEVEQEADNILKDADISDVAFLVVGDPFGATTHSDLVLRATKLGIPYRVIHNASIMNAVGCCGLQLYKFGETVSIVFWTDTWRPESFFDKVKKNRQNGMHTLCLLDIKVKEQSLENLIKGRKIYEPPRYMSVNQAAQQLLEIVQNQRIRGEEPAVTEETLCVGLARVGADDQKIAAGTLRQMCTVDLGEPLHSLIITGGSIHPMEMEMLSLFSIPENSSESQSINGL

SEQ ID NO: 799192 - protein, 159 aa, Homo sapiens
MLHSLWLVIHLDTWRPESFFDKVKKNRQNGMHTLCLLDIKVKEQSLENLIKGRKIYEPPRYMSVNQAAQQLLEIVQNQRIRGEEPAVTEETLCVGLARVGADDQKIAAGTLRQMCTVDLGEPLHSLIITGGSIHPMEMEMLSLFSIPENSSESQSINGL

SEQ ID NO: 799193 - protein, 285 aa, Homo sapiens; identical to SEQ ID NO: 799191

SEQ ID NO: 799194 - protein, 172 aa, Homo sapiens
MNAVGCCGLQLYKFGETVSIVFWTDTWRPESFFDKVKKNRQNGMHTLCLLDIKVKEQSLENLIKGRKIYEPPRYMSVNQAAQQLLEIVQNQRIRGEEPAVTEETLCVGLARVGADDQKIAAGTLRQMCTVDLGEPLHSLIITGGSIHPMEMEMLSLFSIPENSSESQSINGL

SEQ ID NO: 799195 - protein, 240 aa, Homo sapiens
MLYLIGLGLGDAKDITVKGLEVVRRCSRVYLEAYTSVLTVGKEALEEFYGRKLVVADREEVEQEADNILKDADISDVAFLVVGDPFGATTHSDLVLRATKLGIPYRVIHNASIMNAVGCCGLQLYKFGETVSIVFWTDTWRPESFFDKVKKNRQNGMHTLCLLDIKVKEQSLENLINSYRGDTLCWLSQGWSRRPENCSRHFKANVHCGLGRTIAFLDHHRRQHTSNGDGDAKSVFHTRK

SEQ ID NO: 799196 - protein, 159 aa, Homo sapiens; identical to SEQ ID NO: 799192

SEQ ID NO: 799197 - protein, 194 aa, Homo sapiens
DSSKEMRRVNGGNPFMKPSDLVRTHYHENSMELYKFGETVSIVFWTDTWRPESFFDKVKKNRQNGMHTLCLLDIKVKEQSLENLIKGRKIYEPPRYMSVNQAAQQLLEIVQNQRIRGEEPAVTEETLCVGLARVGADDQKIAAGTLRQMCTVDLGEPLHSLIITGGSIHPMEMEMLSLFSIPENSSESQSINGL

SEQ ID NO: 799198 - protein, 137 aa, Homo sapiens
AGIRFSKDCSFTLMSSKHNVCMPFCLFFFTLSKKLSGLQVSVNQAAQQLLEIVQNQRIRGEEPAVTEETLCVGLARVGADDQKIAAGTLRQMCTVDLGEPLHSLIITGGSIHPMEMEMLSLFSIPENSSESQSINGL

SEQ ID NO: 799199 - protein, 234 aa, Homo sapiens
MLYLIGLGLGDAKDITVKGLEVVRRCSRVYLEAYTSVLTVGKEALEEFYGRKLVVADREEVEQEADNILKDADISDVAFLVVGDPFGATTHSDLVLRATKLGIPYRVIHNASIMNAVGCCGLQLYKFGETVSIVFWTDTWRPESFFDKVKKNRQNGMHTLCLLDIKVKEQSLENLIKGRKIYEPPRYMSVNQAAQQLLEIVQNQRIRGEEPAVTEETLCVGLARVGADDQIAGA

SEQ ID NO: 799200 - protein, 234 aa, Homo sapiens; identical to SEQ ID NO: 799199

SEQ ID NO: 799201 - protein, 105 aa, Homo sapiens
MLYLIGLGLGDAKDITVKGLEVVRRCSRVYLEAYTSVLTVGKEALEEFYGRKLVVADREEVEQEADNILKDADISDVAFLVVGDPFGVSQGRYFEFLTHLLFFNQ

SEQ ID NO: 799202 - protein, 285 aa, Homo sapiens; identical to SEQ ID NO: 799191

SEQ ID NO: 799203 - protein, 285 aa, Homo sapiens; identical to SEQ ID NO: 799191

SEQ ID NO: 799204 - protein, 172 aa, Homo sapiens; identical to SEQ ID NO: 799194

SEQ ID NO: 799205 - protein, 172 aa, Homo sapiens; identical to SEQ ID NO: 799194

SEQ ID NO: 799206 - protein, 259 aa, Homo sapiens
MLYLIGLGLGDAKDITVKGLEVVRRCSRVYLEAYTSVLTVGKEALEEFYGRKLVVADREEVEQEADNILKDADISDVAFLVVGDPFGATTHSDLVLRATKLGIPYRVIHNASIMNAVGCCGLQLYKFGETVSIVFWTDTWRPESFFDKVKKGRKIYEPPRYMSVNQAAQQLLEIVQNQRIRGEEPAVTEETLCVGLARVGADDQKIAAGTLRQMCTVDLGEPLHSLIITGGSIHPMEMEMLSLFSIPENSSESQSINGL

SEQ ID NO: 799207 - protein, 237 aa, Homo sapiens
MLYLIGLGLGDAKDITVKGLEVVRRCSRVYLEAYTSVLTVGKEALEEFYGRKLVVADREEVEQEADNILKDADISDVAFLVVGDPFGATTHSDLVLRATKLGIPYRVIHNASIMNAVGCCGLQLYKFGETVSIVFWTDTWRPESFFDKVKKNRQNGMHTLCLLAVTEETLCVGLARVGADDQKIAAGTLRQMCTVDLGEPLHSLIITGGSIHPMEMEMLSLFSIPENSSESQSINGL

SEQ ID NO: 799208 - protein, 159 aa, Homo sapiens; identical to SEQ ID NO: 799192

SEQ ID NO: 799209 - protein, 120 aa, Homo sapiens
MNAVGCCGLQLYKFGETVSIVFWTDTWRPESFFDKVKKNRQNGMHTLCLLDIKVKEQSLENLIKGRKIYEPPRYMSVNQAAQQLLEIVQNQRIRGEEPAVTEETLCVGLARVGADDHCIP

SEQ ID NO: 799210 - protein, 144 aa, Homo sapiens
MLYLIGLGLGDAKDITVKGLEVVRRCSRVYLEAYTSVLTVGKEALEEFYGRKLVVADREEVEQEADNILKDADISDVAFLVVGDPFGATTHSDLVLRATKLGIPYRVIHNASIMNAVGCCGLQLYKLVLTDCLSFCLISPSSNL

SEQ ID NO: 799211 - protein, 267 aa, Homo sapiens
LVQAQPCHSPEKATSEWGLQALWPQEERAGGPLSPLLGQLPCPSPASGTLIISVGLFWGLLGFISRVENLEGPSWQSQGWGQRDPIPSALNLCFTQSPSESWELALSTPRGGPQAHPGCPSMAPAASALHPSRPSLLLMVTSACLSTGSSPRPGPLLPWKPSKRPLVAPQRVLAGLCQVQGPVGGQQEPRRPSAQEQTHMATLVRSATGSVVERWNVCTVTSAEYENWPVAGYKQDDALAVGHVGGEVQGQLEVRGCLFQVDDVVVQ

SEQ ID NO: 799212 - protein, 67 aa, Homo sapiens
MEPSMAARSFSGSLSARSGWYSLVLLEDALCLKAAVTKASQEAATDPSGSTRHTASSPAVGGGPGGA

SEQ ID NO: 799213 - protein, 89 aa, Homo sapiens
IRVLARCSPGSDGREGRGIPTAATALSASARMYMKHGTNSCSCEASRSLQSWQKLKGEPACGMAREGARERGRSCQALLNNQISRELTD

SEQ ID NO: 799214 - protein, 442 aa, Homo sapiens
MGRVQLFEISLSHGRVVYSPGEPLAGTVRVRLGAPLPFRAIRVTCIGSCGVSNKANDTAWVVEEGYFNSSLSLADKGSLPAGEHSFPFQFLLPATAPTSFEGPFGKIVHQVRAAIHTPRFSKDHKCSLVFYILSPLNLNSIPDIEQPNVASATKKFSYKLVKTGSVVLTASTDLRGYVVGQALQLHADVENQSGKDTSPVVASLLQKVSYKAKRWIHDVRTIAEVEGAGVKAWRRAQWHEQILVPALPQSALPGCSLIHIDYYLQVSLKAPEATVTLPVFIGNIAVNHAPVSPRPGLGLPPGAPPLVVPSAPPQEEAEAEAAAGGPHFLDPVFLSTKSHSQRQPLLATLSSVPGAPEPCPQDGSPASHPLHPPLCISTGATVPYFAEGSGGPVPTTSTLILPPEYSSWGYPYGESTARAWQGGDAKSPTQTLLSSRRGPTVL

SEQ ID NO: 799215 - protein, 433 aa, Homo sapiens
MGRVQLFEISLSHGRVVYSPGEPLAGTVRVRLGAPLPFRAIRVTCIGSCGVSNKANDTAWVVEEGYFNSSLSLADKGSLPAGEHSFPFQFLLPATAPTSFEGPFGKIVHQVRAAIHTPRFSKDHKCSLVFYILSPLNLNSIPDIEQPNVASATKKFSYKLVKTGSVVLTASTDLRGYVVGQALQLHADVENQSGKDTSPVVASLLQKVSYKAKRWIHDVRTIAEVEGAGVKAWRRAQWHEQILVPALPQSALPGCSLIHIDYYLQVSLKAPEATVTLPVFIGNIAVNHAPVSPRPGLGLPPGAPPLVVPSAPPQEEAEAEAAAGGPHFLDPVFLSTKSHSQRQPLLATLSSVPGAPEPCPQDGSPASHPLHPPLCISTGATVPYFAEGSGGPVPTTSTLILPPEYSSWGYPYEAPPSYEQSCGGVEPSLTPES

SEQ ID NO: 799216 - protein, 432 aa, Homo sapiens
MGRVQLFEISLSHGRVVYSPGEPLAGTVRVRLGAPLPFRAIRVTCIGSCGVSNKANDTAWVVEEGYFNSSLSLADKGSLPAGEHSFPFQFLLPATAPTSFEGPFGKIVHQVRAAIHTPRFSKDHKCSLVFYILSPLNLNSIPDIEQPNVASATKKFSYKLVKTGSVVLTASTDLRGYVVGQALQLHADVENQSGKDTSPVVASLLQKVSYKAKRWIHDVRTIAEVEGAGVKAWRRAQWHEQILVPALPQSALPGCSLIHIDYYLQVSLKAPEATVTLPVFIGNIAVNHAPVSPRPGLGLPPGAPPLVVPSAPPQEEAEAEAAAGGPHFLDPVFLSTKSHSQRQPLLATLSSVPGAPEPCPQDGSPASHPLHPPLCISTGATVPYFAEGSGGPVPTTSTLILPPEYSSWGYPYGESTARAWQGGSWDLERQLL

SEQ ID NO: 799217 - protein, 442 aa, Homo sapiens; identical to SEQ ID NO: 799214

SEQ ID NO: 799218 - protein, 442 aa, Homo sapiens; identical to SEQ ID NO: 799214

SEQ ID NO: 799219 - protein, 395 aa, Homo sapiens
MQCPLLSWPCGHLRPPQGGTAPHLPPVSAGSLPAGEHSFPFQFLLPATAPTSFEGPFGKIVHQVRAAIHTPRFSKDHKCSLVFYILSPLNLNSIPDIEQPNVASATKKFSYKLVKTGSVVLTASTDLRGYVVGQALQLHADVENQSGKDTSPVVASLLQKVSYKAKRWIHDVRTIAEVEGAGVKAWRRAQWHEQILVPALPQSALPGCSLIHIDYYLQVSLKAPEATVTLPVFIGNIAVNHAPVSPRPGLGLPPGAPPLVVPSAPPQEEAEAEAAAGGPHFLDPVFLSTKSHSQRQPLLATLSSVPGAPEPCPQDGSPASHPLHPPLCISTGATVPYFAEGSGGPVPTTSTLILPPEYSSWGYPYGESTARAWQGGDAKSPTQTLLSSRRGPTVL

SEQ ID NO: 799220 - protein, 608 aa, Homo sapiens
AGCTGSQVPYECGGRGMGRVQLFEISLSHGRVVYSPGEPLAGTVRVRLGAPLPFRAIRVTCIGSCGVSNKANDTAWVVEEGYFNSSLSLADKGKFGSQFPSGDPWGQPLEWGLSVLSSPFPRSASWIWHWPILSQVVGPDGFLIGAGWLKGPPPPCAGFGWALTPGTAVHPCPIPKPLSCSSQALILSPSPKPQPCAAVALVTETGRPSVSWSAAVPTLILALWPPQPPQGGTAPHLPPVSAGSLPAGEHSFPFQFLLPATAPTSFEGPFGKIVHQVRAAIHTPRFSKDHKCSLVFYILSPLNLNSIPDIEQPNVASATKKFSYKLVKTGSVVLTASTDLRGYVVGQALQLHADVENQSGKDTSPVVASLLQKVSYKAKRWIHDVRTIAEVEGAGVKAWRRAQWHEQILVPALPQSALPGCSLIHIDYYLQVSLKAPEATVTLPVFIGNIAVNHAPVSPRPGLGLPPGAPPLVVPSAPPQEEAEAEAAAGGPHFLDPVFLSTKSHSQRQPLLATLSSVPGAPEPCPQDGSPASHPLHPPLCISTGATVPYFAEGSGGPVPTTSTLILPPEYSSWGYPYGESTARAWQGGDAKSPTQTLLSSRRGPTVL

SEQ ID NO: 799221 - protein, 317 aa, Homo sapiens
MPQGSSLRTPAKPLPGPPPKQPNVASATKKFSYKLVKTGSVVLTASTDLRGYVVGQALQLHADVENQSGKDTSPVVASLLQKVSYKAKRWIHDVRTIAEVEGAGVKAWRRAQWHEQILVPALPQSALPGCSLIHIDYYLQVSLKAPEATVTLPVFIGNIAVNHAPVSPRPGLGLPPGAPPLVVPSAPPQEEAEAEAAAGGPHFLDPVFLSTKSHSQRQPLLATLSSVPGAPEPCPQDGSPASHPLHPPLCISTGATVPYFAEGSGGPVPTTSTLILPPEYSSWGYPYGESTARAWQGGDAKSPTQTLLSSRRGPTVL

SEQ ID NO: 799222 - protein, 397 aa, Homo sapiens
MMVAVSFLECGRVLPCLTDLSTGQQEDAPLAIRVTCIGSCGVSNKANDTAWVVEEGYFNSSLSLADKGSLPAGEHSFPFQFLLPATAPTSFEGPFGKIVHQVRAAIHTPRFSKDHKCSLVFYILSPLNLNSIPDIEALQLHADVENQSGKDTSPVVASLLQKVSYKAKRWIHDVRTIAEVEGAGVKAWRRAQWHEQILVPALPQSALPGCSLIHIDYYLQVSLKAPEATVTLPVFIGNIAVNHAPVSPRPGLGLPPGAPPLVVPSAPPQEEAEAEAAAGGPHFLDPVFLSTKSHSQRQPLLATLSSVPGAPEPCPQDGSPASHPLHPPLCISTGATVPYFAEGSGGPVPTTSTLILPPEYSSWGYPYGESTARAWQGGDAKSPTQTLLSSRRGPTVL

SEQ ID NO: 799223 - protein, 317 aa, Homo sapiens; identical to SEQ ID NO: 799221

SEQ ID NO: 799224 - protein, 474 aa, Homo sapiens
QAVLAPKFLMSGGRGMGRVQLFEISLSHGRVVYSPGEPLAGTVRVRLGAPLPFRAIRVTCIGSCGVSNKANDTAWVVEEGYFNSSLSLADKGSLPAGEHSFPFQFLLPATAPTSFEGPFGKIVHQVRAAIHTPRFSKDHKCSLVFYILSPLNLNSIPDIEGSSLRTPAKPLPGPPPKQPNVASATKKFSYKLVKTGSVVLTASTDLRGYVVGQALQLHADVENQSGKDTSPVVASLLQKVSYKAKRWIHDVRTIAEVEGAGVKAWRRAQWHEQILVPALPQSALPGCSLIHIDYYLQVSLKAPEATVTLPVFIGNIAVNHAPVSPRPGLGLPPGAPPLVVPSAPPQEEAEAEAAAGGPHFLDPVFLSTKSHSQRQPLLATLSSVPGAPEPCPQDGSPASHPLHPPLCISTGATVPYFAEGSGGPVPTTSTLILPPEYSSWGYPYGESTARAWQGGDAKSPTQTLLSSRRGPTVL

SEQ ID NO: 799225 - protein, 130 aa, Homo sapiens [sequence omitted]

SEQ ID NO: 799226 - protein, 429 aa, Homo sapiens
MGRVQLFEISLSHGRVVYSPGEPLAGTVRVRLGAPLPFRAIRVTCIGSCGVSNKANDTAWVVEEGYFNSSLSLADKGSLPAGEHSFPFQFLLPATAPTSFEGPFGKIVHQVRAAIHTPRFSKDHKCSLVFYILSPLNLNSIPDIEQPNVASATKKFSYKLVKTGSVVLTASTDLRGYVVGQALQLHADVENQSGKDTSPVVASLLQKVSYKAKRWIHDVRTIAEVEGAGVKAWRRAQWHEQILVPALPQSALPGCSLIHIDYYLQVSLKAPEATVTLPVFIGNIAVNHAPVSPRPGLGLPPGAPPLVVPSAPPQEEAEAEAAAGGPHFLDPVFLSTKSHSQRQPLLATLSSVPGAPEPCPQDGSPASHPLHPPLCISTGATVPYFAEGSGGPVPTTSTLILPSSPWGWGGGGRELGPGETTPVNKTLYL

SEQ ID NO: 799227 - protein, 317 aa, Homo sapiens; identical to SEQ ID NO: 799221

SEQ ID NO: 799228 - protein, 422 aa, Homo sapiens
MSSEVAWAACSLAFPGPCPAIRVTCIGSCGVSNKANDTAWVVEEGYFNSSLSLADKGSLPAGEHSFPFQFLLPATAPTSFEGPFGKIVHQVRAAIHTPRFSKDHKCSLVFYILSPLNLNSIPDIEQPNVASATKKFSYKLVKTGSVVLTASTDLRGYVVGQALQLHADVENQSGKDTSPVVASLLQKVSYKAKRWIHDVRTIAEVEGAGVKAWRRAQWHEQILVPALPQSALPGCSLIHIDYYLQVSLKAPEATVTLPVFIGNIAVNHAPVSPRPGLGLPPGAPPLVVPSAPPQEEAEAEAAAGGPHFLDPVFLSTKSHSQRQPLLATLSSVPGAPEPCPQDGSPASHPLHPPLCISTGATVPYFAEGSGGPVPTTSTLILPPEYSSWGYPYGESTARAWQGGDAKSPTQTLLSSRRGPTVL

SEQ ID NO: 799229 - protein, 458 aa, Homo sapiens
MGRVQLFEISLSHGRVVYSPGEPLAGTVRVRLGAPLPFRAIRVTCIGSCGVSNKANDTAWVVEEGYFNSSLSLADKGHLRGGLPPTSLLLSAGSLPAGEHSFPFQFLLPATAPTSFEGPFGKIVHQVRAAIHTPRFSKDHKCSLVFYILSPLNLNSIPDIEQPNVASATKKFSYKLVKTGSVVLTASTDLRGYVVGQALQLHADVENQSGKDTSPVVASLLQKVSYKAKRWIHDVRTIAEVEGAGVKAWRRAQWHEQILVPALPQSALPGCSLIHIDYYLQVSLKAPEATVTLPVFIGNIAVNHAPVSPRPGLGLPPGAPPLVVPSAPPQEEAEAEAAAGGPHFLDPVFLSTKSHSQRQPLLATLSSVPGAPEPCPQDGSPASHPLHPPLCISTGATVPYFAEGSGGPVPTTSTLILPPEYSSWGYPYGESTARAWQGGDAKSPTQTLLSSRRGPTVL

SEQ ID NO: 799230 - protein, 425 aa, Homo sapiens
MGRVQLFEISLSHGRVVYSPGEPLAGTVRVRLGAPLPFRAIRVTCIGSCGVSNKANDTAWVVEEGYFNSSLSLADKATAPTSFEGPFGKIVHQVRAAIHTPRFSKDHKCSLVFYILSPLNLNSIPDIEQPNVASATKKFSYKLVKTGSVVLTASTDLRGYVVGQALQLHADVENQSGKDTSPVVASLLQKVSYKAKRWIHDVRTIAEVEGAGVKAWRRAQWHEQILVPALPQSALPGCSLIHIDYYLQVSLKAPEATVTLPVFIGNIAVNHAPVSPRPGLGLPPGAPPLVVPSAPPQEEAEAEAAAGGPHFLDPVFLSTKSHSQRQPLLATLSSVPGAPEPCPQDGSPASHPLHPPLCISTGATVPYFAEGSGGPVPTTSTLILPPEYSSWGYPYGESTARAWQGGDAKSPTQTLLSSRRGPTVL

SEQ ID NO: 799231 - protein, 317 aa, Homo sapiens; identical to SEQ ID NO: 799221

SEQ ID NO: 799232 - protein, 194 aa, Homo sapiens
LRFAPLSRSILLSASALLLSSARLPGPARRGRLALVSLFLPPPFVFCLPLYLLMFPSPPRPLSFLCYSSVLSRSWLPPLLSSSALSSSWLSPCAAVLFVFRVPVASSLLPLLLPSPVLPVSFGPSLRRAWLAGVASLSFLLLRLLSFSLSCLSLSLSLCFLFVFFILFFFFPFFVFLFFFFFFFFFFFFFFSCK

SEQ ID NO: 799233 - protein, 273 aa, Homo sapiens
MGRVQLFEISLSHGRVVYSPGEPLAGTVRVRLGAPLPFRAIRVTCIGSCGVSNKANDTAWVVEEGYFNSSLSLADKGSLPAGEHSFPFQFLLPATAPTSFEGPFGKIVHQVRAAIHTPRFSKDHKCSLVFYILSPLNLNSIPDIEQPNVASATKKFSYKLVKTGSVVLTASTDLRGYVVGQALQLHADVENQSGKDTSPVVASLLQKVSYKAKRWIHDVRTIAEVEGAGVKAWRRAQWHEQILVPALPQSALPGCSLIHIDYYLQSQVSIFND

SEQ ID NO: 799234 - protein, 147 aa, Homo sapiens
MGDALPPFPGAQPLTGRAWLGSSPVMYLHSHGKVAHGALAAAEVEAVQMEEDILQLQAEATAEVLGEVAQAQKVLRDSVQRLEVQLRSAWLGPAYREFEVLKAHADKQSHILWALTGHVQRQRREMVAQQHRLRQIQERLHTAALPA

SEQ ID NO: 799235 - protein, 144 aa, Homo sapiens
MPVPALCLLWALAMVTRPASAAPMGGPELAQHEELTLLFHGTLQLGQALNGVYRTTEGRLTKARNSLGLYGRTIELLGQEVSRGRDAAQELRASLLETQAHADKQSHILWALTGHVQRQRREMVAQQHRLRQIQERLHTAALPA

SEQ ID NO: 799236 - protein, 198 aa, Homo sapiens
MPVPALCLLWALAMVTRPASAAPMGGPELAQHEELTLLFHGTLQLGQALNGVYRTTEGRLTKARNSLGLYGRTIELLGQEVSRGRDAAQELRASLLETQMEEDILQLQAEATAEVLGEVAQAQKVLRDSVQRLEVQLRSAWLGPAYREFEVLKAHADKQSHILWALTGHVQRQRREMVAQQHRLRQIQERLHTAALPA

SEQ ID NO: 799237 - protein, 220 aa, Homo sapiens
MNGFTPDEMSRGGDAAAAVAAVVAAAAAAASAGNGTGAGTGAEVPGAGAVSAAGPPGAAGPGPGQLCCLREDGERCGRAAGNASFSKRIQKSISQKKVKIELDKSARHLYICDYHKNLIQSVRNRRKRKGSDDDGGDSPVQDIDTPEVDLYQLQVNTLRRYKRHFKLPTRPGLNKAQLVEIVGCHFRSIPVNEKDTLTYFIYSVKNDKNKSDLKVDSGVH

SEQ ID NO: 799238 - protein, 220 aa, Homo sapiens; identical to SEQ ID NO: 799237

SEQ ID NO: 799239 - protein, 102 aa, Homo sapiens
PLANALGRKRKGSDDDGGDSPVQDIDTPEVDLYQLQVNTLRRYKRHFKLPTRPGLNKAQLVEIVGCHFRSIPVNEKDTLTYFIYSVKNDKNKSDLKVDSGVH

SEQ ID NO: 799240 - protein, 220 aa, Homo sapiens; identical to SEQ ID NO: 799237

SEQ ID NO: 799241 - protein, 102 aa, Homo sapiens; identical to SEQ ID NO: 799239

SEQ ID NO: 799242 - protein, 202 aa, Homo sapiens
FSRRHLGFQAGSSCRLTLQLGGMDWPHNLLFLLTISIFLGLGQPRSPKSKRKGQGRPGPLAPGPHQVPLDLVSRMKPYARMEEYERNIEEMVAQLRNSSELAQRKCEVNLQLWMSNKRSLSPWGYSINHDPSRIPVDLPEARCLCLGCVNPFTMQEDRSMVSVPVFSQVPVRRRLCPPPPRTGPCRQRAVMETIAVGCTCIF

SEQ ID NO: 799243 - protein, 202 aa, Homo sapiens; identical to SEQ ID NO: 799242

SEQ ID NO: 799244 - protein, 69 aa, Homo sapiens
LAGLLVVAGHLDEALVEREVVADAVLPALLVLPVEGEAVHDELVDAVQGFLAPFLAVHRLRIRFSAKGC

SEQ ID NO: 799245 - protein, 100 aa, Homo sapiens
PAGPAERQPLPWRVVSRDQGVAGGAERRGTDGYIRGISPHIQNVLKAPKIFIMSDYQKLEVTLLYLGELAPQAFEIPAFCPALHRPRISKAVSPFSITTR

SEQ ID NO: 799246 - protein, 146 aa, Homo sapiens
QLRHSSLEQSSQTWRSAPSKTSTASATTSSAKSAASTKATTTASSTSSFRFCRRRDTRQTMPPGLAQKWTGEAKKDTAGLVTAAGKQELRQFGRVPFKVGGLENENFKFHSSNSSSHVWRICWIQGSILAWSLTPKTAEASIAVLI

SEQ ID NO: 799247 - protein, 101 aa, Homo sapiens
CTVSLSTFEVLALGLIHHWLPRSPACRRPIVGLHLVIRGQFAILSSSGSGSDVGDQHLPLPMAYGTHVQHESGYLPNKTHSNTAEYVQTKTSMLMKFLQIL

SEQ ID NO: 799248 - protein, 926 aa, Homo sapiens
MLKLDNKDVISHPLGYPSESLLSIASMLDSSDSSSQPHWSNELIAEQLQQQVSQLQDQLDAELEDKRKVLLELSREKAQNEDLKLEVTNILQKHKQEVELLQNAATISQPPDRQSEPATHPAVLQENTQIEPSEPKNQEEKKLSQVLNELQVSHAETTLELEKTRDMLILQRKINVCYQVQGKMVQEGDGNRNVGTTHRTGNEARPKFPGLIPEELEAMMTKADNDNRDHKEKLERLTRLLDLKNNRIKQLEGILEAMTFQHLGENLFELHIHQAFLTSAALAQAGDTQPTTFCTYSFYDFETHCTPLSVGPQPLYDFTSQYVMETDSLFLHYLQEASARLDIHQAMASEHSTLAAGWICFDRVLETVEKVHGLATLIGAGGEEFGVLEYWMRLRFPIKPSLQACNKRKKAQVYLSTDVLGGRKAQEEEFRSESWEPQNELWIEITKCCGLRSRWLGTQPSPYAVYRFFTFSDHDTAIIPASNNPYFRDQARFPVLVTSDLDHYLRREALSIHVFDDEDLEPGSYLGRARVPLLPLAKNESIKGDFNLTDPAEKPNGSIQVQLDWKFPYIPPESFLKPEAQTKGKDTKDSSKISSEEEKASFPSQDQMASPEVPIEAGQYRSKRKPPHGGERKEKEHQVVSYSRRKHGKRIGVQGKNRMEYLSLNILNGNTPEQVNYTEWKFSETNSFIGDGFKNQHEEEEMTLSHSALKQKEPLHPVNDKESSEQGSEVSEAQTTDSDDVIVPPMSQKYPKADSEKMCIEIVSLAFYPEAEVMSDENIKQVYVEYKFYDLPLSETETPVSLRKPRAGEEIHFHFSKVIDLDPQEQQGRRRFLFDMLNGQDPDQGHLKFTVVSDPLDEEKKECEEVGYAYLQLWQILESGRDILEQELDIVSPEDLATPIGRLKVSLQAAAVLHAIYKEMTEDLFS

SEQ ID NO: 799249 - protein, 883 aa, Homo sapiens
MLKLDNKDVISHPLGYPSESLLSIASMLDSSDSSSQPHWSNELIAEQLQQQVSQLQDQLDAELEDKRKVLLELSREKAQNEDLKLEVTNILQKHKQEVELLQNAATISQPPDRQSEPATHPAVLQENTQIEPSEPKNQEEKKLSQVLNELQVSHAETTLELEKTRDMLILQRKINVCYQEELEAMMTKADNDNRDHKEKLERLTRLLDLKNNRIKQLEERAPYPLRIGSFLSPLEQLKDVAYGTRPLSLCLETLPAHGDEDKVDISLLHQPLYDFTSQYVMETDSLFLHYLQEASARLDIHQAMASEHSTLAAGWICFDRVLETVEKVHGLATLIGAGGEEFGVLEYWMRLRFPIKPSLQACNKRKKAQVYLSTDVLGGRKAQEEEFRSESWEPQNELWIEITKCCGLRSRWLGTQPSPYAVYRFFTFSDHDTAIIPASNNPYFRDQARFPVLVTSDLDHYLRREALSIHVFDDEDLEPGSYLGRARVPLLPLAKNESIKGDFNLTDPAEKPNGSIQVQLDWKFPYIPPESFLKPEAQTKGKDTKDSSKISSEEEKASFPSQDQMASPEVPIEAGQYRSKRKPPHGGERKEKEHQVVSYSRRKHGKRIGVQGKNRMEYLSLNILNGNTPEQVNYTEWKFSETNSFIGDGFKNQHEEEEMTLSHSALKQKEPLHPVNDKESSEQGSEVSEAQTTDSDDVIVPPMSQKYPKADSEKMCIEIVSLAFYPEAEVMSDENIKQVYVEYKFYDLPLSETETPVSLRKPRAGEEIHFHFSKVIDLDPQEQQGRRRFLFDMLNGQDPDQGHLKFTVVSDPLDEEKKECEEVGYAYLQLWQILESGRDILEQELDIVSPEDLATPIGRLKVSLQAAAVLHAIYKEMTEDLFS

SEQ ID NO: 799250 - protein, 928 aa, Homo sapiens
MLKLDNKDVISHPLGYPSESLLSIASMLDSSDSSSQPHWSNELIAEQLQQQVSQLQDQLDAELEDKRKVLLELSREKAQNEDLKLEVTNILQKHKQEVELLQNAATISQPPDRQSEPATHPAVLQENTQIEPSEPKNQEEKKLSQVLNELQVSHAETTLELEKTRDMLILQRKINVCYQEELEAMMTKADNDNRDHKEKLERLTRLLDLKNNRIKQLEGILRSHDLPTSEQLKDVAYGTRPLSLCLETLPAHGDEDKVDISLLHQGENLFELHIHQAFLTSAALAQAGDTQPTTFCTYSFYDFETHCTPLSVGPQPLYDFTSQYVMETDSLFLHYLQEASARLDIHQAMASEHSTLAAGWICFDRVLETVEKVHGLATLIGAGGEEFGVLEYWMRLRFPIKPSLQACNKRKKAQVYLSTDVLGGRKAQEEEFRSESWEPQNELWIEITKCCGLRSRWLGTQPSPYAVYRFFTFSDHDTAIIPASNNPYFRDQARFPVLVTSDLDHYLRREALSIHVFDDEDLEPGSYLGRARVPLLPLAKNESIKGDFNLTDPAEKPNGSIQVQLDWKFPYIPPESFLKPEAQTKGKDTKDSSKISSEEEKASFPSQDQMASPEVPIEAGQYRSKRKPPHGGERKEKEHQVVSYSRRKHGKRIGVQGKNRMEYLSLNILNGNTPEQVNYTEWKFSETNSFIGDGFKNQHEEEEMTLSHSALKQKEPLHPVNDKESSEQGSEVSEAQTTDSDDVIVPPMSQKYPKADSEKMCIEIVSLAFYPEAEVMSDENIKQVYVEYKFYDLPLSETETPVSLRKPRAGEEIHFHFSKVIDLDPQEQQGRRRFLFDMLNGQDPDQGHLKFTVVSDPLDEEKKECEEVGYAYLQLWQILESGRDILEQELDIVSPEDLATPIGRLKVSLQAAAVLHAIYKEMTEDLFS

SEQ ID NO: 799251 - protein, 928 aa, Homo sapiens; identical to SEQ ID NO: 799250

SEQ ID NO: 799252 - protein, 490 aa, Homo sapiens
MEQKPSKVECGSDPEENSARSPDGKRKRKNGQCSLKTSMSGYIPSYLDKDEQCVVCGDKATGYHYRCITCEGCKGFFRRTIQKNLHPTYSCKYDSCCVIDKITRNQCQLCRFKKCIAVGMAMDLVLDDSKRVAKRKLIEQNRERRRKEEMIRSLQQRPEPTPEEWDLIHIATEAHRSTNAQGSHWKQRRKFLPDDIGQSPIVSMPDGDKVDLEAFSEFTKIITPAITRVVDFAKKLPMFSELPCEDQIILLKGCCMEIMSLRAAVRYDPESDTLTLSGEMAVKREQLKNGGLGVVSDAIFELGKSLSAFNLDDTEVALLQAVLLMSTDRSGLLCVDKIEKSQEAYLLAFEHYVNHRKHNIPHFWPKLLMKEREVQSSILYKGAAAEGRPGGSLGVHPEGQQLLGMHVVQGPQVRQLEQQLGEAGSLQGPVLQHQSPKSPQQRLLELLHRSGILHARAVCGEDDSSEADSPSSSEEEPEVCEDLAGNAASP

SEQ ID NO: 799253 - protein, 98 aa, Homo sapiens
EDPWGNLVPCVRPCASLFTVVLDDSKRVAKRKLIEQNRERRRKEEMIRSLQQRPEPTPEEWDLIHIATEAHRSTNAQGSHWKQRRKFLVRRKGAWGEQ

SEQ ID NO: 799254 - protein, 490 aa, Homo sapiens; identical to SEQ ID NO: 799252

SEQ ID NO: 799255 - protein, 490 aa, Homo sapiens; identical to SEQ ID NO: 799252

SEQ ID NO: 799256 - protein, 451 aa, Homo sapiens
MEQKPSKVECGSDPEENSARSPDGKRKRKNGQCSLKTSMSGYIPSYLDKDEQCVVCGDKATGYHYRCITCEGCKGFFRRTIQKNLHPTYSCKYDSCCVIDKITRNQCQLCRFKKCIAVGMAMDLVLDDSKRVAKRKLIEQNRERRRKEEMIRSLQQRPEPTPEEWDLIHIATEAHRSTNAQGSHWKQRRKFLPDDIGQSPIVSMPDGDKVDLEAFSEFTKIITPAITRVVDFAKKLPMFSELPCEDQIILLKGCCMEIMSLRAAVRYDPESDTLTLSGEMAVKREQLKNGGLGVVSDAIFELGKSLSAFNLDDTEVALLQAVLLMSTDRSGLLCVDKIEKSQEAYLLAFEHYVNHRKHNIPHFWPKLLMKGPQVRQLEQQLGEAGSLQGPVLQHQSPKSPQQRLLELLHRSGILHARAVCGEDDSSEADSPSSSEEEPEVCEDLAGNAASP

SEQ ID NO: 799257 - protein, 377 aa, Homo sapiens
GRVGVGMAMDLVLDDSKRVAKRKLIEQNRERRRKEEMIRSLQQRPEPTPEEWDLIHIATEAHRSTNAQGSHWKQRRKFLPDDIGQSPIVSMPDGDKVDLEAFSEFTKIITPAITRVVDFAKKLPMFSELPCEDQIILLKGCCMEIMSLRAAVRYDPESDTLTLSGEMAVKREQLKNGGLGVVSDAIFELGKSLSAFNLDDTEVALLQAVLLMSTDRSGLLCVDKIEKSQEAYLLAFEHYVNHRKHNIPHFWPKLLMKEREVQSSILYKGAAAEGRPGGSLGVHPEGQQLLGMHVVQGPQVRQLEQQLGEAGSLQGPVLQHQSPKSPQQRLLELLHRSGILHARAVCGEDDSSEADSPSSSEEEPEVCEDLAGNAASP

SEQ ID NO: 799258 - protein, 410 aa, Homo sapiens
MEQKPSKVECGSDPEENSARSPDGKRKRKNGQCSLKTSMSGYIPSYLDKDEQCVVCGDKATGYHYRCITCEGCKGFFRRTIQKNLHPTYSCKYDSCCVIDKITRNQCQLCRFKKCIAVGMAMDLVLDDSKRVAKRKLIEQNRERRRKEEMIRSLQQRPEPTPEEWDLIHIATEAHRSTNAQGSHWKQRRKFLPDDIGQSPIVSMPDGDKVDLEAFSEFTKIITPAITRVVDFAKKLPMFSELPCEDQIILLKGCCMEIMSLRAAVRYDPESDTLTLSGEMAVKREQLKNGGLGVVSDAIFELGKSLSAFNLDDTEVALLQAVLLMSTDRSGLLCVDKIEKSQEAYLLAFEHYVNHRKHNIPHFWPKLLMKVTDLRMIGACHASRFLHMKVECPTELFPPLFLEVFEDQEV

SEQ ID NO: 799259 - protein, 353 aa, Homo sapiens
MEQKPSKVECGSDPEENSARSPDGKRKRKNGQCSLKTSMSGYIPSYLDKDEQCVVCGDKATGYHYRCITCEGCKGFFRRTIQKNLHPTYSCKYDSCCVIDKITRNQCQLCRFKKCIAVGMAMDLVLDDSKRVAKRKLIEQNRERRRKEEMIRSLQQRPEPTPEEWDLIHIATEAHRSTNAQGSHWKQRRKFLPDDIGQSPIVSMPDGDKVDLEAFSEFTKIITPAITRVVDFAKKLPMFSELPCEDQIILLKGCCMEIMSLRAAVRYDPESDTLTLSGEMAVKREQLKNGGLGVVSDAIFELGKSLSAWQHLTCPLRPQLKCHLLPQLPQAEIVVCASLVHASTVTLISLFYN

SEQ ID NO: 799260 - protein, 324 aa, Homo sapiens
MEQKPSKVECGSDPEENSARSPDGKRKRKNGQCSLKTSMSGYIPSYLDKDEQCVVCGDKATGYHYRCITCEGCKGFFRRTIQKNLHPTYSCKYDSCCVIDKITRNQCQLCRFKKCIAVGMAMDLVLDDSKRVAKRKLIEQNRERRRKEEMIRSLQQRPEPTPEEWDLIHIATEAHRSTNAQGSHWKQRRKFLPDDIGQSPIVSMPDGDKVDLEAFSEFTKIITPAITRVVDFAKKLPMFSELPSRKTTFPSSAGQTWPDSLAFCCVVPSAWDALPPFSAWQHLTCPLRPQLKCHLLPQLPQAEIVVCASLVHASTVTLISLFYN

SEQ ID NO: 799261 - protein, 188 aa, Homo sapiens
  misc_feature (176)..(176): Xaa can be any naturally occurring amino acid
MEQKPSKVECGSDPEENSARSPDGKRKRKNGQCSLKTSMSGYIPSYLDKDEQCVVCGDKATGYHYRCITCEGCKGFFRRTIQKNLHPTYSCKYDSCCVIDKITRNQCQLCRFKKCIAVGMAMDLVLDDSKRVAKRKLIEQNRERRRKEEMIRSLQQRPEPTPEEWDLIKIEKEENXRKNEKGRNWKKR

SEQ ID NO: 799262 - protein, 410 aa, Homo sapiens; identical to SEQ ID NO: 799258

SEQ ID NO: 799263 - protein, 490 aa, Homo sapiens; identical to SEQ ID NO: 799252

SEQ ID NO: 799264 - protein, 475 aa, Homo sapiens
MGKSVRASLLDSKPCLPSSILSFLPGYIPSYLDKDEQCVVCGDKATGYHYRCITCEGCKGFFRRTIQKNLHPTYSCKYDSCCVIDKITRNQCQLCRFKKCIAVGMAMDLVLDDSKRVAKRKLIEQNRERRRKEEMIRSLQQRPEPTPEEWDLIHIATEAHRSTNAQGSHWKQRRKFLPDDIGQSPIVSMPDGDKVDLEAFSEFTKIITPAITRVVDFAKKLPMFSELPCEDQIILLKGCCMEIMSLRAAVRYDPESDTLTLSGEMAVKREQLKNGGLGVVSDAIFELGKSLSAFNLDDTEVALLQAVLLMSTDRSGLLCVDKIEKSQEAYLLAFEHYVNHRKHNIPHFWPKLLMKEREVQSSILYKGAAAEGRPGGSLGVHPEGQQLLGMHVVQGPQVRQLEQQLGEAGSLQGPVLQHQSPKSPQQRLLELLHRSGILHARAVCGEDDSSEADSPSSSEEEPEVCEDLAGNAASP

SEQ ID NO: 799265 - protein, 410 aa, Homo sapiens; identical to SEQ ID NO: 799258

SEQ ID NO: 799266 - protein, 410 aa, Homo sapiens; identical to SEQ ID NO: 799258

SEQ ID NO: 799267 - protein, 364 aa, Homo sapiens
MEQKPSKVECGSDPEENSARSPDGKRKRKNGQCSLKTSMSGYIPSYLDKDEQCVVCGDKATGYHYRCITCEGCKGFFRRTIQKNLHPTYSCKYDSCCVIDKITRNQCQLCRFKKCIAVGMAMDLVLDDSKRVAKRKLIEQNRERRRKEEMIRSLQQRPEPTPEEWDLIHIATEAHRSTNAQGSHWKQRRKFLPDDIGQSPIVSMPDGDKVDLEAFSEFTKIITPAITRVVDFAKKLPMFSELPCEDQIILLKGCCMEIMSLRAAVRYDPESDTLTLSGEMAVKREQLKNGGLGVVSDAIFELGKSLSAFNLDDTEVALLQAVLLMSTDRSGLLCVDKIEKSQEAYLLAFEHYVNRSHPSGSSRA

SEQ ID NO: 799268 - protein, 340 aa, Homo sapiens
MEQKPSKVECGSDPEENSARSPDGKRKRKNGQCSLKTSMSGYIPSYLDKDEQCVVCGDKATGYHYRCITCEGCKGFFRRTIQKNLHPTYSCKYDSCCVIDKITRNQCQLCRFKKCIAVGMAMDLVLDDSKRVAKRKLIEQNRERRRKEEMIRSLQQRPEPTPEEWDLIHIATEAHRSTNAQGSHWKQRRKFLPDDIGQSPIVSMPDGDKVDLEAFSEFTKIITPAITRVVDFAKKLPMFSEVSGRSGERCDAVLEGNLLPRSPSTGSSEVLWTRSNSCRSTYTDNIHRHTHTHAYTYTQHTGTHADTYTDTHTHLAYRYVHRHTYTHTYTQHTDTHISFL

SEQ ID NO: 799269 - protein, 179 aa, Homo sapiens
SGVRGPHPRRAVVVAVLFGVQAPRRDVAEGGLRRDGRRPGLAPQRGRGGLLLVVLHAATVQRPRLGRGPSRPPRGPVGVCRPQVAQRQRLARVCVRSLPGNRRLATRSCPAAFPLQGGATLPSSLPAPRLHLGSLLPSSSGGARLGDAAGTTHFQPAHLSHAAAPASLTDSLLRETISD

SEQ ID NO: 799270 - protein, 179 aa, Homo sapiens; identical to SEQ ID NO: 799269

SEQ ID NO: 799271 - protein, 179 aa, Homo sapiens; identical to SEQ ID NO: 799269

SEQ ID NO: 799272 - protein, 79 aa, Homo sapiens
SRSRVERPSPPPSRPLDYTWGLSFLPPREEPDWETPRGLPISSPLTFPMQQPLLHSLIHSFARPLVTEHLAHGVSGAGD

SEQ ID NO: 799273 - protein, 452 aa, Homo sapiens
MKAKIYKHIGNLKEAAKWMDEAQSLDTADRFINSKCAKYMLRANMIKEAEEMCSKFTREGTSAMENLNEMQCMWFQTECISAYQRLGRYGDALKKCHEVERHFFEITDDQFDFHTYCMRKMTLRAYVDLLRLEDILRRHAFYFKAARSAIEIYLKLYDNPLTNESKQQEINSENLSAKELKKMLSKQRRAQKKAKLEEERKHAERERQQKNQKKKRDEEEEEASGLKEELIPEKLERVENPLEEAVKFLIPLKNLVADNIDTHLLAFEIYFRKGKFLLMLQSVKRGFAINSNNPWLHECLIRFSKSVSNHSNLPDIVSKVLSQEMQKIFVKKDLESFNEDFLKRNATSLQHLLSGAKMMYFLDKSRQEKAIAIATRLDETIKDKDVKTLIKVSEALLDGSFGNCSSQYEEYRMASHNLLPFTSAFLPAVNEVDNPNVALNHTANYDVLANEI

SEQ ID NO: 799274 - protein, 426 aa, Homo sapiens
MKAKIYKHIGNLKEAAKWMDEAQSLDTADRFINSKCAKYMLRANMIKEAEEMCSKFTREGTSAMENLNEMQCMWFQTECISAYQRLGRYGDALKKCHEVERHFFEITDDQFDFHTYCMRKMTLRAYVDLLRLEDILRRHAFYFKAARSAIEIYLKLYDNPLTNESKQQEINSENLSAKELKKMLSKQRRAQKKAKLEEERKHAERERQQKNQKKKRDEEEEEASGLKEELIPEKLERVENPLEEAVKFLIPLKNLVADNIDTHLLAFEIYFRKGKFLLMLQSVKRGFAINSNNPWLHECLIRFSKSDIVSKVLSQEMQKIFVKKDLESFNEDFLKRNATSLQHLLSGATRLDETIKDKDVKTLIKVSEALLDGSFGNCSSQYEEYRMASHNLLPFTSAFLPAVNEVDNPNVALNHTANYDVLANEI

SEQ ID NO: 799275 - protein, 434 aa, Homo sapiens
MKAKIYKHIGNLKEAAKWMDEAQSLDTADRFINSKCAKYMLRANMIKEAEEMCSKFTREGTSAMENLNEMQCMWFQTECISAYQRLGRYGDALKKCHEVERHFFEITDDQFDFHTYCMRKMTLRAYVDLLRLEDILRRHAFYFKAARSAIEIYLKLYDNPLTNESKQQEINSENLSAKELKKMLSKQRRAQKKAKLEEERKHAERERQQKNQKKKRDEEEEEASGLKEELIPEKLERVENPLEEAVKFLIPLKNLVADNIDTHLLAFEIYFRKGKFLLMLQSVKRGFAINSNNPWLHECLIRFSKSVSNHSNLPDIVSKVLSQEMQKIFVKKDLESFNEDFLKRNATSLQHLLSGATRLDETIKDKDVKTLIKVSEALLDGSFGNCSSQYEEYRMASHNLLPFTSAFLPAVNEVDNPNVALNHTANYDVLANEI

SEQ ID NO: 799276 - protein, 768 aa, Homo sapiens
MDPDRKAAVSHWQQQSYLDSGIHSGATTTAPSLSGKGNPEEEDVDTSQVLYEWEQGFSQSFTQEQVADIDGQYAMTRAQRVRAAMFPETLDEGMQIPSTQFDAAHPTNVQRLAEPSQMLKHAVVNLINYQDDAELATRAIPELTKLLNDEDQVVVNKAAVMVHQLSKKEASRHAIMRSPQMVSAIVRTMQNTNDVETARCTAGTLHNLSHHREGLLAIFKSGGIPALVKMLGSPVDSVLFYAITTLHNLLLHQEGAKMAVRLAGGLQKMVALLNKTNVKFLAITTDCLQILAYGNQESKLIILASGGPQALVNIMRTYTYEKLLWTTSRVLKVLSVCSSNKPAIVEAGGMQALGLHLTDPSQRLVQNCLWTLRNLSDAATKQEGMEGLLGTLVQLLGSDDINVVTCAAGILSNLTCNNYKNKMMVCQVGGIEALVRTVLRAGDREDITEPAICALRHLTSRHQEAEMAQNAVRLHYGLPVVVKLLHPPSHWPLIKATVGLIRNLALCPANHAPLREQGAIPRLVQLLVRAHQDTQRRTSMGGTQQQFVEGVRMEEIVEGCTGALHILARDVHNRIVIRGLNTIPLFVQLLYSPIENIQRVAAGVLCELAQDKEAAEAIEAEGATAPLTELLHSRNEGVATYAAAVLFRMSEDKPQDYKKRLSVELTSSLFRTEPMAWNETADLGLDIGAQGEPLGYRQDDPSYRSFHSGGYGQDALGMDPMMEHEMGGHHPGADYPVDGLPDLGHAQDLMDGLPPGDSNQLAWFDTDL

SEQ ID NO: 799277 - protein, 768 aa, Homo sapiens; identical to SEQ ID NO: 799276

SEQ ID NO: 799278 - protein, 768 aa, Homo sapiens; identical to SEQ ID NO: 799276

SEQ ID NO: 799279 - protein, 499 aa, Homo sapiens
  misc_feature (23)..(23): Xaa can be any naturally occurring amino acid
VVVAEICCCHNNVIWYTTDCFNXVMAPREQLIILASGGPQALVNIMRTYTYEKLLWTTSRVLKVLSVCSSNKPAIVEAGGMQALGLHLTDPSQRLVQNCLWTLRNLSDAATKQEGMEGLLGTLVQLLGSDDINVVTCAAGILSNLTCNNYKNKMMVCQVGGIEALVRTVLRAGDREDITEPAICALRHLTSRHQEAEMAQNAVRLHYGLPVVVKLLHPPSHWPLIKATVGLIRNLALCPANHAPLREQGAIPRLVQLLVRAHQDTQRRTSMGGTQQQFVEGVRMEEIVEGCTGALHILARDVHNRIVIRGLNTIPLFVQLLYSPIENIQRVAAGVLCELAQDKEAAEAIEAEGATAPLTELLHSRNEGVATYAAAVLFRMSEDKPQDYKKRLSVELTSSLFRTEPMAWNETADLGLDIGAQGEPLGYRQDDPSYRSFHSGGYGQDALGMDPMMEHEMGGHHPGADYPVDGLPDLGHAQDLMDGLPPGDSNQLAWFDTDL

SEQ ID NO: 799280 - protein, 768 aa, Homo sapiens; identical to SEQ ID NO: 799276

SEQ ID NO: 799281 - protein, 768 aa, Homo sapiens; identical to SEQ ID NO: 799276

SEQ ID NO: 799282 - protein, 120 aa, Homo sapiens
MSEDKPQDYKKRLSVELTSSLFRTEPMAWNETADLGLDIGAQGEPLGYRQDDPSYRSFHSGGYGQDALGMDPMMEHEMGGHHPGADYPVDGLPDLGHAQDLMDGLPPGDSNQLAWFDTDL

SEQ ID NO: 799283 - protein, 165 aa, Homo sapiens
YEDPRNRDKEAAEAIEAEGATAPLTELLHSRNEGVATYAAAVLFRMSEDKPQDYKKRLSVELTSSLFRTEPMAWNETADLGLDIGAQGEPLGYRQDDPSYRSFHSGGYGQDALGMDPMMEHEMGGHHPGADYPVDGLPDLGHAQDLMDGLPPGDSNQLAWFDTDL

SEQ ID NO: 799284 - protein, 768 aa, Homo sapiens; identical to SEQ ID NO: 799276

SEQ ID NO: 799285 - protein, 163 aa, Homo sapiens [sequence omitted]

SEQ ID NO: 799286 - protein, 689 aa, Homo sapiens
MDPDRKAAVSHWQQQSYLDSGIHSGATTTAPSLSGKGNPEEEDVDTSQVLYEWEQGFSQSFTQEQVADIDGQYAMTRAQRVRAAMFPETLDEGMQIPSTQFDAAHPTNVQRLAEPSQMLKHAVVNLINYQDDAELATRAIPELTKLLNDEDQVVVNKAAVMVHQLSKKEASRHAIMRSPQMVSAIVRTMQNTNDVETARCTAGTLHNLSHHREGLLAIFKSGGIPALVKMLGSPVDSVLFYAITTLHNLLLHQEGAKMAVRLAGGLQKMVALLNKTNVKFLAITTDCLQILAYGNQESKLIILASGGPQALVNIMRTYTYEKLLWTTSRVLKVLSVCSSNKPAIVEAGGMQALGLHLTDPSQRLVQNCLWTLRNLSDAATKQEGMEGLLGTLVQLLGSDDINVVTCAAGILSNLTCNNYKNKMMVCQVGGIEALVRTVLRAGDREDITEPAICALRHLTSRHQEAEMAQNAVRLHYGLPVVVKLLHPPSHWPLIKATVGLIRNLALCPANHAPLREQGAIPRLVQLLVRAHQDTQRRTSMGGTQQQFVEGVRMEEIVEGCTGALHILARDVHNRIVIRGLNTIPLFVQLLYSPIENIQRVAAGVLCELAQDKEAAEAIEAEGATAPLTELLHSRNEGVATYAAAVLFRMSEDKPQDYKKRLSVELTSSLFRTEPMAWNEVGKCEQLFIW

SEQ ID NO: 799287 - protein, 773 aa, Homo sapiens
MDPDRKAAVSHWQQQSYLDSGIHSGATTTAPSLSGKGNPEEEDVDTSQVLYEWEQGFSQSFTQEQVADIDGQYAMTRAQRVRAAMFPETLDEGMQIPSTQFDAAHPTNVQRLAEPSQMLKHAVVNLINYQDDAELATRAIPELTKLLNDEDQVVVNKAAVMVHQLSKKEASRHAIMRSPQMVSAIVRTMQNTNDVETARCTAGTLHNLSHHREGLLAIFKSGGIPALVKMLGSPVDSVLFYAITTLHNLLLHQEGAKMAVRLAGGLQKMVALLNKTNVKFLAITTDCLQILAYGNQESKLIILASGGPQALVNIMRTYTYEKLLWTTSRVLKVLSVCSSNKPAIVEAGGMQALGLHLTDPSQRLVQNCLWTLRNLSDAATKQEGMEGLLGTLVQLLGSDDINVVTCAAGILSNLTCNNYKNKMMVCQVGGIEALVRTVLRAGDREDITEPAICALRHLTSRHQEAEMAQNAVRLHYGLPVVVKLLHPPSHWPLIKATVGLIRNLALCPANHAPLREQGAIPRLVQLLVRAHQDTQRRTSMGGTQQQFVEGVRMEEIVEGCTGALHILARDVHNRIVIRGLNTIPLFVQLLYSPIENIQRVAAGVLCELAQDKEAAEAIEAEGATAPLTELLHSRNEGVATYAAAVLFRMSEDKPQDYKKRLSVELTSSLFRTEPMAWNETADLGLDIGAQGEPLGYRQDDPSYRSFHSGGYGQDALGMDPMMEHEMGGHHPGADYPVDGLPDLGHAQDLMDGLPSIEVGSAPSCSELFLPVSV

SEQ ID NO: 799288 - protein, 626 aa, Homo sapiens
MDPDRKAAVSHWQQQSYLDSGIHSGATTTAPSLSGKGNPEEEDVDTSQVLYEWEQGFSQSFTQEQVADIDGQYAMTRAQRVRAAMFPETLDEGMQIPSTQFDAAHPTNVQRLAEPSQMLKHAVVNLINYQDDAELATRAIPELTKLLNDEDQVVVNKAAVMVHQLSKKEASRHAIMRSPQMVSAIVRTMQNTNDVETARCTAGTLHNLSHHREGLLAIFKSGGIPALVKMLGSPVDSVLFYAITTLHNLLLHQEGAKMAVRLAGGLQKMVALLNKTNVKFLAITTDCLQILAYGNQESKLIILASGGPQALVNIMRTYTYEKLLWTTSRVLKVLSVCSSNKPAIVEAGGMQALGLHLTDPSQRLVQNCLWTLRNLSDAATKQEGMEGLLGTLVQLLGSDDINVVTCAAGILSNLTCNNYKNKMMVCQVGGIEALVRTVLRAGDREDITEPAICALRHLTSRHQEAEMAQNAVRLHYGLPVVVKLLHPPSHWPLIKATVGLIRNLALCPANHAPLREQGAIPRLVQLLVRAHQDTQRRTSMGGTQQQFVEGVRMEEIVEGCTGALHILARDVHNRIVIRGLNTIPLFVQLLYSPIENIQRVAAGVLCELAHGTPSLHAATRSTDPRL

SEQ ID NO: 799289 - protein, 390 aa, Homo sapiens
MDPDRKAAVSHWQQQSYLDSGIHSGATTTAPSLSGKGNPEEEDVDTSQVLYEWEQGFSQSFTQEQVADIDGQYAMTRAQRVRAAMFPETLDEGMQIPSTQFDAAHPTNVQRLAEPSQMLKHAVVNLINYQDDAELATRAIPELTKLLNDEDQVVVNKAAVMVHQLSKKEASRHAIMRSPQMVSAIVRTMQNTNDVETARCTAGTLHNLSHHREGLLAIFKSGGIPALVKMLGSPVDSVLFYAITTLHNLLLHQEGAKMAVRLAGGLQKMVALLNKTNVKFLAITTDCLQILAYGNQESKLIILASGGPQALVNIMRTYTYEKLLWTTSRVLKVLSVCSSNKPAIVEAGGMQALGLHLTDPSQRLVQNCLWTLRNLSDAATKQPLQGSSRR

SEQ ID NO: 799290 - protein, 209 aa, Homo sapiens
MDPDRKAAVSHWQQQSYLDSGIHSGATTTAPSLSGKGNPEEEDVDTSQVLYEWEQGFSQSFTQEQVADIDGQYAMTRAQRVRAAMFPETLDEGMQIPSTQFDAAHPTNVQRLAEPSQMLKHAVVNLINYQDDAELATRAIPELTKLLNDEDQHWSEEISTVAVITICIFILIQLYHFVQQRREDYAQQLENIAHSVRKPLSQAVLDVNL

SEQ ID NO: 799291 - protein, 125 aa, Homo sapiens
PVSSIAQVADIDGQYAMTRAQRVRAAMFPETLDEGMQIPSTQFDAAHPTNVQRLAEPSQMLKHAVVMAIKQHTNPRGEPSIFTRAGMPPDLKMAVSPHDDGKGYARSQRYTSCFYIICILRVRHM

SEQ ID NO: 799292 - protein, 110 aa, Homo sapiens
FLLLPPPSHWPLIKATVGLIRNLALCPANHAPLREQGAIPRLVQLLVRAHQDTQRRTSMGGTQQQFVEGVRMEEIVEGCTGALHILARDVHNRQFLSQIAMTITHRLYRC

SEQ ID NO: 799293 - protein, 710 aa, Homo sapiens
PVSSIAQVADIDGQYAMTRAQRVRAAMFPETLDEGMQIPSTQFDAAHPTNVQRLAEPSQMLKHAVVNLINYQDDAELATRAIPELTKLLNDEDQVVVNKAAVMVHQLSKKEASRHAIMRSPQMVSAIVRTMQNTNDVETARCTAGTLHNLSHHREGLLAIFKSGGIPALVKMLGSPVDSVLFYAITTLHNLLLHQEGAKMAVRLAGGLQKMVALLNKTNVKFLAITTDCLQILAYGNQESKLIILASGGPQALVNIMRTYTYEKLLWTTSRVLKVLSVCSSNKPAIVEAGGMQALGLHLTDPSQRLVQNCLWTLRNLSDAATKQEGMEGLLGTLVQLLGSDDINVVTCAAGILSNLTCNNYKNKMMVCQVGGIEALVRTVLRAGDREDITEPAICALRHLTSRHQEAEMAQNAVRLHYGLPVVVKLLHPPSHWPLIKATVGLIRNLALCPANHAPLREQGAIPRLVQLLVRAHQDTQRRTSMGGTQQQFVEGVRMEEIVEGCTGALHILARDVHNRIVIRGLNTIPLFVQLLYSPIENIQRVAAGVLCELAQDKEAAEAIEAEGATAPLTELLHSRNEGVATYAAAVLFRMSEDKPQDYKKRLSVELTSSLFRTEPMAWNETADLGLDIGAQGEPLGYRQDDPSYRSFHSGGYGQDALGMDPMMEHEMGGHHPGADYPVDGLPDLGHAQDLMDGLPPGDSNQLAWFDTDL

SEQ ID NO: 799294 - protein, 768 aa, Homo sapiens; identical to SEQ ID NO: 799276

SEQ ID NO: 799295 - protein, 768 aa, Homo sapiens; identical to SEQ ID NO: 799276

SEQ ID NO: 799296 - protein, 640 aa, Homo sapiens
MDPDRKAAVSHWQQQSYLDSGIHSGATTTAPSLSGKGNPEEEDVDTSQVLYEWEQGFSQSFTQEQVADIDGQYAMTRAQRVRAAMFPETLDEGMQIPSTQFDAAHPTNVQRLAEPSQMLKHAVVNLINYQDDAELATRAIPELTKLLNDEDQVVVNKAAVMVHQLSKKEASRHAIMRSPQMVSAIVRTMQNTNDVETARCTAGTLHNLSHHREGLLAIFKSGGIPALVKMLGSPVDSVLFYAITTLHNLLLHQEGAKMAVRLAGGLQKMVALLNKTNVKFLAITTDCLQILAYGNQESKLIILASGGPQALVNIMRTYTYEKLLWTTSRVLKVLSVCSSNKPAIVEAGGMQALGLHLTDPSQRLVQNCLWTLRNLSDAATKQEGMEGLLGTLVQLLGSDDINVVTCAAGILSNLTCNNYKNKMMVCQVGGIEALVRTVLRAGDREDITEPAICALRHLTSRHQEAEMAQNAVRLHYGLPVVVKLLHPPSHWPLIKATVGLIRNLALCPANHAPLREQGAIPRLVQLLVRAHQDTQRRTSMGGTQQQFVEGVRMEEIVEGCTGALHILARDVHNRIVIRGLNTIPLFVQLLYSPIENIQRVAAGVLCELAQDKEAAEAIEAEGATAPLTELLHSRNEGVGK

SEQ ID NO: 799297 - protein, 768 aa, Homo sapiens; identical to SEQ ID NO: 799276

SEQ ID NO: 799298 - protein, 226 aa, Homo sapiens
TLGIPSEGVRMEEIVEGCTGALHILARDVHNRIVIRGLNTIPLFVQLLYSPIENIQRVAAGVLCELAQDKEAAEAIEAEGATAPLTELLHSRNEGVATYAAAVLFRMSEDKPQDYKKRLSVELTSSLFRTEPMAWNETADLGLDIGAQGEPLGYRQDDPSYRSFHSGGYGQDALGMDPMMEHEMGGHHPGADYPVDGLPDLGHAQDLMDGLPPGDSNQLAWFDTDL

SEQ ID NO: 799299 - protein, 768 aa, Homo sapiens; identical to SEQ ID NO: 799276

SEQ ID NO: 799300 - protein, 163 aa, Homo sapiens [sequence omitted]

SEQ ID NO: 799301 - protein, 90 aa, Homo sapiens
QFLHITVLLGSQREPLGYRQDDPSYRSFHSGGYGQDALGMDPMMEHEMGGHHPGADYPVDGLPDLGHAQDLMDGLPPGDSNQLAWFDTDL

SEQ ID NO: 799302 - protein, 640 aa, Homo sapiens; identical to SEQ ID NO: 799296

SEQ ID NO: 799303 - protein, 188 aa, Homo sapiens [sequence omitted]

SEQ ID NO: 799304 - protein, 188 aa, Homo sapiens [sequence omitted]

SEQ ID NO: 799305 - protein, 188 aa, Homo sapiens [sequence omitted]

SEQ ID NO: 799306 - protein, 188 aa, Homo sapiens [sequence omitted]

SEQ ID NO: 799307 - protein, 152 aa, Homo sapiens
MTEYKLVVVGAGGVGKSALTIQLIQNHFVDEYDPTIEDSYRKQVVIDGETCLLDILDTAGQEEYSAMRDQYMRTGEGFLCVFAINNTKSFEDIHHYREQIKRVKDSEDVPMVLVGNKCDLPSRTVDTKQAQDLARSYGIPFIETSAKTRQGK

SEQ ID NO: 799308 - protein, 188 aa, Homo sapiens [sequence omitted]

SEQ ID NO: 799309 - protein, 183 aa, Homo sapiens
MTEYKLVVVGAGGVGKSALTIQLIQNHFVDEYDPTIEDSYRKQVVIDGETCLLDILDTAGQEEYSAMRDQYMRTGEGFLCVFAINNTKSFEDIHHYREQIKRVKDSEDVPMVLVGNKCDLPSRTVDTKQAQDLARSYGIPFIETSAKTRQESGGCFLYIGEGDPTIQIEKNQQRRKDSWLCEN

SEQ ID NO: 799310 - protein, 575 aa, Homo sapiens
MDFPTISRSPSGPPAMDLEGPRDILVPSEDLTPDSQWDPMPGGPGSLSRMELDESSLQELVQQFEALPGDLVGPSPGGAPCPLHIATGHGLASQEIADAHGLLSAEAGRDDLLGLLHCEECPPSQTGPEEPLEPAPRLLQPPEDPDEDSDSPEWVEGASAEQEGSRSSSSSPEPWLETVPLVTPEEPPAGAQSPETLASYPAPQEVPGPCDHEDLLDGVIFGARYLGSTQLVSERNPPTSTRMAQAREAMDRVKAPDGETQPMTEVDLFVSTKRIKVLTADSQEAMMDHALHTISYTADIGCVLVLMARRRLARRPAPQDHGRRLYKMLCHVFYAEDAQLIAQAIGQAFAAAYSQFLRESGIDPSQVGVHPSPGACHLHNGDLDHFSNSDNCREVHLEKRRGEGLGVALVESGWGSLLPTAVIANLLHGGPAERSGALSIGDRLTAINGTSLVGLPLAACQAAVRETKSQTSVTLSIVHCPPVTTAIIHRPHAREQLGFCVEDGIICSLLRGGIAERGGIRVGHRIIEINGQSVVATPHARIIELLTEAYGEVHIKTMPAATYRLLTGQEQPVYL

SEQ ID NO: 799311 - protein, 71 aa, Homo sapiens
PLRRPSALRRPSALRRLHGGPAERSGALSIGDRLTAINGTSLVGLPLAACQAAVRVSFLVWQGPHTPRKGS

SEQ ID NO: 799312 - protein, 650 aa, Homo sapiens
MDFPTISRSPSGPPAMDLEGPRDILVPSEDLTPDSQWDPMPGGPGSLSRMELDESSLQELVQQFEALPGDLVGPSPGGAPCPLHIATGHGLASQEIADAHGLLSAEAGRDDLLGLLHCEECPPSQTGPEEPLEPAPRLLQPPEDPDEDSDSPEWVEGASAEQEGSRSSSSSPEPWLETVPLVTPEEPPAGAQSPETLASYPAPQEVPGPCDHEDLLDGVIFGARYLGSTQLVSERNPPTSTRMAQAREAMDRVKAPDGETQPMTEVDLFVSTKRIKVLTADSQEAMMDHALHTISYTADIGCVLVLMARRRLARRPAPQDHGRRLYKMLCHVFYAEDAQLIAQAIGQAFAAAYSQFLRESGIDPSQVGVHPSPGACHLHNGDLDHFSNSDNCREVHLEKRRGEGLGVALVESGWGSLLPTAVIANLLHGGPAERSGALSIGDRLTAINGTSLVGLPLAACQAAVRETKSQTSVTLSIVHCPPVTTAIIHRPHAREQLGFCVEDGIVRPRPLAPGWGGRAALSTAPEQPPPLSRPPLFSPRSAASSVVASPSVGASASATASLRSMGRVWWPRHTPASSSCSPRPMARCISRRCQLPHIASLQARSSPCTCDHLIPCLPLCLRLHGPGAPSWACPGWPGPQRFLVLYDFLI

SEQ ID NO: 799313 - protein, 575 aa, Homo sapiens; identical to SEQ ID NO: 799310

SEQ ID NO: 799314 - protein, 333 aa, Homo sapiens [sequence omitted]

SEQ ID NO: 799315 - protein, 176 aa, Homo sapiens
RPLPPRDGRTTRTGRTGPGDCRAAAPRMHGGPAERSGALSIGDRLTAINGTSLVGLPLAACQAAVRETKSQTSVTLSIVHCPPVTTAIIHRPHAREQLGFCVEDGIICSLLRGGIAERGGIRVGHRIIEINGQSVVATPHARIIELLTEAYGEVHIKTMPAATYRLLTGQEQPVYL

SEQ ID NO: 799316 - protein, 333 aa, Homo sapiens [sequence omitted]

SEQ ID NO: 799317 - protein, 604 aa, Homo sapiens
MDFPTISRSPSGPPAMDLEGPRDILVPSEDLTPDSQWDPMPGGPGSLSRMELDESSLQELVQQFEALPGDLVGPSPGGAPCPLHIATGHGLASQEIADAHGLLSAEAGRDDLLGLLHCEECPPSQTGPEEPLEPAPRLLQPPEDPDEDSDSPEWVEGASAEQEGSRSSSSSPEPWLETVPLVTPEEPPAGAQVVPAPPSRHPGLPGTKQGDSVLPLLIFFQSPETLASYPAPQEVPGPCDHEDLLDGVIFGARYLGSTQLVSERNPPTSTRMAQAREAMDRVKAPDGETQPMTEVDLFVSTKRIKVLTADSQEAMMDHALHTISYTADIGCVLVLMARRRLARRPAPQDHGRRLYKMLCHVFYAEDAQLIAQAIGQAFAAAYSQFLRESGIDPSQVGVHPSPGACHLHNGDLDHFSNSDNCREVHLEKRRGEGLGVALVESGWGSLLPTAVIANLLHGGPAERSGALSIGDRLTAINGTSLVGLPLAACQAAVRETKSQTSVTLSIVHCPPVTTAIIHRPHAREQLGFCVEDGIICSLLRGGIAERGGIRVGHRIIEINGQSVVATPHARIIELLTEAYGEVHIKTMPAATYRLLTGQEQPVYL

SEQ ID NO: 799318 - protein, 573 aa, Homo sapiens
MDFPTISRSPSGPPAMDLEGPRDILVPSEDLTPDSQWDPMPGGPGSLSRMELDESSLQELVQQFEALPGDLVGPSPGGAPCPLHIATGHGLASQEIADAHGLLSAEAGRDDLLGLLHCEECPPSQTGPEEPLEPAPRLLQPPEDPDEDSDSPEWVEGASAEQEGSRSSSSSPEPWLETVPLVTPEEPPAGAQSPETLASYPAPQEVPGPCDHEDLLDGVIFGARYLGSTQLVSERNPPTSTRMAQAREAMDRVKAPDGETQPMTEVDLFVSTKRIKVLTADSQEAMMDHALHTISYTADIGCVLVLMARRRLARRPAPQDHGRRLYKMLCHVFYAEDAQLIAQAIGQAFAAAYSQFLRESGIDPSQVGVHPSPGACHLHNGDLDHFSNSDNCREVHLEKRRGEGLGVALVESGWGSLLPTAVIANLLHGGPAERSGALSIGDRLTAINGTSLVGLPLAACQAAVRETKSQTSVTLSIVHCPPVTTAIIHRPHAREQLGFCVEDGIICSLLRGGIAERGGIRVGHRIIEINGQSVVATPHARIIELLTEAYGEVCGWWVVARGAPTSPTSPGLP

SEQ ID NO: 799319 - protein, 85 aa, Homo sapiens
DPDAASENAGPWMKAESPGKHEFSVDMTCGGCAEAVSRVLNKLGGVKYDIDLPNKKVCIESEHSMDTLLATLKKTGKTVSYLGLE

SEQ ID NO: 799320 - protein, 105 aa, Homo sapiens
ILNEINPLPPQPNPPSESREALLTPPPHRRHTAAASVMPKHEFSVDMTCGGCAEAVSRVLNKLGGVKYDIDLPNKKVCIESEHSMDTLLATLKKTGKTVSYLGLE

SEQ ID NO: 799321 - protein, 105 aa, Homo sapiens; identical to SEQ ID NO: 799320

SEQ ID NO: 799322 - protein, 105 aa, Homo sapiens; identical to SEQ ID NO: 799320

SEQ ID NO: 799323 - protein, 85 aa, Homo sapiens; identical to SEQ ID NO: 799319

SEQ ID NO: 799324 - protein, 105 aa, Homo sapiens
VALHGDPRVRGLHGQDPGGEALLTPPPHRRHTAAASVMPKHEFSVDMTCGGCAEAVSRVLNKLGGVKYDIDLPNKKVCIESEHSMDTLLATLKKTGKTVSYLGLE

SEQ ID NO: 799325 - protein, 105 aa, Homo sapiens; identical to SEQ ID NO: 799320

SEQ ID NO: 799326 - protein, 105 aa, Homo sapiens; identical to SEQ ID NO: 799320

SEQ ID NO: 799327 - protein, 105 aa, Homo sapiens; identical to SEQ ID NO: 799320

SEQ ID NO: 799328 - protein, 94 aa, Homo sapiens
GILLLSQNELYRQILLLMHLLPQDLLLLKPCQSSYCYCQEVLDRLIQCGLLVAEESWATQSSCSSSCRPPPRKKGSSSVRTQSSPSVLSGPSET

SEQ ID NO: 799329 - protein, 218 aa, Homo sapiens
GILLLSQNELYRQILLLMHLLPQDLLLLKPCQSSYCYCQEVLDRLIQCGLLVAEETPGSRPACDTGRQRLSRKLLWKPSGDFTDSDSDDFGEADGRYFRLSQQSHCPDFFLFLCRLLSPLLKAFAQAAAFLRQGQLPDTELGYTEQLFQFLQATAQEEGIFECADPKLAISAVWTFRDLGVLQQTPSPAGPRLHLSPTFASLDNQEKLEQFIRQFICS

SEQ ID NO: 799330 - protein, 388 aa, Homo sapiens
MAQPKQERVARARHQRSETARHQRSETAKTPTLGNRQTPTVGNRQTPTLGIHARPRRRATTSLLTLLLAFGKNAVRCALIGPGSLTSRTRPLTEPLGEKERREVFFPPRPERVEHNVESSRWEPRRRGACGSRGGNFPSPRGGSGVASLERAESSSTEPAKAIKPIDRKSVHQICSGPVVPSLSTAVKELVENSLDAGATNIDLKLKDYGVDLIEVSGNGCGVEEENFEGLTLKHHTSKIQEFADLPQVETFGFRGEALSSLCALSDVTISTCHVSAKVGTRLVFDHYGKIIQKTPYPHPRGMTVSVKQLFSTLPVHHKEFQRNIKKKRACFPFAFCRDCQFPEASPAMLPVQPAELTPRSTPPHPCSLEDNVITVFSSVKNGPGSSR

SEQ ID NO: 799331 - protein, 239 aa, Homo sapiens
MHFYLLGTEPAKAIKPIDRKSVHQICSGPVVPSLSTAVKELVENSLDAGATNIDLKLKDYGVDLIEVSGNGCGVEEENFEGLTLKHHTSKIQEFADLPQVETFGFRGEALSSLCALSDVTISTCHVSAKVGTRLVFDHYGKIIQKTPYPHPRGMTVSVKQLFSTLPVHHKEFQRNIKKKRACFPFAFCRDCQFPEASPAMLPVQPAELTPRSTPPHPCSLEDNVITVFSSVKNGPGSSR

SEQ ID NO: 799332 - protein, 328 aa, Homo sapiens
GATKAREGGACQTPTVGNRQTPTVGNRQDTNARKPPDTNGRKPPDTNARNPRQATTEGDYLPSDPAAGVRKKRSPVCSDWSRLFDVTDSTFDRATEAKRRDGKYFFRPARKGWSTTSKAAVGSPGGGAPVGAVEGTFPVPEADPVLHPWSELRARGELGSRSPLSRALFKNHGVQPPWKWGEHGRGAWRGRLVEAPERHPQRPSDPVPIRCALKPSTEPAKAIKPIDRKSVHQICSGPVVPSLSTAVKELVENSLDAGATNIDLKLKDYGVDLIEVSGNGCGVEEENFEGLMMSPFLPAMYRRRLGLDWCLITMGKSSRKPPTPTPEG

SEQ ID NO: 799333 - protein, 327 aa, Homo sapiens
MAQPKQERVARARHQRSETARHQRSETAKTPTLGNRQTPTVGNRQTPTLGIHARPRRRATTSLLTLLLAFGKNAVRCALIGPGSLTSRTRPLTEPLGEKERREVFFPPRPERVEHNVESSRWEPRRRGACGSRGGNFPSPRGGSGVASLERAESSSTEPAKAIKPIDRKSVHQICSGPVVPSLSTAVKELVENSLDAGATNIDLKLKDYGVDLIEVSGNGCGVEEENFEGLTLKHHTSKIQEFADLPQVETFGFRGEALSSLCALSDVTISTCHVSAKVGTRLVFDHYGKIIQKTPYPHPRGMTVSVKQLFSTLPVHHKEFQRNIKK

SEQ ID NO: 799334 - protein, 360 aa, Homo sapiens
MAQPKQERVARARHQRSETARHQRSETAKTPTLGNRQTPTVGNRQTPTLGIHARPRRRATTSLLTLLLAFGKNAVRCALIGPGSLTSRTRPLTEPLGEKERREVFFPPRPERVEHNVESSRWEPRRRGACGSRGGNFPSPRGGSGVASLERAESSSTEPAKAIKPIDRKSVHQICSGPVVPSLSTAVKELVENSLDAGATNIDLKLKDYGVDLIEVSGNGCGVEEENFEGLTLKHHTSKIQEFADLPQVETFGFRGEALSSLCALSDVTISTCHVSAKVGTRLVFDHYGKIIQKTPYPHPRGMTVSVKQLFSTLPVHHKEFQRNIKKPPIYSLKHVRGGPELLCKWTHCPEATMLQGSPS

SEQ ID NO: 799335 - protein, 326 aa, Homo sapiens
GATKAREGGACQTPTVGNRQTPTVGNRQDTNARKPPDTNGRKPPDTNARNPRQATTEGDYLPSDPAAGVRKKRSPVCSDWSRLFDVTDSTFDRATEAKRRDGKYFFRPARKGWSTTSKAAVGSPGGGAPVGAVEGTFPVPEADPVLHPWSELRARGELGSRSPLSRALFKNHGVQPPWKWGEHGRGAWRGRLVEAPERHPQRPSDPVPIRCALKPSTEPAKAIKPIDRKSVHQICSGPVVPSLSTAVKELVENSLDAGATNIDLKLKDYGVDLIEVSGNGCGVEEENFEGLTLKHHTSKIQEFADLPQVETFGFRGEALSSLCALR

SEQ ID NO: 799336 - protein, 208 aa, Homo sapiens
MHFYLLGTEPAKAIKPIDRKSVHQICSGPVVPSLSTAVKELVENSLDAGATNIDLKLKDYGVDLIEVSGNGCGVEEENFEGLTLKHHTSKIQEFADLPQVETFGFRGEALSSLCALSDVTISTCHVSAKVGTRLVFDHYGKIIQKTPYPHPRGMTVSVKQLFSTLPVHHKEFQRNIKKKRACFPFAFCRDCQFPEASPAMLPVQPAEL

SEQ ID NO: 799337 - protein, 68 aa, Homo sapiens
PLSRALFKNHGVQPPWKWGEHGRGAWRGRLVEAPERHPQRPSDPVPIRCALKPRQAPSGCWAAGKEFG

SEQ ID NO: 799338 - protein, 389 aa, Homo sapiens
AAPAVHVGEPVHAGGLHTERGADPVIGLYLVHRGGACQTPTVGNRQTPTLGIHARPRRRATTSLLTLLLAFGKNAVRCALIGPGSLTSRTRPLTEPLGEKERREVFFPPRPERVEHNVESSRWEPRRRGACGSRGGNFPSPRGGSGVASLERAESSSTEPAKAIKPIDRKSVHQICSGPVVPSLSTAVKELVENSLDAGATNIDLKLKDYGVDLIEVSGNGCGVEEENFEGLTLKHHTSKIQEFADLPQVETFGFRGEALSSLCALSDVTISTCHVSAKVGTRLVFDHYGKIIQKTPYPHPRGMTVSVKQLFSTLPVHHKEFQRNIKKKRACFPFAFCRDCQFPEASPAMLPVQPAELTPRSTPPHPCSLEDNVITVFSSVKNGPGSSR

SEQ ID NO: 799339 - protein, 448 aa, Homo sapiens
GATKAREGGACQTPTVGNRQTPTVGNRQDTNARKPPDTNGRKPPDTNARNPRQATTEGDYLPSDPAAGVRKKRSPVCSDWSRLFDVTDSTFDRATEAKRRDGKYFFRPARKGWSTTSKAAVGSPGGGAPVGAVEGTFPVPEADPVLHPWSELRARGELGSRSPLSRALFKNHGVQPPWKWGEHGRGAWRGRLVEAPERHPQRPSDPVPIRCALKPSTEPAKAIKPIDRKSVHQICSGPVVPSLSTAVKELVENSLDAGATNIDLKLKDYGVDLIEVSGNGCGVEEENFEGLTLKHHTSKIQEFADLPQVETFGFRGEALSSLCALSDVTISTCHVSAKVGTRLVFDHYGKIIQKTPYPHPRGMTVSVKQLFSTLPVHHKEFQRNIKKKRACFPFAFCRDCQFPEASPAMLPVQPAELTPRSTPPHPCSLEDNVITVFSSVKNGPGSSR

SEQ ID NO: 799340 - protein, 329 aa, Homo sapiens
MAQPKQERVARARHQRSETARHQRSETAKTPTLGNRQTPTVGNRQTPTLGIHARPRRRATTSLLTLLLAFGKNAVRCALIGPGSLTSRTRPLTEPLGEKERREVFFPPRPERVEHNVESSRWEPRRRGACGSRGGNFPSPRGGSGVASLERAESSSTEPAKAIKPIDRKSVHQICSGPVVPSLSTAVKELVENSLDAGATNIDLKLKDYGVDLIEVSGNGCGVEEENFEGLTLKHHTSKIQEFADLPQVETFGFRGEALSSLCALSDVTISTCHVSAKVGTRLVFDHYGKIIQKTPYPHPRGMTVSVKQLFSTLPVHHKEFQRNIKKDS

SEQ ID NO: 799341 - protein, 311 aa, Homo sapiens
MAQPKQERVARARHQRSETARHQRSETAKTPTLGNRQTPTVGNRQTPTLGIHARPRRRATTSLLTLLLAFGKNAVRCALIGPGSLTSRTRPLTEPLGEKERREVFFPPRPERVEHNVESSRWEPRRRGACGSRGGNFPSPRGGSGVASLERAESSSTEPAKAIKPIDRKSVHQICSGPVVPSLSTAVKELVENSLDAGATNIDLKLKDYGVDLIEVSGNGCGVEEENFEGLTLKHHTSKIQEFADLPQVETFGFRGEALSSLCALSDVTISTCHVSAKVGTRLVFDHYGKIIQSTLPVHHKEFQRNIKKDS

SEQ ID NO: 799342 - protein, 357 aa, Homo sapiens
MAQPKQERVARARHQRSETARHQRSETAKTPTLGNRQTPTVGNRQTPTLGIHARPRRRATTSLLTLLLAFGKNAVRCALIGPGSLTSRTRPLTEPLGEKERREVFFPPRPERVEHNVESSRWEPRRRGACGSRGGNFPSPRGGSGVASLERAESSSTEPAKAIKPIDRKSVHQICSGPVVPSLSTAVKELVENSLDAGATNIDLKLKDYGVDLIEVSGNGCGVEEENFEGLTLKHHTSKIQEFADLPQVETFGFRGEALSSLCALSDVTISTCHVSAKVGTRLVFDHYGKIIQKTPYPHPRGMTVSVKQLFSTLPVHHKEFQRNIKKKRACFPFAFCRDCQFPEASPAMLPVQPAEL

SEQ ID NO: 799343 - protein, 266 aa, Homo sapiens
MAQPKQERVARARHQRSETARHQRSETAKTPTLGNRQTPTVGNRQTPTLGIHARPRRRATTSLLTLLLAFGKNAVRCALIGPGSLTSRTRPLTEPLGEKERREVFFPPRPERVEHNVESSRWEPRRRGACGSRGGNFPSPRGGSGVASLERAESSSTEPAKAIKPIDRKSVHQICSGPVVPSLSTAVKELVENSLDAGATNIDLKLKDYGVDLIEVSGNGCGVEEENFEGLTLKHHTSKIQEFADLPQVETFGFRGEALSSLCALR

SEQ ID NO: 799344 - protein, 564 aa, Homo sapiens
PGSRDSRSSRDLSGAAPPRGVRARVLRPQGREGGDWEGGRSPFGLPYGSLRGRVVSTAQFRVPMPSASASRKSQEKPREIMDAAEDYAKERYGISSMIQSQEKPDRVLVRVRDLTIQKADEVVWVRARVHTSRAKGKQCFLVLRQQQFNVQALVAVGDHASKQMVKFAANINKESIVDVEGVVRKVNQKIGSCTQQDVELHVQKIYVISLAEPRLPLQLDDAVRPEAEGEEEGRATVNQDTRLDNRVIDLRTSTSQAVFRLQSGICHLFRETLINKGFVEIQTPKIISAASEGGANVFTVSYFKNNAYLAQSPQLYKQMCICADFEKVFSIGPVFRAEDSNTHRHLTEFVGLDIEMAFNYHYHEVMEEIADTMVQIFKGLQERFQTEIQTVNKQFPCEPFKFLEPTLRLEYCEALAMLREAGVEMGDEDDLSTPNEKLLGHLVKEKYDTDFYILDKYPLAVRPFYTMPDPRNPKQSNSYDMFMRGEEILSGAQRIHDPQLLTERALHHGIDLEKIKAYIDSFRFGAPPHAGGGIGLERVTMLFLGLHNVRQTSMFPRDPKRLTP

SEQ ID NO: 799345 - protein, 210 aa, Homo sapiens
PGSRDSRSSRDLSGAAPPRGVRARVLRPQGREGGDWEGGRSPFGLPYGSLRGRVVSTAQFRVPMPSASASRKSQEKPREIMDAAEDYAKERYGISSMIQSQEKPDRVLVRVRDLTIQKADEVVWVRARVHTSRAKGKQCFLVLRQQQFNVQALVAVGDHASKQMVKFAANINKESIVDVEGVVRKVNQKIGSCTQQDVELHVQKVSFFKI

SEQ ID NO: 799346 - protein, 81 aa, Homo sapiens
MVKFAANINKESIVDVEGVVRKVNQKIGSCTQQDVELHVQKIYVISLAEPRLPLQLDDAVRPEAEGEEEGRATAWITRRVP

SEQ ID NO: 799347 - protein, 564 aa, Homo sapiens; identical to SEQ ID NO: 799344

SEQ ID NO: 799348 - protein, 564 aa, Homo sapiens; identical to SEQ ID NO: 799344

SEQ ID NO: 799349 - protein, 564 aa, Homo sapiens; identical to SEQ ID NO: 799344

SEQ ID NO: 799350 - protein, 564 aa, Homo sapiens; identical to SEQ ID NO: 799344

SEQ ID NO: 799351 - protein, 468 aa, Homo sapiens
MIQSQEKPDRVLVRVRDLTIQKADEVVWVRARVHTSRAKGKQCFLVLRQQQFNVQALVAVGDHASKQMVKFAANINKESIVDVEGVVRKVNQKIGSCTQQDVELHVQKIYVISLAEPRLPLQLDDAVRPEAEGEEEGRATVNQDTRLDNRVIDLRTSTSQAVFRLQSGICHLFRETLINKGFVEIQTPKIISAASEGGANVFTVSYFKNNAYLAQSPQLYKQMCICADFEKVFSIGPVFRAEDSNTHRHLTEFVGLDIEMAFNYHYHEVMEEIADTMVQIFKGLQERFQTEIQTVNKQFPCEPFKFLEPTLRLEYCEALAMLREAGVEMGDEDDLSTPNEKLLGHLVKEKYDTDFYILDKYPLAVRPFYTMPDPRNPKQSNSYDMFMRGEEILSGAQRIHDPQLLTERALHHGIDLEKIKAYIDSFRFGAPPHAGGGIGLERVTMLFLGLHNVRQTSMFPRDPKRLTP

SEQ ID NO: 799352 - protein, 470 aa, Homo sapiens
MPSASASRKSQEKPREIMDAAEDYAKERYGISSMIQSQEKPGKQCFLVLRQQQFNVQALVAVGDHASKQMVKFAANINKESIVDVEGVVRKVNQKIGSCTQQDVELHVQKIYVISLAEPRLPLQLDDAVRPEAEGEEEGRATVNQDTRLDNRVIDLRTSTSQAVFRLQSGICHLFRETLINKGFVEIQTPKIISAASEGGANVFTVSYFKNNAYLAQSPQLYKQMCICADFEKVFSIGPVFRAEDSNTHRHLTEFVGLDIEMAFNYHYHEVMEEIADTMVQIFKGLQERFQTEIQTVNKQFPCEPFKFLEPTLRLEYCEALAMLREAGVEMGDEDDLSTPNEKLLGHLVKEKYDTDFYILDKYPLAVRPFYTMPDPRNPKQSNSYDMFMRGEEILSGAQRIHDPQLLTERALHHGIDLEKIKAYIDSFRFGAPPHAGGGIGLERVTMLFLGLHNVRQTSMFPRDPKRLTP

SEQ ID NO: 799353 - protein, 487 aa, Homo sapiens
KQIEFGFSCDCIIEDIPYLSLHNHKKNHRVLVRVRDLTIQKADEVVWVRARVHTSRAKGKQCFLVLRQQQFNVQALVAVGDHASKQMVKFAANINKESIVDVEGVVRKVNQKIGSCTQQDVELHVQKIYVISLAEPRLPLQLDDAVRPEAEGEEEGRATVNQDTRLDNRVIDLRTSTSQAVFRLQSGICHLFRETLINKGFVEIQTPKIISAASEGGANVFTVSYFKNNAYLAQSPQLYKQMCICADFEKVFSIGPVFRAEDSNTHRHLTEFVGLDIEMAFNYHYHEVMEEIADTMVQIFKGLQERFQTEIQTVNKQFPCEPFKFLEPTLRLEYCEALAMLREAGVEMGDEDDLSTPNEKLLGHLVKEKYDTDFYILDKYPLAVRPFYTMPDPRNPKQSNSYDMFMRGEEILSGAQRIHDPQLLTERALHHGIDLEKIKAYIDSFRFGAPPHAGGGIGLERVTMLFLGLHNVRQTSMFPRDPKRLTP

SEQ ID NO: 799354 - protein, 246 aa, Homo sapiens
MCICADFEKVFSIGPVFRAEDSNTHRHLTEFVGLDIEMAFNYHYHEVMEEIADTMVQIFKGLQERFQTEIQTVNKQFPCEPFKFLEPTLRLEYCEALAMLREAGVEMGDEDDLSTPNEKLLGHLVKEKYDTDFYILDKYPLAVRPFYTMPDPRNPKQSNSYDMFMRGEEILSGAQRIHDPQLLTERALHHGIDLEKIKAYIDSFRFGAPPHAGGGIGLERVTMLFLGLHNVRQTSMFPRDPKRLTP

SEQ ID NO: 799355 - protein, 518 aa, Homo sapiens
  misc_feature (517)..(517): Xaa can be any naturally occurring amino acid
PGSRDSRSSRDLSGAAPPRGVRARVLRPQGREGGDWEGGRSPFGLPYGSLRGRVVSTAQFRVPMPSASASRKSQEKPREIMDAAEDYAKERYGISSMIQSQEKPDRVLVRVRDLTIQKADEVVWVRARVHTSRAKGKQCFLVLRQQQFNVQALVAVGDHASKQMVKFAANINKESIVDVEGVVRKVNQKIGSCTQQDVELHVQKIYVISLAEPRLPLQLDDAVRPEAEGEEEGRATVNQDTRLDNRVIDLRTSTSQAVFRLQSGICHLFRETLINKGFVEIQTPKIISAASEGGANVFTVSYFKNNAYLAQSPQLYKQMCICADFEKVFSIGPVFRAEDSNTHRHLTEFVGLDIEMAFNYHYHEVMEEIADTMVQIFKGLQERFQTEIQTVNKQFPCEPFKFLEPTLRLEYCEALAMLREAGVEMGDEDDLSTPNEKLLGHLVKEKYDTDFYILDKYPLAVRPFYTMPDPRNPKQSNSYDMFMRGEEILSGAQRIHDPQLLTERALHHGIDLGKKLXA

SEQ ID NO: 799356 - protein, 383 aa, Homo sapiens
PGSRDSRSSRDLSGAAPPRGVRARVLRPQGREGGDWEGGRSPFGLPYGSLRGRVVSTAQFRVPMPSASASRKSQEKPREIMDAAEDYAKERYGISSMIQSQEKPDRVLVRVRDLTIQKADEVVWVRARVHTSRAKGKQCFLVLRQQQFNVQALVAVGDHASKQMVKFAANINKESIVDVEGVVRKVNQKIGSCTQQDVELHVQKIYVISLAEPRLPLQLDDAVRPEAEGEEEGRATVNQDTRLDNRVIDLRTSTSQAVFRLQSGICHLFRETLINKGFVEIQTPKIISAASEGGANVFTVSYFKNNAYLAQSPQLYKQMCICADFEKVFSIGPVFRAEDSNTHRHLTEFVGLDIEMAFNYHYHEVMEEIADTMVQIFKGLQER

SEQ ID NO: 799357 - protein, 176 aa, Homo sapiens
PGSRDSRSSRDLSGAAPPRGVRARVLRPQGREGGDWEGGRSPFGLPYGSLRGRVVSTAQFRVPMPSASASRKSQEKPREIMDAAEDYAKERYGISSMIQSQEKPDRVLVRVRDLTIQKADEVVWVRARVHTSRAKGRIGFIIKALSVRTPNFLSYIFLTDQSKSLKTKQKHVTFLS

SEQ ID NO: 799358 - protein, 146 aa, Homo sapiens
PGSRDSRSSRDLSGAAPPRGVRARVLRPQGREGGDWEGGRSPFGLPYGSLRGRVVSTAQFRVPMPSASASRKSQEKPREIMDAAEDYAKERYGISSMIQSQEKPDLVCLGLELANYNVMKLFGLAKGLYNERMDSSYAYSITDSLA

SEQ ID NO: 799359 - protein, 70 aa, Homo sapiens
LFIGTSLFIGTSLFIGTQRIHDPQLLTERALHHGIDLEKIKAYIDSFRFGALMNSEVPMNSEVPMNSECR

SEQ ID NO: 799360 - protein, 564 aa, Homo sapiens; identical to SEQ ID NO: 799344

SEQ ID NO: 799361 - protein, 564 aa, Homo sapiens; identical to SEQ ID NO: 799344

SEQ ID NO: 799362 - protein, 564 aa, Homo sapiens; identical to SEQ ID NO: 799344

SEQ ID NO: 799363 - protein, 468 aa, Homo sapiens; identical to SEQ ID NO: 799351

SEQ ID NO: 799364 - protein, 401 aa, Homo sapiens
YQDTAIHINKESIVDVEGVVRKVNQKIGSCTQQDVELHVQKIYVISLAEPRLPLQLDDAVRPEAEGEEEGRATVNQDTRLDNRVIDLRTSTSQAVFRLQSGICHLFRETLINKGFVEIQTPKIISAASEGGANVFTVSYFKNNAYLAQSPQLYKQMCICADFEKVFSIGPVFRAEDSNTHRHLTEFVGLDIEMAFNYHYHEVMEEIADTMVQIFKGLQERFQTEIQTVNKQFPCEPFKFLEPTLRLEYCEALAMLREAGVEMGDEDDLSTPNEKLLGHLVKEKYDTDFYILDKYPLAVRPFYTMPDPRNPKQSNSYDMFMRGEEILSGAQRIHDPQLLTERALHHGIDLEKIKAYIDSFRFGAPPHAGGGIGLERVTMLFLGLHNVRQTSMFPRDPKRLTP

SEQ ID NO: 799365 - protein, 537 aa, Homo sapiens
PGSRDSRSSRDLSGAAPPRGVRARVLRPQGREGGDWEGGRSPFGLPYGSLRGRVVSTAQFRVPMPSASASRKSQEKPREIMDAAEDYAKERYGISSMIQSQEKPDRVLVRVRDLTIQKADEVVWVRARVHTSRAKGKQCFLVLRQQQFNVQALVAVGDHASKQMVKFAANINKESIVDVEGVVRKVNQKIGSCTQQDVELHVQKIYVISLAEPRLPLQLDDAVRPEAEGEEEGRATVNQDTRLDNRVIDLRTSTSQAVFRLQSGICHLFRETLINKGFVEIQTPKIISAASEGGANVFTVSYFKNNAYLAQSPQLYKQMCICADFEKVFSIGPVFRAEDSNTHRHLTEFVGLDIEMAFNYHYHEVMEEIADTMVQIFKGLQERFQTEIQTVNKQFPCEPFKFLEPTLRLEYCEALAMLREAGVEMGDEDDLSTPNEKLLGHLVKEKKQSNSYDMFMRGEEILSGAQRIHDPQLLTERALHHGIDLEKIKAYIDSFRFGAPPHAGGGIGLERVTMLFLGLHNVRQTSMFPRDPKRLTP

SEQ ID NO: 799366 - protein, 559 aa, Homo sapiens
PGSRDSRSSRDLSGAAPPRGVRARVLRPQGREGGDWEGGRSPFGLPYGSLRGRVVSTAQFRVPMPSASASRKSQEKPREIMDAAEDYAKERYGISSMIQSQEKPDRVLVRVRDLTIQKADEVVWVRARVHTSRAKGKQCFLVLRQQQFNVQALVAVGDHASKQMVKFAANINKESIVDVEGVVRKVNQKIGSCTQQDVELHVQKIYVISLAEPRLPLQLDDAVRPEAEGEEEGRATVNQDTRLDNRVIDLRTSTSQAVFRLQSGICHLFRETLINKGFVEIQTPKIISAASEGGANVFTVSYFKNNAYLAQSPQLYKQMCICADFEKVFSIGPVFRAEDSNTHRHLTEFVGLDIEMAFNYHYHEVMEEIADTMVQIFKGLQERFQTEIQTVNKQFPCEPFKFLEPTLRLEYCEALAMLREAGVEMGDEDDLSTPNEKLLGHLVKEKYDTDFYILDKYPLAVRPFYTMPDPRNPKQSNSYDMFMRGEEILSGAQRIHDPQLLTERALHHGIDLEKIKAYIDSFRFGAPPHAGGGIGNILLLLTNKFISSKYNTNLNYKNF

SEQ ID NO: 799367 - protein, 148 aa, Homo sapiens
KRRPKSTTTFTNFRPYTPNEKLLGHLVKEKYDTDFYILDKYPLAVRPFYTMPDPRNPKQSNSYDMFMRGEEILSGAQRIHDPQLLTERALHHGIDLEKIKAYIDSFRFGAPPHAGGGIGLERVTMLFLGLHNVRQTSMFPRDPKRLTP

SEQ ID NO: 799368 - protein, 253 aa, Homo sapiens
PGSRDSRSSRDLSGAAPPRGVRARVLRPQGREGGDWEGGRSPFGLPYGSLRGRVVSTAQFRVPMPSASASRKSQEKPREIMDAAEDYAKERYGISSMIQSQEKPDRVLVRVRDLTIQKADEVVWVRARVHTSRAKGKQCFLVLRQQQFNVQALVAVGDHASKQMVKFAANINKESIVDVEGVVRKVNQKIGSCTQQDVELHVQKIYVISLAEPRLPLQLDDAVRPEAEGEEVKIILMKYYASAVYLVCKTLKT

SEQ ID NO: 799369 - protein, 115 aa, Homo sapiens
MLLVGCKSDLRTDVSTLVELSNHRQTPVSYDQGANMAKQIGAATYIECSALQSENSVRDIFHVATLACVNKTNKNVKRNKSQRATKRISHMPSRPELSAVATDLRKDKAKSCTVM

SEQ ID NO: 799370 - protein, 115 aa, Homo sapiens; identical to SEQ ID NO: 799369

SEQ ID NO: 799371 - protein, 115 aa, Homo sapiens; identical to SEQ ID NO: 799369

SEQ ID NO: 799372 - protein, 503 aa, Homo sapiens
MPVPPPPAPPPPPTFALANTEKPTLNKTEQAGRNALLSDISKGKKLKKTVTNDRSAPILDKPKGAGAGGGGGGFGGGGGFGGGGGGGGGGSFGGGGPPGLGGLFQAGMPKLRSTANRDNDSGGSRPPLLPPGGRSTSAKPFSPPSGPGRFPVPSPGHRSGPPEPQRNRMPPPRPDVGSKPDSIPPPVPSTPRPIQSSLHNRGSPPVPGGPRQPSPGPTPPPFPGNRGTALGGGSIRQSPLSSSSPFSNRPPLPPTPSRALDDKPPPPPPPVGNRPSIHREAVPPPPPQNNKPPVPSTPRPSASSQAPPPPPPPSRPGPPPLPPSSSGNDETPRLPQRNLSLSSSTPPLPSPGRSGPLPPPPSERPPPPVRDPPGRSGPLPPPPPVSRNGSTSRALPATPQLPSRSGVDSPRSGPRPPLPPDRPSAGAPPPPPPSTSIRNGFQDSPCEDEWESRFYFHPISDLPPPEPYVQTTKSYPSKLARNESRSGSNRRERGAPPLPPIPR

SEQ ID NO: 799373 - protein, 503 aa, Homo sapiens; identical to SEQ ID NO: 799372

SEQ ID NO: 799374 - protein, 503 aa, Homo sapiens; identical to SEQ ID NO: 799372

SEQ ID NO: 799375 - protein, 503 aa, Homo sapiens; identical to SEQ ID NO: 799372

SEQ ID NO: 799376 - protein, 495 aa, Homo sapiens
MTEVHQYWTNLKEAGAGGGGGRLLQFLLLSDISKGKKLKKTVTNDRSAPILDKPKGAGAGGGGGGFGGGGGFGGGGGGGGGGSFGGGGPPGLGGLFQAGMPKLRSTANRDNDSGGSRPPLLPPGGRSTSAKPFSPPSGPGRFPVPSPGHRSGPPEPQRNRMPPPRPDVGSKPDSIPPPVPSTPRPIQSSLHNRGSPPVPGGPRQPSPGPTPPPFPGNRGTALGGGSIRQSPLSSSSPFSNRPPLPPTPSRALDDKPPPPPPPVGNRPSIHREAVPPPPPQNNKPPVPSTPRPSASSQAPPPPPPPSRPGPPPLPPSSSGNDETPRLPQRNLSLSSSTPPLPSPGRSGPLPPPPSERPPPPVRDPPGRSGPLPPPPPVSRNGSTSRALPATPQLPSRSGVDSPRSGPRPPLPPDRPSAGAPPPPPPSTSIRNGFQDSPCEDEWESRFYFHPISDLPPPEPYVQTTKSYPSKLARNESRSGSNRRERGAPPLPPIPR

SEQ ID NO: 799377 - protein, 454 aa, Homo sapiens
HEANPLHHLLQWATGPPSTGKRFPLLLLRTTSLQCLPLRGGSFGGGGPPGLGGLFQAGMPKLRSTANRDNDSGGSRPPLLPPGGRSTSAKPFSPPSGPGRFPVPSPGHRSGPPEPQRNRMPPPRPDVGSKPDSIPPPVPSTPRPIQSSLHNRGSPPVPGGPRQPSPGPTPPPFPGNRGTALGGGSIRQSPLSSSSPFSNRPPLPPTPSRALDDKPPPPPPPVGNRPSIHREAVPPPPPQNNKPPVPSTPRPSASSQAPPPPPPPSRPGPPPLPPSSSGNDETPRLPQRNLSLSSSTPPLPSPGRSGPLPPPPSERPPPPVRDPPGRSGPLPPPPPVSRNGSTSRALPATPQLPSRSGVDSPRSGPRPPLPPDRPSAGAPPPPPPSTSIRNGFQDSPCEDEWESRFYFHPISDLPPPEPYVQTTKSYPSKLARNESRSGSNRRERGAPPLPPIPR

SEQ ID NO: 799378 - protein, 503 aa, Homo sapiens; identical to SEQ ID NO: 799372

SEQ ID NO: 799379 - protein, 503 aa, Homo sapiens; identical to SEQ ID NO: 799372

SEQ ID NO: 799380 - protein, 358 aa, Homo sapiens
MPVPPPPAPPPPPTFALANTEKPTLNKTEQAGRNALLSDISKGKKLKKTVTNDRSAPILDKPKGAGAGGGGGGFGGGGGFGGGGGGGGGGSFGGGGPPGLGGLFQAGMPKLRSTANRDNDSGGSRPPLLPPGGRSTSAKPFSPPSGPGRFPVPSPGHRSGPPEPQRNRMPPPRPDVGSKPDSIPPPVPSTPRPIQSSLHNRGSPPVPGGPRQPSPGPTPPPPPVRDPPGRSGPLPPPPPVSRNGSTSRALPATPQLPSRSGVDSPRSGPRPPLPPDRPSAGAPPPPPPSTSIRNGFQDSPCEDEWESRFYFHPISDLPPPEPYVQTTKSYPSKLARNESRSGSNRRERGAPPLPPIPR

SEQ ID NO: 799381 - protein, 84 aa, Homo sapiens
CAFRYVSLHSTLSVTEDTACFSSQMSGKADSTSIRFPICHLQSHMYKRPKVIPANWQETKAGVSISAKVFEDSRLSSLSDTRAI

SEQ ID NO: 799382 - protein, 343 aa, Homo sapiens
MPVPPPPAPPPPPTFALANTEKPTLNKTEQAGRNALLSDISKGKKLKKTVTNDRSAPILDKPKGAGAGGGEAGSAGRQTDYRPKDSEKAEQQVTTIPKRGTHPSNNSKRYAPQHRKARKPQTPRHQTRELKEYMRRKTEHSKSETTAERRSKLQKNHKTTTRKWNQENRNQMTHTKGKEKYETSKRHTDGNREERTTKSRKKEYTAQQQKKTNDTTHRTNDNPLEQDSKKGDTRKSEQRAQETQSKQKTPQPREQHRRTITAGLQTDPRRENDTRPTEKTRGENEAESTKRKNRPEQSNTHRTTDKHQRQTENEAKKQQETTNQTHNTAQDSTDTTNSSTKNK

SEQ ID NO: 799383 - protein, 503 aa, Homo sapiens; identical to SEQ ID NO: 799372

SEQ ID NO: 799384 - protein, 503 aa, Homo sapiens; identical to SEQ ID NO: 799372

SEQ ID NO: 799385 - protein, 503 aa, Homo sapiens; identical to SEQ ID NO: 799372

SEQ ID NO: 799386 - protein, 493 aa, Homo sapiens [sequence omitted]

SEQ ID NO: 799387 - protein, 403 aa, Homo sapiens
MPVPPPPAPPPPPTFALANTEKPTLNKTEQAGRNALLSDISKGKKLKKTVTNDRSAPILDKPKGAGAGGGGGGFGGGGGFGGGGGGGGGGSFGGGGPPGLGGLFQAGMPKLRSTANRDNDSGGSRPPLLPPGGRSTSAKPFSPPSGPGRFPVPSPGHRSGPPEPQRNRMPPPRPDVGSKPDSIPPPVPSTPRPIQSSLHNRGSPPVPGGPRQPSPGPTPPPFPGNRGTALGGGSIRQSPLSSSSPFSNRPPLPPTPSRALDDKPPPPPPPVGNRPSIHREAVPPPPPQNNKPPVPSTPRPSASSQAPPPPPPPSRPGPPPLPPSSSGNDETPRLPQRNLSLSSSTPPLPSPGRSGPLPPPPSERPPPPVRDPPGRSGMTRRGVSCFQNPACPNVPIILSVKIV

SEQ ID NO: 799388 - protein, 343 aa, Homo sapiens
MPVPPPPAPPPPPTFALANTEKPTLNKTEQAGRNALLSDISKGKKLKKTVTNDRSAPILDKPKGAGAGGGEAGSAGRQTDYRPKDSEKAEQQVTTIPKRGTHPSNNSKRYAPQHRKARKPQTPRHQTRELKEYMRRKTEHSKSETTAERRSKLQKNHKTTTRKWNQENRNQMTHTKGKEKYETSKRHTDGNREERTTKSRKKEETAQQQKKTNDTTHRTNDNPLEQDSKKGDTRKSEQRAQETQSKQKTPQPREQHRRTITAGLQTDPRRENDTRPTEKTRGENEAESTKRKNRPEQSNTHRTTDKHQRQTENEAKKQQETTNQTHNTAQDSTDTTNSSTKNK

SEQ ID NO: 799389 - protein, 125 aa, Homo sapiens
MARYEARCQVAPVRQQGSVAGARAGVVSLLGCRSSWTAAMELSAEYLREKLQRDLEAEHVEVEDTTLNRCSCSFRVLVVSAKFEGKPLLQRHRLVNACLAEELPHIHAFEQKTLTPDQWARERQK

SEQ ID NO: 799390 - protein, 168 aa, Homo sapiens
SSGNNAEYAGSSGNNAEYAGSSGNNAEYAGSSGNNAEYAESSGNNAEYAGPEVAPVRQQGSVAGARAGVVSLLGCRSSWTAAMELSAEYLREKLQRDLEAEHVEVEDTTLNRCSCSFRVLVVSAKFEGKPLLQRHRLVNACLAEELPHIHAFEQKTLTPDQWARERQK

SEQ ID NO: 799391 - protein, 120 aa, Homo sapiens [sequence omitted]

SEQ ID NO: 799392 - protein, 152 aa, Homo sapiens
MASAKSLDRWKARLLEGGSTALTYALVRAEVSFPAEVAPVRQQGSVAGARAGVVSLLGCRSSWTAAMELSAEYLREKLQRDLEAEHVEVEDTTLNRCSCSFRVLVVSAKFEGKPLLQRHRLVNACLAEELPHIHAFEQKTLTPDQWARERQK

SEQ ID NO: 799393 - protein, 152 aa, Homo sapiens; identical to SEQ ID NO: 799392

SEQ ID NO: 799394 - protein, 168 aa, Homo sapiens; identical to SEQ ID NO: 799390

SEQ ID NO: 799395 - protein, 152 aa, Homo sapiens; identical to SEQ ID NO: 799392

SEQ ID NO: 799396 - protein, 152 aa, Homo sapiens; identical to SEQ ID NO: 799392

SEQ ID NO: 799397 - protein, 124 aa, Homo sapiens
MASAKSLDRWKARLLEGGSTALTYALVRAEVSFPAEVAPVRQQGSVAGARAGVVSLLGCRSSWTAAMELSAEYLREKLQRDLEAEHVEVEDTTLNRCSCSFRVLVVSAKFEGKPLLQRHRLLNR

SEQ ID NO: 799398 - protein, 193 aa, Homo sapiens
MASAKSLDRWKARLLEGGSTALTYALVRAEVSFPAEVAPVRQQGSVAGARAGVVSLLGCRSSWTAAMELSAEYLREKLQRDLEAEHVEVEDTTLNRCSCSFRVLVVSAKFEGKPLLQRHRETVSRRVAQAGLKLLGSNDPAASASHSAGIIDVSPHAQPPSLFLSLDLQFKRCLPCSVQSNEMCDGCKPGVFF

SEQ ID NO: 799399 - protein, 287 aa, Homo sapiens
MASAKSLDRWKARLLEGGSTALTYALVRAEVSFPAEVAPVRQQGSVAGARAGVVSLLGCRSSWTAAMELSAEYLREKLQRDLEAEHVEVEDTTLNRCSCSFRVLVVSAKFEGKPLLQRHSLDPSMTIHCDMVITYGLDQLENCQTCGTDYIISVLNLLTLIVEQINTKLPSSFVEKLFIPSSKLLFLRYHKEKEVVAVAHAVYQAMLSLKNIPVLETAYKLILGEMTCALNNLLHSLQLPEACSEIKHEAFKNHVFNVDNAKFVVKFDLSALTTIGNAKNSLIGVSL

SEQ ID NO: 799400 - protein, 386 aa, Homo sapiens
MASAKSLDRWKARLLEGGSTALTYALVRAEVSFPAEVAPVRQQGSVAGARAGVVSLLGCRSSWTAAMELSAEYLREKLQRDLEAEHVEVEDTTLNRCSCSFRVLVVSAKFEGKPLLQRHRLECNGTISAHHNLRLLGSSDSLVSASQVAGITETVSRRVAQAGLKLLGSNDPAASASHSAGIIDVLYRVMRCVTAANQVFFSEAVLTAANECVGVLLGSLDPSMTIHCDMVITYGLDQLENCQTCGTDYIISVLNLLTLIVEQINTKLPSSFVEKLFIPSSKLLFLRYHKEKEVVAVAHAVYQAMLSLKNIPVLETAYKLILGEMTCALNNLLHSLQLPEACSEIKHEAFKNHVFNVDNAKFVVKFDLSALTTIGNAKNSLIGVSL

SEQ ID NO: 799401 - protein, 124 aa, Homo sapiens
MASAKSLDRWKARLLEGGSTALTYALVRAEVSFPAEVAPVRQQGSVAGARAGVVSLLGCRSSWTAAMELSAEYLREKLQRDLEAEHVEVEDTTLNRCSCSFRVLVVSAKFEGKPLLQRHRFCTE

SEQ ID NO: 799402 - protein, 120 aa, Homo sapiens [sequence omitted]

SEQ ID NO: 799403 - protein, 115 aa, Homo sapiens
MASAKSLDRWKARLLEGGSTALTYALVRAEVSFPAEVAPVRQQGSVAGARAGVVSLLGCRSSWTAAMELSAEYLREKLQRDLEAEHVLPSPGGVGQVRGETAASETQVRPWEHLA

SEQ ID NO: 799404 - protein, 111 aa, Homo sapiens
MASAKSLDRWKARLLEGGSTALTYALVRAEVSFPAEVAPVRQQGSVAGARAGVVSLLGCRSSWTAAMELSAEYLREKLQRDLEAEHVELSRRTRGKELGGRVRHHSYSSAR

SEQ ID NO: 799405 - protein, 227 aa, Homo sapiens
MASAKSLDRWKARLLEGGSTALTYALVRAEVSFPAEVAPVRQQGSVAGARAGVVSLLGCRSSWTAAMELSAEYLREKLQRDLEAEHVLPSPGGVGQVRGETAASETQAGVQWHDLGSPQPPPPGFKRFSCLSLPSSWDYRYVLPRPANLVFLIETGFLHVVQAGLELPTSGDPPASASKSAGITGVCHLCPAFFFVFFPHLYCPSSFLWHTEEVGPGNDAMGGPCLI

SEQ ID NO: 799406 - protein, 123 aa, Homo sapiens
MASAKSLDRWKARLLEGGSTALTYALVRAEVSFPAEVAPVRQQGSVAGARAGVVSLLGCRSSWTAAMELSAEYLREKLQRDLEAEHVLPSPGGVGQVRGETAASETQAGERVPSRRAPAHPCL

SEQ ID NO: 799407 - protein, 123 aa, Homo sapiens; identical to SEQ ID NO: 799406

SEQ ID NO: 799408 - protein, 163 aa, Homo sapiens
MTIHCDMVITYGLDQLENCQTCGTDYIISVLNLLTLIVEQINTKLPSSFVEKLFIPSSKLLFLRYHKEKEVVAVAHAVYQAMLSLKNIPVLETAYKLILGEMTCALNNLLHSLQLPEACSEIKHEAFKNHVFNVDNAKFVVKFDLSALTTIGNAKNSLIGVSL

SEQ ID NO: 799409 - protein, 272 aa, Homo sapiens
PQQPPQPQPQPPGSSATTPGGGSGGSLSAMPPPSPDSENGFYPGLPSSMNPAFFPSFSPVSPHGCTGLSVPTSGGGGGGFGGPFSATAVPPPPPPAMNIPQQQPPPPAAPQQPQSRRSPVSPQLQQQHQAAAAAFLQQRNSYNHHQPLLKQSPWSNHQSSGWGTGSMSWGAMHGRDHRRTGNMGIPGTMNQISPLKKPFSGNVIAPPKFTRSTPSLTPKSWIEDNVFRTDNNSNTLLPLQDRSRMYDSLNMHSLENSLIDIMRAEHDPLKGR

SEQ ID NO: 799410 - protein, 618 aa, Homo sapiens
PQQPPQPQPQPPGSSATTPGGGSGGSLSAMPPPSPDSENGFYPGLPSSMNPAFFPSFSPVSPHGCTGLSVPTSGGGGGGFGGPFSATAVPPPPPPAMNIPQQQPPPPAAPQQPQSRRSPVSPQLQQQHQAAAAAFLQQRNSYNHHQPLLKQSPWSNHQSSGWGTGSMSWGAMHGRDHRRTGNMGIPGTMNQISPLKKPFSGNVIAPPKFTRSTPSLTPKSWIEDNVFRTDNNSNTLLPLQVRSSLQLPAWGSDSLQDSWCTAAGTSRIDQDRSRMYDSLNMHSLENSLIDIMRAEHDPLKGRLSYPHPGTDNLLMLNGRSSLFPIDDGLLDDGHSDQVGVLNSPTCYSAHQNGERIERFSRKVFVGGLPPDIDEDEITASFRRFGPLVVDWPHKAESKSYFPPKGYAFLLFQEESSVQALIDACIEEDGKLYLCVSSPTIKDKPVQIRPWNLSDSDFVMDGSQPLDPRKTIFVGGVPRPLRAVELAMIMDRLYGGVCYAGIDTDPELKYPKGAGRVAFSNQQSYIAAISARFVQLQHGDIDKRVEVKPYVLDDQMCDECQGARCGGKFAPFFCANVTCLQYYCEFCWANIHSRAGREFHKPLVKEGADRPRQIHFRWN

SEQ ID NO: 799411 - protein, 588 aa, Homo sapiens
PQQPPQPQPQPPGSSATTPGGGSGGSLSAMPPPSPDSENGFYPGLPSSMNPAFFPSFSPVSPHGCTGLSVPTSGGGGGGFGGPFSATAVPPPPPPAMNIPQQQPPPPAAPQQPQSRRSPVSPQLQQQHQAAAAAFLQQRNSYNHHQPLLKQSPWSNHQSSGWGTGSMSWGAMHGRDHRRTGNMGIPGTMNQISPLKKPFSGNVIAPPKFTRSTPSLTPKSWIEDNVFRTDNNSNTLLPLQDRSRMYDSLNMHSLENSLIDIMRAEHDPLKGRLSYPHPGTDNLLMLNGRSSLFPIDDGLLDDGHSDQVGVLNSPTCYSAHQNGERIERFSRKVFVGGLPPDIDEDEITASFRRFGPLVVDWPHKAESKSYFPPKGYAFLLFQEESSVQALIDACIEEDGKLYLCVSSPTIKDKPVQIRPWNLSDSDFVMDGSQPLDPRKTIFVGGVPRPLRAVELAMIMDRLYGGVCYAGIDTDPELKYPKGAGRVAFSNQQSYIAAISARFVQLQHGDIDKRVEVKPYVLDDQMCDECQGARCGGKFAPFFCANVTCLQYYCEFCWANIHSRAGREFHKPLVKEGADRPRQIHFRWN

SEQ ID NO: 799412 - protein, 72 aa, Homo sapiens
GSSVYSWPVGFTFALLMMVQSASVSKAGKGSSSSHGVAAALNQDLDPDPKCHVFNVSSQRCQMGSAQPCLCC

SEQ ID NO: 799413 - protein, 72 aa, Homo sapiens; identical to SEQ ID NO: 799412

SEQ ID NO: 799414 - protein, 115 aa, Homo sapiens
APEAAVVAQQAEGGSSVEPVPSRGEAGSPRYTVFKLTDIFLCLTIVLLRASSKFFRLTDQGCSCYYRRCVAPYLSKAINAEWPWYGRRSAAWLEDMATPVGVEHGEQSQAFSDDD

SEQ ID NO: 799415 - protein, 115 aa, Homo sapiens; identical to SEQ ID NO: 799414

SEQ ID NO: 799416 - protein, 108 aa, Homo sapiens
MQLLLPEVCGTLPQQGYETQSGHGTAGGRPRGWKTWPLQSVLSTASSLRPLVMMVQSASVSKAGKGSSSSHGVAAALNQDLDPDPKCHVFNVSSQRCQMGSAQPCLCC

SEQ ID NO: 799417 - protein, 115 aa, Homo sapiens; identical to SEQ ID NO: 799414

SEQ ID NO: 799418 - protein, 115 aa, Homo sapiens; identical to SEQ ID NO: 799414

SEQ ID NO: 799419 - protein, 115 aa, Homo sapiens; identical to SEQ ID NO: 799414

SEQ ID NO: 799420 - protein, 108 aa, Homo sapiens
MQLLLPEVCGTLPQQGYETQSGHGTAGGRPRGWKTWPLQSVLSTASSLRPLVMMVRLPGWENGVFLDTTLTYLASLPQRRSGDDNLGFSLIGWLGGLKVLDEKMLSKR

SEQ ID NO: 799421 - protein, 72 aa, Homo sapiens
GAAAAAGAGSQRLPRRRPRCLPLLSCALFSCNCAECWLVLWDVDAVLPCTDGSQPAGKPLRLLPEGAGLRCG

SEQ ID NO: 799422 - protein, 115 aa, Homo sapiens; identical to SEQ ID NO: 799414

SEQ ID NO: 799423 - protein, 115 aa, Homo sapiens; identical to SEQ ID NO: 799414

SEQ ID NO: 799424 - protein, 115 aa, Homo sapiens; identical to SEQ ID NO: 799414

SEQ ID NO: 799425 - protein, 108 aa, Homo sapiens; identical to SEQ ID NO: 799416

SEQ ID NO: 799426 - protein, 115 aa, Homo sapiens; identical to SEQ ID NO: 799414

SEQ ID NO: 799427 - protein, 115 aa, Homo sapiens; identical to SEQ ID NO: 799414

SEQ ID NO: 799428 - protein, 108 aa, Homo sapiens; identical to SEQ ID NO: 799416

SEQ ID NO: 799429 - protein, 108 aa, Homo sapiens; identical to SEQ ID NO: 799420

SEQ ID NO: 799430 - protein, 115 aa, Homo sapiens; identical to SEQ ID NO: 799414

SEQ ID NO: 799431 - protein, 115 aa, Homo sapiens; identical to SEQ ID NO: 799414

SEQ ID NO: 799432 - protein, 115 aa, Homo sapiens; identical to SEQ ID NO: 799414

SEQ ID NO: 799433 - protein, 115 aa, Homo sapiens; identical to SEQ ID NO: 799414

SEQ ID NO: 799434 - protein, 145 aa, Homo sapiens
APEAAVVAQQAEGGSSVEPVPSRGEAGSPRYTVFKLTDIFLCLTIVLLRASSKFFRLTDQGCSCYYRRCVAPYLSKAINAEWPWYGRRSAAWLEDMATPVGVEHGEQSQAFSDDFSRDWVSPCWPGWSLSPDLVICLPQLPKVLR

SEQ ID NO: 799435 - protein, 115 aa, Homo sapiens; identical to SEQ ID NO: 799414

SEQ ID NO: 799436 - protein, 108 aa, Homo sapiens; identical to SEQ ID NO: 799416

SEQ ID NO: 799437 - protein, 108 aa, Homo sapiens; identical to SEQ ID NO: 799416

SEQ ID NO: 799438 - protein, 108 aa, Homo sapiens; identical to SEQ ID NO: 799416

SEQ ID NO: 799439 - protein, 342 aa, Homo sapiens
MDILKSEILRKRQLVEDRNLLVENKKYFKRSELAKKEEEAYFERCGYKIQPKEEDQKPLTSSNPVLELELAEEKLPMTLSRQEVIRRLRERGEPIRLFGETDYDAFQRLRKIEILTPEVNKGLRNDLKAALDKIDQQYLNEIVGGQEPGEEDTQNDLKVHEENTTIEELEALGESLGKGDDHKDMDIITKFLKFLLGVWAKELNAREDYVKRSVQGKLNSATQKQTESYLRPLFRKLRKRNLPADIKESITDIIKFMLQREYVKANDAYLQMAIGNAPWPIGVTMVGIHARTGREKIFSKHVAHVLNDETQRKYIQGLKRLMTICQKHFPTDPSKCVEYNAL

SEQ ID NO: 799440 - protein, 120 aa, Homo sapiens
MMLIFRWPLEMRLGPSVSLCEVDTKLTITAAFLWASCYMRTVLGVHLKRSGNMNPFCTLESPVQPCMELGKAGPELSRETWWRKPRPALSLPGPGQVCVCPSSTLGGLQAAAEGIPWALC

SEQ ID NO: 799441 - protein, 86 aa, Homo sapiens
LSHPSFRRKRLLSVVLRCLGLLFRILSGFAAAGPVRLGSRSWSGKLELKFWRRDGHSEIRDPSEAAAGGGQEPAGGEDPAVVGVGM

SEQ ID NO: 799442 - protein, 342 aa, Homo sapiens; identical to SEQ ID NO: 799439

SEQ ID NO: 799443 - protein, 342 aa, Homo sapiens; identical to SEQ ID NO: 799439

SEQ ID NO: 799444 - protein, 295 aa, Homo sapiens
MDILKSEILRKRQLVEDRNLLVENKKYFKRSELAKKEEEAYFERCGYKIQPKEEDQKPLTSSNPVLELELAEEKLPMTLSRQEVIRRLRERGEPIRLFGETDYDAFQRLRKIEILTPEVNKGLRNDLKAALDKIDQQYLNEIVGGQEPGEEDTQNDLKVHEENTTIEELEALGESLGKGDDHKDMDIITKFLKNLPADIKESITDIIKFMLQREYVKANDAYLQMAIGNAPWPIGVTMVGIHARTGREKIFSKHVAHVLNDETQRKYIQGLKRLMTICQKHFPTDPSKCVEYNAL

SEQ ID NO: 799445 - protein, 285 aa, Homo sapiens
MDILKSEILRKRQLVEDRNLLVENKKYFKRSELAKKEEEAYFERCGYKIQPKEEDQKPLTSSNPVLELELAEEKLPMTLSRQEVIRRLRERGEPIRLFGETDYDAFQRLRKIEILTPEVNKGLRNDLKAALDKIDQQYLNEIVGGQEPGEEDTQNDLKVHEENTTIEELEALGESLGKGDDHKDMDIITKFLKFLLGVWAKELNAREDYVKRSVQGKLNSATQKQTESYLRPLFRKLRKRNLPADIKESITDIIKFMLQREYVKANDAYLQMAIGNAPWPIGVTM

SEQ ID NO: 799446 - protein, 327 aa, Homo sapiens
MIRTFPGENKKYFKRSELAKKEEEAYFERCGYKIQPKEEDQKPLTSSNPVLELELAEEKLPMTLSRQEVIRRLRERGEPIRLFGETDYDAFQRLRKIEILTPEVNKGLRNDLKAALDKIDQQYLNEIVGGQEPGEEDTQNDLKVHEENTTIEELEALGESLGKGDDHKDMDIITKFLKFLLGVWAKELNAREDYVKRSVQGKLNSATQKQTESYLRPLFRKLRKRNLPADIKESITDIIKFMLQREYVKANDAYLQMAIGNAPWPIGVTMVGIHARTGREKIFSKHVAHVLNDETQRKYIQGLKRLMTICQKHFPTDPSKCVEYNAL

SEQ ID NO: 799447 - protein, 336 aa, Homo sapiens
MIRTFPGENKKYFKRSELAKKEEEAYFERCGYKPINEKPSGEIQPKEEDQKPLTSSNPVLELELAEEKLPMTLSRQEVIRRLRERGEPIRLFGETDYDAFQRLRKIEILTPEVNKGLRNDLKAALDKIDQQYLNEIVGGQEPGEEDTQNDLKVHEENTTIEELEALGESLGKGDDHKDMDIITKFLKFLLGVWAKELNAREDYVKRSVQGKLNSATQKQTESYLRPLFRKLRKRNLPADIKESITDIIKFMLQREYVKANDAYLQMAIGNAPWPIGVTMVGIHARTGREKIFSKHVAHVLNDETQRKYIQGLKRLMTICQKHFPTDPSKCVEYNAL

SEQ ID NO: 799448 - protein, 324 aa, Homo sapiens
MDILKSEILRKRQLVEDRNLLVENKKYFKRSELAKKEEEAYFERCGYKIQPKEEDQKPLTSSNPVLELELAEEKLPMTLSRQEVIRRLRERGEPIRLFGETDYDAFQRLRTALDKIDQQYLNEIVGGQEPGEEDTQNDLKVHEENTTIEELEALGESLGKGDDHKDMDIITKFLKFLLGVWAKELNAREDYVKRSVQGKLNSATQKQTESYLRPLFRKLRKRNLPADIKESITDIIKFMLQREYVKANDAYLQMAIGNAPWPIGVTMVGIHARTGREKIFSKHVAHVLNDETQRKYIQGLKRLMTICQKHFPTDPSKCVEYNAL

SEQ ID NO: 799449 - protein, 285 aa, Homo sapiens; identical to SEQ ID NO: 799445

SEQ ID NO: 799450 - protein, 285 aa, Homo sapiens; identical to SEQ ID NO: 799445

SEQ ID NO: 799451 - protein, 295 aa, Homo sapiens; identical to SEQ ID NO: 799444

SEQ ID NO: 799452 - protein, 246 aa, Homo sapiens
  misc_feature (246)..(246): Xaa can be any naturally occurring amino acid
MDILKSEILRKRQLVEDRNLLVENKKYFKRSELAKKEEEAYFERCGYKIQPKEEDQKPLTSSNPVLELELAEEKLPMTLSRQEVIRRLRERGEPIRLFGETDYDAFQRLRKIEILTPEVNKGLRNDLKAALDKIDQQYLNEIVGGQEPGEEDTQNDLKVHEENTTIEELEALGESLGKGDDHKDMDIITKFLKFLLGVWAKELNAREDYVKRSVQGKLNSATQKQTESYLRPLFRKLRKRNLPADX

SEQ ID NO: 799453 - protein, 308 aa, Homo sapiens
MCRVPVFEWLSRKRGTVLLPVAAAPGHLQLVKKAYRQKALSCHPDKNPDNPRAAELFHQLSQALEVLTDAAARAAYDKVRKAKKQAAERTQKLDEKRKKVKLDLEARERQAQAQESEEEEESRSTRTLEQEIERLREEGSRQLEEQQRLIREQIRQERDQRLRGKAENTEGQGTPKLKLKWKCKKEDESKGGYSKDVLLRLLQKYGEVLNLVLSSKKPGTAVVEFATVKAAELAVQNEVGLVDNPLKISWLEGQPQDAVGRSHSGLSKGSVLSERDYESLVMMRMRQAAERQQLIARMQQEDQEGPPT

SEQ ID NO: 799454 - protein, 329 aa, Homo sapiens
MCRVPVFEWLSRKRGTVLLPVAAAPGHLQLVKKAYRQKALSCHPDKNPDNPRAAELFHQLSQALEVLTDAAARAAYDKVRKAKKQAAERTQKLDEKRKKVKLDLEARERQAQAQESEEEEESRSTRTLEQEIERLREEGSRQLEEQQRLIREQIRQERDQRLRGKAENTEGQGTPKLKLKWKCKKEDESKGGYSKDVLLRLLQKVGPVDVHSFLSSQSTSQSTPYYGEVLNLVLSSKKPGTAVVEFATVKAAELAVQNEVGLVDNPLKISWLEGQPQDAVGRSHSGLSKGSVLSERDYESLVMMRMRQAAERQQLIARMQQEDQEGPPT

SEQ ID NO: 799455 - protein, 304 aa, Homo sapiens
MAVTKELLQMDLYALLGIEEKAADKEVKKAYRQKALSCHPDKNPDNPRAAELFHQLSQALEVLTDAAARAAYDKVRKAKKQAAERTQKLDEKRKKVKLDLEARERQAQAQESEEEEESRSTRTLEQEIERLREEGSRQLEEQQRLIREQIRQERDQRLRGKAENTEGQGTPKLKLKWKCKKEDESKGGYSKDVLLRLLQKYGEVLNLVLSSKKPGTAVVEFATVKAAELAVQNEVGLVDNPLKISWLEGQPQDAVGRSHSGLSKGSVLSERDYESLVMMRMRQAAERQQLIARMQQEDQEGPPT

SEQ ID NO: 799456 - protein, 304 aa, Homo sapiens; identical to SEQ ID NO: 799455

SEQ ID NO: 799457 - protein, 493 aa, Homo sapiens
MHTLVFLSTRQVLQCQPAACQALPLLPRELFPLLFKVAFMDKKTVVLRELVHTWPFPLLSFQQLLQECAHCSRALLQERPSTESMQAVILGLTARLHTSEPGASTQPLCRKHALRVLDMTGLLDDGVEQDPGTMSMWDCTAAVARTCIAQQQGGAAEPGPAPIPVEVRVDLRVNRASYAFLREALRSSVGSPLRLCCRDLRAEDLPMRNTVALLQLLDAGCLRRVDLRFNNLGLRGLSVIIPHVARFQHLASLRLHYVHGDSRQPSVDGEDNFRYFLAQMGRFTCLRELSMGSSLLSGRLDQLLSTLQSPLESLELAFCALLPEDLRFLARSPHAAHLKKLDLSGNDLSGSQLAPFQGLLQASAATLLHLELTECQLADTQLLATLPILTQCASLRYLGLYGNPLSMAGLKELLRDSVAQAELRTVVHPFPVDCYEGLPWPPPASVLLEASINEEKFARVEAELHQLLLASGRAHVLWTTDIYGRLAADYFSL

SEQ ID NO: 799458 - protein, 493 aa, Homo sapiens; identical to SEQ ID NO: 799457

SEQ ID NO: 799459 - protein, 531 aa, Homo sapiens
QRHRGAPRRRAGSGGRSRRGWRRWLRLRDRWPSARPSTMHTLVFLSTRQVLQCQPAACQALPLLPRELFPLLFKVAFMDKKTVVLRELVHTWPFPLLSFQQLLQECAHCSRALLQERPSTESMQAVILGLTARLHTSEPGASTQPLCRKHALRVLDMTGLLDDGVEQDPGTMSMWDCTAAVARTCIAQQQGGAAEPGPAPIPVEVRVDLRVNRASYAFLREALRSSVGSPLRLCCRDLRAEDLPMRNTVALLQLLDAGCLRRVDLRFNNLGLRGLSVIIPHVARFQHLASLRLHYVHGDSRQPSVDGEDNFRYFLAQMGRFTCLRELSMGSSLLSGRLDQLLSTLQSPLESLELAFCALLPEDLRFLARSPHAAHLKKLDLSGNDLSGSQLAPFQGLLQASAATLLHLELTECQLADTQLLATLPILTQCASLRYLGLYGNPLSMAGLKELLRDSVAQAELRTVVHPFPVDCYEGLPWPPPASVLLEASINEEKFARVEAELHQLLLASGRAHVLWTTDIYGRLAADYFSL

SEQ ID NO: 799460 - protein, 493 aa, Homo sapiens; identical to SEQ ID NO: 799457

SEQ ID NO: 799461 - protein, 493 aa, Homo sapiens; identical to SEQ ID NO: 799457

SEQ ID NO: 799462 - protein, 493 aa, Homo sapiens; identical to SEQ ID NO: 799457

SEQ ID NO: 799463 - protein, 493 aa, Homo sapiens; identical to SEQ ID NO: 799457

SEQ ID NO: 799464 - protein, 493 aa, Homo sapiens; identical to SEQ ID NO: 799457

SEQ ID NO: 799465 - protein, 497 aa, Homo sapiens
MHTLVFLSTRQVLQCQPAACQALPLLPRELFPLLFKVAFMDKKTVVLRELVHTWPFPLLSFQQLLQECAHCSRALLQERPSTESMQAVILGLTARLHTSEPGASTQPLCRKHALRVLDMTGLLDDGVEQDPGTMSMWDCTAAVARTCIAQQQGGAAEPGPAPIPVEVRVDLRVNRASYAFLREALRSSVGSPLRLCCRDLRAEDLPMRNTVALLQLLDAGCLRRVDLRFNNLGLRGLSVIIPHVARFQHLASLRPQALTPLTCSLPCHPATPLGWARAGGGHQGTHVPGSLNLWLFFFLSTLVTLILISAVTPNMATGQQLPSSLSPRPSRGSPVGTAGQSLLFPPFGGPRSYCGRPGPARDPPHAELEVGVMSFRKSFKGGVGASPATFHCYPRIPECNVPGSLPHTRLSAHCAASTFTDGACARPHRPISGAHVIRAPAALAVDLVGDRRGHAESRPRPLFRAAVSGRLRRTLGEERLGAVDDEHLVAALVAELL

SEQ ID NO: 799466 - protein, 127 aa, Homo sapiens
GTLAWGKQKTGTPRGRVPELYSPAHPLPQPSSVAAGGGAAFQTAAQLPDVRAPPHMSLLPTANTVAQTETLSEEEVPVRRRTCRLARGCRASRLMVPSWFLLRSSSAREDSPARAWSSSSSMLFSCR

SEQ ID NO: 799467 - protein, 515 aa, Homo sapiens
SPCARAPASRLGSSMQARYSVSDPNALGVVPYLSEQNYYRAAGSYGGMASPMGVYSGHPEQYSAGMGRSYAPYHHHQPAAPKDLVKPPYSYIALITMAIQNAPEKKITLNGIYQFIMDRFPFYRENKQGWQNSIRHNLSLNECFVKVPRDDKKPGKGSYWTLDPDSYNMFENGSFLRRRRRFKKKDVSKEKEERAHLKEPPPAASKGAPATPHLADAPKEAEKKVVIKSEAASPALPVITKVETLSPESALQGSPRSAASTPAGSPDGSLPEHHAAAPNGLPGFSVENIMTLRTSPPGGELSPGAGRAGLVVPPLALPYAAAPPAAYGQPCAQGLEAGAAGGYQCSMRAMSLYTGAERPAHMCVPPALDEALSDHPSGPTSPLSALNLAAGQEGALAATGHHHQHHGHHHPQAPPPPPAPQPQPTPQPGAAAAQAASWYLNHSGDLNHLPGHTFAAQQQTFPNVREMFNSHRLGIENSTLGESQVSGNASCQLPYRSTPPLYRHAAPYSYDCTKY

SEQ ID NO: 799468 - protein, 453 aa, Homo sapiens
DAEIRTRSSPSAIFAAAATAVAAPPPPRAARKPPQTGGARARPPPGLSPPPAALPFRTTVAALGGKAPAAGSRGAGPEREPGWGGRALRVRRGAAGEARGGWSWRRGAGELRTMCAQYCISFADVEKAHINIRDSIHLTPVLTSSILNQLTGRNLFFKCELFQKTGSFKIRGALNAVRSLVPDALERKPKAVVTHSSGNHGQALTYAAKLEGIPAYIVVPQTAPDCKKLAIQAYGASIVYCEPSDESRENVAKRVTEETEGIMVHPNQEPAVIAGQGTIALEVLNQVPLVDALVVPVGGGGMLAGIAITVKALKPSVKVYAAEPSNADDCYQSKLKGKLMPNLYPPETIADGVKSSIGLNTWPIIRDLVDDIFTVTEDEIKCATQLVWERMKLLIEPTAGVGVAAVLSQHFQTVSPEVKNICIVLSGGNVDLTSSITWVKQAERPASYQSVSV

SEQ ID NO: 799469 - protein, 288 aa, Homo sapiens
DAEIRTRSSPSAIFAAAATAVAAPPPPRAARKPPQTGGARARPPPGLSPPPAALPFRTTVAALGGKAPAAGSRGAGPEREPGWGGRALRVRRGAAGEARGGWSWRRGAGELRTMCAQYCISFADVEKAHINIRDSIHLTPVLTSSILNQLTGRNLFFKCELFQKTGSFKIRGALNAVRSLVPDALERKPKAVVTHSSGNHGQALTYAAKLEGIPAYIVVPQTAPDCKKLAIQAYGASIVYCEPSDESRENVAKRVTEETEGIMVHPNQEPAVIAGQGTIALEVLNQVK

SEQ ID NO: 799470 - protein, 288 aa, Homo sapiens; identical to SEQ ID NO: 799469

SEQ ID NO: 799471 - protein, 253 aa, Homo sapiens
DAEIRTRSSPSAIFAAAATAVAAPPPPRAARKPPQTGGARARPPPGLSPPPAALPFRTTVAALGGKAPAAGSRGAGPEREPGWGGRALRVRRGAAGEARGGWSWRRGAGELRTMCAQYCISFADVEKAHINIRDSIHLTPVLTSSILNQLTGRNLFFKCELFQKTGSFKIRGALNAVRSLVPDALERKPKAVVTHSSGNHGQALTYAAKLEGIPAYIVVPQTAPDCKKLAIQAYGASIVYCEPSDEIPTRSLQ

SEQ ID NO: 799472 - protein, 172 aa, Homo sapiens
MVSLSATDCYIVHEIYNGENAQDQFEYELEQALEAQYKYIVIEPTRIGDETARWITVGNCLHKTAVLAGTACLFTPLALPLDYSHYISLPAGVLSLACCTLYGISWQFDPCCKYQVEYDAYKLSRLPLHTLTSSTPVVLVRKDDLHRKRLHNTIALAALVYCVKKIYELYAV

SEQ ID NO: 799473 - protein, 191 aa, Homo sapiens
RECVYVPRGSTWLCSCPEERVSLSATDCYIVHEIYNGENAQDQFEYELEQALEAQYKYIVIEPTRIGDETARWITVGNCLHKTAVLAGTACLFTPLALPLDYSHYISLPAGVLSLACCTLYGISWQFDPCCKYQVEYDAYKLSRLPLHTLTSSTPVVLVRKDDLHRKRLHNTIALAALVYCVKKIYELYAV

SEQ ID NO: 799474 - protein, 144 aa, Homo sapiens
MVSLSATDCYIVHEIYNGENAQDQFEYELEQALEAQYKYIVIEPTRIGDETARWITVGNCLHKTAVLAGTACLFTPLALPLDYSHYISLPAGVLSLACCTLYGISWQFDPCCKYQVEYDAYKLSRLPLHTLNSVRQQSLGRCLA

SEQ ID NO: 799475 - protein, 349 aa, Homo sapiens
AEGPGASSPQTARRPPAGEAAWRPGQRGRAPPRGALGVVGTCLSSLLQLLALETQGPTGGWAPVTPRLRTPGTQFLQKCSNQDGSWSPRALAEGLRAPATPGAGLPARCLVGTVVPPGLASACRAAPDRRPDYTSRRPACSPDAALARDVGKQSVSKMAAWGRRRLGPGSSGGSARERVSLSATDCYIVHEIYNGENAQDQFEYELEQALEAQYKYIVIEPTRIGDETARWITVGNCLHKTAVLAGTACLFTPLALPLDYSHYISLPAGVLSLACCTLYGISWQFDPCCKYQVEYDAYKLSRLPLHTLTSSTPVVLVRKDDLHRKRLHNTIALAALVYCVKKIYELYAV

SEQ ID NO: 799476 - protein, 349 aa, Homo sapiens; identical to SEQ ID NO: 799475

SEQ ID NO: 799477 - protein, 198 aa, Homo sapiens
MDTEKVLEQEVSHLPLFLAVEGGPAHGVSLSATDCYIVHEIYNGENAQDQFEYELEQALEAQYKYIVIEPTRIGDETARWITVGNCLHKTAVLAGTACLFTPLALPLDYSHYISLPAGVLSLACCTLYGISWQFDPCCKYQVEYDAYKLSRLPLHTLTSSTPVVLVRKDDLHRKRLHNTIALAALVYCVKKIYELYAV

SEQ ID NO: 799478 - protein, 182 aa, Homo sapiens
  misc_feature (3)..(3): Xaa can be any naturally occurring amino acid
EIXIILMVNSLVSLSATDCYIVHEIYNGENAQDQFEYELEQALEAQYKYIVIEPTRIGDETARWITVGNCLHKTAVLAGTACLFTPLALPLDYSHYISLPAGVLSLACCTLYGISWQFDPCCKYQVEYDAYKLSRLPLHTLTSSTPVVLVRKDDLHRKRLHNTIALAALVYCVKKIYELYAV

SEQ ID NO: 799479 - protein, 147 aa, Homo sapiens
MVSLSATDCYIVHEIYNGENAQDQFEYELEQALEAQYKYIVIEPTRIGDETARWITVGNCLHKTAVLAGTACLFTPLALPLDYSHYISLPAGVLSLACCTLYGISWQFDPCCKYQVEYDAYKLSRLPLHTLTPGPQETTEYSDRHTL

SEQ ID NO: 799480 - protein, 98 aa, Homo sapiens
MPPPSKGVSLSATDCYIVHEIYNGENAQDQFEYELEQALEAQYKYIVIEPTRIGDETARWITVGNCLHKTAVLAGTACLFTPLALPLDYSHYISLPAG

SEQ ID NO: 799481 - protein, 695 aa, Homo sapiens
MSILHCYKGIPEVVVAYKEKRVIWLTVVQVVQKHGTSIASCEASGSFHLWWKGKGEFVTYMAREGARAMSGSSKQPALMETNRVRTHSLPRGGHQAIHEGPAPMSQNISHQATPSTLGVTFSMRFGGDHHASKPYQGPIFGEGTRNISLPLSSTSFNVEFSKESRAWVKLKPGLNFLVQLLAVYPWASHLTPSGYNVTNDHIFLNLKNGIGTCPKQSWSDGAINGPAVPGHTVGLGSPDFYRTGSCLQSLFSIVGLAGNCRHPRGQGLMRMPNPSSKWRPQDSITASGGEWLLQQEGFIGMNPFKLQSKCPEWFCRYGCEAGMVVPSAVPWDEALYGRGPGWREEKDGDEPRTTDGPVPWMIFIEVPSSQFNTGLLNLLRYAGKSHLRQWGMLLLKCRLRLSRSRVGPEILCSYQGSILGMEVRYPLTSPVDPAFEGSGEECSVPAATTLKSPRNKDYYRWRGRGPRQTGRWGTPVGLQWALRKACWRWGPKEFKDLFQEPKERVGSNCCSIWEMPGGAGCGRPSQSIRQLVVDEDAVSMARRNSRGCSGQGCQKHEEGQHSVSSGKGKVMVLKLPHVASPFLGSLNKSISCALCGKPTPLQSTSELNRILHFLEAWLDADILQPQGRPKDLQVLRHLEHLHLRPLYMISLLEGFWTMLCVFSPKTWASARLQFKFSEEVPCTPPSAKFSLCKFP

SEQ ID NO: 799482 - protein, 94 aa, Homo sapiens
GVNRDSDLPKVTKAGRAPGCLTVLSKCPHTSTPSAAASSRDSWGSQGRPDSWEPWSGLQRPLTPHGTASLLQDFRMPPLGSPKAVGSPGTLPQS

SEQ ID NO: 799483 - protein, 220 aa, Homo sapiens
MAASGSGMAQKTWELANNMQEAQSIDEIYKYDKKQQQEILAAKPWTKDHHYFKYCKISALALLKMVMHARSGGNLEVMGLMLGKVDGETMIIMDSFALPVEGTETRVNAQAAAYEYMAAYIENAKQVGRLENAIGWYHSHPGYGCWLSGIDVSTQMLNQQFQEPFVAVVIDPTRTISAGKVNLGAFRTYPKGYKPPDEGPSEYQTIPLNKIEDFGVHCKQ

SEQ ID NO: 799484 - protein, 337 aa, Homo sapiens
GKLRLGTSLVWIGEVKAHTRKPSEVKLRLGCRDDNFSASSAMAASGSGMAQKTWELANNMQEAQSIDEIYKYDKKQQQEILAAKPWTKDHHYFKYCKISALALLKMVMHARSGGNLEVMGLMLGKVDGETMIIMDSFALPVEGTETRVNAQAAAYEYMAAYIENAKQVGRLENAIGWYHSHPGYGCWLSGIDVSTQMLNQQFQEPFVAVVIDPTRTISAGKVNLGAFRTYPKGYKPPDEGPSEYQTIPLNKIEDFGVHCKQYYALEVSYFKSSLDRKLLELLWNKYWVNTLSSSSLLTAYQATSRAGLIAKLAKPGEGLWLTRHKCSTGPTRGGERT

SEQ ID NO: 799485 - protein, 244 aa, Homo sapiens
PKGCTGPEVFWTVKAHTRKPSEVKLRLGCRDDNFSASSAMAASGSGMAQKTWELANNMQEAQSIDEIYKYDKKQQQEILAAKPWTKDHHYFKYCKISALALLKMVMHARSGGNLEVMGLMLGKVDGETMIIMDSFALPVEGTETRVNAQAAAYEYMAAYIENAKQVGRLENAIGWYHSHPGYGCWLSGIDVSTQMLNQQFQEPFVAVVIDPPGQYPRGSGSGGPYDIPQGCKLLVKGSGAKIPL

SEQ ID NO: 799486 - protein, 334 aa, Homo sapiens
MAASGSGMAQKTWELANNMQEAQSIDEIYKYDKKQQQEILAAKPWTKDHHYFKYCKISALALLKMVMHARSGGNLEVMGLMLGKVDGETMIIMDSFALPVEGTETRVNAQAAAYEYMAAYIENAKQVGRLENAIGWYHSHPGYGCWLSGIDVSTQMLNQQFQEPFVAVVIDPTRTISAGKVNLGAFRTYPKGYKPPDEGPSEYQTIPLNKIEDFGVHCKQYYALEVSYFKSSLDRKLLELLWNKYWVNTLSSSSLLTNADYTTGQVFDLSEKLEQSEAQLGRGSFMLGLETHDRKSEDKLAKATRDSCKTTIEAIHGLMSQVIKDKLFNQINIS

SEQ ID NO: 799487 - protein, 334 aa, Homo sapiens; identical to SEQ ID NO: 799486

SEQ ID NO: 799488 - protein, 334 aa, Homo sapiens; identical to SEQ ID NO: 799486

SEQ ID NO: 799489 - protein, 334 aa, Homo sapiens; identical to SEQ ID NO: 799486

SEQ ID NO: 799490 - protein, 258 aa, Homo sapiens
MAASGSGMAQKTWELANNMQEAQSIDEIYKYDKKQQQEILAAKPWTKDHHYFKYCKISALALLKMVMHARSGGNLEVMGLMLGKVDGETMIIMDSFALPVEGTETRVNAQAAAYEYMAAYIENAKQVGRLENAIGWYHSHPGYGCWLSGIDVSTQMLNQQFQEPFVAVVIDPTRTISAGKVNLGAFRTYPKGYKPPDEGPSEYQTIPLNKIEDFGVHCKQYYALEVSYFKSSLDRKLLELLWNKYWVNTLSSSSLLTL

SEQ ID NO: 799491 - protein, 334 aa, Homo sapiens; identical to SEQ ID NO: 799486

SEQ ID NO: 799492 - protein, 270 aa, Homo sapiens
MVMHARSGGNLEVMGLMLGKVDGETMIIMDSFALPVEGTETRVNAQAAAYEYMAAYIENAKQVGRLENAIGWYHSHPGYGCWLSGIDVSTQMLNQQFQEPFVAVVIDPTRTISAGKVNLGAFRTYPKGYKPPDEGPSEYQTIPLNKIEDFGVHCKQYYALEVSYFKSSLDRKLLELLWNKYWVNTLSSSSLLTNADYTTGQVFDLSEKLEQSEAQLGRGSFMLGLETHDRKSEDKLAKATRDSCKTTIEAIHGLMSQVIKDKLFNQINIS

SEQ ID NO: 799493 - protein, 379 aa, Homo sapiens
MVSTNFTSGSRCHGCPKSLETTTSPLPRRWRRPGAVWPRKPGNWPTTCRKLRVSMKSTNTTRNSSKKSWRRSPGLRIKGEAKISIHVLTSNMSHHYFKYCKISALALLKMVMHARSGGNLEVMGLMLGKVDGETMIIMDSFALPVEGTETRVNAQAAAYEYMAAYIENAKQVGRLENAIGWYHSHPGYGCWLSGIDVSTQMLNQQFQEPFVAVVIDPTRTISAGKVNLGAFRTYPKGYKPPDEGPSEYQTIPLNKIEDFGVHCKQYYALEVSYFKSSLDRKLLELLWNKYWVNTLSSSSLLTNADYTTGQVFDLSEKLEQSEAQLGRGSFMLGLETHDRKSEDKLAKATRDSCKTTIEAIHGLMSQVIKDKLFNQINIS

SEQ ID NO: 799494 - protein, 297 aa, Homo sapiens
LQQLQLQQLQLQQLQLQQLQLQQLLLKMVMHARSGGNLEVMGLMLGKVDGETMIIMDSFALPVEGTETRVNAQAAAYEYMAAYIENAKQVGRLENAIGWYHSHPGYGCWLSGIDVSTQMLNQQFQEPFVAVVIDPTRTISAGKVNLGAFRTYPKGYKPPDEGPSEYQTIPLNKIEDFGVHCKQYYALEVSYFKSSLDRKLLELLWNKYWVNTLSSSSLLTNADYTTGQVFDLSEKLEQSEAQLGRGSFMLGLETHDRKSEDKLAKATRDSCKTTIEAIHGLMSQVIKDKLFNQINIS

SEQ ID NO: 799495 - protein, 176 aa, Homo sapiens
MAASGSGMAQKTWELANNMQEAQSIDEIYKYDKKQQQEILAAKPWTKDHHYFKYCKISALALLKMVMHARSGGNLEVMGLMLGKVDGETMIIMDSFALPVEGTETRVNAQAAAYEYMAAYIENAKQVGRLENAIGWYHSHPGYGCWLSGIDVSTQMLNQQFQEPFVAVVVTMGKAA

SEQ ID NO: 799496 - protein, 87 aa, Homo sapiens
IHEDINNQEKNADYTTGQVFDLSEKLEQSEAQLGRGSFMLGLETHDRKSEDKLAKATRDSCKTTIEAIHGLMSQVIKDKLFNQINIS

SEQ ID NO: 799497 - protein, 124 aa, Homo sapiens
LEDPQLTLQLLKMVMHARSGGNLEVMGLMLGKVDGETMIIMDSFALPVEGTETRVNAQAAAYEYMAAYIENAKQVGRLENAIGWYHSHPGYGCWLSGIDVSTQMLNQQFQEPFVAVVVTMGKAA

SEQ ID NO: 799498 - protein, 334 aa, Homo sapiens; identical to SEQ ID NO: 799486

SEQ ID NO: 799499 - protein, 296 aa, Homo sapiens
MAASGSGMAQKTWELANNMQEAQSIDEIYKYDKKQQQEILAAKPWTKDHHYFKYCKISALALLKMVMHARSGGNLEVMGLMLGKVDGETMIIMDSFALPVEGTETRVNAQAAAYEYMAAYIENAKQVGRLENAIGWYHSHPGYGCWLSGIDVSTQMLNQQFQEPFVAVVIDPTRTISAGKVNLGAFRTYPKGYKPPDEGPSEYQTIPLNKIEDFGVHCKQYYALEVSYFKSSLDRKLLELLWNKYWVNTLSSSSLLTAYQATSRAGLIAKLAKPGEGLWLTRHKCSTGPTRGGERT

SEQ ID NO: 799500 - protein, 389 aa, Homo sapiens
PTPRGSHCPCPRSGAANAAPGPSTLNLHHPRPHLATHAPHPRLADSYSGERARVRGDTQCSRGSSRTEEVTAATWSGNSMTDLRAGAPPLRPSPPLALRHTAGHHYFKYCKISALALLKMVMHARSGGNLEVMGLMLGKVDGETMIIMDSFALPVEGTETRVNAQAAAYEYMAAYIENAKQVGRLENAIGWYHSHPGYGCWLSGIDVSTQMLNQQFQEPFVAVVIDPTRTISAGKVNLGAFRTYPKGYKPPDEGPSEYQTIPLNKIEDFGVHCKQYYALEVSYFKSSLDRKLLELLWNKYWVNTLSSSSLLTNADYTTGQVFDLSEKLEQSEAQLGRGSFMLGLETHDRKSEDKLAKATRDSCKTTIEAIHGLMSQVIKDKLFNQINIS

SEQ ID NO: 799501 - protein, 270 aa, Homo sapiens; identical to SEQ ID NO: 799492

SEQ ID NO: 799502 - protein, 212 aa, Homo sapiens
MLKLVGRLENAIGWYHSHPGYGCWLSGIDVSTQMLNQQFQEPFVAVVIDPTRTISAGKVNLGAFRTYPKGYKPPDEGPSEYQTIPLNKIEDFGVHCKQYYALEVSYFKSSLDRKLLELLWNKYWVNTLSSSSLLTNADYTTGQVFDLSEKLEQSEAQLGRGSFMLGLETHDRKSEDKLAKATRDSCKTTIEAIHGLMSQVIKDKLFNQINIS

SEQ ID NO: 799503 - protein, 203 aa, Homo sapiens
MAASGSGMAQKTWELANNMQEAQSIDEIYKYDKKQQQEILAAKPWTKDHHYFKYCKISALALLKMVMHARSGGNLEVMGLMLGKVDGETMIIMDSFALPVEGTETRVNAQAAAYEYMAAYIENAKQVGRLENAIGWYHSHPGYGCWLSGIDVSTQMLNQQFQEPFVAVVIDPTRTISAGKVNLGAFRTYPKATTPLTRPVRLI

SEQ ID NO: 799504 - protein, 205 aa, Homo sapiens
MAASGSGMAQKTWELANNMQEAQSIDEIYKYDKKQQQEILAAKPWTKDHHYFKYCKISALALLKMVMHARSGGNLEVMGLMLGKVDGETMIIMDSFALPVEGTETRVNAQAAAYEYMAAYIENAKQVGRLENAIGWYHSHPGYGCWLSGIDVSTQMLNQQFQEPFVAVVIDPPGQYPRGSGSGGPYDIPQGCKLLVKGSGAKIPL

SEQ ID NO: 799505 - protein, 147 aa, Homo sapiens
MEDDEEETTASTLRGKPRPPPVSAQSAFSYIPPRRLDPKEHSYYYRPARTGIISLYDCIFKRRLDYDQKLHRDDREHAKSLGLHVNEEEQERPVGVLTSSVYGKRINQPIEPLNRDFGRANHVQADFYRKNDIPSLKEPGFGHIAPS

SEQ ID NO: 799506 - protein, 269 aa, Homo sapiens
MSSYFVNSFSGRYPNGPDYQLLNYGSGSSLSGSYRDPAAMHTGSYGYNYNGMDLSVNRSSASSSHFGAVGESSRAFPAPAQEPRFRQAASSCSLSSPESLPCTNGDSHGAKPSASSPSDQATSASSSANFTEIDEASASSEPEEAASQLSSPSLARAQPEPMATSTAAPEGQTPQIFPWMRKLHISHDMTGPDGKRARTAYTRYQTLELEKEFHFNRYLTRRRRIEIAHALCLSERQIKIWFQNRRMKWKKDNKLKSMSLATAGSAFQP

SEQ ID NO: 799507 - protein, 224 aa, Homo sapiens [sequence omitted]

SEQ ID NO: 799508 - protein, 109 aa, Homo sapiens
MLAHGYMPTCKHTIVLNRDHHHPHNPSVWRSLGLPQVYSNPTQPDPNSSQRRVPKCPRTLTSGGWVGGGKGQGRAAGCRVCCQRSHSGPSFSIPPPGSPLPRPCPTTFS

SEQ ID NO: 799509 - protein, 128 aa, Homo sapiens
MAYSTVQRVALASGLVLALSLLLPKAFLSRGKRQEPPPTPEGKLGRFPPMMHHHQAPSDGQTPGARFQRSHLAEAFAKAKGSGGGAGGGGSGRGLMGQIIPIYGFGIFLYILYILFKVSRIILIILHQ

SEQ ID NO: 799510 - protein, 207 aa, Homo sapiens
MCRLKRQEFVISRAQTVTSDQEKRLLHQLREITRVMKEGKFIDRFSPEKEAEEAPYMEDWEGYPEETYPIYDLSDCIKRRQETILVDYPDPKELSAEEIAERMGMIEEEESDHLGWESLPTDPRAQEDNSVTSCDPKPETCSCCFHEDEDPAVLAENAGFSADSYPEQEETTKEEWSQDFKDEGLGISTDKAYTGSMLRKRNPQGLE

SEQ ID NO: 799511 - protein, 368 aa, Homo sapiens
MAYSTVQRVALASGLVLALSLLLPKAFLSRGKRQEPPPTPEGKLGRFPPMMHHHQAPSDGQTPGARFQRSHLAEAFAKAKGSGGGAGGGGSGRGLMGQIIPIYGFGIFLYILYILFKLSKGKTTAEDGKCYTAMPGNTHRKITSFELAQLQEKLKETEAAMEKLINRVGPNGERAQTVTSDQEKRLLHQLREITRVMKEGKFIDRFSPEKEAEEAPYMEDWEGYPEETYPIYDLSDCIKRRQETILVDYPDPKELSAEEIAERMGMIEEEESDHLGWESLPTDPRAQEDNSVTSCDPKPETCSCCFHEDEDPAVLAENAGFSADSYPEQEETTKEEWSQDFKDEGLGISTDKAYTGSMLRKRNPQGLE

SEQ ID NO: 799512 - protein, 207 aa, Homo sapiens; identical to SEQ ID NO: 799510

SEQ ID NO: 799513 - protein, 368 aa, Homo sapiens; identical to SEQ ID NO: 799511

SEQ ID NO: 799514 - protein, 368 aa, Homo sapiens; identical to SEQ ID NO: 799511

SEQ ID NO: 799515 - protein, 251 aa, Homo sapiens
LTSLVPSYAVGGSIPRIIICCNCTFYSSTQTDHSDVYVHCLGVFTTKWLDCLIFLSRAQTVTSDQEKRLLHQLREITRVMKEGKFIDRFSPEKEAEEAPYMEDWEGYPEETYPIYDLSDCIKRRQETILVDYPDPKELSAEEIAERMGMIEEEESDHLGWESLPTDPRAQEDNSVTSCDPKPETCSCCFHEDEDPAVLAENAGFSADSYPEQEETTKEEWSQDFKDEGLGISTDKAYTGSMLRKRNPQGLE

SEQ ID NO: 799516 - protein, 368 aa, Homo sapiens; identical to SEQ ID NO: 799511

SEQ ID NO: 799517 - protein, 326 aa, Homo sapiens
MRTEAQVPALQPPEPGLEGAMGHRTLVLPWVLLTLCVTAGTPEVWVQVRMEATELSSFTIRCGFLGSGSISLVTVSWGGPDGAGGTTLAVLHPERGIRQWAPARQARWETQSSISLILEGSGASSPCANTTFCCKFASFPEGSWEACGSLPPSSDPGLSAPPTPAPILRADLAGILGVSGVLLFGCVYLLHLLRRHKHRPAPRLQPSRTSPQAPRARAWAPSQASQAALHVPYATINTSCRPATLDTAHPHGGPSWWASLPTHAAHRPQGPAAWASTPIPARGSFVSVENGLYAQAGERPPHTGPGLTLFPDPRGPRAMEGPLGVR

SEQ ID NO: 799518 - protein, 306 aa, Homo sapiens [sequence omitted]

SEQ ID NO: 799519 - protein, 132 aa, Homo sapiens
QGPSSSTSQLPPLRPQSSYLSRLVQDRHPSLLEVEQIGLWGDEEGEMGSPYVSQVGFKLLSSSDPLTSASKNAGIIGVSQCARPTNVWACTRCSGSQNAGPFVRCSFPADKEMEAQGAEVLSQHLLPGVSPP

SEQ ID NO: 799520 - protein, 89 aa, Homo sapiens
QGPSSSTSQLPPLRPQSSYLSRLVQDRHPSLLEVEQIGLWGDEEGEMGSPYVSQVGFKLLSSSDPLTSASKNAGIIGVSQCARPTNVSF

SEQ ID NO: 799521 - protein, 90 aa, Homo sapiens
QGPSSSTSQLPPLRPQSSYLSRLVQDRHPSLLEVEQIGLWGDEEGEMGSPYVSQVGFKLLSSSDPLTSASKNAGIIGVSQCARPTNSIST

SEQ ID NO: 799522 - protein, 128 aa, Homo sapiens
MPAHEDGFTQDAFMMPARQSHQNRKMEDAFCGKIVLFEISKRALQLSSQTEFRSSSHAGVQWRNLGSPQPPPPGFRRFSCLSLLITWDYRHVPPHLASFVFLVEMGFLHVGQAGLELLTSGDPPTSAS

SEQ ID NO: 799523 - protein, 272 aa, Homo sapiens [sequence omitted]

SEQ ID NO: 799524 - protein, 272 aa, Homo sapiens [sequence omitted]

SEQ ID NO: 799525 - protein, 440 aa, Homo sapiens
MEQRGQNAPAASGARKRHGPGPREARGARPGLRVPKTLVLVVAAVLLLVSAESALITQQDLAPQQRAAPQQKRSSPSEGLCPPGHHISEDGRDCISCKYGQDYSTHWNDLLFCLRCTRCDSGEVELSPCTTTRNTVCQCEEGTFREEDSPEMCRKCRTGCPRGMVKVGDCTPWSDIECVHKESGTKHSGEAPAVEETVTSSPGTPASPCSLSGIIIGVTVAAVVLIVAVFVCKSLLWKKVLPYLKGICSGGGGDPERVDRSSQRPGAEDNVLNEIVSILQPTQVPEQEMEVQEPAEPTGVNMLSPGESEHLLEPAEAERSQRRRLLVPANEGDPTETLRQCFDDFADLVPFDSWEPLMRKLGLMDNEIKVAKAEAAGHRDTLYTMLIKWVNKTGRDASVHTLLDALETLGERLAKQKIEDHLLSSGKFMYLEGNADSAMS

SEQ ID NO: 799526 - protein, 411 aa, Homo sapiens
MEQRGQNAPAASGARKRHGPGPREARGARPGLRVPKTLVLVVAAVLLLVSAESALITQQDLAPQQRAAPQQKRSSPSEGLCPPGHHISEDGRDCISCKYGQDYSTHWNDLLFCLRCTRCDSGEVELSPCTTTRNTVCQCEEGTFREEDSPEMCRKCRTGCPRGMVKVGDCTPWSDIECVHKESGIIIGVTVAAVVLIVAVFVCKSLLWKKVLPYLKGICSGGGGDPERVDRSSQRPGAEDNVLNEIVSILQPTQVPEQEMEVQEPAEPTGVNMLSPGESEHLLEPAEAERSQRRRLLVPANEGDPTETLRQCFDDFADLVPFDSWEPLMRKLGLMDNEIKVAKAEAAGHRDTLYTMLIKWVNKTGRDASVHTLLDALETLGERLAKQKIEDHLLSSGKFMYLEGNADSAMS

SEQ ID NO: 799527 - protein, 411 aa, Homo sapiens; identical to SEQ ID NO: 799526

SEQ ID NO: 799528 - protein, 411 aa, Homo sapiens; identical to SEQ ID NO: 799526

SEQ ID NO: 799529 - protein, 411 aa, Homo sapiens; identical to SEQ ID NO: 799526

SEQ ID NO: 799530 - protein, 411 aa, Homo sapiens; identical to SEQ ID NO: 799526

SEQ ID NO: 799531 - protein, 241 aa, Homo sapiens
IELGTDYSCHKESGIIIGVTVAAVVLIVAVFVCKSLLWKKVLPYLKGICSGGGGDPERVDRSSQRPGAEDNVLNEIVSILQPTQVPEQEMEVQEPAEPTGVNMLSPGESEHLLEPAEAERSQRRRLLVPANEGDPTETLRQCFDDFADLVPFDSWEPLMRKLGLMDNEIKVAKAEAAGHRDTLYTMLIKWVNKTGRDASVHTLLDALETLGERLAKQKIEDHLLSSGKFMYLEGNADSAMS

SEQ ID NO: 799532 - protein, 440 aa, Homo sapiens; identical to SEQ ID NO: 799525

SEQ ID NO: 799533 - protein, 411 aa, Homo sapiens; identical to SEQ ID NO: 799526

SEQ ID NO: 799534 - protein, 411 aa, Homo sapiens; identical to SEQ ID NO: 799526

SEQ ID NO: 799535 - protein, 411 aa, Homo sapiens; identical to SEQ ID NO: 799526

SEQ ID NO: 799536 - protein, 260 aa, Homo sapiens
MCRKCRTGCPRGMVKVGDCTPWSDIECVHKESGIIIGVTVAAVVLIVAVFVCKSLLWKKVLPYLKGICSGGGGDPERVDRSSQRPGAEDNVLNEIVSILQPTQVPEQEMEVQEPAEPTGVNMLSPGESEHLLEPAEAERSQRRRLLVPANEGDPTETLRQCFDDFADLVPFDSWEPLMRKLGLMDNEIKVAKAEAAGHRDTLYTMLIKWVNKTGRDASVHTLLDALETLGERLAKQKIEDHLLSSGKFMYLEGNADSAMS

SEQ ID NO: 799537 - protein, 352 aa, Homo sapiens
MEQRGQNAPAASGARKRHGPGPREARGARPGLRVPKTLVLVVAAVLLLVSAESALITQQDLAPQQRAAPQQKRSSPSEGLCPPGHHISEDGRDCISCKYGQDYSTHWNDLLFCLRCTRCDSGEVELSPCTTTRNTVCQCEEGTFREEDSPEMCRKCRTGCPRGMVKVGDCTPWSDIECVHKESGTKHSGEAPAVEETVTSSPGTPASPCSLSGIIIGVTVAAVVLIVAVFVCKSLLWKKVLPYLKGICSGGGGDPERVDRSSQRPGAEDNVLNEIVSILQPTQVPEQEMEVQEPAEPTGKWVNKTGRDASVHTLLDALETLGERLAKQKIEDHLLSSGKFMYLEGNADSAMS

SEQ ID NO: 799538 - protein, 425 aa, Homo sapiens
MEQRGQNAPAASGARKRHGPGPREARGARPGLRVPKTLVLVVAAVLLLVSAESALITQQDLAPQQRAAPQQKRSSPSEGLCPPGHHISEDGRDCISCKYGQDYSTHWNDLLFCLRCTRCDSGEVELSPCTTTRNTVCQCEEGTFREEDSPEMCRKCRTGCPRGMVKVGDCTPWSDIECVHKESGTKHSGEAPAVEETVTSSPGTPASPCSLSGIIIGVTVAAVVLIVAVFVCKSLLWKKVLPYLKGICSGGGGDPERVDRSSQRPGAEDNVLNEIVSILQPTQVPEQEMEVQEPAEPTGVNMLSPGESEHLLEPAEAERSQRRRLLVPANEGDPTETLRQCFDDFADLVPFDSWEPLMRKLGLMDNEIKVAKAEAAGHRDTLYTMLILDALETLGERLAKQKIEDHLLSSGKFMYLEGNADSAMS

SEQ ID NO: 799539 - protein, 294 aa, Homo sapiens
MEQRGQNAPAASGARKRHGPGPREARGARPGLRVPKTLVLVVAAVLLLVSAESALITQQDLAPQQRAAPQQKRSSPSEGLCPPGHHISEDGRDCISCKYGQDYSTHWNDLLFCLRCTRCDSGEVELSPCTTTRNTVCQCEEGTFREEDSPEMCRKCRTGCPRGMVKVGDCTPWSDIECVHKESGTKHSGEAPAVEETVTSSPGTPASPCSLSGIIIGVTVAAVVLIVAVFVCKSLLWKKVLPYLKGICSGGGGDPERVDRSSQRPGAEDNVLNEIVSILQPTQVPEQEMESSCI

SEQ ID NO: 799540 - protein, 699 aa, Homo sapiens
AGFLPVVNAHGLARRRLLGSVTADASAGLQETQGDATRRGGRLGQRGLRLLAMGPLSARLLMQRGRPKSDRLGKIRSLDLSGLELLSEHLDPKLLCRLTQLQELDLSNNHLETLPDNLGLSHLRVLRCANNQLGDVTALCQFPKLEELSLEGNPFLTVNDNLKVSFLLPTLRKVNGKDASSTYSQVENLNRELTSRVTAHWEKFMATLGPEEEAEKAQADFVKSAVRDVRYGPESLSEFTQWRVRMISEELVAASRTQVQKANSPEKPPEAGAAHKPRARLAALKRPDDVPLSLSPSKRACASPSAQVEGSPVAGSDGSQPAVKLEPLHFLQCHSKNNSPQDLETQLWACAFEPAWEEGATSQTVATCGGEAVCVIDCQTGIVLHKYKAPGEEFFSVAWTALMVVTQAGHKKRWSVLAAAGLRGLVRLLHVRAGFCCGVIRAHKKAIATLCFSPAHETHLFTASYDKRIILWDIGVPNQDYEFQASQLLTLDTTSIPLRLCPVASCPDARLLAGCEGGCCCWDVRLDQPQKRRVCEVEFVFSEGSEASGRRVDGLAFVNEDIVASKGSGLGTICLWSWRQTWGGRGSQSTVAVVVLARLQWSSTELAYFSLSACPDKGIVLCGDEEGNVWLYDVSNILKQPPLLPAALQAPTQILKWPQPWALGQVVTKTMVNTVVANASFTYLTALTDSNIVAIWGRM

SEQ ID NO: 799541 - protein, 391 aa, Homo sapiens
AGFLPVVNAHGLARRRLLGSVTADASAGLQETQGDATRRGGRLGQRGLRLLAMGPLSARLLMQRGRPKSDRLGKIRSLEYEPGSGLSGLELLSEHLDPKLLCRLTQLQELDLSNNHLETLPDNLGLSHLRVLRCANNQLGDVTALCQFPKLEELSLEGNPFLTVNDNLKVSFLLPTLRKVNGKDASSTYSQVENLNRELTSRVTAHWEKFMATLGPEEEAEKAQADFVKSAVRDVRYGPESLSEFTQWRVRMISEELVAASRTQVQKANSPEKPPEAGAAHKPRARLAALKRPDDVPLSLSPSKRACASPSAQVEGSPVAGSDGSQLCELEHCTPAVQKQTKAQTRNSGLARPAGGGIQTALAGVCEVPSSSLSRRFGDMRDGQTMGEAHY

SEQ ID NO: 799542 - protein, 699 aa, Homo sapiens; identical to SEQ ID NO: 799540

SEQ ID NO: 799543 - protein, 699 aa, Homo sapiens; identical to SEQ ID NO: 799540

SEQ ID NO: 799544 - protein, 762 aa, Homo sapiens
AGFLPVVNAHGLARRRLLGSVTADASAGLQETQGDATRRGGRLGQRGLRLLAMGPLSARLLMQRGRPKSDRLGKIRSLDLSGLELLSEHLDPKLLCRLTQLQELDLSNNHLETLPDNLGLSHLRVLRCANNQLGDVTALCQFPKLEELSLEGNPFLTVNDNLKVSFLLPTLRKVNGKDASSTYSQVENLNRELTSRVTAHWEKFMATLGPEEEAEKAQADFVKSAVRDVRYGPESLSEFTQWRVRMISEELVAASRTQVQKANSPEKPPEAGAAHKPRARLAALKRPDDVPLSLSPSKRACASPSAQVEGSPVAGSDGSQPAVKLEPLHFLQCHSKNNSPQDLETQLWACAFEPAWEEGATSQTVATCGGEAVCVIDCQTGIVLHKYKAPGEEFFSVAWTALMVVTQAGHKKRWSVLAAAGLRGLVRLLHVRAGFCCGVIRAHKKAIATLCFSPAHETHLFTASYDKRIILWDIGVPNQDYEFQASQLLTLDTTSIPLRLCPVASCPDARLLAGCEGGCCCWDVRLDQPQKRRVCEVEFVFSEGSEASGRRVDGLAFVNEDIVASKGSGLGTICLWSWRQTWGGRGSQSTVAVVVLARLQWSSTELAYFSLSACPDKGIVLCGDEEGNVWLYDVSNILKQPPLLPAALQAPTQPSPLSPPDPEVAPALGPWPGGDQDHGEHSGGQCLLHLPHRPDGLQHRSHLGEDVASHHRKGPGTQLTNLFSFGPMGVGGGLSVNIFIKLYCGQENRNMTTQRNTKKMES

SEQ ID NO: 799545 - protein, 544 aa, Homo sapiens
AGFLPVVNAHGLARRRLLGSVTADASAGLQETQGDATRRGGRLGQRGLRLLAMGPLSARLLMQRGRPKSDRLGKIRSLDLSGLELLSEHLDPKLLCRLTQLQELDLSNNHLETLPDNLGLSHLRVLRCANNQLGDVTALCQFPKLEELSLEGNPFLTVNDNLKVSFLLPTLRKVNGKDASSTYSQVENLNRELTSRVTAHWEKFMATLGPEEEAEKAQADFVKSAVRDVRYGPESLSEFTQWRVRMISEELVAASRTQVQKANSPEKPPEAGAAHKPRARLAALKRPDDVPLSLSPSKRACASPSAQVEGSPVAGSDGSQPAVKLEPLHFLQCHSKNNSPQDLETQLWACAFEPAWEEGATSQTVATCGGEAVCVIDCQTGIVLHKYKAPGEEFFSVAWTALMVVTQAGHKKRWSVLAAAGLRGLVRLLHVRAGFCCGVIRAHKKAIATLCFSPAHETHLFTASYDKRIILWDIGVPNQDYEFQASQLLTLDTTSIPLRLCPVASCPDARLLAGCEGGCCCWDVRLDQPQKRSWTESGWAGICE

SEQ ID NO: 799546 - protein, 679 aa, Homo sapiens
QAGTAPGYGMETQGDATRRGGRLGQRGLRLLAMGPLSARLLMQRGRPKSDRLGKIRSLDLSGLELLSEHLDPKLLCRLTQLQELDLSNNHLETLPDNLGLSHLRVLRCANNQLGDVTALCQFPKLEELSLEGNPFLTVNDNLKVSFLLPTLRKVNGKDASSTYSQVENLNRELTSRVTAHWEKFMATLGPEEEAEKAQADFVKSAVRDVRYGPESLSEFTQWRVRMISEELVAASRTQVQKANSPEKPPEAGAAHKPRARLAALKRPDDVPLSLSPSKRACASPSAQVEGSPVAGSDGSQPAVKLEPLHFLQCHSKNNSPQDLETQLWACAFEPAWEEGATSQTVATCGGEAVCVIDCQTGIVLHKYKAPGEEFFSVAWTALMVVTQAGHKKRWSVLAAAGLRGLVRLLHVRAGFCCGVIRAHKKAIATLCFSPAHETHLFTASYDKRIILWDIGVPNQDYEFQASQLLTLDTTSIPLRLCPVASCPDARLLAGCEGGCCCWDVRLDQPQKRRVCEVEFVFSEGSEASGRRVDGLAFVNEDIVASKGSGLGTICLWSWRQTWGGRGSQSTVAVVVLARLQWSSTELAYFSLSACPDKGIVLCGDEEGNVWLYDVSNILKQPPLLPAALQAPTQILKWPQPWALGQVVTKTMVNTVVANASFTYLTALTDSNIVAIWGRM

SEQ ID NO: 799547 - protein, 385 aa, Homo sapiens
AGFLPVVNAHGLARRRLLGSVTADASAGLQETQGDATRRGGRLGQRGLRLLAMGPLSARLLMQRGRPKSDRLGKIRSLDLSGLELLSEHLDPKLLCRLTQLQELDLSNNHLETLPDNLGLSHLRVLRCANNQLGDVTALCQFPKLEELSLEGNPFLTVNDNLKVSFLLPTLRKVNGKDASSTYSQVENLNRELTSRVTAHWEKFMATLGPEEEAEKAQADFVKSAVRDVRYGPESLSEFTQWRVRMISEELVAASRTQVQKANSPEKPPEAGAAHKPRARLAALKRPDDVPLSLSPSKRACASPSAQVEGSPVAGSDGSQLCELEHCTPAVQKQTKAQTRNSGLARPAGGGIQTALAGVCEVPSSSLSRRFGDMRDGQTMGEAHY

SEQ ID NO: 799548 - protein, 705 aa, Homo sapiens
AGFLPVVNAHGLARRRLLGSVTADASAGLQETQGDATRRGGRLGQRGLRLLAMGPLSARLLMQRGRPKSDRLGKIRSLEYEPGSGLSGLELLSEHLDPKLLCRLTQLQELDLSNNHLETLPDNLGLSHLRVLRCANNQLGDVTALCQFPKLEELSLEGNPFLTVNDNLKVSFLLPTLRKVNGKDASSTYSQVENLNRELTSRVTAHWEKFMATLGPEEEAEKAQADFVKSAVRDVRYGPESLSEFTQWRVRMISEELVAASRTQVQKANSPEKPPEAGAAHKPRARLAALKRPDDVPLSLSPSKRACASPSAQVEGSPVAGSDGSQPAVKLEPLHFLQCHSKNNSPQDLETQLWACAFEPAWEEGATSQTVATCGGEAVCVIDCQTGIVLHKYKAPGEEFFSVAWTALMVVTQAGHKKRWSVLAAAGLRGLVRLLHVRAGFCCGVIRAHKKAIATLCFSPAHETHLFTASYDKRIILWDIGVPNQDYEFQASQLLTLDTTSIPLRLCPVASCPDARLLAGCEGGCCCWDVRLDQPQKRRVCEVEFVFSEGSEASGRRVDGLAFVNEDIVASKGSGLGTICLWSWRQTWGGRGSQSTVAVVVLARLQWSSTELAYFSLSACPDKGIVLCGDEEGNVWLYDVSNILKQPPLLPAALQAPTQILKWPQPWALGQVVTKTMVNTVVANASFTYLTALTDSNIVAIWGRM

SEQ ID NO: 799549 - protein, 636 aa, Homo sapiens
GWYASEVRDEKIRSLDLSGLELLSEHLDPKLLCRLTQLQELDLSNNHLETLPDNLGLSHLRVLRCANNQLGDVTALCQFPKLEELSLEGNPFLTVNDNLKVSFLLPTLRKVNGKDASSTYSQVENLNRELTSRVTAHWEKFMATLGPEEEAEKAQADFVKSAVRDVRYGPESLSEFTQWRVRMISEELVAASRTQVQKANSPEKPPEAGAAHKPRARLAALKRPDDVPLSLSPSKRACASPSAQVEGSPVAGSDGSQPAVKLEPLHFLQCHSKNNSPQDLETQLWACAFEPAWEEGATSQTVATCGGEAVCVIDCQTGIVLHKYKAPGEEFFSVAWTALMVVTQAGHKKRWSVLAAAGLRGLVRLLHVRAGFCCGVIRAHKKAIATLCFSPAHETHLFTASYDKRIILWDIGVPNQDYEFQASQLLTLDTTSIPLRLCPVASCPDARLLAGCEGGCCCWDVRLDQPQKRRVCEVEFVFSEGSEASGRRVDGLAFVNEDIVASKGSGLGTICLWSWRQTWGGRGSQSTVAVVVLARLQWSSTELAYFSLSACPDKGIVLCGDEEGNVWLYDVSNILKQPPLLPAALQAPTQILKWPQPWALGQVVTKTMVNTVVANASFTYLTALTDSNIVAIWGRM

SEQ ID NO: 799550 - protein, 731 aa, Homo sapiens
AGFLPVVNAHGLARRRLLGSVTADASAGLQETQGDATRRGGRLGQRGLRLLAMGPLSARLLMQRGRPKSDRLGKIRSLDGVESGVVARASSPSYSRGCGGRIPQPRSWRQLLSGLELLSEHLDPKLLCRLTQLQELDLSNNHLETLPDNLGLSHLRVLRCANNQLGDVTALCQFPKLEELSLEGNPFLTVNDNLKVSFLLPTLRKVNGKDASSTYSQVENLNRELTSRVTAHWEKFMATLGPEEEAEKAQADFVKSAVRDVRYGPESLSEFTQWRVRMISEELVAASRTQVQKANSPEKPPEAGAAHKPRARLAALKRPDDVPLSLSPSKRACASPSAQVEGSPVAGSDGSQPAVKLEPLHFLQCHSKNNSPQDLETQLWACAFEPAWEEGATSQTVATCGGEAVCVIDCQTGIVLHKYKAPGEEFFSVAWTALMVVTQAGHKKRWSVLAAAGLRGLVRLLHVRAGFCCGVIRAHKKAIATLCFSPAHETHLFTASYDKRIILWDIGVPNQDYEFQASQLLTLDTTSIPLRLCPVASCPDARLLAGCEGGCCCWDVRLDQPQKRRVCEVEFVFSEGSEASGRRVDGLAFVNEDIVASKGSGLGTICLWSWRQTWGGRGSQSTVAVVVLARLQWSSTELAYFSLSACPDKGIVLCGDEEGNVWLYDVSNILKQPPLLPAALQAPTQILKWPQPWALGQVVTKTMVNTVVANASFTYLTALTDSNIVAIWGRM

SEQ ID NO: 799551 - protein, 658 aa, Homo sapiens
AGFLPVVNAHGLARRRLLGSVTADASAGLQETQGDATRRGGRLGQRGLRLLAMGPLSARLLMQRGRPKSDRLGKIRSLDLSGLELLSEHLDPKLLCRLTQLQELDLSNNHLETLPDNLGLSHLRVLRCANNQLGDVTALCQFPKLEELSLEGNPFLTVNDNLKVSFLLPTLRKVNGKDASSTYSQVENLNRELTSRVTAHWEVRMISEELVAASRTQVQKANSPEKPPEAGAAHKPRARLAALKRPDDVPLSLSPSKRACASPSAQVEGSPVAGSDGSQPAVKLEPLHFLQCHSKNNSPQDLETQLWACAFEPAWEEGATSQTVATCGGEAVCVIDCQTGIVLHKYKAPGEEFFSVAWTALMVVTQAGHKKRWSVLAAAGLRGLVRLLHVRAGFCCGVIRAHKKAIATLCFSPAHETHLFTASYDKRIILWDIGVPNQDYEFQASQLLTLDTTSIPLRLCPVASCPDARLLAGCEGGCCCWDVRLDQPQKRRVCEVEFVFSEGSEASGRRVDGLAFVNEDIVASKGSGLGTICLWSWRQTWGGRGSQSTVAVVVLARLQWSSTELAYFSLSACPDKGIVLCGDEEGNVWLYDVSNILKQPPLLPAALQAPTQILKWPQPWALGQVVTKTMVNTVVANASFTYLTALTDSNIVAIWGRM

SEQ ID NO: 799552 - protein, 140 aa, Homo sapiens
KGPWSWRQTWGGTICLWSWRQTWGGRGSQSTVAVVVLARLQWSSTELAYFSLSACPDKGIVLCGDEEGNVWLYDVSNILKQPPLLPAALQAPTQILKWPQPWALGQVVTKTMVNTVVANASFTYLTALTDSNIVAIWGRM

SEQ ID NO: 799553 - protein, 33 aa, Homo sapiens
MSLLIRPLKTGHSGATSQTVATCGGEAVCVIDC

SEQ ID NO: 799554 - protein, 1120 aa, Homo sapiens
AARGRRTCTRLWPERPVEKPRSAGDPGVGRARSARPRRQLCRPGEQPAGRASDIGSERYTFSFTIRDSPAHFVNAASWGNEDYIKSLSDSFRVGDCVIIENPLIQRKEIEREEKFSPATPSNCKLLLSENHSTVKVCSSYEVDTKLLSLIHLPVKESHDYYSLGDIVANGHSLNGRIINVLAAVKSVGEPKYFTTSDRRKGQRCEVRLYDETESSFAMTCWDNESILLAQSWMPRETVIFASDVRINFDKFRNCMTATVISKTIITTNPEANILLNFIRENKETNVLDDEIDSYFKESINLSTIVDVYTVEQLKGKALKNEGKADPSYGILYAYISTLNIDDETTKVVRNRCSSCGYIVNEASNMCTTCNKNSLDFKSVFLSFHVLIDLTDHTGTLHSCSLTGSVAEETLGCRCNLRNGKLREDCLTREFEAAVSCDSTAALQLGRQSETLSQPVYASLDLIVFFNRSNSLWRPSQDNISFFQGYDLRNIADDVGDGKNHGGCLTLLSEFAVDLEPELQLVRVRDLLLGHERADRAGRREALRQSPGQPLLLALVLHVPGGHIQAQGIAAHVVHGRSLGDCAAALAHHHAQLQLVVQVASVRGHEDGRALGRVGRGRLQEQHGLAQHRAAHLPDVVRVVPPHADDVLSPLPEAGQWPGCCHDSIKCPCSHVGWAGQLMPTASRRGPTASERCPPQRRPVPPRDLPGTRAAWRSASRDPLCGAKKEAEARGTALPAQLSGRRRRRSQARLPARGSRGSRRKQVERERVDWLADGARWTLIGWGQREAGADWLRRADAGVLQSWAARQSSPARVMVVGRGLLGRRSLAALGAACARRGLGPALLGVFCHTDLRKNLTVDEGTMKVEVLPALTDNYMYLVIDDETKEAAIVDPVQPQKVVDAARKHGVKLTTVLTTHHHWDHAGGNEKLVKLESGLKVYGGDDRIGALTHKITHLSTLQVGSLNVKCLATPCHTSGHICYFVSKPGGSEPPAVFTGDTLFVAGCGKFYEGTADEMCKALLEVLGRLPPDTRVYCGHEYTINNLKFARHVEPGNAAIREKLAWAKEKYSIGEPTVPSTLAEEFTYNPFMRVREKTVQQHAGETDPVTTMRAVRREKDQFKMPRD

SEQ ID NO: 799555 - protein, 308 aa, Homo sapiens
MVVGRGLLGRRSLAALGAACARRGLGPALLGVFCHTDLRKNLTVDEGTMKVEVLPALTDNYMYLVIDDETKEAAIVDPVQPQKVVDAARKHGVKLTTVLTTHHHWDHAGGNEKLVKLESGLKVYGGDDRIGALTHKITHLSTLQVGSLNVKCLATPCHTSGHICYFVSKPGGSEPPAVFTGDTLFVAGCGKFYEGTADEMCKALLEVLGRLPPDTRVYCGHEYTINNLKFARHVEPGNAAIREKLAWAKEKYSIGEPTVPSTLAEEFTYNPFMRVREKTVQQHAGETDPVTTMRAVRREKDQFKMPRD

SEQ ID NO: 799556 - protein, 1151 aa, Homo sapiens
AARGRRTCTRLWPERPVEKPRSAGDPGVGRARSARPRRQLCRPGEQPAGRASDIGSERYTFSFTIRDSPAHFVNAASWGNEDYIKSLSDSFRVGDCVIIENPLIQRKEIEREEKFSPATPSNCKLLLSENHSTVKVCSSYEVDTKLLSLIHLPVKESHDYYSLGDIVANGHSLNGRIINVLAAVKSVGEPKYFTTSDRRKGQRCEVRLYDETESSFAMTCWDNESILLAQSWMPRETVIFASDVRINFDKFRNCMTATVISKTIITTNPEANILLNFIRENKETNVLDDEIDSYFKESINLSTIVDVYTVEQLKGKALKNEGKADPSYGILYAYISTLNIDDETTKVVRNRCSSCGYIVNEASNMCTTCNKNSLDFKSVFLSFHVLIDLTDHTGTLHSCSLTGSVAEETLGCRCNLRNGKLREDCLTREFEAAVSCDSTAALQLGRQSETLSQPVYASLDLIVFFNRSNSLWRPSQDNISFFQGYDLRNIADDVGDGKNHGGCLTLLSEFAVDLEPELQLVRVRDLLLGHERADRAGRREALRQSPGQPLLLALVLHVPGGHIQAQGIAAHVVHGRSLGDCAAALAHHHAQLQLVVQVASVRGHEDGRALGRVGRGRLQEQHGLAQHRAAHLPDVVRVVPPHADDVLSPLPEAGQWPGCCHDSIKCPCSHVGWAGQLMPTASRRGPTASERCPPQRRPVPPRDLPGTRAAWRSASRDPLCGAKKEAEARGTALPAQLSGRRRRRSQARLPARGSRGSRRKQVERERVDWLADGARWTLIGWGSARRALIGCDAPTPVFCSPGQLGSPARPGSWWWAEGCSAAAASPRWEPPAPAEASVPKAALPGSSGGGAGAGLRGAGAGPRVRKALGPALLGVFCHTDLRKNLTVDEGTMKVEVLPALTDNYMYLVIDDETKEAAIVDPVQPQKVVDAARKHGVKLTTVLTTHHHWDHAGGNEKLVKLESGLKVYGGDDRIGALTHKITHLSTLQVGSLNVKCLATPCHTSGHICYFVSKPGGSEPPAVFTGDTLFVAGCGKFYEGTADEMCKALLEVLGRLPPDTRVYCGHEYTINNLKFARHVEPGNAAIREKLAWAKEKYSIGEPTVPSTLAEEFTYNPFMRVREKTVQQHAGETDPVTTMRAVRREKDQFKMPRD

SEQ ID NO: 799557 - protein, 260 aa, Homo sapiens [sequence omitted]

SEQ ID NO: 799558 - protein, 1120 aa, Homo sapiens; identical to SEQ ID NO: 799554

SEQ ID NO: 799559 - protein, 1120 aa, Homo sapiens; identical to SEQ ID NO: 799554

SEQ ID NO: 799560 - protein, 1048 aa, Homo sapiens
AARGRRTCTRLWPERPVEKPRSAGDPGVGRARSARPRRQLCRPGEQPAGRASDIGSERYTFSFTIRDSPAHFVNAASWGNEDYIKSLSDSFRVGDCVIIENPLIQRKEIEREEKFSPATPSNCKLLLSENHSTVKVCSSYEVDTKLLSLIHLPVKESHDYYSLGDIVANGHSLNGRIINVLAAVKSVGEPKYFTTSDRRKGQRCEVRLYDETESSFAMTCWDNESILLAQSWMPRETVIFASDVRINFDKFRNCMTATVISKTIITTNPEANILLNFIRENKETNVLDDEIDSYFKESINLSTIVDVYTVEQLKGKALKNEGKADPSYGILYAYISTLNIDDETTKVVRNRCSSCGYIVNEASNMCTTCNKNSLDFKSVFLSFHVLIDLTDHTGTLHSCSLTGSVAEETLGCRCNLRNGKLREDCLTREFEAAVSCDSTAALQLGRQSETLSQPVYASLDLIVFFNRSNSLWRPSQDNISFFQGYDLRNIADDVGDGKNHGGCLTLLSEFAVDLEPELQLVRVRDLLLGHERADRAGRREALRQSPGQPLLLALVLHVPGGHIQAQGIAAHVVHGRSLGDCAAALAHHHAQLQLVVQVASVRGHEDGRALGRVGRGRLQEQHGLAQHRAAHLPDVVRVVPPHADDVLSPLPEAGQWPGCCHDSIKCPCSHVGWAGQLMPTASRRGPTASERCPPQRRPVPPRDLPGTRAAWRSASRDPLCGAKKEAEARGTALPAQLSGRRRRRSQARLPARGSRGSRRKQVERERVDWLADGARWTLIGWGQREAGADWLRRADAGVLQSWAARQSSPARVMVVGRGLLGRRSLAALGAACARRGLGPALLGVFCHTDLRKNLTVDEGTMKVEVLPALTDNYMYLVIDDETKEAAIVDPVQPQKVVDAARKHGVKLTTVLTTHHHWDHAGGNEKLVKLESGLKVYGGDDRIGALTHKITHLSTLQVTPCLWLAAGSSMKGLRMRCVKLCWRSWAGSPRTQESTVATSTPSTTSSLHATWSPAMPPSGRSWPGPRRSTASGSPQCHPPWQRSLPTTPS

SEQ ID NO: 799561 - protein, 1130 aa, Homo sapiens
AARGRRTCTRLWPERPVEKPRSAGDPGVGRARSARPRRQLCRPGEQPAGRASDIGSERYTFSFTIRDSPAHFVNAASWGNEDYIKSLSDSFRVGDCVIIENPLIQRKEIEREEKFSPATPSNCKLLLSENHSTVKVCSSYEVDTKLLSLIHLPVKESHDYYSLGDIVANGHSLNGRIINVLAAVKSVGEPKYFTTSDRRKGQRCEVRLYDETESSFAMTCWDNESILLAQSWMPRETVIFASDVRINFDKFRNCMTATVISKTIITTNPEANILLNFIRENKETNVLDDEIDSYFKESINLSTIVDVYTVEQLKGKALKNEGKADPSYGILYAYISTLNIDDETTKVVRNRCSSCGYIVNEASNMCTTCNKNSLDFKSVFLSFHVLIDLTDHTGTLHSCSLTGSVAEETLGCRCNLRNGKLREDCLTREFEAAVSCDSTAALQLGRQSETLSQPVYASLDLIVFFNRSNSLWRPSQDNISFFQGYDLRNIADDVGDGKNHGGCLTLLSEFAVDLEPELQLVRVRDLLLGHERADRAGRREALRQSPGQPLLLALVLHVPGGHIQAQGIAAHVVHGRSLGDCAAALAHHHAQLQLVVQVASVRGHEDGRALGRVGRGRLQEQHGLAQHRAAHLPDVVRVVPPHADDVLSPLPEAGQWPGCCHDSIKCPCSHVGWAGQLMPTASRRGPTASERCPPQRRPVPPRDLPGTRAAWRSASRDPLCGAKKEAEARGTALPAQLSGRRRRRSQARLPARGSRGSRRKQVERERVDWLADGARWTLIGWGQREAGADWLRRADAGVLQSWAARQSSPARVMVVGRGLLGRRSLAALGAACARRGLGPALLGVFCHTDLRKNLTVDEGTMKVEVLPALTDNYMYLVIDDETKEAAIVDPVQPQKVVDAARKHGVKLTTVLTTHHHWDHAGGNEKLVKLESGLKVYGGDDRIGALTHKITHLSTLQVGSLNVKCLATPCHTSGHICYFVSKPGGSEPPAVFTDTLFVAGCGKKRGFFFSFKFEKKGGTADEMCKALLEVLGRLPPDTRVYCGHEYTINNLKFARHVEPGNAAIREKLAWAKEKYSIGEPTVPSTLAEEFTYNPFMRVREKTVQQHAGETDPVTTMRAVRREKDQFKMPRD

SEQ ID NO: 799562 - protein, 1021 aa, Homo sapiens
AARGRRTCTRLWPERPVEKPRSAGDPGVGRARSARPRRQLCRPGEQPAGRASDIGSERYTFSFTIRDSPAHFVNAASWGNEDYIKSLSDSFRVGDCVIIENPLIQRKEIEREEKFSPATPSNCKLLLSENHSTVKVCSSYEVDTKLLSLIHLPVKESHDYYSLGDIVANGHSLNGRIINVLAAVKSVGEPKYFTTSDRRKGQRCEVRLYDETESSFAMTCWDNESILLAQSWMPRETVIFASDVRINFDKFRNCMTATVISKTIITTNPEANILLNFIRENKETNVLDDEIDSYFKESINLSTIVDVYTVEQLKGKALKNEGKADPSYGILYAYISTLNIDDETTKVVRNRCSSCGYIVNEASNMCTTCNKNSLDFKSVFLSFHVLIDLTDHTGTLHSCSLTGSVAEETLGCRCNLRNGKLREDCLTREFEAAVSCDSTAALQLGRQSETLSQPVYASLDLIVFFNRSNSLWRPSQDNISFFQGYDLRNIADDVGDGKNHGGCLTLLSEFAVDLEPELQLVRVRDLLLGHERADRAGRREALRQSPGQPLLLALVLHVPGGHIQAQGIAAHVVHGRSLGDCAAALAHHHAQLQLVVQVASVRGHEDGRALGRVGRGRLQEQHGLAQHRAAHLPDVVRVVPPHADDVLSPLPEAGQWPGCCHDSIKCPCSHVGWAGQLMPTASRRGPTASERCPPQRRPVPPRDLPGTRAAWRSASRDPLCGAKKEAEARGTALPAQLSGRRRRRSQARLPARGSRGSRRKQVERERVDWLADGARWTLIGWGQREAGADWLRRADAGVLQSWAARQSSPARVMVVGRGLLGRRSLAALGAACARRGLGPALLGVFCHTDLRKNLTVDEGTMKVEVLPALTDNYMYLVIDDETKEAAIVDPVQPQKVVDAARKHGVKLTTVLTTHHHWDHAGGNEKLVKLESGLKVYGGDDRIGALTHKITHLSTLQVGSLNVKCLATPCHTSGHICYFVSKPGGSEPPAVFTETDHSAHHPPPLGPCWREEKLVKLESGLK

SEQ ID NO: 799563 - protein, 780 aa, Homo sapiens
AARGRRTCTRLWPERPVEKPRSAGDPGVGRARSARPRRQLCRPGEQPAGRASDIGSERYTFSFTIRDSPAHFVNAASWGNEDYIKSLSDSFRVGDCVIIENPLIQRKEIEREEKFSPATPSNCKLLLSENHSTVKVCSSYEVDTKLLSLIHLPVKESHDYYSLGDIVANGHSLNGRIINVLAAVKSVGEPKYFTTSDRRKGQRCEVRLYDETESSFAMTCWDNESILLAQSWMPRETVIFASDVRINFDKFRNCMTATVISKTIITTNPEANILLNFIRENKETNVLDDEIDSYFKESINLSTIVDVYTVEQLKGKALKNEGKADPSYGILYAYISTLNIDDETTKVVRNRCSSCGYIVNEASNMCTTCNKNSLDFKSVFLSFHVLIDLTDHTGTLHSCSLTGSVAEETLGCRCNLRNGKLREDCLTREFEAAVSCDSTAALQLGRQSETLSQPVYASLDLIVFFNRSNSLWRPSQDNISFFQGYDLRNIADDVGDGKNHGGCLTLLSEFAVDLEPELQLVRVRDLLLGHERADRAGRREALRQSPGQPLLLALVLHVPGGHIQAQGIAAHVVHGRSLGDCAAALAHHHAQLQLVVQVASVRGHEDGRALGRVGRGRLQEQHGLAQHRAAHLPDVVRVVPPHADDVLSPLPEAGQWPGCCHDSIKCPCSHVGWAGQLMPTASRRGPTASERCPPQRRPVPPRDLPGTRAAWRSASRDPLCGAKKEAEARGTALPAQLSGRRRRRSQARLPARGSRGSRRKQVERERVDWLADGARWTLIG

SEQ ID NO: 799564 - protein, 936 aa, Homo sapiens
AARGRRTCTRLWPERPVEKPRSAGDPGVGRARSARPRRQLCRPGEQPAGRASDIGSERYTFSFTIRDSPAHFVNAASWGNEDYIKSLSDSFRVGDCVIIENPLIQRKEIEREEKFSPATPSNCKLLLSENHSTVKVCSSYEVDTKLLSLIHLPVKESHDYYSLGDIVANGHSLNGRIINVLAAVKSVGEPKYFTTSDRRKGQRCEVRLYDETESSFAMTCWDNESILLAQSWMPRETVIFASDVRINFDKFRNCMTATVISKTIITTNPEANILLNFIRENKETNVLDDEIDSYFKESINLSTIVDVYTVEQLKGKALKNEGKADPSYGILYAYISTLNIDDETTKVVRNRCSSCGYIVNEASNMCTTCNKNSLDFKSVFLSFHVLIDLTDHTGTLHSCSLTGSVAEETLGCRCNLRNGKLREDCLTREFEAAVSCDSTAALQLGRQSETLSQPVYASLDLIVFFNRSNSLWRPSQDNISFFQGYDLRNIADDVGDGKNHGGCLTLLSEFAVDLEPELQLVRVRDLLLGHERADRAGRREALRQSPGQPLLLALVLHVPGGHIQAQGIAAHVVHGRSLGDCAAALAHHHAQLQLVVQVASVRGHEDGRALGRVGRGRLQEQHGLAQHRAAHLPDVVRVVPPHADDVLSPLPEAGQWPGCCHDSIKCPCSHVGWAGQLMPTASRRGPTASERCPPQRRPVPPRDLPGTRAAWRSASRDPLCGAKKEAEARGTALPAQLSGRRRRRSQARLPARGSRGSRRKQVERERVDWLADGARWTLIGWGQREAGADWLRRADAGVLQSWAARQSSPARVMVVGRGLLGRRSLAALGAACARRGLGPALLGVFCHTDLRKNLTVDEGTMKVEVLPALTDNYMYLVIDDETKEAAIVDPVQPQKVVDAARKHGVKLTTVLTTHHHWDHAGGNEKLVKLDFSGFGD

SEQ ID NO: 799565 - protein, 411 aa, Homo sapiens
AARGRRTCTRLWPERPVEKPRSAGDPGVGRARSARPRRQLCRPGEQPAGRASDIGSERYTFSFTIRDSPAHFVNAASWGNEDYIKSLSDSFRVGDCVIIENPLIQRKEIEREEKFSPATPSNCKLLLSENHSTVKVCSSYEVDTKLLSLIHLPVKESHDYYSLGDIVANGHSLNGRIINVLAAVKSVGEPKYFTTSDRRKGQRCEVRLYDETESSFAMTCWDNESILLAQSWMPRETVIFASDVRINFDKFRNCMTATVISKTIITTNPEANILLNFIRENKETNVLDDEIDSYFKESINLSTIVDVYTVEQLKGKALKNEGKADPSYGILYAYISTLNIDDETTKVVRNRCSSCGYIVNEASNMCTTCNKNSLDFKSVFLSFHVLIDLTDHTGTLHSCSLTGSVAEETLG

SEQ ID NO: 799566 - protein, 1079 aa, Homo sapiens
AARGRRTCTRLWPERPVEKPRSAGDPGVGRARSARPRRQLCRPGEQPAGRASDIGSERYTFSFTIRDSPAHFVNAASWGNEDYIKSLSDSFRVGDCVIIENPLIQRKEIEREEKFSPATPSNCKLLLSENHSTVKVCSSYEVDTKLLSLIHLPVKESHDYYSLGDIVANGHSLNGRIINVLAAVKSVGEPKYFTTSDRRKGQRCEVRLYDETESSFAMTCWDNESILLAQSWMPRETVIFASDVRINFDKFRNCMTATVISKTIITTNPEANILLNFIRENKETNVLDDEIDSYFKESINLSTIVDVYTVEQLKGKALKNEGKADPSYGILYAYISTLNIDDETTKVVRNRCSSCGYIVNEASNMCTTCNKNSLDFKSVFLSFHVLIDLTDHTGTLHSCSLTGSVAEETLGCRCNLRNGKLREDCLTREFEAAVSCDSTAALQLGRQSETLSQPVYASLDLIVFFNRSNSLWRPSQDNISFFQGYDLRNIADDVGDGKNHGGCLTLLSEFAVDLEPELQLVRVRDLLLGHERADRAGRREALRQSPGQPLLLALVLHVPGGHIQAQGIAAHVVHGRSLGDCAAALAHHHAQLQLVVQVASVRGHEDGRALGRVGRGRLQEQHGLAQHRAAHLPDVVRVVPPHADDVLSPLPEAGQWPGCCHDSIKCPCSHVGWAGQLMPTASRRGPTASERCPPQRRPVPPRDLPGTRAAWRSASRDPLCGAKKEAEARGTALPAQLSGRRRRRSQARLPARGSRGSRRKQVERERVDWLADGARWTLIGWGSARRALIGCDAPTPVFCSPGQLGSPARPGSWWWAEGCSAAAASPRWEPPAPAEASVPKAALPGSSGGGAGAGLRGAGAGPRVRKALGPALLGVFCHTDLRKNLTVDEGTMKVEVLPALTDNYMYLVIDDETKEAAIVDPVQPQKVVDAARKHGVKLTTVLTTHHHWDHAGGNEKLVKLESGLKVYGGDDRIGALTHKITHLSTLQVTPCLWLAAGSSMKGLRMRCVKLCWRSWAGSPRTQESTVATSTPSTTSSLHATWSPAMPPSGRSWPGPRRSTASGSPQCHPPWQRSLPTTPS

SEQ ID NO: 799567 - protein, 292 aa, Homo sapiens
MVDLWLAAGADLRKNLTVDEGTMKVEVLPALTDNYMYLVIDDETKEAAIVDPVQPQKVVDAARKHGVKLTTVLTTHHHWDHAGGNEKLVKLESGLKVYGGDDRIGALTHKITHLSTLQVGSLNVKCLATPCHTSGHICYFVSKPGGSEPPAVFTDTLFVAGCGKKRGFFFSFKFEKKGGTADEMCKALLEVLGRLPPDTRVYCGHEYTINNLKFARHVEPGNAAIREKLAWAKEKYSIGEPTVPSTLAEEFTYNPFMRVREKTVQQHAGETDPVTTMRAVRREKDQFKMPRD

SEQ ID NO: 799568 - protein, 917 aa, Homo sapiens
AARGRRTCTRLWPERPVEKPRSAGDPGVGRARSARPRRQLCRPGEQPAGRASDIGSERYTFSFTIRDSPAHFVNAASWGNEDYIKSLSDSFRVGDCVIIENPLIQRKEIEREEKFSPATPSNCKLLLSENHSTVKVCSSYEVDTKLLSLIHLPVKESHDYYSLGDIVANGHSLNGRIINVLAAVKSVGEPKYFTTSDRRKGQRCEVRLYDETESSFAMTCWDNESILLAQSWMPRETVIFASDVRINFDKFRNCMTATVISKTIITTNPEANILLNFIRENKETNVLDDEIDSYFKESINLSTIVDVYTVEQLKGKALKNEGKADPSYGILYAYISTLNIDDETTKVVRNRCSSCGYIVNEASNMCTTCNKNSLDFKSVFLSFHVLIDLTDHTGTLHSCSLTGSVAEETLGCRCNLRNGKLREDCLTREFEAAVSCDSTAALQLGRQSETLSQPVYASLDLIVFFNRSNSLWRPSQDNISFFQGYDLRNIADDVGDGKNHGGCLTLLSEFAVDLEPELQLVRVRDLLLGHERADRAGRREALRQSPGQPLLLALVLHVPGGHIQAQGIAAHVVHGRSLGDCAAALAHHHAQLQLVVQVASVRGHEDGRALGRVGRGRLQEQHGLAQHRAAHLPDVVRVVPPHADDVLSPLPEAGQWPGCCHDSIKCPCSHVGWAGQLMPTASRRGPTASERCPPQRRPVPPRDLPGTRAAWRSASRDPLCGAKKEAEARGTALPAQLSGRRRRRSQARLPARGSRGSRRKQVERERVDWLADGARWTLIGWGQREAGADWLRRADAGVLQSWAARQSSPARVMVVGRGLLGRRSLAALGAACARRGLGPALLGVFCHTDLRKNLTVDEGTMKVEVLPALTDNYMYLVIDDETKEAAIVDPVQPQKVVDAARKHGVKLTTVLTTHHHW

SEQ ID NO: 799569 - protein, 477 aa, Homo sapiens
AARGRRTCTRLWPERPVEKPRSAGDPGVGRARSARPRRQLCRPGEQPAGRASDIGSERYTFSFTIRDSPAHFVNAASWGNEDYIKSLSDSFRVGDCVIIENPLIQRKEIEREEKFSPATPSNCKLLLSENHSTVKVCSSYEVDTKLLSLIHLPVKESHDYYSLGDIVANGHSLNGRIINVLAAVKSVGEPKYFTTSDRRKGQRCEVRLYDETESSFAMTCWDNESILLAQSWMPRETVIFASDVRINFDKFRNCMTATVISKTIITTNPEANILLNFIRENKETNVLDDEIDSYFKESINLSTIVDVYTVEQLKGKALKNEGKADPSYGILYAYISTLNIDDETTKVVRNRCSSCGYIVNEASNMCTTCNKNSLDFKSVFLSFHVLIDLTDHTGTLHSCSLTGSVAEETLGCVHEFLAMTDEQKTALKWQFLLERSKIYLKFVLSHRARSGLKISVLSCKLADPTEASRNLSGQKHV

SEQ ID NO: 799570 - protein, 253 aa, Homo sapiens
MASGILVNVKEEVTCPICLELLTQPLSLDCGHSFCQACLTANHKKSMLDKGESSCPVCRISYQPENIRPNRHVANIVEKLREVKLSPEGQKVDHCARHGEKLLLFCQEDGKVICWLCERSQEHRGHHTFLTEEVAREYQVKLQAALEMLRQKQQEAEELEADIREEKASWKTQIQYDKTNVLADFEQLRDILDWEESNELQNLEKEEEDILKSLTNSETEMVQQTQSLRELISDLEHRLQGSVMELLQVWMAS

SEQ ID NO: 799571 - protein, 271 aa, Homo sapiens
MASGILVNVKEEVTCPICLELLTQPLSLDCGHSFCQACLTANHKKSMLDKGESSCPVCRISYQPENIRPNRHVANIVEKLREVKLSPEGQKVDHCARHGEKLLLFCQEDGKVICWLCERSQEHRGHHTFLTEEVAREYQVKLQAALEMLRQKQQEAEELEADIREEKASWKTQIQYDKTNVLADFEQLRDILDWEESNELQNLEKEEEDILKSLTNSETEMVQQTQSLRELISDLEHRLQGSVMELLQDGERDLEEARNFSKKSKESVSSS

SEQ ID NO: 799572 - protein, 253 aa, Homo sapiens; identical to SEQ ID NO: 799570

SEQ ID NO: 799573 - protein, 219 aa, Homo sapiens
MASGILVNVKEEVTCPICLELLTQPLSLDCGHSFCQACLTANHKKSMLDKGESSCPVCRISYQPENIRPNRHVANIVEKLREVKLSPEGQKVDHCARHGEKLLLFCQEDGKVICWLCERSQEHRGHHTFLTEEVAREYQVKLQAALEMLRQKQQEAEELEADIREEKASWKTQIQYDKTNVLADFEQLRDILDWEESNELQNLEKEEEDILKSLTNSYT

SEQ ID NO: 799574 - protein, 253 aa, Homo sapiens; identical to SEQ ID NO: 799570

SEQ ID NO: 799575 - protein, 253 aa, Homo sapiens; identical to SEQ ID NO: 799570

SEQ ID NO: 799576 - protein, 253 aa, Homo sapiens; identical to SEQ ID NO: 799570

SEQ ID NO: 799577 - protein, 258 aa, Homo sapiens
MASGILVNVKEEVTCPICLELLTQPLSLDCGHSFCQACLTANHKKSMLDKGESSCPVCRISYQPENIRPNRHVANIVEKLREVKLSPEGQKVDHCARHGEKLLLFCQEDGKVICWLCERSQEHRGHHTFLTEEVAREYQVKLQAALEMLRQKQQEAEELEADIREEKASWKTQIQYDKTNVLADFEQLRDILDWEESNELQNLEKEEEDILKSLTNSETEMVQQTQSLRELISDLEHRLQGSVMELLQVKSGKKRRRT

SEQ ID NO: 799578 - protein, 257 aa, Homo sapiens
MASGILVNVKEEVTCPICLELLTQPLSLDCGHSFCQACLTANHKKSMLDKGESSCPVCRISYQPENIRPNRHVANIVEKLREVKLSPEGQKVDHCARHGEKLLLFCQEDGKVICWLCERSQEHRGHHTFLTEEVAREYQVKLQAALEMLRQKQQEAEELEADIREEKASWKTQIQYDKTNVLADFEQLRDILDWEESNELQNLEKEEEDILKSLTNSETEMVQQTQSLRELISDLEHRLQGSVMELLQVKSGKKPEH

SEQ ID NO: 799579 - protein, 102 aa, Homo sapiens
MGTSVAHRRPLPTISLFSEHLLKHLMLKPALHQEALLDPKVGLASLLGLPQLENMTSCDLLDLELPHHQECPAEVGLIVYHLCRAQDNPCMCQMCRKYLLME

SEQ ID NO: 799580 - protein, 917 aa, Homo sapiens
MGLFRGFVFLLVLCLLHQSNTSFIKLNNNGFEDIVIVIDPSVPEDEKIIEQIEDMVTTASTYLFEATEKRFFFKNVSILIPENWKENPQYKRPKHENHKHADVIVAPPTLPGRDEPYTKQFTECGEKGEYIHFTPDLLLGKKQNEYGPPGKLFVHEWAHLRWGVFDEYNEDQPFYRAKSKKIEATRCSAGISGRNRVYKCQGGSCLSRACRIDSTTKLYGKDCQFFPDKVQTEKASIMFMQSIDSVVEFCNEKTHNQEAPSLQNIKCNFRSTWEVISNSEDFKNTIPMVTPPPPPVFSLLKIRQRIVCLVLDKSGSMGGKDRLNRMNQAAKHFLLQTVENGSWVGMVHFDSTATIVNKLIQIKSSDERNTLMAGLPTYPLGGTSICSGIKYAFQVIGELHSQLDGSEVLLLTDGEDNTASSCIDEVKQSGAIVHFIALGRAADEAVIEMSKITGGSHFYVSDEAQNNGLIDAFGALTSGNTDLSQKSLQLESKGLTLNSNAWMNDTVIIDSTVGKDTFFLITWNSLPPSISLWDPSGTIMENFTVDATSKMAYLSIPGTAKVGTWAYNLQAKANPETLTITVTSRAANSSVPPITVNAKMNKDVNSFPSPMIVYAEILQGYVPVLGANVTAFIESQNGHTEVLELLDNGAGADSFKNDGVYSRYFTAYTENGRYSLKVRAHGGANTARLKLRPPLNRAAYIPGWVVNGEIEANPPRPEIDEDTQTTLEDFSRTASGGAFVVSQVPSLPLPDQYPPSQITDLDATVHEDKIILTWTAPGDNFDVGKVQRYIIRISASILDLRDSFDDALQVNTTDLSPKEANSKESFAFKPENISEENATHIFIAIKSIDKSNLTSKVSNIAQVTLFIPQANPDDIDPTPTPTPTPDKSHNSGVNISTLVLSVIGSVVIVNFILSTTI

SEQ ID NO: 799581 - protein, 472 aa, Homo sapiens
MGLFRGFVFLLVLCLLHQSNTSFIKLNNNGFEDIVIVIDPSVPEDEKIIEQIEDMVTTASTYLFEATEKRFFFKNVSILIPENWKENPQYKRPKHENHKHADVIVAPPTLPGRDEPYTKQFTECGEKGEYIHFTPDLLLGKKQNEYGPPGKLFVHEWAHLRWGVFDEYNEDQPFYRAKSKKIEATRCSAGISGRNRVYKCQGGSCLSRACRIDSTTKLYGKDCQFFPDKVQTEKASIMFMQSIDSVVEFCNEKTHNQEAPSLQNIKCNFRSTWEVISNSEDFKNTIPMVTPPPPPVFSLLKIRQRIVCLVLDKSGSMGGKDRLNRMNQAAKHFLLQTVENGSWVGMVHFDSTATIVNKLIQIKSSDERNTLMAGLPTYPLGGTSICSGIKYAFQVIGELHSQLDGSEVLLLTDGEDNTASSCIDEVKQSGAIVHFIALGRAADEAVIEMSKITGKTRSIYSRPSIVMHKCKG

SEQ ID NO: 799582 - protein, 221 aa, Homo sapiens
VDRIVGELGVNGEIEANPPRPEIDEDTQTTLEDFSRTASGGAFVVSQVPSLPLPDQYPPSQITDLDATVHEDKIILTWTAPGDNFDVGKVQRYIIRISASILDLRDSFDDALQVNTTDLSPKEANSKESFAFKPENISEENATHIFIAIKSIDKSNLTSKVSNIAQVTLFIPQANPDDIDPTPTPTPTPDKSHNSGVNISTLVLSVIGSVVIVNFILSTTI

SEQ ID NO: 799583 - protein, 70 aa, Homo sapiens
MSGARRAAPGTSNAAKGSCTYPRAARERLLRALLSLVFCTAPARRSRLRGPMARRDSGMAVCHGCEPPLG

SEQ ID NO: 799584 - protein, 70 aa, Homo sapiens; identical to SEQ ID NO: 799583

SEQ ID NO: 799585 - protein, 108 aa, Homo sapiens
MIEAEEQQPCKTDFYSELPKVELHAHLNGSISSHTMKKLIAQKPDLKIHDQMTVIDKGKKRTCGRMFQMFQTIHQLTSSPEDILMVTKDVIKEFADDGVKYLELRSTP

SEQ ID NO: 799586 - protein, 108 aa, Homo sapiens
MIEAEEQQPCKTDFYSELPKVELHAHLNGSISSHTMKKLIAQKPDLKIHDQMTVIDKGKKRTLEECFQMFQTIHQLTSSPEDILMVTKDVIKEFADDGVKYLELRSTP

SEQ ID NO: 799587 - protein, 80 aa, Homo sapiens
GSGGCPFRAEPGSSFLSAPPPPHRLATGHRSGATGFFPTPPPPADQRPQRPPRAGRLRPTGTPLPLEGGGRFHAYDRARP

SEQ ID NO: 799588 - protein, 123 aa, Homo sapiens
TTRGRRPGNCRPALRNLTHRRAAAGGCTRRARCSKPRERRTPLGQRDGREAREAGERRRRPPYLSRCPERAGTCPSPPHSPPRTGSTRPRPPTRKPCSSAVVGTAAGPCAPPPAAFPTPLPRE

SEQ ID NO: 799589 - protein, 871 aa, Homo sapiens
RHRSAPGPRRVPAPRVGPAQPGPPATCASQPCAEQAAMWGLGARGPDRGLLLALALGGLARAGGVEVEPGGAHGESGGFQVVTFEWAHVQDPYVIALWILVASLAKIGFHLSHKVTSVVPESALLIVLGLVLGGIVWAADHIASFTLTPTVFFFYLLPPIVLDAGYFMPNRLFFGNLGTILLYAVVGTVWNAATTGLSLYGVFLSGLMGDLQIGLLDFLLFGSLMAAVDPVAVLAVFEEVHVNEVLFIIVFGESLLNDAVTVVLYNVFESFVALGGDNVTGVDCVKGIVSFFVVSLGGTLVGVVFAFLLSLVTRFTKHVRIIEPGFVFIISYLSYLTSEMLSLSAILAITFCGICCQKYVKANISEQSATTVRYTMKMLASSAETIIFMFLGISAVNPFIWTWNTAFVLLTLVFISVYRAIGVVLQTWLLNRYRMVQLEPIDQVVLSYGGLRGAVAFALVVLLDGDKVKEKNLFVSTTIIVVFFTVIFQGLTIKPLVQWLKVKRSEHREPRLNEKLHGRAFDHILSAIEDISGQIGHNYLRDKWSHFDRKFLSRVLMRRSAQKSRDRILNVFHELNLKDAISYVAEGERRGSLAFIRSPSTDNVVNVDFTPRSSTVEASVSYLLRENVSAVCLDMQSLEQRRRSIRDAEDMVTHHTLQQYLYKPRQEYKHLYSRHELTPTEDEKQDREIFHRTMRKRLESFKSTKLGLNQNKKAAKLYKRERAQKRRNSSIPNGKLPMESPAQNFTIKEKDLELSDTEEPPNYDEEMSGGIEFLASVTKDTASDSPAGIDNPVFSPDEALDRSLLARLPPWLSPGETVVPSQRARTQIPYSPGTFRRLMPFRLSSKSVDSFLQADGPEERPPAALPESTHM

SEQ ID NO: 799590 - protein, 399 aa, Homo sapiens
RHRSAPGPRRVPAPRVGPAQPGPPATCASQPCAEQAAMWGLGARGPDRGLLLALALGGLARAGGVEVEPGGAHGESGGFQVVTFEWAHVQDPYVIALWILVASLAKIGFHLSHKVTSVVPESALLIVLGLVLGGIVWAADHIASFTLTPTAFLLSLVTRFTKHVRIIEPGFVFIISYLSYLTSEMLSLSAILAITFCGICCQKYVKANISEQSATTVRYTMKMLASSAETIIFMFLGISAVNPFIWTWNTAFVLLTLVFISVYRAIGVVLQTWLLNRYRMVQLEPIDQVVLSYGGLRGAVAFALVVLLDGDKVKEKNLFVSTTIIVVFFTVIFQGLTIKPLVQWLKVKRSEHREPRLNEKLHGRAFDHILSAIEDISGQIGHNYLRDKAQACNPSTLGD

SEQ ID NO: 799591 - protein, 347 aa, Homo sapiens
ADAGVPESYSQGFGEGPVRKGTHFRQEARKASWGVSLSPEGRRGWPDGRCPRAPAGCPPWEGEGHAGGSQGQMPAVGRRGARKRPHPEGACMAQRWSPRRRENVSAVCLDMQSLEQRRRSIRDAEDMVTHHTLQQYLYKPRQEYKHLYSRHELTPTEDEKQDREIFHRTMRKRLESFKSTKLGLNQNKKAAKLYKRERAQKRRNSSIPNGKLPMESPAQNFTIKEKDLELSDTEEPPNYDEEMSGGIEFLASVTKDTASDSPAGIDNPVFSPDEALDRSLLARLPPWLSPGETVVPSQRARTQIPYSPGTFRRLMPFRLSSKSVDSFLQADGPEERPPAALPESTHM

SEQ ID NO: 799592 - protein, 581 aa, Homo sapiens
MAVAGAVSGEPLVHWCTQQLRKTFGLDVSEEIIQYVLSIESAEEIREYVTDLLQGNEGKKGQFIEELITKWQKNDQELISDPLQQCFKKDEILDGQKSGDHLKRGRKKGRNRQEVPAFTEPDTTAEVKTPFDLAKAQENSNSVKKKTKFVNLYTREGQDRLAVLLPGRHPCDCLGQKHKLINNCLICGRIVCEQEGSGPCLFCGTLVCTHEEQDILQRDSNKSQKLLKKLMSGVENSGKVDISTKDLLPHQELRIKSGLEKAIKHKDKLLEFDRTSIRRTQVIDDESDYFASDSNQWLSKLERETLQKREEELRELRHASRLSKKVTIDFAGRKILEEENSLAEYHSRLDETIQAIANGTLNQPLTKLDRSSEEPLGVLVNPNMYQSPPQWVDHTGAASQKKAFRSSGFGLEFNSFQHQLRIQDQEFQEGFDGGWCLSVHQPWASLLVRGIKRVEGRSWYTPHRGRLWIAATAKKPSPQEVSELQATYRLLRGKDVEFPNDYPSGCLLGCVDLIDCLSQKQFKEQFPDISQESDSPFVFICKNPQEMVVKFPIKGNPKIWKLDSKIHQGAKKGLMKQNKAV

SEQ ID NO: 799593 - protein, 351 aa, Homo sapiens
MSGVENSGKVDISTKDLLPHQELRIKSGLEKAIKHKDKLLEFDRTSIRRTQVIDDESDYFASDSNQWLSKLERETLQKREEELRELRHASRLSKKVTIDFAGRKILEEENSLAEYHSRLDETIQAIANGTLNQPLTKLDRSSEEPLGVLVNPNMYQSPPQWVDHTGAASQKKAFRSSGFGLEFNSFQHQLRIQDQEFQEGFDGGWCLSVHQPWASLLVRGIKRVEGRSWYTPHRGRLWIAATAKKPSPQEVSELQATYRLLRGKDVEFPNDYPSGCLLGCVDLIDCLSQKQFKEQFPDISQESDSPFVFICKNPQEMVVKFPIKGNPKIWKLDSKIHQGAKKGLMKQNKAV

SEQ ID NO: 799594 - protein, 581 aa, Homo sapiens; identical to SEQ ID NO: 799592

SEQ ID NO: 799595 - protein, 269 aa, Homo sapiens
MAVAGAVSGEPLVHWCTQQLRKTFGLDVSEEIIQYVLSIESAEEIREYVTDLLQGNEGKKGQFIEELITKWQKNDQELISDPLQQCFKKDEILDGQKSGDHLKRGRKKGRNRQEVPAFTEPDTTAEVKTPFDLAKAQENSNSVKKKTKFVNLYTREGQDRLAVLLPGRHPCDCLGQKHKLINNCLICGRIVCEQEGSGPCLFCGTLVCTHEEQDILQRDSNKSQKLLKKLMSVFEGPKSLMMSQITLPVILTNGCPNLSGKPCRSERRS

SEQ ID NO: 799596 - protein, 198 aa, Homo sapiens [sequence omitted]

SEQ ID NO: 799597 - protein, 532 aa, Homo sapiens
MAVAGAVSGEPLVHWCTQQLRKTFGLDVSEEIIQYVLSIESAEEIREYVTDLLQGNEGKKGQFIEELITKWQKNDQELISDPLQQCFKKDEILDGQKSGDHLKRGRKKGRNRQEVPAFTEPDTTAEVKTPFDLAKAQENSNSVKKKTKFVNLYTREGQDRLAVLLPGRHPCDCLGQKHKLINNCLICGRIVCEQEGSGPCLFCGTLVCTHEEQDILQRDSNKSQKLLKKLMSGVENSGKVDISTKDLLPHQELRIKSGLEKAIKHKDKLLEFDRTSIRRTQVIDDESDYFASDSNQWLSKLERETLQKREEELRELRHASRLSKKVTIDFAGRKILEEENSLAEYHSRLDETIQAIANGTLNQPLTKLDRSSEEPLGVLVNPNMYQSPPQWVDHTGAASQKKAFRSSGFGLEFNSFQHQLRIQDQEFQEGFDGGWCLSVHQPWASLLVRGIKRVEGRSWYTPHRGRLWIAATAKKPSPQEVSELQATYRLLRGKEVTAAYSPFNFTLWREVIDVHLLSLPSFFGFFFVKRDF

SEQ ID NO: 799598 - protein, 83 aa, Homo sapiens
KEISESPDSWLFVIKEHSVLILLGGFQFPDISQESDSPFVFICKNPQEMVVKFPIKGNPKIWKLDSKIHQGAKKGLMKQNKAV

SEQ ID NO: 799599 - protein, 86 aa, Homo sapiens
VLRRELVRCRTWGFCSSAGSGWGRWRWLGRCPGSRWCTGAPSSCGRLSAWMSARRSFSENSSGPSGEGALGCALPERTGKRGGLKS

SEQ ID NO: 799600 - protein, 581 aa, Homo sapiens; identical to SEQ ID NO: 799592

SEQ ID NO: 799601 - protein, 579 aa, Homo sapiens
MKFRFPKYFRNHVIQAGEDGGGWGGVRGAAGALVHPAVAEDFRPGCQRGDHSGNEGKKGQFIEELITKWQKNDQELISDPLQQCFKKDEILDGQKSGDHLKRGRKKGRNRQEVPAFTEPDTTAEVKTPFDLAKAQENSNSVKKKTKFVNLYTREGQDRLAVLLPGRHPCDCLGQKHKLINNCLICGRIVCEQEGSGPCLFCGTLVCTHEEQDILQRDSNKSQKLLKKLMSGVENSGKVDISTKDLLPHQELRIKSGLEKAIKHKDKLLEFDRTSIRRTQVIDDESDYFASDSNQWLSKLERETLQKREEELRELRHASRLSKKVTIDFAGRKILEEENSLAEYHSRLDETIQAIANGTLNQPLTKLDRSSEEPLGVLVNPNMYQSPPQWVDHTGAASQKKAFRSSGFGLEFNSFQHQLRIQDQEFQEGFDGGWCLSVHQPWASLLVRGIKRVEGRSWYTPHRGRLWIAATAKKPSPQEVSELQATYRLLRGKDVEFPNDYPSGCLLGCVDLIDCLSQKQFKEQFPDISQESDSPFVFICKNPQEMVVKFPIKGNPKIWKLDSKIHQGAKKGLMKQNKAV

SEQ ID NO: 799602 - protein, 351 aa, Homo sapiens; identical to SEQ ID NO: 799593

SEQ ID NO: 799603 - protein, 537 aa, Homo sapiens
MAVAGAVSGEPLVHWCTQQLRKTFGLDVSEEIIQYVLSIESAEEIREYVTDLLQGNEGKKGQFIEELITKWQKNDQELISDPLQQCFKKDEILDGQKSGDHLKRGRKKGRNRQEVPAFTEPDTTAEVKTPFDLAKAQENSNSVKKKTKFVNLYTREGQDRLAVLLPGRHPCDCLGQKHKLINNCLICGRIVCEQEGSGPCLFCGTLVCTHEEQDILQRDSNKSQKLLKKLMSGVENSGKVDISTKDLLPHQELRIKSGLEKAIKHKDKLLEFDRTSIRRTQVIDDESDYFASDSNQWLSKLERETLQKREEELRELRHASRLSKKVTIDFAGRKILEEENSLAEYHSRLDETIQAIANGTLNQPLTKLDRSSEEPLGVLVNPNMYQSPPQWVDHTGAASQKKAFRSSGFGLEFNSFQHQLRIQDQEFQEGFDGGWCLSVHQPWASLLVRGIKRVEGRSWYTPHRGRLWIAATAKKPSPQEVSELQATYRLLRGKEVTAAYSPFNFTLWREVIDVHLLSLPSSWFSVKKFIWYVGRES

SEQ ID NO: 799604 - protein, 368 aa, Homo sapiens
MAVAGAVSGEPLVHWCTQQLRKTFGLDVSEEIIQYVLSIESAEEIREYVTDLLQGNEGKKGQFIEELITKWQKNDQELISDPLQQCFKKDEILDGQKSGDHLKRGRKKGRNRQEVPAFTEPDTTAEVKTPFDLAKAQENSNSVKKKTKFVNLYTREGQDRLAVLLPGRHPCDCLGQKHKLINNCLICGRIVCEQEGSGPCLFCGTLVCTHEEQDILQRDSNKSQKLLKKLMSGVENSGKVDISTKDLLPHQELRIKSGLEKAIKHKDKLLEFDRTSIRRTQVIDDESDYFASDSNQWLSKLERETLQKREEELRELRHASRLSKKVTIDFAGRKILEEENSLAEYHSSGLTTQVQPHRRRLSVLQDLD

SEQ ID NO: 799605 - protein, 70 aa, Homo sapiens
DTGYELRINSNDFYFPDISQESDSPFVFICKNPQEMVVKFPIKGNPKIWKLDSKIHQGAKKGLMKQNKAV

SEQ ID NO: 799606 - protein, 187 aa, Homo sapiens
MLGWIKRLIRMVFQQVGVSMQSVLWSRKPYGSSRSIVRKIGTNLSLIQCPRVQFQINSHATEWSPSHPGEDAVASFADVGWVAKEEGECSARLRTEVRSRPPLQDDLLFFEKAPSRQISLPDLSQEEPQLKTPALANEEALQKICALENELAALRAQIAKIVTQQEQQNLTAGDLDSTTFGTIQRKK

SEQ ID NO: 799607 - protein, 333 aa, Homo sapiens
MLGWIKRLIRMVFQQVGVSMQSVLWSRKPYGSSRSIVRKIGTNLSLIQCPRVQFQINSHATEWSPSHPGEDAVASFADVGWVAKEEGECSARLRTEVRSRPPLQDDLLFFEKAPSRQISLPDLSQEEPQLKTPALANEEALQKICALENELAALRAQIAKIVTQQEQQNLTAGDLDSTTFGTIPPHPPPPPPPLPPPALGLHQSTSAVDLIKERREKRANAGKTLVKNNPKKPEMPNMLEILKEMNSVKLRSVKRSEQDVKPKPVDATDPAALIAEALKKKFAYRYRSDSQDEVEKGIPKSESEATSERVLFGPHMLKPTGKMKALIENVSDS

SEQ ID NO: 799608 - protein, 333 aa, Homo sapiens; identical to SEQ ID NO: 799607

SEQ ID NO: 799609 - protein, 333 aa, Homo sapiens; identical to SEQ ID NO: 799607

SEQ ID NO: 799610 - protein, 154 aa, Homo sapiens
MLGWIKRLIRMVFQQVGVSMQSVLWSRKPYGSSRSIVRKIGTNLSLIQCPRVQFQINSHATEWSPSHPGEDAVASFADVGWVAKEEGECSARLRTEVRSRPPLQDDLLFFEKAPSRQISLPDLSQEEPQLKTPALANEEALQKICALENELVLI

SEQ ID NO: 799611 - protein, 328 aa, Homo sapiens
MLGWIKRLIRMVFQQVGVSMQSVLWSRKPYGSSRSIVRKIGTNLSLIQCPRVQFQINSHATEWSPSHPGEDAVASFADVGWVAKEEGECSARLRTEVRSRPPLQDDLLFFEKAPSRQISLPDLSQEEPQLKTPALANEEALQKICALENELAALRAQIAKIVTQQEQQNLTAGDLDSTTFGTIPPHPPPPPPPLPPPALGLHQSTSAVDLIKERREKRANAGKTLVKNNPKKPEMPNMLEILKEMNSVKLRSVKRSEQDVKPKPVDATDPAALIAEALKKKFAYRYRSDSQDEVEKGIPKSESEATSERVLSLPAGFIQPHVSKHCLG

SEQ ID NO: 799612 - protein, 328 aa, Homo sapiens; identical to SEQ ID NO: 799611

SEQ ID NO: 799613 - protein, 328 aa, Homo sapiens; identical to SEQ ID NO: 799611

SEQ ID NO: 799614 - protein, 187 aa, Homo sapiens; identical to SEQ ID NO: 799606

SEQ ID NO: 799615 - protein, 333 aa, Homo sapiens; identical to SEQ ID NO: 799607

SEQ ID NO: 799616 - protein, 333 aa, Homo sapiens; identical to SEQ ID NO: 799607

SEQ ID NO: 799617 - protein, 325 aa, Homo sapiens
MQSVLWSRKPYGSSRSIVRKIGTNLSLIQCPRVQFQLCRTGPCWEPSINSHATEWSPSHPGEDAVASFADVGWVAKEEGECSARLRTEVRSRPPLQDDLLFFEKAPSRQISLPDLSQEEPQLKTPALANEEALQKICALENELAALRAQIAKIVTQQEQQNLTAGDLDSTTFGTIPPHPPPPPPPLPPPALGLHQSTSAVDLIKERREKRANAGKTLVKNNPKKPEMPNMLEILKEMNSVKLRSVKRSEQDVKPKPVDATDPAALIAEALKKKFAYRYRSDSQDEVEKGIPKSESEATSERVLFGPHMLKPTGKMKALIENVSDS

SEQ ID NO: 799618 - protein, 143 aa, Homo sapiens [sequence omitted]

SEQ ID NO: 799619 - protein, 371 aa, Homo sapiens
MLGWIKRLIRMVFQQVGVSMQSVLWSRKPYGSSRSIVRKIGTNLSLIQCPRVQFQINSHATEWSPSHPGEDAVASFADVGWVAKEEGECSARLRTEVRSRPPLQDDLLFFEKAPSRQISLPDLSQEEPQLKTPALANEEALQKICALENELAALRAQIAKIVTQQEQQNLTAGDLDSTTFGTIPPHPPPPPPPLPPPALGLHQSTSAVDLIKERREKRANAGKTLVKNNPKKPEMPNMLEILKEMNSVKLRSVKRSEQDVKPKPVDATDPAALIAEALKKKFAYRYRSDSQDEVEKGIPKSESEATSERVLKRLVKVRTCWTRRPMANPTEDKFISLKRIRTMTKTIQTTIIHGRKYCGIYIIKWLRSFFC

SEQ ID NO: 799620 - protein, 328 aa, Homo sapiens; identical to SEQ ID NO: 799611

SEQ ID NO: 799621 - protein, 762 aa, Homo sapiens
MASLLQDQLTTDQDLLLMQEGMPMRKVRSKSWKKLRYFRLQNDGMTVWHARQARGSAKPSFSISDVETIRNGHDSELLRSLAEELPLEQGFTIVFHGRRSNLDLMANSVEEAQIWMRGLQLLVDLVTSMDHQERLDQWLSDWFQRGDKNQDGKMSFQEVQRLLHLMNVEMDQEYAFSLFQAADTSQSGTLEGEEFVQFYKALTKRAEVQELFESFSADGQKLTLLEFLDFLQEEQKERDCTSELALELIDRYEPSDSGKLRHVLSMDGFLSYLCSKDGDIFNPACLPIYQDMTQPLNHYFICSSHNTYLVGDQLCGQSSVEGYIRALKRGCRCVEVDVWDGPSGEPVVYHGHTLTSRILFKDVVATVAQYAFQTSDYPVILSLETHCSWEQQQTMARHLTEILGEQLLSTTLDGVLPTQLPSPEELRRKILVKGKKLTLEEDLEYEEEEAEPELEESELALESQFETEPEPQEQNLQNKDKKKKSKPILCPALSSLVIYLKSVSFRSFTHSKEHYHFYEISSFSETKAKRLIKEAGNEFVQHNTWQLSRVYPSGLRTDSSNYNPQELWNAGCQMVAMNMQTAGLEMDICDGHFRQNGGCGYVLKPDFLRDIQSSFHPEKPISPFKAQTLLIQVISGQQLPKVDKTKEGSIVDPLVKVQIFGVRLDTARQETNYVENNGFNPYWGQTLCFRVLVPELAMLRFVVMDYDWKSRNDFIGQYTLPWTCMQQGYRHIHLLSKDGISLRPASIFVYICIQEGLEGDES

SEQ ID NO: 799622 - protein, 755 aa, Homo sapiens
MANSVEEAQIWMRGLQLLVDLVTSMDHQERLDQYRQDGVRVGVRDTLSLKEPDATGLGKAADTSQSGTLEGEEFVQFYKALTKRAEVQELFESFSADGQKLTLLEFLDFLQEEQKERDCTSELALELIDRYEPSDSGKLRHVLSMDGFLSYLCSKDGDIFNPACLPIYQDMTQPLNHYFICSSHNTYLVGDQLCGQSSVEGYIRALKRGCRCVEVDVWDGPSGEPVVYHGHTLTSRILFKDVVATVAQYAFQTSDYPVILSLETHCSWEQQQTMARHLTEILGEQLLSTTLDGVLPTQLPSPEELRRKILVKGKKLTLEEDLEYEEEEAEPELEESELALESQFETEPEPQEQNLQNKDKKKKSKPILCPALSSLVIYLKSVSFRSFTHSKEHYHFYEISSFSETKAKRLIKEAGQDQNGGMGREVGWIGSGLMDWQVSPKKKDKVAKEDEGVQKLLRADKGRGVMNSGFKGLGAGKLVWMDRVERHSETFWSQLQMLERRVKSRQVLGTREVGDSTPLPSPSLYPFTGNEFVQHNTWQLSRVYPSGLRTDSSNYNPQELWNAGCQMVAMNMQTAGLEMDICDGHFRQNGGCGYVLKPDFLRDIQSSFHPEKPISPFKAQTLLIQVISGQQLPKVDKTKEGSIVDPLVKVQIFGVRLDTARQETNYVENNGFNPYWGQTLCFRVLVPELAMLRFVVMDYDWKSRNDFIGQYTLPWTCMQQGYRHIHLLSKDGISLRPASIFVYICIQEGLEGDES

SEQ ID NO: 799623 - protein, 571 aa, Homo sapiens
MASLLQDQLTTDQDLLLMQEGMPMRKVRSKSWKKLRYFRLQNDGMTVWHARQARGSAKPSFSISDVETIRNGHDSELLRSLAEELPLEQGFTIVFHGRRSNLDLMANSVEEAQIWMRGLQLLVDLVTSMDHQERLDQWLSDWFQRGDKNQDGKMSFQEVQRLLHLMNVEMDQEYAFSLFQAADTSQSGTLEGEEFVQFYKALTKRAEVQELFESFSADGQKLTLLEFLDFLQEEQKERDCTSELALELIDRYEPSDSGKLRHVLSMDGFLSYLCSKDGDIFNPACLPIYQDMTQPLNHYFICSSHNTYLVGDQLCGQSSVEGYIRALKRGCRCVEVDVWDGPSGEPVVYHGHTLTSRILFKDVVATVAQYAFQTSDYPVILSLETHCSWEQQQTMARHLTEILGEQLLSTTLDGVLPTQLPSPEELRRKILVKGKKLTLEEDLEYEEEEAEPELEESELALESQFETEPEPQEQNLQNKDKKKKSKPILCPALSSLVIYLKSVSFRSFTHSKEHYHFYEISSFSETKAKRLIKEAGQDQNGGMGREVGWIGSGLMDWQVSPKKKDKVAKER

SEQ ID NO: 799624 - protein, 571 aa, Homo sapiens; identical to SEQ ID NO: 799623

SEQ ID NO: 799625 - protein, 571 aa, Homo sapiens; identical to SEQ ID NO: 799623

SEQ ID NO: 799626 - protein, 229 aa, Homo sapiens
MLSVDITSRYRAPSTYLLNSLKEGLEGLHGESCSSFLLGPSVAMNMQTAGLEMDICDGHFRQNGGCGYVLKPDFLRDIQSSFHPEKPISPFKAQTLLIQVISGQQLPKVDKTKEGSIVDPLVKVQIFGVRLDTARQETNYVENNGFNPYWGQTLCFRVLVPELAMLRFVVMDYDWKSRNDFIGQYTLPWTCMQQGYRHIHLLSKDGISLRPASIFVYICIQEGLEGDES

SEQ ID NO: 799627 - protein, 785 aa, Homo sapiens
MASLLQDQLTTDQDLLLMQEGMPMRKVRSKSWKKLRYFRLQNDGMTVWHARQARGSAKPSFSISDVETIRNGHDSELLRSLAEELPLEQGFTIVFHGRRSNLDLMANSVEEAQIWMRGLQLLVDLVTSMDHQERLDQWLSDWFQRGDKNQDGKMSFQEVQRLLHLMNVEMDQEYAFSLFQAADTSQSGTLEGEEFVQFYKALTKRAEVQELFESFSADGQKLTLLEFLDFLQEEQKERDCTSELALELIDRYEPSDSGKLRHVLSMDGFLSYLCSKDGDIFNPACLPIYQDMTQPLNHYFICSSHNTYLVGDQLCGQSSVEGYIRALKRGCRCVEVDVWDGPSGEPVVYHGHTLTSRILFKDVVATVAQYAFQTSDYPVILSLETHCSWEQQQTMARHLTEILGEQLLSTTLDGVLPTQLPSPEELRRKILVKGKKLTLEEDLEYEEEEAEPELEESELALESQFETEPEPQEQNLQNKDKKKKSKPILCPALSSLVIYLKSVSFRSFTHSKEHYHFYEISSFSETKAKRLIKEAGQDQNGGMGREVGWIGSGLMELAGNEFVQHNTWQLSRVYPSGLRTDSSNYNPQELWNAGCQMVAMNMQTAGLEMDICDGHFRQNGGCGYVLKPDFLRDIQSSFHPEKPISPFKAQTLLIQVISGQQLPKVDKTKEGSIVDPLVKVQIFGVRLDTARQETNYVENNGFNPYWGQTLCFRVLVPELAMLRFVVMDYDWKSRNDFIGQYTLPWTCMQQGYRHIHLLSKDGISLRPASIFVYICIQEGLEGDES

SEQ ID NO: 799628 - protein, 571 aa, Homo sapiens; identical to SEQ ID NO: 799623

SEQ ID NO: 799629 - protein, 571 aa, Homo sapiens; identical to SEQ ID NO: 799623

SEQ ID NO: 799630 - protein, 571 aa, Homo sapiens; identical to SEQ ID NO: 799623

SEQ ID NO: 799631 - protein, 494 aa, Homo sapiens
MASLLQDQLTTDQDLLLMQEGMPMRKVRSKSWKKLRYFRLQNDGMTVWHARQARGSAKPSFSISDVETIRNGHDSELLRSLAEELPLEQGFTIVFHGRRSNLDLMANSVEEAQIWMRGLQLLVDLVTSMDHQERLDQWLSDWFQRGDKNQDGKMSFQEVQRLLHLMNVEMDQEYAFSLFQAADTSQSGTLEGEEFVQFYKALTKRAEVQELFESFSADGQKLTLLEFLDFLQEEQKERDCTSELALELIDRYEPSDSGKLRHVLSMDGFLSYLCSKDGDIFNPACLPIYQDMTQPLNHYFICSSHNTYLVGDQLCGQSSVEGYIRALKRGCRCVEVDVWDGPSGEPVVYHGHTLTSRILFKDVVATVAQYAFQTSDYPVILSLETHCSWEQQQTMARHLTEILGEQLLSTTLDGVLPTQLPSPEELRRKILVKGKKLTLEEDLEYEEEEAEPELEESELALESQFETEPEPQEQNLQNKDKKKVSQEWSFCCGI

SEQ ID NO: 799632 - protein, 365 aa, Homo sapiens
MGVPRPQPWALGLLLFLLPGSLGAESHLSLLYHLTAVSSPAPGTPAFWVSGWLGPQQYLSYNSLRGEAEPCGAWVWENQVSWYWEKETTDLRIKEKLFLEAFKALGGKGPYTLQGLLGCELGPDNTSVPTAKFALNGEEFMNFDLKQGTWGGDWPEALAISQRWQQQDKAANKELTFLLFSCPHRLREHLERGRGNLEWKEPPSMRLKARPSSPGFSVLTCSAFSFYPPELQLRFLRNGLAAGTGQGDFGPNSDGSFHASSSLTVKSGDEHHYCCIVQHAGLAQPLRVELESPAKSSVLVVGIVIGVLLLTAAAVGGALLWRRMRSGLPAPWISLRGDDTGVLLPTPGEAQDADLKDVNVIPATA

SEQ ID NO: 799633 - protein, 429 aa, Homo sapiens
MRLYGGILGFFRYEEGIVVSLDRARRAPPRRPGPGRARGVPGGRGGPGVGRSHVPPPAPGRPLSMGVPRPQPWALGLLLFLLPGSLGAESHLSLLYHLTAVSSPAPGTPAFWVSGWLGPQQYLSYNSLRGEAEPCGAWVWENQVSWYWEKETTDLRIKEKLFLEAFKALGGKGPYTLQGLLGCELGPDNTSVPTAKFALNGEEFMNFDLKQGTWGGDWPEALAISQRWQQQDKAANKELTFLLFSCPHRLREHLERGRGNLEWKEPPSMRLKARPSSPGFSVLTCSAFSFYPPELQLRFLRNGLAAGTGQGDFGPNSDGSFHASSSLTVKSGDEHHYCCIVQHAGLAQPLRVELESPAKSSVLVVGIVIGVLLLTAAAVGGALLWRRMRSGLPAPWISLRGDDTGVLLPTPGEAQDADLKDVNVIPATA

SEQ ID NO: 799634 - protein, 365 aa, Homo sapiens; identical to SEQ ID NO: 799632

SEQ ID NO: 799635 - protein, 361 aa, Homo sapiens
MGVPRPQPWALGLLLFLLPGSLGAESHLSLLYHLTAVSSPAPGTPAFWVSGWLGPQQYLSYNSLRGEAEPCGAWVWENQVSWYWEKETTDLRIKEKLFLEAFKALGGKGPYTLQGLLGCELGPDNTSVPTAKFALNGEEFMNFDLKQGTWGGDWPEALAISQRWQQQDKAANKELTFLLFSCPHRLREHLERGRGNLEWKEPPSMRLKARPSSPGFSVLTCSAFSFYPPELQLRFLRNGLAAGTGQGDFGPNSDGSFHASSSLTVKSGDEHHYCCIVQHAGLAQPLRVELGEVPPGGDAPGFPLPCLTAAPVLPESDLPPHCCHLLESDCLEPHACQCPQNLMACPSQGQLPSVSCCFWPH

SEQ ID NO: 799636 - protein, 349 aa, Homo sapiens
GSETQLKEQSHLSLLYHLTAVSSPAPGTPAFWVSGWLGPQQYLSYNSLRGEAEPCGAWVWENQVSWYWEKETTDLRIKEKLFLEAFKALGGKGPYTLQGLLGCELGPDNTSVPTAKFALNGEEFMNFDLKQGTWGGDWPEALAISQRWQQQDKAANKELTFLLFSCPHRLREHLERGRGNLEWKEPPSMRLKARPSSPGFSVLTCSAFSFYPPELQLRFLRNGLAAGTGQGDFGPNSDGSFHASSSLTVKSGDEHHYCCIVQHAGLAQPLRVELESPAKSSVLVVGIVIGVLLLTAAAVGGALLWRRMRSGLPAPWISLRGDDTGVLLPTPGEAQDADLKDVNVIPATA

SEQ ID NO: 799637 - protein, 390 aa, Homo sapiens
MGVPRPQPWALGLLLFLLPGSLGAESHLSLLYHLTAVSSPAPGTPAFWVSGWLGPQQYLSYNSLRGEAEPCGAWVWENQVSWYWEKETTDLRIKEKLFLEAFKALGGKVRFRSGGARGRVHAPGPRLLCLGAPGPYTLQGLLGCELGPDNTSVPTAKFALNGEEFMNFDLKQGTWGGDWPEALAISQRWQQQDKAANKELTFLLFSCPHRLREHLERGRGNLEWKEPPSMRLKARPSSPGFSVLTCSAFSFYPPELQLRFLRNGLAAGTGQGDFGPNSDGSFHASSSLTVKSGDEHHYCCIVQHAGLAQPLRVELESPAKSSVLVVGIVIGVLLLTAAAVGGALLWRRMRSGLPAPWISLRGDDTGVLLPTPGEAQDADLKDVNVIPATA

SEQ ID NO: 799638 - protein, 291 aa, Homo sapiens
GTFSPKALKASTKSFSGSLDLWSLSPNTRTPGFPSPYTLQGLLGCELGPDNTSVPTAKFALNGEEFMNFDLKQGTWGGDWPEALAISQRWQQQDKAANKELTFLLFSCPHRLREHLERGRGNLEWKEPPSMRLKARPSSPGFSVLTCSAFSFYPPELQLRFLRNGLAAGTGQGDFGPNSDGSFHASSSLTVKSGDEHHYCCIVQHAGLAQPLRVELESPAKSSVLVVGIVIGVLLLTAAAVGGALLWRRMRSGLPAPWISLRGDDTGVLLPTPGEAQDADLKDVNVIPATA

SEQ ID NO: 799639 - protein, 272 aa, Homo sapiens
QYPGCKLSHARVEGKGPYTLQGLLGCELGPDNTSVPTAKFALNGEEFMNFDLKQGTWGGDWPEALAISQRWQQQDKAANKELTFLLFSCPHRLREHLERGRGNLEWKEPPSMRLKARPSSPGFSVLTCSAFSFYPPELQLRFLRNGLAAGTGQGDFGPNSDGSFHASSSLTVKSGDEHHYCCIVQHAGLAQPLRVELESPAKSSVLVVGIVIGVLLLTAAAVGGALLWRRMRSGLPAPWISLRGDDTGVLLPTPGEAQDADLKDVNVIPATA

SEQ ID NO: 799640 - protein, 225 aa, Homo sapiens
MGVPRPQPWALGLLLFLLPGSLGAESHLSLLYHLTAVSSPAPGTPAFWVSGWLGPQQYLSYNSLRGEAEPCGAWVWENQVSWYWEKETTDLRIKEKLFLEAFKALGGKGPYTLQGLLGCELGPDNTSVPTAKFALNGEEFMNFDLKQGTWGGDWPEALAISQRWQQQDKAANKELTFLLFSCPHRLREHLERGRGNLEWKDTVSHYVAQAGLELLGSSDSPALVS

SEQ ID NO: 799641 - protein, 348 aa, Homo sapiens
MGVPRPQPWALGLLLFLLPGSLGAESHLSLLYHLTAVSSPAPGTPAFWVSGWLGPQQYLSYNSLRGEAEPCGAWVWENQVSWYWEKETTDLRIKEKLFLEAFKALGGKASVPTAKFALNGEEFMNFDLKQGTWGGDWPEALAISQRWQQQDKAANKELTFLLFSCPHRLREHLERGRGNLEWKEPPSMRLKARPSSPGFSVLTCSAFSFYPPELQLRFLRNGLAAGTGQGDFGPNSDGSFHASSSLTVKSGDEHHYCCIVQHAGLAQPLRVELESPAKSSVLVVGIVIGVLLLTAAAVGGALLWRRMRSGLPAPWISLRGDDTGVLLPTPGEAQDADLKDVNVIPATA

SEQ ID NO: 799642 - protein, 161 aa, Homo sapiens
MRLKARPSSPGFSVLTCSAFSFYPPELQLRFLRNGLAAGTGQGDFGPNSDGSFHASSSLTVKSGDEHHYCCIVQHAGLAQPLRVELESPAKSSVLVVGIVIGVLLLTAAAVGGALLWRRMRSGLPAPWISLRGDDTGVLLPTPGEAQDADLKDVNVIPATA

SEQ ID NO: 799643 - protein, 365 aa, Homo sapiens; identical to SEQ ID NO: 799632

SEQ ID NO: 799644 - protein, 365 aa, Homo sapiens; identical to SEQ ID NO: 799632

SEQ ID NO: 799645 - protein, 449 aa, Homo sapiens
MGVPRPQPWALGLLLFLLPGSLGAESHLSLLYHLTAVSSPAPGTPAFWVSGWLGPQQYLSYNSLRGEAEPCGAWVWENQVSWYWEKETTDLRIKEKLFLEAFKALGGKGPYTLQGLLGCELGPDNTSVPTAKFALNGEEFMNFDLKQGTWGGDWPEALAISQRWQQQDKAANKELTFLLFSCPHRLREHLERGRGNLEWKDTVSHYVAQAGLELLGSSDFSCFGLLSELRLQALALLPRLECSSGIRVHCSLNLPSSSDPPTLPFLNGMGPQEPPSMRLKARPSSPGFSVLTCSAFSFYPPELQLRFLRNGLAAGTGQGDFGPNSDGSFHASSSLTVKSGDEHHYCCIVQHAGLAQPLRVELESPAKSSVLVVGIVIGVLLLTAAAVGGALLWRRMRSGLPALLWRRMRSGLPAPWISLRGDDTGVLLPTPGEAQDADLKDVNVIPATA

SEQ ID NO: 799646 - protein, 364 aa, Homo sapiens
  misc_feature (330)..(330): Xaa can be any naturally occurring amino acid
  misc_feature (332)..(332): Xaa can be any naturally occurring amino acid
  misc_feature (335)..(335): Xaa can be any naturally occurring amino acid
  misc_feature (337)..(339): Xaa can be any naturally occurring amino acid
  misc_feature (344)..(344): Xaa can be any naturally occurring amino acid
MGVPRPQPWALGLLLFLLPGSLGAESHLSLLYHLTAVSSPAPGTPAFWVSGWLGPQQYLSYNSLRGEAEPCGAWVWENQVSWYWEKETTDLRIKEKLFLEAFKALGGKGPYTLQGLLGCELGPDNTSVPTAKFALNGEEFMNFDLKQGTWGGDWPEALAISQRWQQQDKAANKELTFLLFSCPHRLREHLERGRGNLEWKEPPSMRLKARPSSPGFSVLTCSAFSFYPPELQLRFLRNGLAAGTGQGDFGPNSDGSFHASSSLTVKSGDEHHYCCIVQHAGLAQPLRVELESPAKSSVLVVGIVIGVLLLTAAAVGGALLWRRMRSGLPXAXLGXPXXXKRGLXPPREANVIEDVIDHHADIAF

SEQ ID NO: 799647 - protein, 361 aa, Homo sapiens; identical to SEQ ID NO: 799635

SEQ ID NO: 799648 - protein, 150 aa, Homo sapiens
  misc_feature (87)..(87): Xaa can be any naturally occurring amino acid
  misc_feature (91)..(91): Xaa can be any naturally occurring amino acid
TTTTTTTKFAAASTLREDDRRGSGPSCPPSGAPSCGLPQFPLLIHMAVFHLDNITRVWARKKKEEKKKKSYRMSADMMMECRPGNSXPVLXGRPASFGRSRLNAGANNGQNCFLVGKKFGIRSPIHTTYHPGIKRGKPGGAKGGELLTFF

SEQ ID NO: 799649 - protein, 102 aa, Homo sapiens
TTTTTTTKFAAASTLREDDRQPLRVELESPAKSSVLVVGIVIGVLLLTAAAVGGALLWRRMRSGLPAPWISLRGDDTGVLLPTPGEAQDADLKDVNVIPATA

SEQ ID NO: 799650 - protein, 365 aa, Homo sapiens; identical to SEQ ID NO: 799632

SEQ ID NO: 799651 - protein, 365 aa, Homo sapiens; identical to SEQ ID NO: 799632

SEQ ID NO: 799652 - protein, 225 aa, Homo sapiens
MNFDLKQGTWGGDWPEALAISQRWQQQDKAANKELTFLLFSCPHRLREHLERGRGNLEWKEPPSMRLKARPSSPGFSVLTCSAFSFYPPELQLRFLRNGLAAGTGQGDFGPNSDGSFHASSSLTVKSGDEHHYCCIVQHAGLAQPLRVELESPAKSSVLVVGIVIGVLLLTAAAVGGALLWRRMRSGLPAPWISLRGDDTGVLLPTPGEAQDADLKDVNVIPATA

SEQ ID NO: 799653 - protein, 385 aa, Homo sapiens
LPWLIQRTPPNGKPEKILLPPWVSVPLQSSSPPVCSLQLLFLSAESHLSLLYHLTAVSSPAPGTPAFWVSGWLGPQQYLSYNSLRGEAEPCGAWVWENQVSWYWEKETTDLRIKEKLFLEAFKALGGKGPYTLQGLLGCELGPDNTSVPTAKFALNGEEFMNFDLKQGTWGGDWPEALAISQRWQQQDKAANKELTFLLFSCPHRLREHLERGRGNLEWKEPPSMRLKARPSSPGFSVLTCSAFSFYPPELQLRFLRNGLAAGTGQGDFGPNSDGSFHASSSLTVKSGDEHHYCCIVQHAGLAQPLRVELESPAKSSVLVVGIVIGVLLLTAAAVGGALLWRRMRSGLPAPWISLRGDDTGVLLPTPGEAQDADLKDVNVIPATA

SEQ ID NO: 799654 - protein, 539 aa, Homo sapiens
MGVPRPQPWALGLLLFLLPGSLGAESHLSLLYHLTAVSSPAPGTPAFWVSGWLGPQQYLSYNSLRGEAEPCGAWVWENQVSWYWEKETTDLRIKEKLFLEAFKALGGKGPYTLQGLLGCELGPDNTSVPTAKFALNGEEFMNFDLKQGTWGGDWPEALAISQRWQQQDKAANKELTFLLFSCPHRLREHLERGRGNLEWKEPKARQIFCAWISVYIGSTLRLKARGCEHDTGRYRFAEKKVNIKQKPELLMAVSPVPPFHLTVQQILPTCQRGSSRREKLLCFPEAANVFSAEQTKTKIPAKTHDCPDPPSLKGTWAVMPSPRQLLKSLPFIFFFELGSCSVAQTGVECSGTVIAPCSLGLPSSRDPPASALQVAGTIEPPSMRLKARPSSPGFSVLTCSAFSFYPPELQLRFLRNGLAAGTGQGDFGPNSDGSFHASSSLTVKSGDEHHYCCIVQHAGLAQPLRVELGEVPPGGDAPGFPLPCLTAAPVLPESDLPPHCCHLLESDCLEPHACQCPQNLMACPSQGQLPSVSCCFWPH

SEQ ID NO: 799655 - protein, 403 aa, Homo sapiens
MGVPRPQPWALGLLLFLLPGSLGAESHLSLLYHLTAVSSPAPGTPAFWVSGWLGPQQYLSYNSLRGEAEPCGAWVWENQVSWYWEKETTDLRIKEKLFLEAFKALGGKGPYTLQGLLGCELGPDNTSVPTAKFALNGEEFMNFDLKQGTWGGDWPEALAISQRWQQQDKAANKELTFLLFSCPHRLREHLERGRGNLEWKAGILLCRPDWSGVQWHSHSACSLGLPSSRDPPASALQVAGTIEPPSMRLKARPSSPGFSVLTCSAFSFYPPELQLRFLRNGLAAGTGQGDFGPNSDGSFHASSSLTVKSGDEHHYCCIVQHAGLAQPLRVELGEVPPGGDAPGFPLPCLTAAPVLPESDLPPHCCHLLESDCLEPHACQCPQNLMACPSQGQLPSVSCCFWPH

SEQ ID NO: 799656 - protein, 157 aa, Homo sapiens [sequence omitted]

SEQ ID NO: 799657 - protein, 157 aa, Homo sapiens [sequence omitted]

SEQ ID NO: 799658 - protein, 365 aa, Homo sapiens; identical to SEQ ID NO: 799632

SEQ ID NO: 799659 - protein, 225 aa, Homo sapiens
  misc_feature (16)..(16): Xaa can be any naturally occurring amino acid
  misc_feature (21)..(21): Xaa can be any naturally occurring amino acid
  misc_feature (26)..(26): Xaa can be any naturally occurring amino acid
  misc_feature (28)..(28): Xaa can be any naturally occurring amino acid
  misc_feature (35)..(36): Xaa can be any naturally occurring amino acid
  misc_feature (42)..(42): Xaa can be any naturally occurring amino acid
  misc_feature (51)..(51): Xaa can be any naturally occurring amino acid
  misc_feature (69)..(69): Xaa can be any naturally occurring amino acid
CSQAVARRQEQGRAKXGGSAXPAIAXCXRSPAGGXXPGRGGXRKTLDVGRXPPAAIGALEGRRSRRQAXGLFAVAIAWHARLLRLLAPPELQLRFLRNGLAAGTGQGDFGPNSDGSFHASSSLTVKSGDEHHYCCIVQHAGLAQPLRVELESPAKSSVLVVGIVIGVLLLTAAAVGGALLWRRMRSGLPAPWISLRGDDTGVLLPTPGEAQDADLKDVNVIPATA

SEQ ID NO: 799660 - protein, 361 aa, Homo sapiens; identical to SEQ ID NO: 799635

SEQ ID NO: 799661 - protein, 361 aa, Homo sapiens; identical to SEQ ID NO: 799635

SEQ ID NO: 799662 - protein, 206 aa, Homo sapiens
MGVPRPQPWALGLLLFLLPGSLGAESHLSLLYHLTAVSSPAPGTPAFWVSGWLGPQQYLSYNSLRGEAEPCGAWVWENQVSWYWEKETTDLRIKEKLFLEAFKALGGKGPYTLQGLLGCELGPDNTSVPTAKFALNGEEFMNFDLKQGTWGGDWPEALAISQRWQQQDKAANKELTFLLFSCPHRLREHLERGRGNLEWKGTCTVA

SEQ ID NO: 799663 - protein, 253 aa, Homo sapiens [sequence omitted]

SEQ ID NO: 799664 - protein, 150 aa, Homo sapiens
MRCAEGAWWFSPDGPAGSAASIWPAEGAEGLPGQLGRDRLEVVYSVPDNVPGQNGSRRPLVCKITGKCLSVCSEENAKAGGCSAFPLLLSQLGARMTGREHAHKGPELTTPDSGLPRPPNPALAGFRALAQHSPPLGTSTPSAVLLSAAT

SEQ ID NO: 799665 - protein, 109 aa, Homo sapiens
MRCAEGAWWFSPDGPAGSAASIWPAEGAEGLPGQLGRDRLEVVYSVPDNVPGQNGSRRPLVCKITGKCLSVCSEENAKAGGCSAFPLLLSQLGARMTGREHAHKGPELT

SEQ ID NO: 799666 - protein, 133 aa, Homo sapiens
FVPSRLMLKAMRNFLAPVAVAPQLGTKELGPKSGAQSACWSCEQVRSGNRKQPHKYNGREKEKLVNPHTSVTVTWALRRDFLRGDWHDRDGGYVCPACRRDRDGGYVCPARWRDCDLRPCLGISFQERWVGAA

SEQ ID NO: 799667 - protein, 541 aa, Homo sapiens
MLSPQRVAAAASRGADDAMESSKPGPVQVVLVQKDQHSFELDEKALASILLQDHIRDLDVVVVSVAGAFRKGKSFILDFMLRYLYSQKESGHSNWLGDPEEPLTGFSWRGGSDPETTGIQIWSEVFTVEKPGGKKVAVVLMDTQGAFDSQSTVKDCATIFALSTMTSSVQIYNLSQNIQEDDLQQLQLFTEYGRLAMDEIFQKPFQTLMFLVRDWSFPYEYSYGLQGGMAFLDKRLQVKEHQHEEIQNVRNHIHSCFSDVTCFLLPHPGLQVATSPDFDGKLKDIAGEFKEQLQALIPYVLNPSKLMEKEINGSKVTCRGLLEYFKAYIKIYQGEDLPHPKSMLQATAEANNLAAAASAKDIYYNNMEEVCGGEKPYLSPDILEEKHCEFKQLALDHFKKTKKMGGKDFSFRYQQELEEEIKELYENFCKHNGSKNVFSTFRTPAVLFTGIVALYIASGLTGFIGLEVVAQLFNCMVGLLLIALLTWGYIRYSGQYRELGGAIDFGAAYVLEQASSHIGNSTQATVRDAVVGRPSMDKKAQ

SEQ ID NO: 799668 - protein, 541 aa, Homo sapiens; identical to SEQ ID NO: 799667

SEQ ID NO: 799669 - protein, 593 aa, Homo sapiens
MRTAGRDPVSAGLQFPKDGSTQRPANRARFVPARTRPSPLHPCCFCFEGGGSMLSPQRVAAAASRGADDAMESSKPGPVQVVLVQKDQHSFELDEKALASILLQDHIRDLDVVVVSVAGAFRKGKSFILDFMLRYLYSQKESGHSNWLGDPEEPLTGFSWRGGSDPETTGIQIWSEVFTVEKPGGKKVAVVLMDTQGAFDSQSTVKDCATIFALSTMTSSVQIYNLSQNIQEDDLQQLQLFTEYGRLAMDEIFQKPFQTLMFLVRDWSFPYEYSYGLQGGMAFLDKRLQVKEHQHEEIQNVRNHIHSCFSDVTCFLLPHPGLQVATSPDFDGKLKDIAGEFKEQLQALIPYVLNPSKLMEKEINGSKVTCRGLLEYFKAYIKIYQGEDLPHPKSMLQATAEANNLAAAASAKDIYYNNMEEVCGGEKPYLSPDILEEKHCEFKQLALDHFKKTKKMGGKDFSFRYQQELEEEIKELYENFCKHNGSKNVFSTFRTPAVLFTGIVALYIASGLTGFIGLEVVAQLFNCMVGLLLIALLTWGYIRYSGQYRELGGAIDFGAAYVLEQASSHIGNSTQATVRDAVVGRPSMDKKAQ

SEQ ID NO: 799670 - protein, 605 aa, Homo sapiens
  misc_feature (21)..(21): Xaa can be any naturally occurring amino acid
RALEKTSQKVGHADRDGSERXGSAWPNGQPRLRPFPASRARFVPARTRPSPLHPCCFCFEGGGSMLSPQRVAAAASRGADDAMESSKPGPVQVVLVQKDQHSFELDEKALASILLQDHIRDLDVVVVSVAGAFRKGKSFILDFMLRYLYSQKESGHSNWLGDPEEPLTGFSWRGGSDPETTGIQIWSEVFTVEKPGGKKVAVVLMDTQGAFDSQSTVKDCATIFALSTMTSSVQIYNLSQNIQEDDLQQLQLFTEYGRLAMDEIFQKPFQTLMFLVRDWSFPYEYSYGLQGGMAFLDKRLQVKEHQHEEIQNVRNHIHSCFSDVTCFLLPHPGLQVATSPDFDGKLKDIAGEFKEQLQALIPYVLNPSKLMEKEINGSKVTCRGLLEYFKAYIKIYQGEDLPHPKSMLQATAEANNLAAAASAKDIYYNNMEEVCGGEKPYLSPDILEEKHCEFKQLALDHFKKTKKMGGKDFSFRYQQELEEEIKELYENFCKHNGSKNVFSTFRTPAVLFTGIVALYIASGLTGFIGLEVVAQLFNCMVGLLLIALLTWGYIRYSGQYRELGGAIDFGAAYVLEQASSHIGNSTQATVRDAVVGRPSMDKKAQ

SEQ ID NO: 799671 - protein, 523 aa, Homo sapiens
MESSKPGPVQVVLVQKDQHSFELDEKALASILLQDHIRDLDVVVVSVAGAFRKGKSFILDFMLRYLYSQKESGHSNWLGDPEEPLTGFSWRGGSDPETTGIQIWSEVFTVEKPGGKKVAVVLMDTQGAFDSQSTVKDCATIFALSTMTSSVQIYNLSQNIQEDDLQQLQLFTEYGRLAMDEIFQKPFQTLMFLVRDWSFPYEYSYGLQGGMAFLDKRLQVKEHQHEEIQNVRNHIHSCFSDVTCFLLPHPGLQVATSPDFDGKLKDIAGEFKEQLQALIPYVLNPSKLMEKEINGSKVTCRGLLEYFKAYIKIYQGEDLPHPKSMLQATAEANNLAAAASAKDIYYNNMEEVCGGEKPYLSPDILEEKHCEFKQLALDHFKKTKKMGGKDFSFRYQQELEEEIKELYENFCKHNGSKNVFSTFRTPAVLFTGIVALYIASGLTGFIGLEVVAQLFNCMVGLLLIALLTWGYIRYSGQYRELGGAIDFGAAYVLEQASSHIGNSTQATVRDAVVGRPSMDKKAQ

SEQ ID NO: 799672 - protein, 32 aa, Homo sapiens
MYDFTYWLTFGDLRSITYGVLIPVKNLALQHR

SEQ ID NO: 799673 - protein, 541 aa, Homo sapiens; identical to SEQ ID NO: 799667

SEQ ID NO: 799674 - protein, 531 aa, Homo sapiens
MLSPQRVAAAASRGADDAMESSKPGPVQVVLVQKDQHSFELDEKALASILLQDHIRDLDVVVVSVAGAFRKGKSFILDFMLRYLYSQKESGHSNWLGDPEEPLTGFSWRGGSDPETTGIQIWSEVFTVEKPGGKKVAVVLMDTQGAFDSQSTVKDCATIFALSTMTSSVQIYNLSQNIQEDDLQQLQLFTEYGRLAMDEIFQKPFQTLMFLVRDWSFPYEYSYGLQGGMAFLDKRLQVKEHQHEEIQNVRNHIHSCFSDVTCFLLPHPGLQVATSPDFDGKLKDIAGEFKEQLQALIPYVLNPSKLMEKEINGSKVTCRGLLEYFKAYIKIYQGEDLPHPKSMLQATAEANNLAAAASAKDIYYNNMEEVCGGEKPYLSPDILEEKHCEFKQLALDHFKKTKKMGGKDFSFRYQQELEEEIKELYENFCKHNGSKNVFSTFRTPAVLFTGIVALYIASGLTGFIGLEVVAQLFNCMVGLLLIALLTWGYIRYSGQYRELGGAIDFGAAYVLEQASSPYAVFNLTRPLEGWS

SEQ ID NO: 799675 - protein, 167 aa, Homo sapiens
MARTKQTARKSTGGKAPRKQLATKAARKSAPSTGGVKKPHRYRPGTVALREIRRYQKSTELLIRKLPFQRLVREIAQDFKTDLRFQSAATSGALQEASEAYLVGLFEDTNPVCYPCQTCNNYAKRHPASTPHTWRTCLRIHYDGKHFILKKKKKKISLLPVIGSSER

SEQ ID NO: 799676 - protein, 102 aa, Homo sapiens
MARTKQTARKSTGGKAPRKQLATKAARKSAPSTGGVKKPHRYRPGTVALREIRRYQKSTELLIRKLPFQRLVREIAQDFKTDLRFQSAATSGALQGKMVGGK

SEQ ID NO: 799677 - protein, 167 aa, Homo sapiens; identical to SEQ ID NO: 799675

SEQ ID NO: 799678 - protein, 167 aa, Homo sapiens; identical to SEQ ID NO: 799675

SEQ ID NO: 799679 - protein, 167 aa, Homo sapiens; identical to SEQ ID NO: 799675

SEQ ID NO: 799680 - protein, 246 aa, Homo sapiens
LDEDKEGELQVAGPGQRVQTCWGLGVEVLVVRVSKDLGQLLVRHVGELSEVQEVEVDLGQLLVRHVGELSEVQEVEVDLQRGDAAQRLPPLRDLQEPRCWYWDAPDLLLHRRVAIVPCPLGWDAQRSLRHLSLLERSLAAAPAGVLLFSSRYLRVGRRLCAGAPRGWRGAQEGPDSRWVMTPPSLSNASAASRSPSSSRRRRGVSKEVSVPWLVQSRLPANRPVVKHPGSNWLQKPLARVRPLLEG

SEQ ID NO: 799681 - protein, 167 aa, Homo sapiens; identical to SEQ ID NO: 799675

SEQ ID NO: 799682 - protein, 175 aa, Homo sapiens
MARTKQTARKSTGGKAPRKQLATKAARKSAPSTGGVKKPHRYRPGTVALREIRRYQKSTELLIRKLPFQRLVREIAQDFKTDLRFQSAATSGALQEASEAYLVGLFEDTNPVCYPCQTCNNYAKRHPASTPHTWRTCLRIHYDGKHFILKKKKKKGLSPQISRNYGMKPWTCQKD

SEQ ID NO: 799683 - protein, 201 aa, Homo sapiens
MARTKQTARKSTGGKAPRKQLATKAARKSAPSTGGVKKPHRYRPGTVALREIRRYQKSTELLIRKLPFQRLVREIAQDFKTDLRFQSAATSGALQEASEAYLVGLFEDTNPVCYPCQTCNNYAKRHPASTPHTWRTCLRIHYDGKHFILKKKKKKQKTKKKTPRALLMRGGENGCSVKGPWGQRCFPWPPVSLFHKVGTFR

SEQ ID NO: 799684 - protein, 167 aa, Homo sapiens; identical to SEQ ID NO: 799675

SEQ ID NO: 799685 - protein, 167 aa, Homo sapiens; identical to SEQ ID NO: 799675

SEQ ID NO: 799686 - protein, 167 aa, Homo sapiens
GDLEDPSARKSTGGKAPRKQLATKAARKSAPSTGGVKKPHRYRPGTVALREIRRYQKSTELLIRKLPFQRLVREIAQDFKTDLRFQSAATSGALQEASEAYLVGLFEDTNPVCYPCQTCNNYAKRHPASTPHTWRTCLRIHYDGKHFILKKKKKKISLLPVIGSSER

SEQ ID NO: 799687 - protein, 155 aa, Homo sapiens
ENEMFPIIVATKAARKSAPSTGGVKKPHRYRPGTVALREIRRYQKSTELLIRKLPFQRLVREIAQDFKTDLRFQSAATSGALQEASEAYLVGLFEDTNPVCYPCQTCNNYAKRHPASTPHTWRTCLRIHYDGKHFILKKKKKKISLLPVIGSSER

SEQ ID NO: 799688 - protein, 133 aa, Homo sapiens
LLTRLICFTPGTVALREIRRYQKSTELLIRKLPFQRLVREIAQDFKTDLRFQSAATSGALQEASEAYLVGLFEDTNPVCYPCQTCNNYAKRHPASTPHTWRTCLRIHYDGKHFILKKKKKKISLLPVIGSSER

SEQ ID NO: 799689 - protein, 121 aa, Homo sapiens
MARTKQTARKSTGGKAPRKQLATKAARKSAPSTGGVKKPHRYRPGTVALREIRRYQKSTELLIRKLPFQRLVREIAQDLRQVRPIWLAFLKTPTLCAIHAKRVTIMPKDIQLARRIRGERA

SEQ ID NO: 799690 - protein, 114 aa, Homo sapiens
  misc_feature (94)..(94): Xaa can be any naturally occurring amino acid
  misc_feature (109)..(109): Xaa can be any naturally occurring amino acid
MARTKQTARKSTGGKAPRKQLATKAARKSAPSTGGVKKPHRYRPGTVALREIRRYQKSTELLIRKLPFQRLVTPEGFSTRSMPSDARSHGSPAXLLLLLLLLLLPVGPXPLVVT

SEQ ID NO: 799691 - protein, 167 aa, Homo sapiens; identical to SEQ ID NO: 799675

SEQ ID NO: 799692 - protein, 167 aa, Homo sapiens; identical to SEQ ID NO: 799675

SEQ ID NO: 799693 - protein, 201 aa, Homo sapiens; identical to SEQ ID NO: 799683

SEQ ID NO: 799694 - protein, 146 aa, Homo sapiens
  misc_feature (11)..(11): Xaa can be any naturally occurring amino acid
  misc_feature (14)..(14): Xaa can be any naturally occurring amino acid
GLMKNNPGPPXEVXISSTTALAPGTVALREIRRYQKSTELLIRKLPFQRLVREIAQDFKTDLRFQSAATSGALQEASEAYLVGLFEDTNPVCYPCQTCNNYAKRHPASTPHTWRTCLRIHYDGKHFILKKKKKKISLLPVIGSSER

SEQ ID NO: 799695 - protein, 167 aa, Homo sapiens; identical to SEQ ID NO: 799675

SEQ ID NO: 799696 - protein, 167 aa, Homo sapiens; identical to SEQ ID NO: 799675

SEQ ID NO: 799697 - protein, 167 aa, Homo sapiens; identical to SEQ ID NO: 799675

SEQ ID NO: 799698 - protein, 167 aa, Homo sapiens; identical to SEQ ID NO: 799675

SEQ ID NO: 799699 - protein, 167 aa, Homo sapiens; identical to SEQ ID NO: 799675

SEQ ID NO: 799700 - protein, 157 aa, Homo sapiens
MARTKQTARKSTGGKAPRKQLATKAARKSAPSTGGVKKPHRYRPGTVALREIRRYQKSTELLIRKLPFQRLVREIAQDFKTDLRFQSAATSGALQEASEAYLVGLFEDTNPVCYPCQTCNNYAKRHPASTPHTWRTCLRIHYDGKHFILKKKKKKEK

SEQ ID NO: 799701 - protein, 167 aa, Homo sapiens; identical to SEQ ID NO: 799675

SEQ ID NO: 799702 - protein, 167 aa, Homo sapiens; identical to SEQ ID NO: 799675

SEQ ID NO: 799703 - protein, 180 aa, Homo sapiens
MDSTQVGVFKKANQIGLTCPARKSTGGKAPRKQLATKAARKSAPSTGGVKKPHRYRPGTVALREIRRYQKSTELLIRKLPFQRLVREIAQDFKTDLRFQSAATSGALQEASEAYLVGLFEDTNPVCYPCQTCNNYAKRHPASTPHTWRTCLRIHYDGKHFILKKKKKKISLLPVIGSSER

SEQ ID NO: 799704 - protein, 156 aa, Homo sapiens
MGFFKRVRPLKKNKKGSSFNLMKMVKKPHRYRPGTVALREIRRYQKSTELLIRKLPFQRLVREIAQDFKTDLRFQSAATSGALQEASEAYLVGLFEDTNPVCYPCQTCNNYAKRHPASTPHTWRTCLRIHYDGKHFILKKKKKKISLLPVIGSSER

SEQ ID NO: 799705 - protein, 125 aa, Homo sapiens
MARTKQTARKSTGGKAPRKQLATKAARKSAPSTGGVKKPHRYRPGTVALREIRRYQKSTELLIRKLPFQRLVREIAQDFKTDLRFQSAATSGALQTPTLCAIHAKRVTIMPKDIQLARRIRGERA

SEQ ID NO: 799706 - protein, 1138 aa, Homo sapiens
ATTGTRGKMAAAVLSGPSAGSAAGVPGGTGGLSAVSSGPRLRLLLLESVSGLLQPRTGSAVAPVHPPNRSAPHLPGLMCLLRLHGSVGGAQNLSALGALVSLSNARLSSIKTRFEGLCLLSLLVGESPTELFQQHCVSWLRSIQQVLQTQDPPATMELAVAVLRDLLRYAAQLPALFRDISMNHLPGLLTSLLGLRPECEQSALEGMKACMTYFPRACGSLKGKLASFFLSRVDALSPQLQQLACECYSRLPSLGAGFSQGLKHTESWEQELHSLLASLHTLLGALYEGAETAPVQNEGPGVEMLLSSEDGDAHVLLQLRQRFSGLARCLGLMLSSEFGAPVSVPVQEILDFICRTLSVSSKNISLHGDGPLRLLLLPSIHLEALDLLSALILACGSRLLRFGILIGRLLPQVLNSWSIGRDSLSPGQERPYSTVRTKVYAILELWVQVCGASAGMLQGGASGEALLTHLLSDISPPADALKLRSPRGSPDGSLQTGKPSAPKKLKLDVGEAMAPPSHRKGDSNANSDVCAAALRGLSRTILMCGPLIKEETHRRLHDLVLPLVMGVQQGEVLGSSPYTSSRCRRELYCLLLALLLAPSPRCPPPLACALQAFSLGQREDSLEVSSFCSEALVTCAALTHPRVPPLQPMGPTCPTPAPVPPPEAPSPFRAPPFHPPGPMPSVGSMPSAGPMPSAGPMPSAGPVPSARPGPPTTANHLGLSVPGLVSVPPRLLPGPENHRAGSNEDPILAPSGTPPPTIPPDETFGGRVPRPAFVHYDKEEASDVEISLESDSDDSVVIVPEGLPPLPPPPPSGATPPPIAPTGPPTASPPVPAKEEPEELPAAPGPLPPPPPPPPPVPGPVTLPPPQLVPEGTPGGGGPPALEEDLTVININSSDEEEEEEEEEEEEEEEEEEEEEDFEEEEEDEEEYFEEEEEEEEEFEEEFEEEEGELEEEEEEEDEEEEEELEEVEDLEFGTAGGEVEEGAPPPPTLPPALPPPESPPKVQPEPEPEPGLLLEVEEPGTEEERGADTAPTLAPEALPSQGEVEREGESPAAGPPPQELVEEEPSAPPTLLEEETEDGSDKVQPPPETPAEEEMETETEAEALQEKEQDDTAAMLADFIDCPPDDEKPPPPTEPDS

SEQ ID NO: 799707 - protein, 1292 aa, Homo sapiens
ATTGTRGKMAAAVLSGPSAGSAAGVPGGTGGLSAVSSGPRLRLLLLESVSGLLQPRTGSAVAPVHPPNRSAPHLPGLMCLLRLHGSVGGAQNLSALGALVSLSNARLSSIKTRFEGLCLLSLLVGESPTELFQQHCVSWLRSIQQVLQTQDPPATMELAVAVLRDLLRYAAQLPALFRDISMNHLPGLLTSLLGLRPECEQSALEGMKACMTYFPRACGSLKGKLASFFLSRVDALSPQLQQLACECYSRLPSLGAGFSQGLKHTESWEQELHSLLASLHTLLGALYEGAETAPVQNEGPGVEMLLSSEDGDAHVLLQLRQRFSGLARCLGLMLSSEFGAPVSVPVQEILDFICRTLSVSSKNIVSGICHLFRALAQDTRQPGKYWGPESPQTVSSWSRPRELPTFVQITSLPMCRDTGAQCQSVANASLGEGEFGDSAESLLRGPAILLTFHPGSILEDRGLILLGELRSGVGFLTYVYICKWSFPVSVSLWLSLSSSTLYLCPFFLQSLHGDGPLRLLLLPSIHLEALDLLSALILACGSRLLRFGILIGRLLPQVLNSWSIGRDSLSPGQERPYSTVRTKVYAILELWVQVCGASAGMLQGGASGEALLTHLLSDISPPADALKLRSPRGSPDGSLQTGKPSAPKKLKLDVGEAMAPPSHRKGDSNANSDVCAAALRGLSRTILMCGPLIKEETHRRLHDLVLPLVMGVQQGEVLGSSPYTSSRCRRELYCLLLALLLAPSPRCPPPLACALQAFSLGQREDSLEVSSFCSEALVTCAALTHPRVPPLQPMGPTCPTPAPVPPPEAPSPFRAPPFHPPGPMPSVGSMPSAGPMPSAGPMPSAGPVPSARPGPPTTANHLGLSVPGLVSVPPRLLPGPENHRAGSNEDPILAPSGTPPPTIPPDETFGGRVPRPAFVHYDKEEASDVEISLESDSDDSVVIVPEGLPPLPPPPPSGATPPPIAPTGPPTASPPVPAKEEPEELPAAPGPLPPPPPPPPPVPGPVTLPPPQLVPEGTPGGGGPPALEEDLTVININSSDEEEEEEEKRKKKKKEEEEEEEEEEEEEEEEDFEEEEEDEEEYFEEEEEEEEEFEEEFEEEEGELEEEEEEEDEEEEEELEEVEDLEFGTAGGEVEEGAPPPPTLPPALPPPESPPKVQPEPEPEPGLLLEVEEPGTEEERGADTAPTLAPEALPSQGEVEREGESPAAGPPPQELVEEEPSAPPTLLEEETEDGSDKVQPPPETPAEEEMETETEAEALQEKEQDDTAAMLADFIDCPPDDEKPPPPTEPDS

SEQ ID NO: 799708 - protein, 547 aa, Homo sapiens
ATTGTRGKMAAAVLSGPSAGSAAGVPGGTGGLSAVSSGPRLRLLLLESVSGLLQPRTGSAVAPVHPPNRSAPHLPGLMCLLRLHGSVGGAQNLSALGALVSLSNARLSSIKTRFEGLCLLSLLVGESPTELFQQHCVSWLRSIQQVLQTQDPPATMELAVAVLRDLLRYAAQLPALFRDISMNHLPGLLTSLLGLRPECEQSALEGMKACMTYFPRACGSLKGKLASFFLSRVDALSPQLQQLACECYSRLPSLGAGFSQGLKHTESWEQELHSLLASLHTLLGALYEGAETAPVQNEGPGVEMLLSSEDGDAHVLLQLRQRFSGLARCLGLMLSSEFGAPVSVPVQEILDFICRTLSVSSKNISLHGDGPLRLLLLPSIHLEALDLLSALILACGSRLLRFGILIGRLLPQVLNSWSIGRDSLSPGQERPYSTVRTKVYAILELWVQVCGASAGMLQGGASGEALLTHLLSDISPPADALKLRSPRGSPDGSLQTGKPSAPKKLKLDVGEAMAPPSHLLLPVPCKPSPSASEKIALRSPLSAQKHW

SEQ ID NO: 799709 - protein, 1088 aa, Homo sapiens
ATTGTRGKMAAAVLSGPSAGSAAGVPGGTGGLSAVSSGPRLRLLLLESVSGLLQPRTGSAVAPVHPPNRSAPHLPGLMCLLRLHGSVGGAQNLSALGALVSLSNARLSSIKTRFEGLCLLSLLVGESPTELFQQHCVSWLRSIQQVLQTQDPPATMELAVAVLRDLLRYAAQLPALFRDISMNHLPGLLTSLLGLRPECEQSALEGMKACMTYFPRACGSLKGKLASFFLSRVDALSPQLQQAPVQNEGPGVEMLLSSEDGDAHVLLQLRQRFSGLARCLGLMLSSEFGAPVSVPVQEILDFICRTLSVSSKNISLHGDGPLRLLLLPSIHLEALDLLSALILACGSRLLRFGILIGRLLPQVLNSWSIGRDSLSPGQERPYSTVRTKVYAILELWVQVCGASAGMLQGGASGEALLTHLLSDISPPADALKLRSPRGSPDGSLQTGKPSAPKKLKLDVGEAMAPPSHRKGDSNANSDVCAAALRGLSRTILMCGPLIKEETHRRLHDLVLPLVMGVQQGEVLGSSPYTSSRCRRELYCLLLALLLAPSPRCPPPLACALQAFSLGQREDSLEVSSFCSEALVTCAALTHPRVPPLQPMGPTCPTPAPVPPPEAPSPFRAPPFHPPGPMPSVGSMPSAGPMPSAGPMPSAGPVPSARPGPPTTANHLGLSVPGLVSVPPRLLPGPENHRAGSNEDPILAPSGTPPPTIPPDETFGGRVPRPAFVHYDKEEASDVEISLESDSDDSVVIVPEGLPPLPPPPPSGATPPPIAPTGPPTASPPVPAKEEPEELPAAPGPLPPPPPPPPPVPGPVTLPPPQLVPEGTPGGGGPPALEEDLTVININSSDEEEEEEEEEEEEEEEEEEEEEDFEEEEEDEEEYFEEEEEEEEEFEEEFEEEEGELEEEEEEEDEEEEEELEEVEDLEFGTAGGEVEEGAPPPPTLPPALPPPESPPKVQPEPEPEPGLLLEVEEPGTEEERGADTAPTLAPEALPSQGEVEREGESPAAGPPPQELVEEEPSAPPTLLEEETEDGSDKVQPPPETPAEEEMETETEAEALQEKEQDDTAAMLADFIDCPPDDEKPPPPTEPDS

SEQ ID NO: 799710 - protein, 1034 aa, Homo sapiens
FTLSSIKTRFEGLCLLSLLVGESPTELFQQHCVSWLRSIQQVLQTQDPPATMELAVAVLRDLLRYAAQLPALFRDISMNHLPGLLTSLLGLRPECEQSALEGMKACMTYFPRACGSLKGKLASFFLSRVDALSPQLQQLACECYSRLPSLGAGFSQGLKHTESWEQELHSLLASLHTLLGALYEGAETAPVQNEGPGVEMLLSSEDGDAHVLLQLRQRFSGLARCLGLMLSSEFGAPVSVPVQEILDFICRTLSVSSKNISLHGDGPLRLLLLPSIHLEALDLLSALILACGSRLLRFGILIGRLLPQVLNSWSIGRDSLSPGQERPYSTVRTKVYAILELWVQVCGASAGMLQGGASGEALLTHLLSDISPPADALKLRSPRGSPDGSLQTGKPSAPKKLKLDVGEAMAPPSHRKGDSNANSDVCAAALRGLSRTILMCGPLIKEETHRRLHDLVLPLVMGVQQGEVLGSSPYTSSRCRRELYCLLLALLLAPSPRCPPPLACALQAFSLGQREDSLEVSSFCSEALVTCAALTHPRVPPLQPMGPTCPTPAPVPPPEAPSPFRAPPFHPPGPMPSVGSMPSAGPMPSAGPMPSAGPVPSARPGPPTTANHLGLSVPGLVSVPPRLLPGPENHRAGSNEDPILAPSGTPPPTIPPDETFGGRVPRPAFVHYDKEEASDVEISLESDSDDSVVIVPEGLPPLPPPPPSGATPPPIAPTGPPTASPPVPAKEEPEELPAAPGPLPPPPPPPPPVPGPVTLPPPQLVPEGTPGGGGPPALEEDLTVININSSDEEEEEEEEEEEEEEEEEEEEEDFEEEEEDEEEYFEEEEEEEEEFEEEFEEEEGELEEEEEEEDEEEEEELEEVEDLEFGTAGGEVEEGAPPPPTLPPALPPPESPPKVQPEPEPEPGLLLEVEEPGTEEERGADTAPTLAPEALPSQGEVEREGESPAAGPPPQELVEEEPSAPPTLLEEETEDGSDKVQPPPETPAEEEMETETEAEALQEKEQDDTAAMLADFIDCPPDDEKPPPPTEPDS

SEQ ID NO: 799711 - protein, 1041 aa, Homo sapiens
MGRWAGPRTFQLLGHWFEGLCLLSLLVGESPTELFQQHCVSWLRSIQQVLQTQDPPATMELAVAVLRDLLRYAAQLPALFRDISMNHLPGLLTSLLGLRPECEQSALEGMKACMTYFPRACGSLKGKLASFFLSRVDALSPQLQQLACECYSRLPSLGAGFSQGLKHTESWEQELHSLLASLHTLLGALYEGAETAPVQNEGPGVEMLLSSEDGDAHVLLQLRQRFSGLARCLGLMLSSEFGAPVSVPVQEILDFICRTLSVSSKNISLHGDGPLRLLLLPSIHLEALDLLSALILACGSRLLRFGILIGRLLPQVLNSWSIGRDSLSPGQERPYSTVRTKVYAILELWVQVCGASAGMLQGGASGEALLTHLLSDISPPADALKLRSPRGSPDGSLQTGKPSAPKKLKLDVGEAMAPPSHRKGDSNANSDVCAAALRGLSRTILMCGPLIKEETHRRLHDLVLPLVMGVQQGEVLGSSPYTSSRCRRELYCLLLALLLAPSPRCPPPLACALQAFSLGQREDSLEVSSFCSEALVTCAALTHPRVPPLQPMGPTCPTPAPVPPPEAPSPFRAPPFHPPGPMPSVGSMPSAGPMPSAGPMPSAGPVPSARPGPPTTANHLGLSVPGLVSVPPRLLPGPENHRAGSNEDPILAPSGTPPPTIPPDETFGGRVPRPAFVHYDKEEASDVEISLESDSDDSVVIVPEGLPPLPPPPPSGATPPPIAPTGPPTASPPVPAKEEPEELPAAPGPLPPPPPPPPPVPGPVTLPPPQLVPEGTPGGGGPPALEEDLTVININSSDEEEEEEEEEEEEEEEEEEEEEDFEEEEEDEEEYFEEEEEEEEEFEEEFEEEEGELEEEEEEEDEEEEEELEEVEDLEFGTAGGEVEEGAPPPPTLPPALPPPESPPKVQPEPEPEPGLLLEVEEPGTEEERGADTAPTLAPEALPSQGEVEREGESPAAGPPPQELVEEEPSAPPTLLEEETEDGSDKVQPPPETPAEEEMETETEAEALQEKEQDDTAAMLADFIDCPPDDEKPPPPTEPDS

SEQ ID NO: 799712 - protein, 1138 aa, Homo sapiens; identical to SEQ ID NO: 799706

SEQ ID NO: 799713 - protein, 1140 aa, Homo sapiens
ATTGTRGKMAAAVLSGPSAGSAAGVPGGTGGLSAVSSGPRLRLLLLESVSGLLQPRTGSAVAPVHPPNRSAPHLPGLMCLLRLHGSVGGAQNLSALGALVSLSNARLSSIKTRFEGLCLLSLLVGESPTELFQQHCVSWLRSIQQVLQTQDPPATMELAVAVLRDLLRYAAQLPALFRDISMNHLPGLLTSLLGLRPECEQSALEGMKACMTYFPRACGSLKGKLASFFLSRVDALSPQLQQLACECYSRLPSLGAGFSQGLKHTESWEQELHSLLASLHTLLGALYEGAETAPVQNEGPGVEMLLSSEDGDAHVLLQLRQRFSGLARCLGLMLSSEFGAPVSVPVQEILDFICRTLSVSSKNISLHGDGPLRLLLLPSIHLEALDLLSALILACGSRLLRFGILIGRLLPQVLNSWSIGRDSLSPGQERPYSTVRTKVYAILELWVQVCGASAGMLQGGASGEALLTHLLSDISPPADALKLRSPRGSPDGSLQTGKPSAPKKLKLDVGEAMAPPSHRKGDSNANSDVCAAALRGLSRTILMCGPLIKEETHRRLHDLVLPLVMGVQQGEVLGSSPYTSSRCRRELYCLLLALLLAPSPRCPPPLACALQAFSLGQREDSLEVSSFCSEALVTCAALTHPRVPPLQPMGPTCPTPAPVPPPEAPSPFRAPPFHPPGPMPSVGSMPSAGPMPSAGPMPSAGPVPSARPGPPTTANHLGLSVPGLVSVPPRLLPGPENHRAGSNEDPILAPSGTPPPTIPPDETFGGRVPRPAFVHYDKEEASDVEISLESDSDDSVVIVPEGLPPLPPPPPSGATPPPIAPTGPPTASPPVPAKEEPEELPAAPGPLPPPPPPPPPVPGPVTLPPPQLVPEGTPGGGGPPALEEDLTVININSSDEEEEEEEEEEEEEEEEEEEEEDFEEEEEDEEEYFEEEEEEEEEFEEEFEEEEGELEEEEEEEDEEEEEELEEVEDLEFGTAGGEVEEGAPPPPTLPPALPPPESPPKVQPEPEPEPGLLLEVEEPGTEEERGADTAPTLAPEALPSQGEVEREGESPAAGPPPQELVEEEPSAPPTLLEEETEDGSDKVQPPPETPAEEEMETETEAEALQEKVRGQAGKVPWARRWGWREKGWQLLLLGEVCPA

SEQ ID NO: 799714 - protein, 975 aa, Homo sapiens
ATTGTRGKMAAAVLSGPSAGSAAGVPGGTGGLSAVSSGPRLRLLLLESVSGLLQPRTGSAVAPVHPPNRSAPHLPGLMCLLRLHGSVGGAQNLSALGALVSLSNARLSSIKTRFEGLCLLSLLVGESPTELFQQHCVSWLRSIQQVLQTQDPPATMELAVAVLRDLLRYAAQLPALFRDISMNHLPGLLTSLLGLRPECEQSALEGMKACMTYFPRACGSLKGKLASFFLSRVDALSPQLQQLACECYSRLPSLGAGFSQGLKHTESWEQELHSLLASLHTLLGALYEGAETAPVQNEGPGVEMLLSSEDGDAHVLLQLRQRFSGLARCLGLMLSSEFGAPVSVPVQEILDFICRTLSVSSKNISLHGDGPLRLLLLPSIHLEALDLLSALILACGSRLLRFGILIGRLLPQVLNSWSIGRDSLSPGQERPYSTVRTKVYAILELWVQVCGASAGMLQGGASGEALLTHLLSDISPPADALKLRSPRGSPDGSLQTGKPSAPKKLKLDVGEAMAPPSHRKGDSNANSDVCAAALRGLSRTILMCGPLIKEETHRRLHDLVLPLVMGVQQGEVLGSSPYTSSRCRRELYCLLLALLLAPSPRCPPPLACALQAFSLGQREDSLEVSSFCSEALVTCAALTHPRVPPLQPMGPTCPTPAPVPPPEAPSPFRAPPFHPPGPMPSVGSMPSAGPMPSAGPMPSAGPVPSARPGPPTTANHLGLSVPGLVSVPPRLLPGPENHRAGSNEDPILAPSGTPPPTIPPDETFGGRVPRPAFVHYDKEEASDVEISLESDSDDSVVIVPEGLPPLPPPPPSGATPPPIAPTGPPTASPPVPAKEEPEELPAAPGPLPPPPPPPPPVPGPVTLPPPQLVPEGTPGGGGPPALEEDLTVININSSDEEEEEEEEEEEEEEEEEEEEEDFEEEEEDEEEYFEEEMETETEAEALQEKEQDDTAAMLADFIDCPPDDEKPPPPTEPDS

SEQ ID NO: 799715 - protein, 608 aa, Homo sapiens
MWDSDGLSRTILMCGPLIKEETHRRLHDLVLPLVMGVQQGEVLGSSPYTSSRCRRELYCLLLALLLAPSPRCPPPLACALQAFSLGQREDSLEVSSFCSEALVTCAALTHPRVPPLQPMGPTCPTPAPVPPPEAPSPFRAPPFHPPGPMPSVGSMPSAGPMPSAGPMPSAGPVPSARPGPPTTANHLGLSVPGLVSVPPRLLPGPENHRAGSNEDPILAPSGTPPPTIPPDETFGGRVPRPAFVHYDKEEASDVEISLESDSDDSVVIVPEGLPPLPPPPPSGATPPPIAPTGPPTASPPVPAKEEPEELPAAPGPLPPPPPPPPPVPGPVTLPPPQLVPEGTPGGGGPPALEEDLTVININSSDEEEEEEEEEEEEEEEEEEEEEDFEEEEEDEEEYFEEEEEEEEEFEEEFEEEEGELEEEEEEEDEEEEEELEEVEDLEFGTAGGEVEEGAPPPPTLPPALPPPESPPKVQPEPEPEPGLLLEVEEPGTEEERGADTAPTLAPEALPSQGEVEREGESPAAGPPPQELVEEEPSAPPTLLEEETEDGSDKVQPPPETPAEEEMETETEAEALQEKEQDDTAAMLADFIDCPPDDEKPPPPTEPDS

SEQ ID NO: 799716 - protein, 426 aa, Homo sapiens
KVGGLGCRIPHEDEEEYFEEEEEEEEEFEEELPAAPGPLPPPPPTIPPDETFGGRVPRPAFVHYDKEEASDVEISLESDSDDSVVIVPEGLPPLPPPPPSGATPPPIAPTGPPTASPPVPAKEEPEELPAAPGPLPPPPPPPPPVPGPVTLPPPQLVPEGTPGGGGPPALEEDLTVININSSDEEEEEEEEEEEEEEEEEEEEEDFEEEEEDEEEYFEEEEEEEEEFEEEFEEEEGELEEEEEEEDEEEEEELEEVEDLEFGTAGGEVEEGAPPPPTLPPALPPPESPPKVQPEPEPEPGLLLEVEEPGTEEERGADTAPTLAPEALPSQGEVEREGESPAAGPPPQELVEEEPSAPPTLLEEETEDGSDKVQPPPETPAEEEMETETEAEALQEKEQDDTAAMLADFIDCPPDDEKPPPPTEPDS

SEQ ID NO: 799717 - protein, 635 aa, Homo sapiens
ATTGTRGKMAAAVLSGPSAGSAAGVPGGTGGLSAVSSGPRLRLLLLESVSGLLQPRTGSAVAPVHPPNRSAPHLPGLMCLLRLHGSVGGAQNLSALGALVSLSNARLSSIKTRFEGLCLLSLLVGESPTELFQQHCVSWLRSIQQVLQTQDPPATMELAVAVLRDLLRYAAQLPALFRDISMNHLPGLLTSLLGLRPECEQSALEGMKACMTYFPRACGSLKGKLASFFLSRVDALSPQLQQLACECYSRLPSLGAGFSQGLKHTESWEQELHSLLASLHTLLGALYEGAETAPVQNEGPGVEMLLSSEDGDAHVLLQLRQRFSGLARCLGLMLSSEFGAPVSVPVQEILDFICRTLSVSSKNISLHGDGPLRLLLLPSIHLEALDLLSALILACGSRLLRFGILIGRLLPQVLNSWSIGRDSLSPGQERPYSTVRTKVYAILELWVQVCGASAGMLQGGASGEALLTHLLSDISPPADALKLRSPRGSPDGSLQTGKPSAPKKLKLDVGEAMAPPSHRKGDSNANSDVCAAALRGLSRTILMCGPLIKEETHRRLHDLVLPLVMGVQQGEVLGSSPYTSSRCRRELYCLLLALLLAPSPRCPPPLACALQAFSLGQREDSLEVSSFCSEAGRGD

SEQ ID NO: 799718 - protein, 404 aa, Homo sapiens
ATTGTRGKMAAAVLSGPSAGSAAGVPGGTGGLSAVSSGPRLRLLLLESVSGLLQPRTGSAVAPVHPPNRSAPHLPGLMCLLRLHGSVGGAQNLSALGALVSLSNARLSSIKTRFEGLCLLSLLVGESPTELFQQHCVSWLRSIQQVLQTQDPPATMELAVAVLRDLLRYAAQLPALFRDISMNHLPGLLTSLLGLRPECEQSALEGMKACMTYFPRACGSLKGKLASFFLSRVDALSPQLQQLACECYSRLPSLGAGFSQGLKHTESWEQELHSLLASLHTLLGALYEGAETAPVQNEGPGVEMLLSSEDGDAHVLLQLRQRFSGLARCLGLMLSSEFGAPVSVPVQEILDFICRTLSVSSKNISLHGDGPCGCCCCPLSTLRPWTCCLHSSSRVEAGSCALGS

SEQ ID NO: 799719 - protein, 89 aa, Homo sapiens
GKGPPPLSPPRFEKKAFCFPPNPLEEETEDGSDKVQPPPETPAEEEMETETEAEALQEKEQDDTAAMLADFIDCPPDDEKPPPPTEPDS

SEQ ID NO: 799720 - protein, 855 aa, Homo sapiens
SVQGSCASAAPVQNEGPGVEMLLSSEDGDAHVLLQLRQRFSGLARCLGLMLSSEFGAPVSVPVQEILDFICRTLSVSSKNISLHGDGPLRLLLLPSIHLEALDLLSALILACGSRLLRFGILIGRLLPQVLNSWSIGRDSLSPGQERPYSTVRTKVYAILELWVQVCGASAGMLQGGASGEALLTHLLSDISPPADALKLRSPRGSPDGSLQTGKPSAPKKLKLDVGEAMAPPSHRKGDSNANSDVCAAALRGLSRTILMCGPLIKEETHRRLHDLVLPLVMGVQQGEVLGSSPYTSSRCRRELYCLLLALLLAPSPRCPPPLACALQAFSLGQREDSLEVSSFCSEALVTCAALTHPRVPPLQPMGPTCPTPAPVPPPEAPSPFRAPPFHPPGPMPSVGSMPSAGPMPSAGPMPSAGPVPSARPGPPTTANHLGLSVPGLVSVPPRLLPGPENHRAGSNEDPILAPSGTPPPTIPPDETFGGRVPRPAFVHYDKEEASDVEISLESDSDDSVVIVPEGLPPLPPPPPSGATPPPIAPTGPPTASPPVPAKEEPEELPAAPGPLPPPPPPPPPVPGPVTLPPPQLVPEGTPGGGGPPALEEDLTVININSSDEEEEEEEEEEEEEEEEEEEEEDFEEEEEDEEEYFEEEEEEEEEFEEEFEEEEGELEEEEEEEDEEEEEELEEVEDLEFGTAGGEVEEGAPPPPTLPPALPPPESPPKVQPEPEPEPGLLLEVEEPGTEEERGADTAPTLAPEALPSQGEVEREGESPAAGPPPQELVEEEPSAPPTLLEEETEDGSDKVQPPPETPAEEEMETETEAEALQEKEQDDTAAMLADFIDCPPDDEKPPPPTEPDS

SEQ ID NO: 799721 - protein, 683 aa, Homo sapiens [sequence omitted]

SEQ ID NO: 799722 - protein, 594 aa, Homo sapiens
MFPGVLCPFQRLHDLVLPLVMGVQQGEVLGSSPYTSSRCRRELYCLLLALLLAPSPRCPPPLACALQAFSLGQREDSLEVSSFCSEALVTCAALTHPRVPPLQPMGPTCPTPAPVPPPEAPSPFRAPPFHPPGPMPSVGSMPSAGPMPSAGPMPSAGPVPSARPGPPTTANHLGLSVPGLVSVPPRLLPGPENHRAGSNEDPILAPSGTPPPTIPPDETFGGRVPRPAFVHYDKEEASDVEISLESDSDDSVVIVPEGLPPLPPPPPSGATPPPIAPTGPPTASPPVPAKEEPEELPAAPGPLPPPPPPPPPVPGPVTLPPPQLVPEGTPGGGGPPALEEDLTVININSSDEEEEEEEEEEEEEEEEEEEEEDFEEEEEDEEEYFEEEEEEEEEFEEEFEEEEGELEEEEEEEDEEEEEELEEVEDLEFGTAGGEVEEGAPPPPTLPPALPPPESPPKVQPEPEPEPGLLLEVEEPGTEEERGADTAPTLAPEALPSQGEVEREGESPAAGPPPQELVEEEPSAPPTLLEEETEDGSDKVQPPPETPAEEEMETETEAEALQEKEQDDTAAMLADFIDCPPDDEKPPPPTEPDS

SEQ ID NO: 799723 - protein, 323 aa, Homo sapiens
KVGGLGCRIPHEDEEEYFEEEEEEEEEFEEELPAAPGPLPPPPPTIPPDETFGGRVPRPAFVHYDKEEASDVEISLESDSDDSVVIVPEGLPPLPPPPPSGATPPPIAPTGPPTASPPVPAKEEPEEFEEEEGELEEEEEEEDEEEEEELEEVEDLEFGTAGGEVEEGAPPPPTLPPALPPPESPPKVQPEPEPEPGLLLEVEEPGTEEERGADTAPTLAPEALPSQGEVEREGESPAAGPPPQELVEEEPSAPPTLLEEETEDGSDKVQPPPETPAEEEMETETEAEALQEKEQDDTAAMLADFIDCPPDDEKPPPPTEPDS

SEQ ID NO: 799724 - protein, 113 aa, Homo sapiens
ATTGTRGKMAAAVLSGPSAGSAAGVPGGTGGLSAVSSGPRLRLLLLESVSGLLQPRTGSAVAPVHPPNRSAPHLPGLMCLLRLHGSVGGAQNLSALGALVSLSNARLSSIKTR

SEQ ID NO: 799725 - protein, 245 aa, Homo sapiens
MRTSAEYFRLALSKLQSCDLFDEFDNIPCKKCVVVGNGGVLKNKTLGEKIDSYDVIIRMNNGPVLGHEEEVGRRTTFRLFYPESVFSDPIHNDPNTTVILTAFKPHDLRWLLELLMGDKINTNGFWKKPALNLIYKPYQIRILDPFIIRTAAYELLHFPKVFPKNQKPKHPTTGIIAITLAFYICHEVHLAGFKYNFSDLKSPLHYYGNATMSLMNKNAYHNVTAEQLFLKDIIEKNLVINLTQD

SEQ ID NO: 799726 - protein, 213 aa, Homo sapiens
MRTSAEYFRLALSKLQSCDLFDEFDKMNNGPVLGHEEEVGRRTTFRLFYPESVFSDPIHNDPNTTVILTAFKPHDLRWLLELLMGDKINTNGFWKKPALNLIYKPYQIRILDPFIIRTAAYELLHFPKVFPKNQKPKHPTTGIIAITLAFYICHEVHLAGFKYNFSDLKSPLHYYGNATMSLMNKNAYHNVTAEQLFLKDIIEKNLVINLTQD

SEQ ID NO: 799727 - protein, 331 aa, Homo sapiens
MRGYLVAIFLSAVFLYYVLHCILWGTNVYWVAPVEMKRRNKIQPCLSKPAFASLLRFHQFHPFLCAADFRKIASLYGSDKFDLPYGMRTSAEYFRLALSKLQSCDLFDEFDNIPCKKCVVVGNGGVLKNKTLGEKIDSYDVIIRMNNGPVLGHEEEVGRRTTFRLFYPESVFSDPIHNDPNTTVILTAFKPHDLRWLLELLMGDKINTNGFWKKPALNLIYKPYQIRILDPFIIRTAAYELLHFPKVFPKNQKPKHPTTGIIAITLAFYICHEVHLAGFKYNFSDLKSPLHYYGNATMSLMNKNAYHNVTAEQLFLKDIIEKNLVINLTQD

SEQ ID NO: 799728 - protein, 331 aa, Homo sapiens; identical to SEQ ID NO: 799727

SEQ ID NO: 799729 - protein, 331 aa, Homo sapiens; identical to SEQ ID NO: 799727

SEQ ID NO: 799730 - protein, 331 aa, Homo sapiens; identical to SEQ ID NO: 799727

SEQ ID NO: 799731 - protein, 187 aa, Homo sapiens
MNNGPVLGHEEEVGRRTTFRLFYPESVFSDPIHNDPNTTVILTAFKPHDLRWLLELLMGDKINTNGFWKKPALNLIYKPYQIRILDPFIIRTAAYELLHFPKVFPKNQKPKHPTTGIIAITLAFYICHEVHLAGFKYNFSDLKSPLHYYGNATMSLMNKNAYHNVTAEQLFLKDIIEKNLVINLTQD

SEQ ID NO: 799732 - protein, 266 aa, Homo sapiens
MRGYLVAIFLSAVFLYYVLHCILWGTNVYWVAPVEMKRRNKIQPCLSKPAFASLLRFHQFHPFLCAADFRKIASLYGSDKFDLPYGMRTSAEYFRLALSKLQSCDLFDEFDNIPCKKCVVVGNGGVLKNKTLGEKIDSYDVIIRMNNGPVLGHEEEVGRRTTFRLFYPESVFSDPIHNDPNTTVILTAFKPHDLRWLLELLMGDKINTNGFWKKPALNLIYKPYQIRILDPFIIRTAAYELLHFPKVFPKNQKPKHPTTGIIAIFT

SEQ ID NO: 799733 - protein, 32 aa, Homo sapiens
RNYFLHLLCRHVIHVSSGALLYSNLELAGKPE

SEQ ID NO: 799734 - protein, 431 aa, Homo sapiens
GGSLRLRAGLLPPLLPRQIRGEGIVPAPPLARATFLWFLPASGFCGPMWQAPRERQQPAGAAAPQVSEPGAPLRSSLLGLGGSLLPAGFAAGLHCPGEPAMRGYLVAIFLSAVFLYYVLHCILWGTNVYWVAPVEMKRRNKIQPCLSKPAFASLLRFHQFHPFLCAADFRKIASLYGSDKFDLPYGMRTSAEYFRLALSKLQSCDLFDEFDNIPCKKCVVVGNGGVLKNKTLGEKIDSYDVIIRMNNGPVLGHEEEVGRRTTFRLFYPESVFSDPIHNDPNTTVILTAFKPHDLRWLLELLMGDKINTNGFWKKPALNLIYKPYQIRILDPFIIRTAAYELLHFPKVFPKNQKPKHPTTGIIAITLAFYICHEVHLAGFKYNFSDLKSPLHYYGNATMSLMNKNAYHNVTAEQLFLKDIIEKNLVINLTQD

SEQ ID NO: 799735 - protein, 373 aa, Homo sapiens
LVRSEFWDPPPFLVPPFAVIFRSRRPARARGWCPPRPKGEPAMRGYLVAIFLSAVFLYYVLHCILWGTNVYWVAPVEMKRRNKIQPCLSKPAFASLLRFHQFHPFLCAADFRKIASLYGSDKFDLPYGMRTSAEYFRLALSKLQSCDLFDEFDNIPCKKCVVVGNGGVLKNKTLGEKIDSYDVIIRMNNGPVLGHEEEVGRRTTFRLFYPESVFSDPIHNDPNTTVILTAFKPHDLRWLLELLMGDKINTNGFWKKPALNLIYKPYQIRILDPFIIRTAAYELLHFPKVFPKNQKPKHPTTGIIAITLAFYICHEVHLAGFKYNFSDLKSPLHYYGNATMSLMNKNAYHNVTAEQLFLKDIIEKNLVINLTQD

SEQ ID NO: 799736 - protein, 331 aa, Homo sapiens; identical to SEQ ID NO: 799727

SEQ ID NO: 799737 - protein, 331 aa, Homo sapiens; identical to SEQ ID NO: 799727

SEQ ID NO: 799738 - protein, 245 aa, Homo sapiens; identical to SEQ ID NO: 799725

SEQ ID NO: 799739 - protein, 200 aa, Homo sapiens
QAGGEWWNWKLKRMNNGPVLGHEEEVGRRTTFRLFYPESVFSDPIHNDPNTTVILTAFKPHDLRWLLELLMGDKINTNGFWKKPALNLIYKPYQIRILDPFIIRTAAYELLHFPKVFPKNQKPKHPTTGIIAITLAFYICHEVHLAGFKYNFSDLKSPLHYYGNATMSLMNKNAYHNVTAEQLFLKDIIEKNLVINLTQD

SEQ ID NO: 799740 - protein, 561 aa, Homo sapiens
MGARTPLPSFWVSFFAETGILFPGGTPWPMGSQHSKQHRKPGPLKRGHRRDRRTTRRKYWKEGREIARVLDDEGRNLRQQKLDRQRALLEQKQKKKRQEPLMVQANADGRPRSRRARQSEEQAPLVESYLSSSGSTSYQVQEADSLASVQLGATRPTAPASAKRTKAAATAGGQGGAARKEKKGKHKGTSGPAALAEDKSEAQGPVQILTVGQSDHAQDAGETAAGGGERPSGQDLRATMQRKGISSSMSFDEDEEDEEENSSSSSQLNSNTRPSSATSRKSVREAASAPSPTAPEQPVDVEVQDLEEFALRPAPQGITIKCRITRDKKGMDRGMYPTYFLHLDREDGKKVFLLAGRKRKKSKTSNYLISVDPTDLSRGGDSYIGKLRSNLMGTKFTVYDNGVNPQKASSSTLESGTLRQELAAVCYETNVLGFKGPRKMSVIVPGMNMVHERVSIRPRNEHETLLARWQNKNTESIIELQNKTPVWNDDTQSYVLNFHGRVTQASVKNFQIIHGNDPDYIVMQFGRVAEDVFTMDYNYPLCALQAFAIALSSFDSKLACE

SEQ ID NO: 799741 - protein, 426 aa, Homo sapiens
MVQANADGRPRSRRARQSEEQAPLVESYLSSSGSTSYQVQEADSLASVQLGATRPTAPASAKRTKAAATAGGQGGAARKEKKGKHKGTSGPAALAEDKSEAQGPVQILTVGQSDHAQDAGETAAGGGERPSGQDLRATMQRKGISSSMSFDEDEEDEEENSSSSSQLNSNTRPSSATSRKSVREAASAPSPTAPEQPVDVEVQDLEEFALRPAPQGITIKCRITRDKKGMDRGMYPTYFLHLDREDGKKVFLLAGRKRKKSKTSNYLISVDPTDLSRGGDSYIGKLRSNLMGTKFTVYDNGVNPQKASSSTLESGTLRQELAAVCYETNVLGFKGPRKMSVIVPGMNMVHERVSIRPRNEHETLLARWQNKNTESIIELQNKTPVWNDDTQSYVLNFHGRVTQASVKNFQIIHGNDQTQRCDTILI

SEQ ID NO: 799742 - protein, 506 aa, Homo sapiens
MTSKPHSDWIPYSVLDDEGRNLRQQKLDRQRALLEQKQKKKRQEPLMVQANADGRPRSRRARQSEEQAPLVESYLSSSGSTSYQVQEADSLASVQLGATRPTAPASAKRTKAAATAGGQGGAARKEKKGKHKGTSGPAALAEDKSEAQGPVQILTVGQSDHAQDAGETAAGGGERPSGQDLRATMQRKGISSSMSFDEDEEDEEENSSSSSQLNSNTRPSSATSRKSVREAASAPSPTAPEQPVDVEVQDLEEFALRPAPQGITIKCRITRDKKGMDRGMYPTYFLHLDREDGKKVFLLAGRKRKKSKTSNYLISVDPTDLSRGGDSYIGKLRSNLMGTKFTVYDNGVNPQKASSSTLESGTLRQELAAVCYETNVLGFKGPRKMSVIVPGMNMVHERVSIRPRNEHETLLARWQNKNTESIIELQNKTPVWNDDTQSYVLNFHGRVTQASVKNFQIIHGNDPDYIVMQFGRVAEDVFTMDYNYPLCALQAFAIALSSFDSKLACE

SEQ ID NO: 799743 - protein, 81 aa, Homo sapiens
MVQANADGRPRSRRARQSEEQAPLVESYLSSSGSTSYQGIPCLLPNPVTASGSPSLPAHLGRYGLVLTGDAQAVYGFQPRQ

SEQ ID NO: 799744 - protein, 66 aa, Homo sapiens
SRAAAYYYYTFAAASTASLESSSHGPTLPYGRGPQQGPQSDQEREQAQAQPTPRASGPNTPSSCGT

SEQ ID NO: 799745 - protein, 130 aa, Homo sapiens
CLVPAREFMGWRAAAMALRYPMAVGLNKGHKVTKNVSKPRHSRRRGRLDQTHQVRAGHDSGGVWLCPVRAARHGVTEGLQGQTGPQIYQEKGGDAHPRQEEAGGAEQRTGRHEESCCQERLSPSPALSLK

SEQ ID NO: 799746 - protein, 131 aa, Homo sapiens
AAAAIGHEGRLWRAAAMALRYPMAVGLNKGHKVTKNVSKPRHSRRRGRLDQTHQVRAGHDSGGVWLCPVRAARHGVTEGLQGQTGPQIYQEKGGDAHPRQEEAGGAEQRTGRHEESCCQERLSPSPALSLK

SEQ ID NO: 799747 - protein, 130 aa, Homo sapiens
RLVRGWFAAFWRAAAMALRYPMAVGLNKGHKVTKNVSKPRHSRRRGRLDQTHQVRAGHDSGGVWLCPVRAARHGVTEGLQGQTGPQIYQEKGGDAHPRQEEAGGAEQRTGRHEESCCQERLSPSPALSLK

SEQ ID NO: 799748 - protein, 131 aa, Homo sapiens
AGTGPECRDRLWRAAAMALRYPMAVGLNKGHKVTKNVSKPRHSRRRGRLDQTHQVRAGHDSGGVWLCPVRAARHGVTEGLQGQTGPQIYQEKGGDAHPRQEEAGGAEQRTGRHEESCCQERLSPSPALSLK

SEQ ID NO: 799749 - protein, 65 aa, Homo sapiens
  misc_feature (51)..(51): Xaa can be any naturally occurring amino acid
  misc_feature (62)..(62): Xaa can be any naturally occurring amino acid
MASPEAPESVVQFALDKLLDLPGGLDYRVLTTFTRYGRTRARSPSHSLLMXVNFVSSCTDFXPLA

SEQ ID NO: 799750 - protein, 102 aa, Homo sapiens
MLRELRSRMLSATAGKTPAARGSACRSCLSGLRLLSRVDIPEFRAAPALPPRPSLESSSHGPTLPYGRGPQQGPQSDQEREQAQAQPTPRASGPNTPSSCGT

SEQ ID NO: 799751 - protein, 115 aa, Homo sapiens
MALRYPMAVGLNKGHKVTKNVSKPRHSRRRGRLDQTHQVRAGHDSGGVWLCPVRAARHGVTEGLQGQTGPQIYQEKGGDAHPRQEEAGGAEQRTGRHEESCCQERLSPSPALSLK

SEQ ID NO: 799752 - protein, 115 aa, Homo sapiens; identical to SEQ ID NO: 799751

SEQ ID NO: 799753 - protein, 211 aa, Homo sapiens
MKVLLLTGLGALFFAYYWDDNFDPASLQGARVLLTGANAGVGEELAYHYARLGSHLVLTAHTEALLQKGRPEIGGVGIRTHFTGRGRRAAIATSTGSDSSSRARRSKRACSGSSVAHAQRNGGEDSSRQGERVPFLPLWPAPPEPSRYPGVPRGASPSATAVSGEQQVSGFPHCRYPPPSGLPGPLCRLEDGWLWRARLKEPGRGALGLGN

SEQ ID NO: 799754 - protein, 130 aa, Homo sapiens; identical to SEQ ID NO: 799745

SEQ ID NO: 799755 - protein, 115 aa, Homo sapiens; identical to SEQ ID NO: 799751

SEQ ID NO: 799756 - protein, 211 aa, Homo sapiens; identical to SEQ ID NO: 799753

SEQ ID NO: 799757 - protein, 199 aa, Homo sapiens
MASPEAPESVVQFALDKLGGLDYLVLNHIGGAPAGTRARSPQATRWLMQVNFVSYVQLTSRALPSLTDSKGSLVVVSSLLGRVPTSFSTPYSAAKFALDGFFGSLRRELDVQDVNVAITMCVLGLRDRASAAEAVRGVTRVKAAPGPKAALAVIRGGATRAAGVFYPWRFRLLCLLRRWLPRPRAWFIRQELNVTAAAA

SEQ ID NO: 799758 - protein, 185 aa, Homo sapiens
MTTSTGLDYLVLNHIGGAPAGTRARSPQATRWLMQVNFVSYVQLTSRALPSLTDSKGSLVVVSSLLGRVPTSFSTPYSAAKFALDGFFGSLRRELDVQDVNVAITMCVLGLRDRASAAEAVRGVTRVKAAPGPKAALAVIRGGATRAAGVFYPWRFRLLCLLRRWLPRPRAWFIRQELNVTAAAA

SEQ ID NO: 799759 - protein, 241 aa, Homo sapiens
MASPEAPESVVQFALDKLGGLDYLVLNHIGGAPAGTRARSPQATRWLMQVNFVSYVQLTSRALPSLTDSKGSLVVVSSLLGACTRPRLCGTGSGELMRVSLEGLGRLPGRGGATQPLPSAPPGRVPTSFSTPYSAAKFALDGFFGSLRRELDVQDVNVAITMCVLGLRDRASAAEAVRGVTRVKAAPGPKAALAVIRGGATRAAGVFYPWRFRLLCLLRRWLPRPRAWFIRQELNVTAAAA

SEQ ID NO: 799760 - protein, 180 aa, Homo sapiens
MQVNFVSYVQLTSRALPSLTDSKGSLVVVSSLLGRVPTSFSTPYSAAKFALDGFFGSLRRELDVQDVNVAITMCVLGLRDRASAAEAVRGGPDKLGAGLGAMAQPQPQSPPCPPVPRGVTRVKAAPGPKAALAVIRGGATRAAGVFYPWRFRLLCLLRRWLPRPRAWFIRQELNVTAAAA

SEQ ID NO: 799761 - protein, 180 aa, Homo sapiens; identical to SEQ ID NO: 799760

SEQ ID NO: 799762 - protein, 93 aa, Homo sapiens
YVRLGSEAWVAISLQLVVASEAEGAGTRGSGPRELSRYSPPPLLPVAVRSHGPTLPYGRGPQQGPQSDQEREQAQAQPTPRASGPNTPSSCGT

SEQ ID NO: 799763 - protein, 115 aa, Homo sapiens; identical to SEQ ID NO: 799751

SEQ ID NO: 799764 - protein, 140 aa, Homo sapiens
KQCYQRRVPITAGAFRHGRLWRAAAMALRYPMAVGLNKGHKVTKNVSKPRHSRRRGRLDQTHQVRAGHDSGGVWLCPVRAARHGVTEGLQGQTGPQIYQEKGGDAHPRQEEAGGAEQRTGRHEESCCQERLSPSPALSLK

SEQ ID NO: 799765 - protein, 131 aa, Homo sapiens
PPPPAFRHGRLWRAAAMALRYPMAVGLNKGHKVTKNVSKPRHSRRRGRLDQTHQVRAGHDSGGVWLCPVRAARHGVTEGLQGQTGPQIYQEKGGDAHPRQEEAGGAEQRTGRHEESCCQERLSPSPALSLK

SEQ ID NO: 799766 - protein, 106 aa, Homo sapiens
MKVLLLTGLGALFFAYYWDDNFDPASLQGARVLLTGANAGVGEELAYHYARLGSHLVLTAHTEALLQKEARWLTLVVSTLGGRGKWITWGQEFKTSLANMAKPGLY

SEQ ID NO: 799767 - protein, 105 aa, Homo sapiens
AAAAIGHEGRLWRAAAMALRYPMAVGLNKGHKVTKNVSKPRHSRRRGRLDQTHQVRAGHDSGGVWLCPVRAARHGVTEGLQGQTGPQIYQEKVLAAMRKAAAKKD

SEQ ID NO: 799768 - protein, 210 aa, Homo sapiens
MKVLLLTGLGALFFAYYWDDNFDPASLQGARVLLTGANAGVGEELAYHYARLGSHLVLTAHTEALLQKGRPEIGGVGIRTHFTGRGRRAAIATSTGSDSSSRARRSKRACSGSSVAHAQRNGGEDSSRQGERVPFFLSGLRLLSRVDIPEFRAAPALPPRPSLESSSHGPTLPYGRGPQQGPQSDQEREQAQAQPTPRASGPNTPSSCGT

SEQ ID NO: 799769 - protein, 115 aa, Homo sapiens; identical to SEQ ID NO: 799751

SEQ ID NO: 799770 - protein, 211 aa, Homo sapiens; identical to SEQ ID NO: 799753

SEQ ID NO: 799771 - protein, 115 aa, Homo sapiens; identical to SEQ ID NO: 799751

SEQ ID NO: 799772 - protein, 152 aa, Homo sapiens
MQVNFVSYVQLTSRALPSLTDSKGSLVVVSSLLGRVPTSFSTPYSAAKFALDGFFGSLRRELDVQDVNVAITMCVLGLRDRASAAEAVRGVTRVKAAPGPKAALAVIRGGATRAAGVFYPWRFRLLCLLRRWLPRPRAWFIRQELNVTAAAA

SEQ ID NO: 799773 - protein, 152 aa, Homo sapiens; identical to SEQ ID NO: 799772

SEQ ID NO: 799774 - protein, 223 aa, Homo sapiens
MTTSTVVGNCRKLGAPKVFYIAADMASPEAPESVVQFALDKLGGLDYLVLNHIGGAPAGTRARSPQATRWLMQVNFVSYVQLTSRALPSLTDSKGSLVVVSSLLGRVPTSFSTPYSAAKFALDGFFGSLRRELDVQDVNVAITMCVLGLRDRASAAEAVRGVTRVKAAPGPKAALAVIRGGATRAAGVFYPWRFRLLCLLRRWLPRPRAWFIRQELNVTAAAA

SEQ ID NO: 799775 - protein, 173 aa, Homo sapiens
MASPEAPESVVQFALDKLGGLDYLVLNHIGGAPAGTRARSPQATRWLMQVNFVSYVQLTSRALPSLTDSKGSLVVVSSLLGRVPTSFSTPYSAAKFALDGFFGSLRRELDVQDVNVAITMCVLGLRDRASAAEAVAQRHGRGSLSTGGCPSSPRRQCSSLQLSLEPEHSQRHP

SEQ ID NO: 799776 - protein, 104 aa, Homo sapiens
MPATSVPCPSAGPHRTMKVLLLTGLGALFFAYYWDDNFDPASLQGARVLLTGANAGVGEELAYHYARLGSHLVLTAHTEALLQKEARWLTLVVSTLGGRGKWIT

SEQ ID NO: 799777 - protein, 293 aa, Homo sapiens
MSRIPLGKVLLRNVIRHTDAHNKIQEESDMWKIRELEKQMEDAYRGTKRKMLPSSSSRMRSDGFDEESQRYYWRPKNEISGTLEDDFLKAKSWNKKFYDYEANMPDRWGHSGYKELYPEEFETDSSDQQDITNGKKTSPQVKSSTHESRKHKKSKKSHKKKQKKRSHKKQKKSKKEATDITADSSSEFSEETGASGTRKGKQPHKRKKKSRKKSLKKPALFLEAESNTSHSDDSASSSSEESEERDTKKTKRKKREKKAHTSVANNEIQERTNKRTNWKVATDERSAESSEDD

SEQ ID NO: 799778 - protein, 293 aa, Homo sapiens; identical to SEQ ID NO: 799777

SEQ ID NO: 799779 - protein, 293 aa, Homo sapiens; identical to SEQ ID NO: 799777

SEQ ID NO: 799780 - protein, 200 aa, Homo sapiens
MHCFNNTCDVSYYRWGHSGYKELYPEEFETDSSDQQDITNGKKTSPQVKSSTHESRKHKKSKKSHKKKQKKRSHKKQKKSKKEATDITADSSSEFSEETGASGTRKGKQPHKRKKKSRKKSLKKPALFLEAESNTSHSDDSASSSSEESEERDTKKTKRKKREKKAHTSVANNEIQERTNKRTNWKVATDERSAESSEDD

SEQ ID NO: 799781 - protein, 293 aa, Homo sapiens; identical to SEQ ID NO: 799777

SEQ ID NO: 799782 - protein, 293 aa, Homo sapiens; identical to SEQ ID NO: 799777

SEQ ID NO: 799783 - protein, 226 aa, Homo sapiens
MSRIPLGKVLLRNVIRHTDAHNKIQEESDMWKIRELEKQMEDAYRGTKRKMLPSSSSRMRSDGFDEESQRYYWRPKNEISGTLEDDFLKAKSWNKKFYDYEANMPDRWGHSGYKELYPEEFETDSSDQQDITNGKKTSPQVKSSTHESRKHKKSKKSHKKKQKKRSHKKQKKSKKEATDITADSSSEFSEETGASGTRKGKQPHKRKNRMKKVRGTAKANVGAGKK

SEQ ID NO: 799784 - protein, 47 aa, Homo sapiens
MATLMLAPSHPVYHTCRTEQREEVVCSPMSSPDSSGIGHPGSPGGTG

SEQ ID NO: 799785 - protein, 132 aa, Homo sapiens
MALDLGSLQSPPPRFKRFSCLRLLSSWDYRHAPPCPANFVFLVETGFLHVGQADLKLPTSGDPPASASQSVGIIGMRHHARLIFVFFVKTGFCHVTQAGFKLLGSSDPPASASQTAGITSVGNCTRLHLGYS

SEQ ID NO: 799786 - protein, 111 aa, Homo sapiens
MSHKWNHTVSGIGGFLVSLTSRMTPWTLAVSVTALKVGASGSLFLLMFGCVRSFFLLVGSWSRWLRSEAADFRDFISLSAMDTDGFTPSCILRTMIKFQTLGSFCVPRSRA

SEQ ID NO: 799787 - protein, 85 aa, Homo sapiens
QPRKGLPQCSGGLKGSSSAAKLGAQAEEVPRASEGSEDCQHAVTSQYNFISLSAMDTDGFTPSCILRTMIKFQTLGSFCVPRSRA

SEQ ID NO: 799788 - protein, 272 aa, Homo sapiens
LGTDDPAPLPCTASTSLAVLTVSRSSHQEMGFHHVGQAGLELLNSSDPPTLASQSTGITGVSHRAWREGEFELGLGEWGLEAPLPWRARSQEELWGGKNGGGGTAPDPPAPQVSSHRHQVHQAVLARLEVCVREGVGWHQQLLILEMRMMGAHPLSSQEPHPHPRPPLSPAAPERCISEGGEEMGARCYRLAPASPRPLACHPQPCGFSCGLLWLESTLLATPRSLGRDPSPVRMVEKKSSQKRQRMGAATTWFTAPEWIFLSSLAGRLFWS

SEQ ID NO: 799789 - protein, 473 aa, Homo sapiens
NSCCWLFLLRPFPETDSSFGEQKAPAMQPWHGKAMQRASEAGATAPKASARNARGAPMDPNESPAAPEAALPKAGKFGPARKSGSRQKKSAPDTQERPPVRATGARAKKAPQRAQDTQPSDATSAPGAEGLEPPAAREPALSRAGSCRQRGARCSTKPRPPPGPWDVPSPGLPVSAPILVRRDAAPGASKLRAVLEKLKLSRDDISTAAGMVKGVVDHLLLRLKCDSAFRGVGLLNTGSYYEHVKISAPNEFDVMFKLEVPRIQLEEYSNTRAYYFVKFKRNPKENPLSQFLEGEILSASKMLSKFRKIIKEEINDIKDTDVIMKRKRGGSPAVTLLISEKISVDITLALESKSSWPASTQEGLRIQNWLSAKVRKQLRLKPFYLVPKHAKEGNGFQEETWRLSFSHIEKEILNNHGKSKTCCENKEEKCCRKDCLKLMKYLLEQLKERFKDKKHLDKFSSYHVKTAFFHRLY

SEQ ID NO: 799790 - protein, 548 aa, Homo sapiens
NSCCWLFLLRPFPETDSSFGEQKAPAMQPWHGKAMQRASEAGATAPKASARNARGAPMDPNESPAAPEAALPKAGKFGPARKSGSRQKKSAPDTQERPPVRATGARAKKAPQRAQDTQPSDATSAPGAEGLEPPAAREPALSRAGSCRQRGARCSTKPRPPPGPWDVPSPGLPVSAPILVRRDAAPGASKLRAVLEKLKLSRDDISTAAGMVKGVVDHLLLRLKCDSAFRGVGLLNTGSYYEHVKISAPNEFDVMFKLEVPRIQLEEYSNTRAYYFVKFKRNPKENPLSQFLEGEILSASKMLSKFRKIIKEEINDIKDTDVIMKRKRGGSPAVTLLISEKISVDITLALESKSSWPASTQEGLRIQNWLSAKVRKQLRLKPFYLVPKHAKEGNGFQEETWRLSFSHIEKEILNNHGKSKTCCENKEEKCCRKDCLKLMKYLLEQLKERFKDKKHLDKFSSYHVKTAFFHVCTQNPQDSQWDRKDLGLCFDNCVTYFLQCLRTEKLENYFIPEFNLFSSNLIDKRSKEFLTKQIEYERNNEFPVFDEF

SEQ ID NO: 799791 - protein, 408 aa, Homo sapiens
NSCCWLFLLRPFPETDSSFGEQKAPAMQPWHGKAMQRASEAGATAPKASARNARGAPMDPNESPAAPEAALPKAGKFGPARKSGSRQKKSAPDTQERPPVRATGARAKKAPQRAQDTQPSDATSAPGAEGLEPPAAREPALSRAGSCRQRGARCSTKPRPPPGPWDVPSPGLPVSAPILVRRDAAPGASKLRAVLEKLKLSRDDISTAAGMVKGVVDHLLLRLKCDSAFRGVGLLNTGSYYEHVKISAPNEFDVMFKLEVPRIQLEEYSNTRAYYFVKFKRNPKENPLSQFLEGEILSASKMLSKFRKIIKEEINDIKDTDVIMKRKRGGSPAVTLLISEKISVDITLALESKSSWPASTQEGLRIQNWLSAKVRKQLRLKPFYLVPKHAKEGNGFQGILNIKVNLKK

SEQ ID NO: 799792 - protein, 174 aa, Homo sapiens
MTRTQKGKTFLPHCFYQSLPPRLGWGMILNYSKLKGKEECASVSSVPMVFFSSQYRLHRKSQYLKMAAANLTFSQEVVWQRGLPSIPYSQYSFDHLYNTNDIIHTPQIRKARPQKPVSFKFLGSSSPLTGDTSLAVKTESSANPEKKLKKSKPASTVREAPRPLIHHPCMHPDM

SEQ ID NO: 799793 - protein, 551 aa, Homo sapiens
MDGIVPDIAVGTKRGSDELFSTCVTNGPFIMSSNSASAANGNDSKKFKGDSRSAGVPSRVIHIRKLPIDVTEGEVISLGLPFGKVTNLLMLKGKNQAFIEMNTEEAANTMVNYYTSVTPVLRGQPIYIQFSNHKELKTDSSPNQARAQAALQAVNSVQSGNLALAASAAAVDAGMAMAGQSPVLRIIVENLFYPVTLDVLHQIFSKFGTVLKIITFTKNNQFQALLQYADPVSAQHAKLSLDGQNIYNACCTLRIDFSKLTSLNVKYNNDKSRDYTRPDLPSGDSQPSLDQTMAAAFASPYAGAGFPPTFAIPQAAAGLSVPNVHGALAPLAIPSAAAAAAAAGRIAIPGLAGAGNSVLLVSNLNPERVTPQSLFILFGVYGDVQRVKILFNKKENALVQMADGNQAQLAMSHLNGHKLHGKPIRITLSKHQNVQLPREGQEDQGLTKDYGNSPLHRFKKPGSKNFQNIFPPSATLHLSNIPPSVSEEDLKVLFSSNGGVVKGFKFFQKDRKMALIQMGSVEEAVQALIDLHNHDLGENHHLRVSFSKSTI

SEQ ID NO: 799794 - protein, 557 aa, Homo sapiens
MDGIVPDIAVGTKRGSDELFSTCVTNGPFIMSSNSASAANGNDSKKFKGDSRSAGVPSRVIHIRKLPIDVTEGEVISLGLPFGKVTNLLMLKGKNQAFIEMNTEEAANTMVNYYTSVTPVLRGQPIYIQFSNHKELKTDSSPNQARAQAALQAVNSVQSGNLALAASAAAVDAGMAMAGQSPVLRIIVENLFYPVTLDVLHQIFSKFGTVLKIITFTKNNQFQALLQYADPVSAQHAKLSLDGQNIYNACCTLRIDFSKLTSLNVKYNNDKSRDYTRPDLPSGDSQPSLDQTMAAAFGAPGIISASPYAGAGFPPTFAIPQAAGLSVPNVHGALAPLAIPSAAAAAAAAGRIAIPGLAGAGNSVLLVSNLNPERVTPQSLFILFGVYGDVQRVKILFNKKENALVQMADGNQAQLAMSHLNGHKLHGKPIRITLSKHQNVQLPREGQEDQGLTKDYGNSPLHRFKKPGSKNFQNIFPPSATLHLSNIPPSVSEEDLKVLFSSNGGVVKGFKFFQKDRKMALIQMGSVEEAVQALIDLHNHDLGENHHLRVSFSKSTI

SEQ ID NO: 799795 - protein, 367 aa, Homo sapiens
MDGIVPDIAVGTKRGSDELFSTCVTNGPFIMSSNSASAANGNDSKKFKGDSRSAGVPSRVIHIRKLPIDVTEGEVISLGLPFGKVTNLLMLKGKNQAFIEMNTEEAANTMVNYYTSVTPVLRGQPIYIQFSNHKELKTDSSPNQARAQAALQAVNSVQSGNLALAASAAAVDAGMAMAGQSPVLRIIVENLFYPVTLDVLHQIFSKFGTVLKIITFTKNNQFQALLQYADPVSAQHAKLSLDGQNIYNACCTLRIDFSKLTSLNVKYNNDKSRDYTRPDLPSGDSQPSLDQTMAAAFQAFPFRTSTAPWPPWPSPRRRRQLRRQVGSPSRAWRGQEILYCWSATSTQRESHPKASLFFSASTVTCSA

SEQ ID NO: 799796 - protein, 441 aa, Homo sapiens
MDGIVPDIAVGTKRGSDELFSTCVTNGPFIMSSNSASAANGNDSKKFKGDSRSAGVPSRVIHIRKLPIDVTEGEVISLGLPFGKVTNLLMLKGKNQAFIEMNTEEAANTMVNYYTSVTPVLRGQPIYIQFSNHKELKTDSSPNQARAQAALQAVNSVQSGNLALAASAAAVDAGMAMAGQSPVLRIIVENLFYPVTLDVLHQIFSKFGTVLKIITFTKNNQFQALLQYADPVSAQHAKLSLDGQNIYNACCTLRIDFSKLTSLNVKYNNDKSRDYTRPDLPSGDSQPSLDQTMAAAFGAPGIISASPYAGAGFPPTFAIPQAAGIQTLGLGSPATACPHHLPRQLRIHGGSLGGLGTRVPGQGPFPGEGTPRPQSRLGQGSGRTGLWRPTCGRRQPEAANRTVFVVWFPSSTSGRARGPPVVGGMSLVVEFEWPGKRAARG

SEQ ID NO: 799797 - protein, 511 aa, Homo sapiens
MDGIVPDIAVGTKRGSDELFSTCVTNGPFIMSSNSASAANGNDSKKFKGDSRSAGVPSRVIHIRKLPIDVTEGEVISLGLPFGKVTNLLMLKGKNQAFIEMNTEEAANTMVNYYTSVTPVLRGQPIYIQFSNHKELKTDSSPNQARAQAALQAVNSVQSGNLALAASAAAVDAGMAMAGQSPVLRIIVENLFYPVTLDVLHQIFSKFGTVLKIITFTKNNQFQALLQYADPVSAQHAKLSLDGQNIYNACCTLRIDFSKLTSLNVKYNNDKSRDYTRPDLPSGDSQPSLDQTMAAAFGAPGIISASPYAGAGFPPTFAIPQAAGIQTLGLGSPATACPHHLPRQLRIHGGSLGGLGTRVPGQGPFPGEGTPRPQSRLSSMTGGGTCVRGRPPASLLGPGPGRPSAGRGRSSACRPAAASSAWRHGRACAVVPGRALLAEGPVSVLAEPELFCAVGGAHADEPRPGPARAVRRGGRWCRSRRVAVRGSGDPTGTQGRARARAASRAARLLGA

SEQ ID NO: 799798 - protein, 367 aa, Homo sapiens; identical to SEQ ID NO: 799795

SEQ ID NO: 799799 - protein, 557 aa, Homo sapiens; identical to SEQ ID NO: 799794

SEQ ID NO: 799800 - protein, 356 aa, Homo sapiens
MDGIVPDIAVGTKRGSDELFSTCVTNGPFIMSSNSASAANGNDSKKFKGDSRSAGVPSRVIHIRKLPIDVTEGEVISLGLPFGKVTNLLMLKGKNQAFIEMNTEEAANTMVNYYTSVTPVLRGQPIYIQFSNHKELKTDSSPNQARAQAALQAVNSVQSGNLALAASAAAVDAGMAMAGQSPVLRIIVENLFYPVTLDVLHQIFSKFGTVLKIITFTKNNQFQALLQYADPVSAQHAKLSLDGQNIYNACCTLRIDFSKLTSLNVKYNNDKSRDYTRPDLPSGDSQPSLDQTMAAAFQAFPFRTSTAPWPPWPSPRRRRQLRRQVGSPSRAWRGQEILYCWSATSTQRASTVTCSA

SEQ ID NO: 799801 - protein, 546 aa, Homo sapiens
MDGIVPDIAVGTKRGSDELFSTCVTNGPFIMSSNSASAANGNDSKKFKGDSRSAGVPSRVIHIRKLPIDVTEGEVISLGLPFGKVTNLLMLKGKNQAFIEMNTEEAANTMVNYYTSVTPVLRGQPIYIQFSNHKELKTDSSPNQARAQAALQAVNSVQSGNLALAASAAAVDAGMAMAGQSPVLRIIVENLFYPVTLDVLHQIFSKFGTVLKIITFTKNNQFQALLQYADPVSAQHAKLSLDGQNIYNACCTLRIDFSKLTSLNVKYNNDKSRDYTRPDLPSGDSQPSLDQTMAAAFGAPGIISASPYAGAGFPPTFAIPQAAGLSVPNVHGALAPLAIPSAAAAAAAAGRIAIPGLAGAGNSVLLVSNLNPEGVYGDVQRVKILFNKKENALVQMADGNQAQLAMSHLNGHKLHGKPIRITLSKHQNVQLPREGQEDQGLTKDYGNSPLHRFKKPGSKNFQNIFPPSATLHLSNIPPSVSEEDLKVLFSSNGGVVKGFKFFQKDRKMALIQMGSVEEAVQALIDLHNHDLGENHHLRVSFSKSTI

SEQ ID NO: 799802 - protein, 527 aa, Homo sapiens
MSSNSASAANGNDSKKFKGDSRSAGVPSRVIHIRKLPIDVTEGEVISLGLPFGKVTNLLMLKGKNQAFIEMNTEEAANTMVNYYTSVTPVLRGQPIYIQFSNHKELKTDSSPNQARAQAALQAVNSVQSGNLALAASAAAVDAGMAMAGQSPVLRIIVENLFYPVTLDVLHQIFSKFGTVLKIITFTKNNQFQALLQYADPVSAQHAKLSLDGQNIYNACCTLRIDFSKLTSLNVKYNNDKSRDYTRPDLPSGDSQPSLDQTMAAAFGAPGIISASPYAGAGFPPTFAIPQAAGLSVPNVHGALAPLAIPSAAAAAAAAGRIAIPGLAGAGNSVLLVSNLNPERVTPQSLFILFGVYGDVQRVKILFNKKENALVQMADGNQAQLAMSHLNGHKLHGKPIRITLSKHQNVQLPREGQEDQGLTKDYGNSPLHRFKKPGSKNFQNIFPPSATLHLSNIPPSVSEEDLKVLFSSNGGVVKGFKFFQKDRKMALIQMGSVEEAVQALIDLHNHDLGENHHLRVSFSKSTI

SEQ ID NO: 799803 - protein, 557 aa, Homo sapiens; identical to SEQ ID NO: 799794

SEQ ID NO: 799804 - protein, 557 aa, Homo sapiens; identical to SEQ ID NO: 799794

SEQ ID NO: 799805 - protein, 557 aa, Homo sapiens; identical to SEQ ID NO: 799794

SEQ ID NO: 799806 - protein, 557 aa, Homo sapiens; identical to SEQ ID NO: 799794

SEQ ID NO: 799807 - protein, 441 aa, Homo sapiens; identical to SEQ ID NO: 799796

SEQ ID NO: 799808 - protein, 441 aa, Homo sapiens; identical to SEQ ID NO: 799796

SEQ ID NO: 799809 - protein, 203 aa, Homo sapiens
MDGIVPDIAVGTKRGSDELFSTCVTNGPFIMSSNSASAANGNDSKKFKGDSRSAGVPSRVIHIRKLPIDVTEGEVISLGLPFGKVTNLLMLKGKNQGLTKDYGNSPLHRFKKPGSKNFQNIFPPSATLHLSNIPPSVSEEDLKVLFSSNGGVVKGFKFFQKDRKMALIQMGSVEEAVQALIDLHNHDLGENHHLRVSFSKSTI

SEQ ID NO: 799810 - protein, 557 aa, Homo sapiens; identical to SEQ ID NO: 799794

SEQ ID NO: 799811 - protein, 441 aa, Homo sapiens; identical to SEQ ID NO: 799796

SEQ ID NO: 799812 - protein, 441 aa, Homo sapiens; identical to SEQ ID NO: 799796

SEQ ID NO: 799813 - protein, 265 aa, Homo sapiens
MDGIVPDIAVGTKRGSDELFSTCVTNGPFIMSSNSASAANGNDSKKFKGDSRSAGVPSRVIHIRKLPIDVTEGEVISLGLPFGKVTNLLMLKGKNQAFIEMNTEEAANTMVNYYTSVTPVLRGQPIYIQFSNHKELKTDSSPNQARAQAALQAVNSVQSGNLALAASAAAVDAGMAMAGQSPVLRIIVENLFYPVTLDVLHQIFSKFGTVLKIITFTKNNQFQALRREAARQVPRLTEFTSAGLLCRAWLGELSVFSSLWLENWM

SEQ ID NO: 799814 - protein, 150 aa, Homo sapiens
MDGIVPDIAVGTKRGSDELFSTCVTNGPFIMSSNSASAANGNDSKKFKGDSRSAGVPSRVIHIRKLPIDVTEGEVISLGLPFGKVTNLLMLKGKNQAFIEMNTEEAANTMVNYYTSVTPVLRGQPIYIQFSSCLLCALSNRPRVLSRGLS

SEQ ID NO: 799815 - protein, 102 aa, Homo sapiens
AAAPRVCPPPRGRRGLSRDPRGRRHGEGPSRLSGRGSLSGRLCWAGFPWERWEPPPERPCPAERFLREALPGNRKRERLEMFRILSVFLRSFSWVQSLLKVC

SEQ ID NO: 799816 - protein, 557 aa, Homo sapiens; identical to SEQ ID NO: 799794

SEQ ID NO: 799817 - protein, 367 aa, Homo sapiens; identical to SEQ ID NO: 799795

SEQ ID NO: 799818 - protein, 127 aa, Homo sapiens
  misc_feature (30)..(30): Xaa can be any naturally occurring amino acid
VGLADLVPPVASAHGDDGELGQDDGPTDGXGHLLGALNTQTDVAIVVPDSNKCLEPGALAGTGLLLHWHNLQNLILEEAVFYGDTNVYFANSNSRLSIVTAEPQGTPRTFRCLTRWLVTRREPIKTV

SEQ ID NO: 799819 - protein, 557 aa, Homo sapiens; identical to SEQ ID NO: 799794

SEQ ID NO: 799820 - protein, 441 aa, Homo sapiens; identical to SEQ ID NO: 799796

SEQ ID NO: 799821 - protein, 441 aa, Homo sapiens; identical to SEQ ID NO: 799796

SEQ ID NO: 799822 - protein, 367 aa, Homo sapiens; identical to SEQ ID NO: 799795

SEQ ID NO: 799823 - protein, 461 aa, Homo sapiens
MDGIVPDIAVGTKRGSDELFSTCVTNGPFIMSSNSASAANGNDSKKFKGDSRSAGVPSRVIHIRKLPIDVTEGEVISLGLPFGKVTNLLMLKGKNQAFIEMNTEEAANTMVNYYTSVTPVLRGQPIYIQFSNHKELKTDSSPNQARAQAALQAVNSVQSGNLALAASAAAVDAGMAMAGQSPVLRIIVENLFYPVTLDVLHQIFSKFGTVLKIITFTKNNQFQALLQYADPVSAQHAKLSLDGQNIYNACCTLRIDFSKLTSLNVKYNNDKSRDYTRPDLPSGDSQPSLDQTMAAAFGAPGIISASPYAGAGFPPTFAIPQAAGRPFRSERPRRPGPPGHPLGGGGSCGGRSDRHPGPGGGRKFCIAGQQPQPRGTWAFPPRRRSSRKSEQGMLCSGSGPGAAPPLAVSAPLPWQPLCCSAETLLFQDGLSFPLFLNSHLGSRFLLHDTQNELFFGYPKAI

SEQ ID NO: 799824 - protein, 261 aa, Homo sapiens [sequence omitted]

SEQ ID NO: 799825 - protein, 151 aa, Homo sapiens
MADGNQAQLAMSHLNGHKLHGKPIRITLSKHQNVQLPREGQEDQGLTKDYGNSPLHRFKKPGSKNFQNIFPPSATLHLSNIPPSVSEEDLKVLFSSNGGVVKGFKFFQKDRKMALIQMGSVEEAVQALIDLHNHDLGENHHLRVSFSKSTI

SEQ ID NO: 799826 - protein, 203 aa, Homo sapiens; identical to SEQ ID NO: 799809

SEQ ID NO: 799827 - protein, 133 aa, Homo sapiens
MDGIVPDIAVGTKRGSDELFSTCVTNGPFIMSSNSASAANGNDSKKFKGDSRSAGVPSRVIHIRKLPIDVTEGEVISLGLPFGKVTNLLMLKGKNQAFIEMNTEEAAQALIDLHNHDLGENHHLRVSFSKSTI

SEQ ID NO: 799828 - protein, 441 aa, Homo sapiens; identical to SEQ ID NO: 799796

SEQ ID NO: 799829 - protein, 441 aa, Homo sapiens; identical to SEQ ID NO: 799796

SEQ ID NO: 799830 - protein, 458 aa, Homo sapiens
MDGIVPDIAVGTKRGSDELFSTCVTNGPFIMSSNSASAANGNDSKKFKGDSRSAGVPSRVIHIRKLPIDVTEGEVISLGLPFGKVTNLLMLKGKNQAFIEMNTEEAANTMVNYYTSVTPVLRGQPIYIQFSNHKELKTDSSPNQARAQAALQAVNSVQSGNLALAASAAAVDAGMAMAGQSPVLRIIVENLFYPVTLDVLHQIFSKFGTVLKIITFTKNNQFQALLQYADPVSAQHAKLSLDGQNIYNACCTLRIDFSKLTSLNVKYNNDKSRDYTRPDLPSGDSQPSLDQTMAAAFGAPGIISASPYAGAGFPPTFAIPQAAGLSVPNVHGALAPLAIPSAAAAAAAAGRIAIPGLAGAGNSVLLVSNLNPEVTPERGRGPGRLLQDHAAGARRPRLRHPNPSPLIKSRDSPFTPPPGPSLLPPGGLPAAPAAELVDIISVLYTLQLQTSVPSNISS

SEQ ID NO: 799831 - protein, 557 aa, Homo sapiens; identical to SEQ ID NO: 799794

SEQ ID NO: 799832 - protein, 441 aa, Homo sapiens; identical to SEQ ID NO: 799796

SEQ ID NO: 799833 - protein, 441 aa, Homo sapiens; identical to SEQ ID NO: 799796

SEQ ID NO: 799834 - protein, 149 aa, Homo sapiens
MDGIVPDIAVGTKRGSDELFSTCVTNGPFIMSSNSASAANGNDSKKFKGDSRSAGVPSRVIHIRKLPIDVTEGEVISLGLPFGKVTNLLMLKGKNQAFIEMNTEEAANTMVNYYTSVTPVLRGQPIYIQFSNHKELKTDSSPNRPLTGT

SEQ ID NO: 799835 - protein, 111 aa, Homo sapiens
MQLYLYSMSTAIMGLDEQARTVEREEKKENSGAIRSDRCVKASFQQGLANNISFYLCPPGYRSTYAQILFCLCRPETARPTPSPPLPPPQPTQREEDENEDLYDDPHPLNE

SEQ ID NO: 799836 - protein, 244 aa, Homo sapiens
MKERRASQKLSSKSIMDPNQNVKCKIVVVGDSQCGKTALLHVFAKDCFPENYVPTVFENYTASFEIDTQRIELSLWDTSGSPYYDNVRPLSYPDSDAVLICFDISRPETLDSVLKKWKGEIQEFCPNTKMLLVGCKSDLRTDVSTLVELSNHRQTPVSYDQGANMAKQIGAATYIECSALQSENSVRDIFHVATLACVNKTNKNVKRNKSQRATKRISHMPSRPELSAVATDLRKDKAKSCTVM

SEQ ID NO: 799837 - protein, 93 aa, Homo sapiens
KIPVPRENKATSMKERRASQKLSSKSIMDPNQNVKCKIVVVGDSQCGKTALLHVFAKDCFPEVSVAGRGFHEGVGQWDPSPEVGLPAFIRFPL

SEQ ID NO: 799838 - protein, 244 aa, Homo sapiens; identical to SEQ ID NO: 799836

SEQ ID NO: 799839 - protein, 146 aa, Homo sapiens [sequence omitted]

SEQ ID NO: 799840 - protein, 163 aa, Homo sapiens
ANACSFLIAQPIYCLLQEAFLNPPVSKGEPTAKKGLVKSSGVHGHQDWEQAGWLHPNPPAFRRRAHDHREFSLHVHPFKGLGFKGSSFHRIIPQFICQGSDFTNHGGTRGLRRHGTKCPMAHLALMEASKGQDQHPLLRRKERAQQKQGESAITSQPRSWKLT

SEQ ID NO: 799841 - protein, 104 aa, Homo sapiens
MTQSWGAREKVSPIHVLLPEPQGPNPSSSPAGPSPPRGLNPPRNPRRKRLGRSSGPTTPIFTLCPLPSRPSPAGPPLPTPPRAAVVANAGRSQLPCGNADSLVG

SEQ ID NO: 799842 - protein, 119 aa, Homo sapiens
MDIKIGNKPAGCIQTLLRSDVVPMTTENFLYMCTHLKDSASREAASTALSPSSFARAVISQTTVAPGVCAGMALSVPWHIWPSWRPQKGRTSTLFYGGRNGHSRNKESQQLPASQGPGS

SEQ ID NO: 799843 - protein, 119 aa, Homo sapiens; identical to SEQ ID NO: 799842

SEQ ID NO: 799844 - protein, 110 aa, Homo sapiens
MDIKIGNKPAGCIQTLLRSDVVPMTTENFLYMCTHLKDSASREAASTALSPSSFARAVISQTTVAPGVCAGMALSVPWHIWPSWRPQKGRTSTLFYGGRNGHSRYMMWSN

SEQ ID NO: 799845 - protein, 544 aa, Homo sapiens
AASPPPPPPDAGAAFWKVREGSEGLPLLHCGRPESGSIRPSRANPDTAEFAMPENVAPRSGATAGAAGGRGKGAYQDRDKPAQIRFSNISAAKAVADAIRTSLGPKGMDKMIQDGKGDVTITNDGATILKQMQVLHPAARMLVELSKAQDIEAGDGTTSVVIIAGSLLDSCTKLLQKGIHPTIISESFQKALEKGIEILTDMSRPVELSDRETLLNSATTSLNSKVVSQYSSLLSPMSVNAVMKVIDPATATSVDLRDIKIVKKLGGTIDDCELVEGLVLTQKVSNSGITRVEKAKIGLIQFCLSAPKTDMDNQIVVSDYAQMDRVLREERAYILNLVKQIKKTGCNVLLIQKSILRDALSDLALHFLNKMKIMVIKDIEREDIEFICKTIGTKPVAHIDQFTADMLGSAELAEEVNLNGSGKLLKITGCASPGKTVTIVVRGSNKLVIEEAERSIHDALCVIRCLVKKRALIAGGGAPEIELALRLTEYSRTLSGMESYCVRAFADAMEVIPSTLAENAGLNPISTVTELRNRHAQGRKNCRH

SEQ ID NO: 799846 - protein, 543 aa, Homo sapiens
HGSYSPAYVPRLGGGKVREGSEGLPLLHCGRPESGSIRPSRANPDTAEFAMPENVAPRSGATAGAAGGRGKGAYQDRDKPAQIRFSNISAAKAVADAIRTSLGPKGMDKMIQDGKGDVTITNDGATILKQMQVLHPAARMLVELSKAQDIEAGDGTTSVVIIAGSLLDSCTKLLQKGIHPTIISESFQKALEKGIEILTDMSRPVELSDRETLLNSATTSLNSKVVSQYSSLLSPMSVNAVMKVIDPATATSVDLRDIKIVKKLGGTIDDCELVEGLVLTQKVSNSGITRVEKAKIGLIQFCLSAPKTDMDNQIVVSDYAQMDRVLREERAYILNLVKQIKKTGCNVLLIQKSILRDALSDLALHFLNKMKIMVIKDIEREDIEFICKTIGTKPVAHIDQFTADMLGSAELAEEVNLNGSGKLLKITGCASPGKTVTIVVRGSNKLVIEEAERSIHDALCVIRCLVKKRALIAGGGAPEIELALRLTEYSRTLSGMESYCVRAFADAMEVIPSTLAENAGLNPISTVTELRNRHAQGRKNCRH

SEQ ID NO: 799847 - protein, 550 aa, Homo sapiens
KLGTRLRLIGRGLPPVRRSAFWKVREGSEGLPLLHCGRPESGSIRPSRANPDTAEFAMPENVAPRSGATAGAAGGRGKGAYQDRDKPAQIRFSNISAAKAVADAIRTSLGPKGMDKMIQDGKGDVTITNDGATILKQMQVLHPAARMLVELSKAQDIEAGDGTTSVVIIAGSLLDSCTKLLQKGIHPTIISESFQKALEKGIEILTDMSRPVELSDRETLLNSATTSLNSKVVSQYSSLLSPMSVNAVMKVIDPATATSVDLRDIKIVKKLGGTIDDCELVEGLVLTQKVSNSGITRVEKAKIGLIQFCLSAPKTDMDNQIVVSDYAQMDRVLREERAYILNLVKQIKKTGCNVLLIQKSILRDALSDLALHFLNKMKIMVIKDIEREDIEFICKTIGTKPVAHIDQFTADMLGSAELAEEVNLNGSGKLLKITGCASPGKTVTIVVRGSNKLVIEEAERSIHDALCVIRCLVKKRALIAGGGAPEIELALRLTEYSRTLSGMESYCVRAFADAMEVIPSTLAENAGLNPISTVTELRNRHAQGRKNCRH

SEQ ID NO: 799848 - protein, 525 aa, Homo sapiens
VTCSTSVQFASVWPESGSIRPSRANPDTAEFAMPENVAPRSGATAGAAGGRGKGAYQDRDKPAQIRFSNISAAKAVADAIRTSLGPKGMDKMIQDGKGDVTITNDGATILKQMQVLHPAARMLVELSKAQDIEAGDGTTSVVIIAGSLLDSCTKLLQKGIHPTIISESFQKALEKGIEILTDMSRPVELSDRETLLNSATTSLNSKVVSQYSSLLSPMSVNAVMKVIDPATATSVDLRDIKIVKKLGGTIDDCELVEGLVLTQKVSNSGITRVEKAKIGLIQFCLSAPKTDMDNQIVVSDYAQMDRVLREERAYILNLVKQIKKTGCNVLLIQKSILRDALSDLALHFLNKMKIMVIKDIEREDIEFICKTIGTKPVAHIDQFTADMLGSAELAEEVNLNGSGKLLKITGCASPGKTVTIVVRGSNKLVIEEAERSIHDALCVIRCLVKKRALIAGGGAPEIELALRLTEYSRTLSGMESYCVRAFADAMEVIPSTLAENAGLNPISTVTELRNRHAQGRKNCRH

SEQ ID NO: 799849 - protein, 544 aa, Homo sapiens; identical to SEQ ID NO: 799845

SEQ ID NO: 799850 - protein, 544 aa, Homo sapiens; identical to SEQ ID NO: 799845

SEQ ID NO: 799851 - protein, 544 aa, Homo sapiens; identical to SEQ ID NO: 799845

SEQ ID NO: 799852 - protein, 544 aa, Homo sapiens; identical to SEQ ID NO: 799845

SEQ ID NO: 799853 - protein, 544 aa, Homo sapiens; identical to SEQ ID NO: 799845

SEQ ID NO: 799854 - protein, 544 aa, Homo sapiens; identical to SEQ ID NO: 799845

SEQ ID NO: 799855 - protein, 544 aa, Homo sapiens; identical to SEQ ID NO: 799845

SEQ ID NO: 799856 - protein, 544 aa, Homo sapiens; identical to SEQ ID NO: 799845

SEQ ID NO: 799857 - protein, 544 aa, Homo sapiens; identical to SEQ ID NO: 799845

SEQ ID NO: 799858 - protein, 508 aa, Homo sapiens
  misc_feature (15)..(15): Xaa can be any naturally occurring amino acid
MNSVHVSHNVRLTLXGSLDLVVAWRSAPVVTGSHQSCDQLQSTRPKNPAFSNISAAKAVADAIRTSLGPKGMDKMIQDGKGDVTITNDGATILKQMQVLHPAARMLVELSKAQDIEAGDGTTSVVIIAGSLLDSCTKLLQKGIHPTIISESFQKALEKGIEILTDMSRPVELSDRETLLNSATTSLNSKVVSQYSSLLSPMSVNAVMKVIDPATATSVDLRDIKIVKKLGGTIDDCELVEGLVLTQKVSNSGITRVEKAKIGLIQFCLSAPKTDMDNQIVVSDYAQMDRVLREERAYILNLVKQIKKTGCNVLLIQKSILRDALSDLALHFLNKMKIMVIKDIEREDIEFICKTIGTKPVAHIDQFTADMLGSAELAEEVNLNGSGKLLKITGCASPGKTVTIVVRGSNKLVIEEAERSIHDALCVIRCLVKKRALIAGGGAPEIELALRLTEYSRTLSGMESYCVRAFADAMEVIPSTLAENAGLNPISTVTELRNRHAQGRKNCRH

SEQ ID NO: 799859 - protein, 544 aa, Homo sapiens; identical to SEQ ID NO: 799845

SEQ ID NO: 799860 - protein, 343 aa, Homo sapiens
MSRPVELSDRETLLNSATTSLNSKVVSQYSSLLSPMSVNAVMKVIDPATATSVDLRDIKIVKKLGGTIDDCELVEGLVLTQKVSNSGITRVEKAKIGLIQFCLSAPKTDMDNQIVVSDYAQMDRVLREERAYILNLVKQIKKTGCNVLLIQKSILRDALSDLALHFLNKMKIMVIKDIEREDIEFICKTIGTKPVAHIDQFTADMLGSAELAEEVNLNGSGKLLKITGCASPGKTVTIVVRGSNKLVIEEAERSIHDALCVIRCLVKKRALIAGGGAPEIELALRLTEYSRTLSGMESYCVRAFADAMEVIPSTLAENAGLNPISTVTELRNRHAQGRKNCRH

SEQ ID NO: 799861 - protein, 544 aa, Homo sapiens; identical to SEQ ID NO: 799845

SEQ ID NO: 799862 - protein, 174 aa, Homo sapiens
MKIMVIKDIEREDIEFICKTIGTKPVAHIDQFTADMLGSAELAEEVNLNGSGKLLKITGCASPGKTVTIVVRGSNKLVIEEAERSIHDALCVIRCLVKKRALIAGGGAPEIELALRLTEYSRTLSGMESYCVRAFADAMEVIPSTLAENAGLNPISTVTELRNRHAQGRKNCRH

SEQ ID NO: 799863 - protein, 544 aa, Homo sapiens; identical to SEQ ID NO: 799845

SEQ ID NO: 799864 - protein, 174 aa, Homo sapiens; identical to SEQ ID NO: 799862

SEQ ID NO: 799865 - protein, 505 aa, Homo sapiens
AASPPPPPPDAGAAFWKVREGSEGLPLLHCGRPESGSIRPSRANPDTAEFAMPENVAPRSGATAGAAGGRGKGAYQDRDKPAQIRFSNISAAKAVADAIRTSLGPKGMDKMIQDGKGDVTITNDGATILKQMQVLHPAARMLVELSKAQDIEAGDGTTSVVIIAGSLLDSCTKLLQKGIHPTIISESFQKALEKGIEILTDMSRPVELSDRETLLNSATTSLNSKVVSQYSSLLSPMSVNAVMKVIDPATATSVDLRDIKIVKKLGGTIDDCELVEGLVLTQKVSNSGITRVEKAKIGLIQFCLSAPKTDMDNQIVVSDYAQMDRVLREERAYILNLVKQIKKTGCNVLLIQKSILRDALSDLALHFLNKMKIMVIKDIEREDIEFICKTIGTKPVAHIDQFTADMLGSAELAEEVNLNGSGKLLKITGCASPGKTVTIVVRGSNKLVIEEAERSIHDAHVYRGKAHKGLWGRGPKMSCPIRDSKDGWTKGGCSGDPTGKGNLRK

SEQ ID NO: 799866 - protein, 336 aa, Homo sapiens
AASPPPPPPDAGAAFWKVREGSEGLPLLHCGRPESGSIRPSRANPDTAEFAMPENVAPRSGATAGAAGGRGKGAYQDRDKPAQIRFSNISAAKAVADAIRTSLGPKGMDKMIQDGKGDVTITNDGATILKQMQVLHPAARMLVELSKAQDIEAGDGTTSVVIIAGSLLDSCTKLLQKGIHPTIISESFQKALEKGIEILTDMSRPVELSDRETLLNSATTSLNSKVVSQYSSLLSPMSVNAVMKVIDPATATSVDLRDIKIVKKLGGTIDDCELVEGLVLTQKVSNSGITRVEKAKIGLIQFCLSAPKTDMDNQIVVSDYAQMDRMFRYQLDSIMS

SEQ ID NO: 799867 - protein, 70 aa, Homo sapiens
GRLLLLNSRPRRRKCRPESHFYSNRTKKPACPGEKKLQALMSEKGGISNILEELVVQPLLVSSQCSDSCN

SEQ ID NO: 799868 - protein, 544 aa, Homo sapiens; identical to SEQ ID NO: 799845

SEQ ID NO: 799869 - protein, 544 aa, Homo sapiens; identical to SEQ ID NO: 799845

SEQ ID NO: 799870 - protein, 526 aa, Homo sapiens
AASPPPPPPDAGAAFWKVREGSEGLPLLHCGRPESGSIRPSRANPDTAEFAMPENVAPRSGATAGAAGGRGKGAYQDRDKPAQIRFSNISAAKAVADAIRTSLGPKGMDKMIQDGKGDVTITNDGATILKQMQVLHPAARMLVELSKAQDIEAGDGTTSVVIIAGSLLDSCTKLLQKGIHPTIISESFQKALEKGIEILTDMSRPVELSDRETLLNSATTSLNSKVVSQYSSLLSPMSVNAVMKVIDPATATSVDLRDIKIVKKLGGTIDDCELVEGLVLTQKVSNSGITRVEKAKIGLIQFCLSAPVLREERAYILNLVKQIKKTGCNVLLIQKSILRDALSDLALHFLNKMKIMVIKDIEREDIEFICKTIGTKPVAHIDQFTADMLGSAELAEEVNLNGSGKLLKITGCASPGKTVTIVVRGSNKLVIEEAERSIHDALCVIRCLVKKRALIAGGGAPEIELALRLTEYSRTLSGMESYCVRAFADAMEVIPSTLAENAGLNPISTVTELRNRHAQGRKNCRH

SEQ ID NO: 799871 - protein, 410 aa, Homo sapiens
GRVGRPTRPELSKAQDIEAGDGTTSVVIIAGSLLDSCTKLLQKGIHPTIISESFQKALEKGIEILTDMSRPVELSDRETLLNSATTSLNSKVVSQYSSLLSPMSVNAVMKVIDPATATSVDLRDIKIVKKLGGTIDDCELVEGLVLTQKVSNSGITRVEKAKIGLIQFCLSAPKTDMDNQIVVSDYAQMDRVLREERAYILNLVKQIKKTGCNVLLIQKSILRDALSDLALHFLNKMKIMVIKDIEREDIEFICKTIGTKPVAHIDQFTADMLGSAELAEEVNLNGSGKLLKITGCASPGKTVTIVVRGSNKLVIEEAERSIHDALCVIRCLVKKRALIAGGGAPEIELALRLTEYSRTLSGMESYCVRAFADAMEVIPSTLAENAGLNPISTVTELRNRHAQGRKNCRH

SEQ ID NO: 799872 - protein, 526 aa, Homo sapiens
AASPPPPPPDAGAAFWKVREGSEGLPLLHCGRPESGSIRPSRANPDTAEFAMPENVAPRSGATAGAAGGRGKGAYQDRDKPAQIRFSNISAAKAVADAIRTSLGPKGMDKMIQDGKGDVTITNDGATILKQMQVLHPAARMLVELSKAQDIEAGDGTTSVVIIAGSLLDSCTKLLQKGIHPTIISESFQKALGETLLNSATTSLNSKVVSQYSSLLSPMSVNAVMKVIDPATATSVDLRDIKIVKKLGGTIDDCELVEGLVLTQKVSNSGITRVEKAKIGLIQFCLSAPKTDMDNQIVVSDYAQMDRVLREERAYILNLVKQIKKTGCNVLLIQKSILRDALSDLALHFLNKMKIMVIKDIEREDIEFICKTIGTKPVAHIDQFTADMLGSAELAEEVNLNGSGKLLKITGCASPGKTVTIVVRGSNKLVIEEAERSIHDALCVIRCLVKKRALIAGGGAPEIELALRLTEYSRTLSGMESYCVRAFADAMEVIPSTLAENAGLNPISTVTELRNRHAQGRKNCRH

SEQ ID NO: 799873 - protein, 234 aa, Homo sapiens
MDNQIVVSDYAQMDRVLREERAYILNLVKQIKKTGCNVLLIQKSILRDALSDLALHFLNKMKIMVIKDIEREDIEFICKTIGTKPVAHIDQFTADMLGSAELAEEVNLNGSGKLLKITGCASPGKTVTIVVRGSNKLVIEEAERSIHDALCVIRCLVKKRALIAGGGAPEIELALRLTEYSRTLSGMESYCVRAFADAMEVIPSTLAENAGLNPISTVTELRNRHAQGRKNCRH

SEQ ID NO: 799874 - protein, 200 aa, Homo sapiens
LAGLTLFINHRYRDALSDLALHFLNKMKIMVIKDIEREDIEFICKTIGTKPVAHIDQFTADMLGSAELAEEVNLNGSGKLLKITGCASPGKTVTIVVRGSNKLVIEEAERSIHDALCVIRCLVKKRALIAGGGAPEIELALRLTEYSRTLSGMESYCVRAFADAMEVIPSTLAENAGLNPISTVTELRNRHAQGRKNCRH

SEQ ID NO: 799875 - protein, 452 aa, Homo sapiens
AASPPPPPPDAGAAFWKVREGSEGLPLLHCGRPESGSIRPSRANPDTAEFAMPENVAPRSGATAGAAGGRGKGAYQDRDKPAQIRFSNISAAKAVADAIRTSLGPKGMDKMIQDGKGDVTITNDGATILKQMQVLHPAARMLVELSKAQDIEAGDGTTSVVIIAGSLLDSCTKLLQKGIHPTIISESFQKALEKGIEILTDMSRPVELSDRETLLNSATTSLNSKVVSQYSSLLSPMSVNAVMKVIDPATATSVDLRDIKIVKKLGGTIDDCELVEGLVLTQKVSNSGITRVEKAKIGLIQFCLSAPKTDMDNQIVVSDYAQMDRVLREERAYILNLVKQIKKTGCNVLLIQKSILRDALSDLALHFLNKMKIMVIKDIEREDIEFICKTIGTKPVAHIDQFTADMLGSAELAEEVNLNGSGKLLKGGISNILEELVVQPLLVSSQCSDSCN

SEQ ID NO: 799876 - protein, 182 aa, Homo sapiens
AASPPPPPPDAGAAFWKVREGSEGLPLLHCGRPESGSIRPSRANPDTAEFAMPENVAPRSGATAGAAGGRGKGAYQDRDKPAQIRFSNISAAKAVADAIRTSLGPKGMDKMIQDGKGDVTITNDGATILKQMQVLHPAARMLVELSKAQDIEAGDGTTSVVIIAGSLLDSCTKLLQKRFVIF

SEQ ID NO: 799877 - protein, 193 aa, Homo sapiens
AASPPPPPPDAGAAFWKVREGSEGLPLLHCGRPESGSIRPSRANPDTAEFAMPENVAPRSGATAGAAGGRGKGAYQDRDKPAQIRFSNISAAKAVADAIRTSLGPKGMDKMIQDGKGDVTITNDGATILKQMQVLHPAARMLVELSKAQDIEAGDGTTSVVIIAGSLLDSCTKLLQKDSPPYSEDSEAWKGLN

SEQ ID NO: 799878 - protein, 145 aa, Homo sapiens
AASPPPPPPDAGAAFWKVREGSEGLPLLHCGRPESGSIRPSRANPDTAEFAMPENVAPRSGATAGAAGGRGKGAYQDRDKPAQIRFSNISAAKAVADAIRTSLGPKGMDKMIQDGKGDVTITNDGATILKQMQVLHPAARMLVEV

SEQ ID NO: 799879 - protein, 554 aa, Homo sapiens
MSADGGGIQDTQDKETPPEVPDRGHPHQEMPSKLGEAVPSGDTQESLHIKMEPEEPHSEGASQEDGAQGAWGWAPLSHGSKEKALFLPGGALPSPRIPVLSREGRTRDRQMAAALLTAWSQMPVTFEDVALYLSREEWGRLDHTQQNFYRDVLQKKNGLSLGFPFSRPFWAPQAHGKGEASGSSRQAGDEKEWRGACTGAVEVGQRVQTSSVAALGNVKPFRTRAGRVQWGVPQCAQEAACGRSSGPAKDSGQPAEPDRTPDAAPPDPSPTEPQEYRVPEKPNEEEKGAPESGEEGLAPDSEVGRKSYRCEQCGKGFSWHSHLVTHRRTHTGEKPYACTDCGKRFGRSSHLIQHQIIHTGEKPYTCPACRKSFSHHSTLIQHQRIHTGEKPYVCDRCAKRFTRRSDLVTHQGTHTGAKPHKCPICAKCFTQSSALVTHQRTHTGVKPYPCPECGKCFSQRSNLIAHNRTHTGEKPYHCLDCGKSFSHSSHLTAHQRTHRGVRPYACPLCGKSFSRRSNLHRHEKIHTTGPKALAMLMLGAAAAGALATPPPAPT

SEQ ID NO: 799880 - protein, 554 aa, Homo sapiens; identical to SEQ ID NO: 799879

SEQ ID NO: 799881 - protein, 554 aa, Homo sapiens; identical to SEQ ID NO: 799879

SEQ ID NO: 799882 - protein, 593 aa, Homo sapiens
MSADGGGIQDTQDKETPPEVPDRGHPHQEMPSKLGEAVPSGDTQESLHIKMEPEEPHSEGASQEDGAQGAWGWAPLSHGSKEKALFLPGGALPSPRIPVLSREGRTRDRQMAAALLTAWSQMPVTFEDVALYLSREEWGRLDHTQQNFYRDVLQKKNGLSLGFPFSRPFWAPQAHGKGEASGSSRQAGDEKEWRGACTGAVEVGQRVQTSSVAALGNVKPFRTRAGRVQWGVPQCAQEAACGRSSGPAKDSGQPAEPDRTPDAAPPDPSPTEPQEYRVPEKPNEEEKGAPESGEEGLAPDSEVGRKSYRCEQCGKGFSWHSHLVTHRRTHTGEKPYACTDCGKRFGRSSHLIQHQIIHTGEKPYTCPACRKSFSHHSTLIQHQRIHTGEKPYVCDRCAKRFTRRSDLVTHQGTHTGAKPHKCPICAKCFTQSSALVTHQPFQPHRAQPHTHRREALPLPRLRQELQPQLAPHRAPAHPPWRAALRLPVVWQELQPALQPAPAREDPHHRAQGPGHADAGGGGGGGSGHTPTRSHLGGQERGSGAPRATGTAPLESRLRGRREGLGKGAGAVRAWGEAWRWGRARARKGRHSAN

SEQ ID NO: 799883 - protein, 517 aa, Homo sapiens
MSADGGGIQDTQDKETPPEVPDRGHPHQEMPSKLGEAVPSGDTQESLHIKMEPEEPHSEGASQEDGAQGAWGWAPLSHGSKEKALFLPGGALPSPRIPVLSREGRTRDRQMAAALLTAWSQMPVTFEDVALYLSREEWGRLDHTQQNFYRDVLQKKNGLSLGAVEVGQRVQTSSVAALGNVKPFRTRAGRVQWGVPQCAQEAACGRSSGPAKDSGQPAEPDRTPDAAPPDPSPTEPQEYRVPEKPNEEEKGAPESGEEGLAPDSEVGRKSYRCEQCGKGFSWHSHLVTHRRTHTGEKPYACTDCGKRFGRSSHLIQHQIIHTGEKPYTCPACRKSFSHHSTLIQHQRIHTGEKPYVCDRCAKRFTRRSDLVTHQGTHTGAKPHKCPICAKCFTQSSALVTHQRTHTGVKPYPCPECGKCFSQRSNLIAHNRTHTGEKPYHCLDCGKSFSHSSHLTAHQRTHRGVRPYACPLCGKSFSRRSNLHRHEKIHTTGPKALAMLMLGAAAAGALATPPPAPT

SEQ ID NO: 799884 - protein, 137 aa, Homo sapiens
PSQLWQPPGRGRTPDPGGLLETALFYPLFPEPHPLLGPISLGEMLSAAGQRQKACDSTASLSGQAFPSAGLSGPLKRTARVRPRAPAGRQEMRRSGEARAQVRDGRAPLSAGVGRRRRPSGCCLWEWGRATRPPPGR

SEQ ID NO: 799885 - protein, 104 aa, Homo sapiens
  misc_feature (94)..(94): Xaa can be any naturally occurring amino acid
  misc_feature (99)..(99): Xaa can be any naturally occurring amino acid
  misc_feature (103)..(103): Xaa can be any naturally occurring amino acid
ALSSLLFQAPGSSVRARETMVSVTMATSEWIQFFKEAGIPPGPAVNYAVMFVDNRIQKSMLLDLNKEIMNELGVTVVGDIIAILKHAKVVHRQXQLFKXLPLXV

SEQ ID NO: 799886 - protein, 385 aa, Homo sapiens
MVSVTMATSEWIQFFKEAGIPPGPAVNYAVMFVDNRIQKSMLLDLNKEIMNELGVTVVGDIIAILKHAKVVHRQDMCKAATESVPCSPSPLAGEIRRGTSAASRMITNSLNHDSPPSTPPRRPDTSTSKISVTVSNKMAAKSAKATAALARREEESLAVPAKRRRVTAEMEGKYVINMPKGTTPRTRKILEQQQAAKGLHRTSVFDRLGAETKADTTTGSKPTGVFSRLGATPETDEDLAWDSDNDSSSSVLQYAGVLKKLGRGPAKASPQPALTVKAKATSSATTAAAPTLRRLALSSRSGLERKPESLSKVSIIKRLGAAALVPEAQDSQVTSTKSKSSAEVKVTIKRTLVGPRGSSSSEGLGAQMDHAGTVSVFKRLGRRTF

SEQ ID NO: 799887 - protein, 422 aa, Homo sapiens
MVMAALSLVAACWGRAAADESVQLPAAPGSSVRARETMVSVTMATSEWIQFFKEAGIPPGPAVNYAVMFVDNRIQKSMLLDLNKEIMNELGVTVVGDIIAILKHAKVVHRQDMCKAATESVPCSPSPLAGEIRRGTSAASRMITNSLNHDSPPSTPPRRPDTSTSKISVTVSNKMAAKSAKATAALARREEESLAVPAKRRRVTAEMEGKYVINMPKGTTPRTRKILEQQQAAKGLHRTSVFDRLGAETKADTTTGSKPTGVFSRLGATPETDEDLAWDSDNDSSSSVLQYAGVLKKLGRGPAKASPQPALTVKAKATSSATTAAAPTLRRLALSSRSGLERKPESLSKVSIIKRLGAAALVPEAQDSQVTSTKSKSSAEVKVTIKRTLVGPRGSSSSEGLGAQMDHAGTVSVFKRLGRRTF

SEQ ID NO: 799888 - protein, 355 aa, Homo sapiens
MFVDNRIQKSMLLDLNKEIMNELGVTVVGDIIAILKHAKVVHRQDMCKAATESVPCSPSPLAGEIRRGTSAASRMITNSLNHDSPPSTPPRRPDTSTSKISVTVSNKMAAKSAKATAALARREEESLAVPAKRRRVTAEMEGKYVINMPKGTTPRTRKILEQQQAAKGLHRTSVFDRLGAETKADTTTGSKPTGVFSRLGATPETDEDLAWDSDNDSSSSVLQYAGVLKKLGRGPAKASPQPALTVKAKATSSATTAAAPTLRRLALSSRSGLERKPESLSKVSIIKRLGAAALVPEAQDSQVTSTKSKSSAEVKVTIKRTLVGPRGSSSSEGLGAQMDHAGTVSVFKRLGRRTF

SEQ ID NO: 799889 - protein, 421 aa, Homo sapiens
MATSEWIQFFKEAGIPPGPAVNYAVMFVDNRIQKSMLLDLNKEIMNELGVTVVGDIIAILKHAKVVHRQDMCKAATESVPCSPSPLAGEIRRGTSDGVSLCCPGWSTVALTLAQCNLRLPGSSSSPASASRVAGITAASRMITNSLNHDSPPSTPPRRPDTSTSKISVTVSNKMAAKSAKATAALARREEESLAVPAKRRRVTAEMEGKYVINMPKGTTPRTRKILEQQQAAKGLHRTSVFDRLGAETKADTTTGSKPTGVFSRLGATPETDEDLAWDSDNDSSSSVLQYAGVLKKLGRGPAKASPQPALTVKAKATSSATTAAAPTLRRLALSSRSGLERKPESLSKVSIIKRLGAAALVPEAQDSQVTSTKSKSSAEVKVTIKRTLVGPRGSSSSEGLGAQMDHAGTVSVFKRLGRRTF

SEQ ID NO: 799890 - protein, 436 aa, Homo sapiens
RAGGGVSDSWRRREGGRAARVGAGPVGQAPGSSVRARETMVSVTMATSEWIQFFKEAGIPPGPAVNYAVMFVDNRIQKSMLLDLNKEIMNELGVTVVGDIIAILKHAKVVHRQDMCKAATESVPCSPSPLAGEIRRGTSAASRMITNSLNHDSPPSTPPRRPDTSTSKISVTVSNKMAAKSAKATAALARREEESLAVPAKRRRVTAEMEGKYVINMPKGTTPRTRKILEQQQAAKGLHRTSVFDRLGAETKADTTTGSKPTGVFSRLGATPETDEDLAWDSDNDSSSSVLQYAGVLKKLGRGPAKASPQPALTVKAKATSSATTAAAPTLRRLALSSRSGLERKPESLSKVSIIKRLGAAALVPEAQDSQVTRPDCPLRPARPSCTSGLPAAPSSAVASSLLRLLAALYSQAGGTSPDPGLRLRRIRFPALGICL

SEQ ID NO: 799891 - protein, 409 aa, Homo sapiens
RAGGGVSDSWRRREGGRAARVGAGPVGQAPGSSVRARETMVSVTMATSEWIQFFKEAGIPPGPAVNYAVMFVDNRIQKSMLLDLNKEIMNELGVTVVGDIIAILKHAKVVHRQDMCKAATESVPCSPSPLAGEIRRGTSAASRMITNSLNHDSPPSTPPRRPDTSTSKISVTVSNKMAAKSAKATAALARREEESLAVPAKRRRVTAEMEGKYVINMPKGTTPRTRKILEQQQAAKGLHRTSVFDRLGAETKADTTTGSKPTGVFSRLGATPETDEDLAWDSDNDSSSSVLQYAGVLKKLGRGPAKASPQPALTVKAKATSSATTAAAPTLRRLALSSRSGLERKPESLSKVSIIKRTVSRPLLPGWRDLSRPWAAAEAHPFSCPGHLSLKVYGGWWARGTGKGGQCLE

SEQ ID NO: 799892 - protein, 163 aa, Homo sapiens
GRDDSVSWQRRVCRKLVRHERTLYVQEAAKQSGVTCEEAREKQQLQEMEREKSSHIIQVCGLPRRLRDGFSTNVSEANWMRISVPVLERKAVRGENEVQLVPGSQSAGITGVSHRARRIAVFNGKLALLAMRGRKSSGSREQCQGQGDDGLRDYGHFRVDPVL

SEQ ID NO: 799893 - protein, 424 aa, Homo sapiens
RAGGGVSDSWRRREGGRAARVGAGPVGQAPGSSVRARETMVSVTMATSEWIQFFKEAGIPPGPAVNYAVMFVDNRIQKSMLLDLNKEIMNELGVTVVGDIIAILKHAKVVHRQDMCKAATESVPCSPSPLAGEIRRGTSAASRMITNSLNHDSPPSTPPRRPDTSTSKISVTVSNKMAAKSAKATAALARREEESLAVPAKRRRVTAEMEGKYVINMPKGTTPRTRKILEQQQAAKGLHRTSVFDRLGAETKADTTTGSKPTGVFSRLGATPETDEDLAWDSDNDSSSSVLQYAGVLKKLGRGPAKASPQPALTVKAKATSSATTAAAPTLRRLALSSRSGLERKPESLSKVSIIKRLGAAALVPEAQDSQVTSTKSKSSAEVKVTIKRTLVGPRGSSSSEGLGAQMDHAGTVSVFKRLGRRTF

SEQ ID NO: 799894 - protein, 385 aa, Homo sapiens; identical to SEQ ID NO: 799886

SEQ ID NO: 799895 - protein, 380 aa, Homo sapiens
MATSEWIQFFKEAGIPPGPAVNYAVMFVDNRIQKSMLLDLNKEIMNELGVTVVGDIIAILKHAKVVHRQDMCKAATESVPCSPSPLAGEIRRGTSAASRMITNSLNHDSPPSTPPRRPDTSTSKISVTVSNKMAAKSAKATAALARREEESLAVPAKRRRVTAEMEGKYVINMPKGTTPRTRKILEQQQAAKGLHRTSVFDRLGAETKADTTTGSKPTGVFSRLGATPETDEDLAWDSDNDSSSSVLQYAGVLKKLGRGPAKASPQPALTVKAKATSSATTAAAPTLRRLALSSRSGLERKPESLSKVSIIKRLGAAALVPEAQDSQVTSTKSKSSAEVKVTIKRTLVGPRGSSSSEGLGAQMDHAGTVSVFKRLGRRTF

SEQ ID NO: 799896 - protein, 400 aa, Homo sapiens
RAGGGVSDSWRRREGGRAARVGAGPVGQAPGSSVRARETMVSVTMATSEWIQFFKEAGIPPGPAVNYAVMFVDNRIQKSMLLDLNKEIMNELGVTVVGDIIAILKHAKVVHRQDMCKAATESVPCSPSPLAGEIRRGTSAASRMITNSLNHDSPPSTPPRRPDTSTSKISVTVSNKMAAKSAKATAALARREEESLAVPAKRRRVTAEMEGKYVINMPKGTTPRTRKILEQQQAAKGLHRTSVFDRLGAETKADTTTGSKPTGVFSRLGATPETDEDLAWDSDNDSSSSVLQYAGVLKKLGRGPAKASPQPALTVKAKATSSATTAAAPTLRRLALSSRSGLERKPESLSKVSIIKRLGAAALVPEAQDSQVTRPVPRVKTAAVLIYFCDFQIISPTPSG

SEQ ID NO: 799897 - protein, 218 aa, Homo sapiens
MVSVTMATSEWIQFFKEAGIPPGPAVNYAVMFVDNRIQKSMLLDLNKEIMNELGVTVVGDIIAILKHAKVVHRQDMCKAATESVPCSPSPLAGEIRRGTSAASRMITNSLNHDSPPSTPPRRPDTSTSKISVTVSNKMAAKSAKATAALARREEESLAVPAKRRRVTAEMEGKYVINMPKGTTPRTRKILDSSSEGLGAQMDHAGTVSVFKRLGRRTF

SEQ ID NO: 799898 - protein, 112 aa, Homo sapiens
MSLVLNDLLICCRQLEHDRATERKKEVEKFKRLIRDPETIKHLDRHSDSKQGKYLNWDAVFRFLQKYIQKETECLRIAKPNVSASTQASRQKKMQEISSLVKYFIKCANRSK

SEQ ID NO: 799899 - protein, 3056 aa, Homo sapiens
MSLVLNDLLICCRQLEHDRATERKKEVEKFKRLIRDPETIKHLDRHSDSKQGKYLNWDAVFRFLQKYIQKETECLRIAKPNVSASTQASRQKKMQEISSLVKYFIKCANRRAPRLKCQELLNYIMDTVKDSSNGAIYGADCSNILLKDILSVRKYWCEISQQQWLELFSVYFRLYLKPSQDVHRVLVARIIHAVTKGCCSQTDGLNSKFLDFFSKAIQCARQEKSSSGLNHILAALTIFLKTLAVNFRIRVCELGDEILPTLLYIWTQHRLNDSLKEVIIELFQLQIYIHHPKGAKTQEKGAYESTKWRSILYNLYDLLVNEISHIGSRGKYSSGFRNIAVKENLIELMADICHQVFNEDTRSLEISQSYTTTQRESSDYSVPCKRKKIELGWEVIKDHLQKSQNDFDLVPWLQIATQLISKYPASLPNCELSPLLMILSQLLPQQRHGERTPYVLRCLTEVALCQDKRSNLESSQKSDLLKLWNKIWCITFRGISSEQIQAENFGLLGAIIQGSLVEVDREFWKLFTGSACRPSCPAVCCLTLALTTSIVPGTVKMGIEQNMCEVNRSFSLKESIMKWLLFYQLEGDLENSTEVPPILHSNFPHLVLEKILVSLTMKNCKAAMNFFQSVPECEHHQKDKEELSFSEVEELFLQTTFDKMDFLTIVRECGIEKHQSSIGFSVHQNLKESLDRCLLGLSEQLLNNYSSEITNSETLVRCSRLLVGVLGCYCYMGVIAEEEAYKSELFQKAKSLMQCAGESITLFKNKTNEEFRIGSLRNMMQLCTRCLSNCTKKSPNKIASGFFLRLLTSKLMNDIADICKSLASFIKKPFDRGEVESMEDDTNGNLMEVEDQSSMNLFNDYPDSSVSDANEPGESQSTIGAINPLAEEYLSKQDLLFLDMLKFLCLCVTTAQTNTVSFRAADIRRKLLMLIDSSTLEPTKSLHLHMYLMLLKELPGEEYPLPMEDVLELLKPLSNVCSLYRRDQDVCKTILNHVLHVVKNLGQSNMDSENTRDAQGQFLTVIGAFWHLTKERKYIFSVRMALVNCLKTLLEADPYSKWAILNVMGKDFPVNEVFTQFLADNHHQVRMLAAESINRLFQDTKGDSSRLLKALPLKLQQTAFENAYLKAQEGMREMSHSAENPETLDEIYNRKSVLLTLIAVVLSCSPICEKQALFALCKSVKENGLEPHLVKKVLEKVSETFGYRRLEDFMASHLDYLVLEWLNLQDTEYNLSSFPFILLNYTNIEDFYRSCYKVLIPHLVIRSHFDEVKSIANQIQEDWKSLLTDCFPKILVNILPYFAYEGTRDSGMAQQRETATKVYDMLKSENLLGKQIDHLFISNLPEIVVELLMTLHEPANSSASQSTDLCDFSGDLDPAPNPPHFPSHVIKATFAYISNCHKTKLKSILEILSKSPDSYQKILLAICEQAAETNNVYKKHRILKIYHLFVSLLLKDIKSGLGGAWAFVLRDVIYTLIHYINQRPSCIMDVSLRSFSLCCDLLSQVCQTAVTYCKDALENHLHVIVGTLIPLVYEQVEVQKQVLDLLKYLVIDNKDNENLYITIKLLDPFPDHVVFKDLRITQQKIKYSRGPFSLLEEINHFLSVSVYDALPLTRLEGLKDLRRQLELHKDQMVDIMRASQDNPQDGIMVKLVVNLLQLSKMAINHTGEKEVLEAVGSCLGEVGPIDFSTIAIQHSKDASYTKALKLFEDKELQWTFIMLTYLNNTLVEDCVKVRSAAVTCLKNILATKTGHSFWEIYKMTTDPMLAYLQPFRTSRKKFLEVPRFDKENPFEGLDDINLWIPLSENHDIWIKTLTCAFLDSGGTKCEILQLLKPMCEVKTDFCQTVLPYLIHDILLQDTNESWRNLLSTHVQGFFTSCLRHFSQTSRSTTPANLDSESEHFFRCCLDKKSQRTMLAVVDYMRRQKRPSSGTIFNDAFWLDLNYLEVAKVAQSCAAHFTALLYAEIYADKKSMDDQEKRSLAFEEGSQSTTISSLSEKSKEETGISLQDLLLEIYRSIGEPDSLYGCGGGKMLQPITRLRTYEHEAMWGKALVTYDLETAIPSSTRQAGIIQALQNLGLCHILSVYLKGLDYENKDWCPELEELHYQAAWRNMQWDHCTSVSKEVEGTSYHESLYNALQSLRDREFSTFYESLKYARVKEVEEMCKRSLESVYSLYPTLSRLQAIGELESIGELFSRSVTHRQLSEVYIKWQKHSQLLKDSDFSFQEPIMALRTVILEILMEKEMDNSQRECIKDILTKHLVELSILARTFKNTQLPERAIFQIKQYNSVSCGVSEWQLEEAQVFWAKKEQSLALSILKQMIKKLDASCAANNPSLKLTYTECLRVCGNWLAETCLENPAVIMQTYLEKAVEVAGNYDGESSDELRNGKMKAFLSLARFSDTQYQRIENYMKSSEFENKQALLKRAKEEVGLLREHKIQTNRYTVKVQRELELDELALRALKEDRKRFLCKAVENYINCLLSGEEHDMWVFRLCSLWLENSGVSEVNGMMKRDGMKIPTYKFLPLMYQLAARMGTKMMGGLGFHEVLNNLISRISMDHPHHTLFIILALANANRDEFLTKPEVARRSRITKNVPKQSSQLDEDRTEAANRIICTIRSRRPQMVRSVEALCDAYIILANLDATQWKTQRKGINIPADQPITKLKNLEDVVVPTMEIKVDHTGEYGNLVTIQSFKAEFRLAGGVNLPKIIDCVGSDGKERRQLVKGRDDLRQDAVMQQVFQMCNTLLQRNTETRKRKLTICTYKVVPLSQRSGVLEWCTGTVPIGEFLVNNEDGAHKRYRPNDFSAFQCQKKMMEVQKKSFEEKYEVFMDVCQNFQPVFRYFCMEKFLDPAIWFEKRLAYTRSVATSSIVGYILGLGDRHVQNILINEQSAELVHIDLGVAFEQGKILPTPETVPFRLTRDIVDGMGITGVEGVFRRCCEKTMEVMRNSQETLLTIVEVLLYDPLFDWTMNPLKALYLQQRPEDETELHPTLNADDQECKRNLSDIDQSFNKVAERVLMRLQEKLKGVEEGTVLSVGGQVNLLIQQAIDPKNLSRLFPGWKAWV

SEQ ID NO: 799900 - protein, 3056 aa, Homo sapiens; identical to SEQ ID NO: 799899

SEQ ID NO: 799901 - protein, 3056 aa, Homo sapiens; identical to SEQ ID NO: 799899

SEQ ID NO: 799902 - protein, 1708 aa, Homo sapiens
MTLHEPANSSASQSTDLCDFSGDLDPAPNPPHFPSHVIKATFAYISNCHKTKLKSILEILSKSPDSYQKILLAICEQAAETNNVYKKHRILKIYHLFVSLLLKDIKSGLGGAWAFVLRDVIYTLIHYINQRPSCIMDVSLRSFSLCCDLLSQVCQTAVTYCKDALENHLHVIVGTLIPLVYEQVEVQKQVLDLLKYLVIDNKDNENLYITIKLLDPFPDHVVFKDLRITQQKIKYSRGPFSLLEEINHFLSVSVYDALPLTRLEGLKDLRRQLELHKDQMVDIMRASQDNPQDGIMVKLVVNLLQLSKMAINHTGEKEVLEAVGSCLGEVGPIDFSTIAIQHSKDASYTKALKLFEDKELQWTFIMLTYLNNTLVEDCVKVRSAAVTCLKNILATKTGHSFWEIYKMTTDPMLAYLQPFRTSRKKFLEVPRFDKENPFEGLDDINLWIPLSENHDIWIKTLTCAFLDSGGTKCEILQLLKPMCEVKTDFCQTVLPYLIHDILLQDTNESWRNLLSTHVQGFFTSCLRHFSQTSRSTTPANLDSESEHFFRCCLDKKSQRTMLAVVDYMRRQKRPSSGTIFNDAFWLDLNYLEVAKVAQSCAAHFTALLYAEIYADKKSMDDQEKRSLAFEEGSQSTTISSLSEKSKEETGISLQDLLLEIYRSIGEPDSLYGCGGGKMLQPITRLRTYEHEAMWGKALVTYDLETAIPSSTRQAGIIQALQNLGLCHILSVYLKGLDYENKDWCPELEELHYQAAWRNMQWDHCTSVSKEVEGTSYHESLYNALQSLRDREFSTFYESLKYARVKEVEEMCKRSLESVYSLYPTLSRLQAIGELESIGELFSRSVTHRQLSEVYIKWQKHSQLLKDSDFSFQEPIMALRTVILEILMEKEMDNSQRECIKDILTKHLVELSILARTFKNTQLPERAIFQIKQYNSVSCGVSEWQLEEAQVFWAKKEQSLALSILKQMIKKLDASCAANNPSLKLTYTECLRVCGNWLAETCLENPAVIMQTYLEKAVEVAGNYDGESSDELRNGKMKAFLSLARFSDTQYQRIENYMKSSEFENKQALLKRAKEEVGLLREHKIQTNRYTVKVQRELELDELALRALKEDRKRFLCKAVENYINCLLSGEEHDMWVFRLCSLWLENSGVSEVNGMMKRDGMKIPTYKFLPLMYQLAARMGTKMMGGLGFHEVLNNLISRISMDHPHHTLFIILALANANRDEFLTKPEVARRSRITKNVPKQSSQLDEDRTEAANRIICTIRSRRPQMVRSVEALCDAYIILANLDATQWKTQRKGINIPADQPITKLKNLEDVVVPTMEIKVDHTGEYGNLVTIQSFKAEFRLAGGVNLPKIIDCVGSDGKERRQLVKGRDDLRQDAVMQQVFQMCNTLLQRNTETRKRKLTICTYKVVPLSQRSGVLEWCTGTVPIGEFLVNNEDGAHKRYRPNDFSAFQCQKKMMEVQKKSFEEKYEVFMDVCQNFQPVFRYFCMEKFLDPAIWFEKRLAYTRSVATSSIVGYILGLGDRHVQNILINEQSAELVHIDLGVAFEQGKILPTPETVPFRLTRDIVDGMGITGVEGVFRRCCEKTMEVMRNSQETLLTIVEVLLYDPLFDWTMNPLKALYLQQRPEDETELHPTLNADDQECKRNLSDIDQSFNKVAERVLMRLQEKLKGVEEGTVLSVGGQVNLLIQQAIDPKNLSRLFPGWKAWV

SEQ ID NO: 799903 - protein, 2903 aa, Homo sapiens
MDTVKDSSNGAIYGADCSNILLKDILSVRKYWCEISQQQWLELFSVYFRLYLKPSQDVHRVLVARIIHAVTKGCCSQTDGLNSKFLDFFSKAIQCARQEKSSSGLNHILAALTIFLKTLAVNFRIRVCELGDEILPTLLYIWTQHRLNDSLKEVIIELFQLQIYIHHPKGAKTQEKGAYESTKWRSILYNLYDLLVNEISHIGSRGKYSSGFRNIAVKENLIELMADICHQVFNEDTRSLEISQSYTTTQRESSDYSVPCKRKKIELGWEVIKDHLQKSQNDFDLVPWLQIATQLISKYPASLPNCELSPLLMILSQLLPQQRHGERTPYVLRCLTEVALCQDKRSNLESSQKSDLLKLWNKIWCITFRGISSEQIQAENFGLLGAIIQGSLVEVDREFWKLFTGSACRPSCPAVCCLTLALTTSIVPGTVKMGIEQNMCEVNRSFSLKESIMKWLLFYQLEGDLENSTEVPPILHSNFPHLVLEKILVSLTMKNCKAAMNFFQSVPECEHHQKDKEELSFSEVEELFLQTTFDKMDFLTIVRECGIEKHQSSIGFSVHQNLKESLDRCLLGLSEQLLNNYSSEITNSETLVRCSRLLVGVLGCYCYMGVIAEEEAYKSELFQKAKSLMQCAGESITLFKNKTNEEFRIGSLRNMMQLCTRCLSNCTKKSPNKIASGFFLRLLTSKLMNDIADICKSLASFIKKPFDRGEVESMEDDTNGNLMEVEDQSSMNLFNDYPDSSVSDANEPGESQSTIGAINPLAEEYLSKQDLLFLDMLKFLCLCVTTAQTNTVSFRAADIRRKLLMLIDSSTLEPTKSLHLHMYLMLLKELPGEEYPLPMEDVLELLKPLSNVCSLYRRDQDVCKTILNHVLHVVKNLGQSNMDSENTRDAQGQFLTVIGAFWHLTKERKYIFSVRMALVNCLKTLLEADPYSKWAILNVMGKDFPVNEVFTQFLADNHHQVRMLAAESINRLFQDTKGDSSRLLKALPLKLQQTAFENAYLKAQEGMREMSHSAENPETLDEIYNRKSVLLTLIAVVLSCSPICEKQALFALCKSVKENGLEPHLVKKVLEKVSETFGYRRLEDFMASHLDYLVLEWLNLQDTEYNLSSFPFILLNYTNIEDFYRSCYKVLIPHLVIRSHFDEVKSIANQIQEDWKSLLTDCFPKILVNILPYFAYEGTRDSGMAQQRETATKVYDMLKSENLLGKQIDHLFISNLPEIVVELLMTLHEPANSSASQSTDLCDFSGDLDPAPNPPHFPSHVIKATFAYISNCHKTKLKSILEILSKSPDSYQKILLAICEQAAETNNVYKKHRILKIYHLFVSLLLKDIKSGLGGAWAFVLRDVIYTLIHYINQRPSCIMDVSLRSFSLCCDLLSQVCQTAVTYCKDALENHLHVIVGTLIPLVYEQVEVQKQVLDLLKYLVIDNKDNENLYITIKLLDPFPDHVVFKDLRITQQKIKYSRGPFSLLEEINHFLSVSVYDALPLTRLEGLKDLRRQLELHKDQMVDIMRASQDNPQDGIMVKLVVNLLQLSKMAINHTGEKEVLEAVGSCLGEVGPIDFSTIAIQHSKDASYTKALKLFEDKELQWTFIMLTYLNNTLVEDCVKVRSAAVTCLKNILATKTGHSFWEIYKMTTDPMLAYLQPFRTSRKKFLEVPRFDKENPFEGLDDINLWIPLSENHDIWIKTLTCAFLDSGGTKCEILQLLKPMCEVKTDFCQTVLPYLIHDILLQDTNESWRNLLSTHVQGFFTSCLRHFSQTSRIHNPCKLGFRPSSGTIFNDAFWLDLNYLEVAKVAQSCAAHFTALLYAEIYADKKSMDDQEKRSLAFEEGSQSTTISSLSEKSKEETGISLQDLLLEIYRSIGEPDSLYGCGGGKMLQPITRLRTYEHEAMWGKALVTYDLETAIPSSTRQAGIIQALQNLGLCHILSVYLKGLDYENKDWCPELEELHYQAAWRNMQWDHCTSVSKEVEGTSYHESLYNALQSLRDREFSTFYESLKYARVKEVEEMCKRSLESVYSLYPTLSRLQAIGELESIGELFSRSVTHRQLSEVYIKWQKHSQLLKDSDFSFQEPIMALRTVILEILMEKEMDNSQRECIKDILTKHLVELSILARTFKNTQLPERAIFQIKQYNSVSCGVSEWQLEEAQVFWAKKEQSLALSILKQMIKKLDASCAANNPSLKLTYTECLRVCGNWLAETCLENPAVIMQTYLEKAVEVAGNYDGESSDELRNGKMKAFLSLARFSDTQYQRIENYMKSSEFENKQALLKRAKEEVGLLREHKIQTNRYTVKVQRELELDELALRALKEDRKRFLCKAVENYINCLLSGEEHDMWVFRLCSLWLENSGVSEVNGMMKRDGMKIPTYKFLPLMYQLAARMGTKMMGGLGFHEVLNNLISRISMDHPHHTLFIILALANANRDEFLTKPEVARRSRITKNVPKQSSQLDEDRTEAANRIICTIRSRRPQMVRSVEALCDAYIILANLDATQWKTQRKGINIPADQPITKLKNLEDVVVPTMEIKVDHTGEYGNLVTIQSFKAEFRLAGGVNLPKIIDCVGSDGKERRQLVKGRDDLRQDAVMQQVFQMCNTLLQRNTETRKRKLTICTYKVVPLSQRSGVLEWCTGTVPIGEFLVNNEDGAHKRYRPNDFSAFQCQKKMMEVQKKSFEEKYEVFMDVCQNFQPVFRYFCMEKFLDPAIWFEKRLAYTRSVATSSIVGYILGLGDRHVQNILINEQSAELVHIDLGVAFEQGKILPTPETVPFRLTRDIVDGMGITGVEGVFRRCCEKTMEVMRNSQETLLTIVEVLLYDPLFDWTMNPLKALYLQQRPEDETELHPTLNADDQECKRNLSDIDQSFNKVAERVLMRLQEKLKGVEEGTVLSVGGQVNLLIQQAIDPKNLSRLFPGWKAWV

SEQ ID NO: 799904 - protein, 1486 aa, Homo sapiens
MSLVLNDLLICCRQLEHDRATERKKEVEKFKRLIRDPETIKHLDRHSDSKQGKYLNWDAVFRFLQKYIQKETECLRIAKPNVSASTQASRQKKMQEISSLVKYFIKCANRRAPRLKCQELLNYIMDTVKDSSNGAIYGADCSNILLKDILSVRKYWCEISQQQWLELFSVYFRLYLKPSQDVHRVLVARIIHAVTKGCCSQTDGLNSKFLDFFSKAIQCARQEKSSSGLNHILAALTIFLKTLAVNFRIRVCELGDEILPTLLYIWTQHRLNDSLKEVIIELFQLQIYIHHPKGAKTQEKGAYESTKWRSILYNLYDLLVNEISHIGSRGKYSSGFRNIAVKENLIELMADICHQVFNEDTRSLEISQSYTTTQRESSDYSVPCKRKKIELGWEVIKDHLQKSQNDFDLVPWLQIATQLISKYPASLPNCELSPLLMILSQLLPQQRHGERTPYVLRCLTEVALCQDKRSNLESSQKSDLLKLWNKIWCITFRGISSEQIQAENFGLLGAIIQGSLVEVDREFWKLFTGSACRPSCPAVCCLTLALTTSIVPGTVKMGIEQNMCEVNRSFSLKESIMKWLLFYQLEGDLENSTEVPPILHSNFPHLVLEKILVSLTMKNCKAAMNFFQSVPECEHHQKDKEELSFSEVEELFLQTTFDKMDFLTIVRECGIEKHQSSIGFSVHQNLKESLDRCLLGLSEQLLNNYSSEITNSETLVRCSRLLVGVLGCYCYMGVIAEEEAYKSELFQKAKSLMQCAGESITLFKNKTNEEFRIGSLRNMMQLCTRCLSNCTKKSPNKIASGFFLRLLTSKLMNDIADICKSLASFIKKPFDRGEVESMEDDTNGNLMEVEDQSSMNLFNDYPDSSVSDANEPGESQSTIGAINPLAEEYLSKQDLLFLDMLKFLCLCVTTAQTNTVSFRAADIRRKLLMLIDSSTLEPTKSLHLHMYLMLLKELPGEEYPLPMEDVLELLKPLSNVCSLYRRDQDVCKTILNHVLHVVKNLGQSNMDSENTRDAQGQFLTVIGAFWHLTKERKYIFSVRMALVNCLKTLLEADPYSKWAILNVMGKDFPVNEVFTQFLADNHHQVRMLAAESINRLFQDTKGDSSRLLKALPLKLQQTAFENAYLKAQEGMREMSHSAENPETLDEIYNRKSVLLTLIAVVLSCSPICEKQALFALCKSVKENGLEPHLVKKVLEKVSETFGYRRLEDFMASHLDYLVLEWLNLQDTEYNLSSFPFILLNYTNIEDFYRSCYKVLIPHLVIRSHFDEVKSIANQIQEDWKSLLTDCFPKILVNILPYFAYEGTRDSGMAQQRETATKVYDMLKSENLLGKQIDHLFISNLPEIVVELLMTLHEPANSSASQSTDLCDFSGDLDPAPNPPHFPSHVIKATFAYISNCHKTKLKSILEILSKSPDSYQKILLAICEQAAETNNVYKKHRILKIYHLFVSLLLKDIKSGLGGAWAFVLRDVIYTLIHYINQRKLTIFSQ

SEQ ID NO: 799905 - protein, 548 aa, Homo sapiens [sequence omitted]

SEQ ID NO: 799906 - protein, 1486 aa, Homo sapiens; identical to SEQ ID NO: 799904

SEQ ID NO: 799907 - protein, 1906 aa, Homo sapiens
MSLVLNDLLICCRQLEHDRATERKKEVEKFKRLIRDPETIKHLDRHSDSKQGKYLNWDAVFRFLQKYIQKETECLRIAKPNVSASTQASRQKKMQEISSLVKYFIKCANRRAPRLKCQELLNYIMDTVKDSSNGAIYGADCSNILLKDILSVRKYWCEISQQQWLELFSVYFRLYLKPSQDVHRVLVARIIHAVTKGCCSQTDGLNSKFLDFFSKAIQCARQEKSSSGLNHILAALTIFLKTLAVNFRIRVCELGDEILPTLLYIWTQHRLNDSLKEVIIELFQLQIYIHHPKGAKTQEKGAYESTKWRSILYNLYDLLVNEISHIGSRGKYSSGFRNIAVKENLIELMADICHQVFNEDTRSLEISQSYTTTQRESSDYSVPCKRKKIELGWEVIKDHLQKSQNDFDLVPWLQIATQLISKYPASLPNCELSPLLMILSQLLPQQRHGERTPYVLRCLTEVALCQDKRSNLESSQKSDLLKLWNKIWCITFRGISSEQIQAENFGLLGAIIQGSLVEVDREFWKLFTGSACRPSCPAVCCLTLALTTSIVPGTVKMGIEQNMCEVNRSFSLKESIMKWLLFYQLEGDLENSTEVPPILHSNFPHLVLEKILVSLTMKNCKAAMNFFQSVPECEHHQKDKEELSFSEVEELFLQTTFDKMDFLTIVRECGIEKHQSSIGFSVHQNLKESLDRCLLGLSEQLLNNYSSEITNSETLVRCSRLLVGVLGCYCYMGVIAEEEAYKSELFQKAKSLMQCAGESITLFKNKTNEEFRIGSLRNMMQLCTRCLSNCTKKSPNKIASGFFLRLLTSKLMNDIADICKSLASFIKKPFDRGEVESMEDDTNGNLMEVEDQSSMNLFNDYPDSSVSDANEPGESQSTIGAINPLAEEYLSKQDLLFLDMLKFLCLCVTTAQTNTVSFRAADIRRKLLMLIDSSTLEPTKSLHLHMYLMLLKELPGEEYPLPMEDVLELLKPLSNVCSLYRRDQDVCKTILNHVLHVVKNLGQSNMDSENTRDAQGQFLTVIGAFWHLTKERKYIFSVRMALVNCLKTLLEADPYSKWAILNVMGKDFPVNEVFTQFLADNHHQVRMLAAESINRLFQDTKGDSSRLLKALPLKLQQTAFENAYLKAQEGMREMSHSAENPETLDEIYNRKSVLLTLIAVVLSCSPICEKQALFALCKSVKENGLEPHLVKKVLEKVSETFGYRRLEDFMASHLDYLVLEWLNLQDTEYNLSSFPFILLNYTNIEDFYRSCYKVLIPHLVIRSHFDEVKSIANQIQEDWKSLLTDCFPKILVNILPYFAYEGTRDSGMAQQRETATKVYDMLKSENLLGKQIDHLFISNLPEIVVELLMTLHEPANSSASQSTDLCDFSGDLDPAPNPPHFPSHVIKATFAYISNCHKTKLKSILEILSKSPDSYQKILLAICEQAAETNNVYKKHRILKIYHLFVSLLLKDIKSGLGGAWAFVLRDVIYTLIHYINQRPSCIMDVSLRSFSLCCDLLSQVCQTAVTYCKDALENHLHVIVGTLIPLVYEQVEVQKQVLDLLKYLVIDNKDNENLYITIKLLDPFPDHVVFKDLRITQQKIKYSRGPFSLLEEINHFLSVSVYDALPLTRLEGLKDLRRQLELHKDQMVDIMRASQDNPQDGIMVKLVVNLLQLSKMAINHTGEKEVLEAVGSCLGEVGPIDFSTIAIQHSKDASYTKALKLFEDKELQWTFIMLTYLNNTLVEDCVKVRSAAVTCLKNILATKTGHSFWEIYKMTTDPMLAYLQPFRTSRKKFLEVPRFDKENPFEGLDDINLWIPLSENHDIWIKTLTCAFLDSGGTKCEILQLLKPMCEVKTDFCQTVLPYLIHDILLQDTNESWRNLLSTHVQGFFTSCLRHFSQTSRSTTPANLDSDLLQEQFLMMLSGWI

SEQ ID NO: 799908 - protein, 168 aa, Homo sapiens
MSLVLNDLLICCRQLEHDRATERKKEVEKFKRLIRDPETIKHLDRHSDSKQGKYLNWDAVFRFLQKYIQKETECLRIAKPNVSASTQASRQKKMQEISSLVKYFIKCANRRAPRLKCQELLNYIMDTVKDSSNGAIYGADCSNILLKDILSVRKYWCEISQQQWLGMF

SEQ ID NO: 799909 - protein, 168 aa, Homo sapiens; identical to SEQ ID NO: 799908

SEQ ID NO: 799910 - protein, 3056 aa, Homo sapiens; identical to SEQ ID NO: 799899

SEQ ID NO: 799911 - protein, 3056 aa, Homo sapiens; identical to SEQ ID NO: 799899

SEQ ID NO: 799912 - protein, 3056 aa, Homo sapiens; identical to SEQ ID NO: 799899

SEQ ID NO: 799913 - protein, 3056 aa, Homo sapiens; identical to SEQ ID NO: 799899

SEQ ID NO: 799914 - protein, 3027 aa, Homo sapiens
MSLVLNDLLICCRQLEHDRATERKKEVEKFKRLIRDPETIKHLDRHSDSKQGKYLNWDAVFRFLQKYIQKETECLRIAKPNVSASTQASRQKKMQEISSLVKYFIKCANRRAPRLKCQELLNYIMDTVKDSSNGAIYGADCSNILLKDILSVRKYWCEISQQQWLELFSVYFRLYLKPSQDVHRVLVARIIHAVTKGCCSQTDGLNSKFLDFFSKAIQCARQEKSSSGLNHILAALTIFLKTLAVNFRIRVCELGDEILPTLLYIWTQHRLNDSLKEVIIELFQLQIYIHHPKGAKTQEKGAYESTKWRSILYNLYDLLVNEISHIGSRGKYSSGFRNIAVKENLIELMADICHQVFNEDTRSLEISQSYTTTQRESSDYSVPCKRKKIELGWEVIKDHLQKSQNDFDLVPWLQIATQLISKYPASLPNCELSPLLMILSQLLPQQRHGERTPYVLRCLTEVALCQDKRSNLESSQKSDLLKLWNKIWCITFRGISSEQIQAENFGLLGAIIQGSLVEVDREFWKLFTGSACRPSCPAVCCLTLALTTSIVPGTVKMGIEQNMCEVNRSFSLKESIMKWLLFYQLEGDLENSTEVPPILHSNFPHLVLEKILVSLTMKNCKAAMNFFQSVPECEHHQKDKEELSFSEVEELFLQTTFDKMDFLTIVRECGIEKHQSSIGFSVHQNLKESLDRCLLGLSEQLLNNYSSEITNSETLVRCSRLLVGVLGCYCYMGVIAEEEAYKSELFQKAKSLMQCAGESITLFKNKTNEEFRIGSLRNMMQLCTRCLSNCTKKSPNKIASGFFLRLLTSKLMNDIADICKSLASFIKKPFDRGEVESMEDDTNGNLMEVEDQSSMNLFNDYPDSSVSDANEPGESQSTIGAINPLAEEYLSKQDLLFLDMLKFLCLCVTTAQTNTVSFRAADIRRKLLMLIDSSTLEPTKSLHLHMYLMLLKELPGEEYPLPMEDVLELLKPLSNVCSLYRRDQDVCKTILNHVLHVVKNLGQSNMDSENTRDAQGQFLTVIGAFWHLTKERKYIFSVRMALVNCLKTLLEADPYSKWAILNVMGKDFPVNEVFTQFLADNHHQVRMLAAESINRLFQDTKGDSSRLLKALPLKLQQTAFENAYLKAQEGMREMSHSAENPETLDEIYNRKSVLLTLIAVVLSCSPICEKQALFALCKSVKENGLEPHLVKKVLEKVSETFGYRRLEDFMASHLDYLVLEWLNLQDTEYNLSSFPFILLNYTNIEDFYRSCYKVLIPHLVIRSHFDEVKSIANQIQEDWKSLLTDCFPKILVNILPYFAYEGTRDSGMAQQRETATKVYDMLKSENLLGKQIDHLFISNLPEIVVELLMTLHEPANSSASQSTDLCDFSGDLDPAPNPPHFPSHVIKATFAYISNCHKTKLKSILEILSKSPDSYQKILLAICEQAAETNNVYKKHRILKIYHLFVSLLLKDIKSGLGGAWAFVLRDVIYTLIHYINQRPSCIMDVSLRSFSLCCDLLSQVCQTAVTYCKDALENHLHVIVGTLIPLVYEQVEVQKQVLDLLKYLVIDNKDNENLYITIKLLDPFPDHVVFKDLRITQQKIKYSRGPFSLLEEINHFLSVSVYDALPLTRLEGLKDLRRQLELHKDQMVDIMRASQDNPQDGIMVKLVVNLLQLSKMAINHTGEKEVLEAVGSCLGEVGPIDFSTIAIQHSKDASYTKALKLFEDKELQWTFIMLTYLNNTLVEDCVKVRSAAVTCLKNILATKTGHSFWEIYKMTTDPMLAYLQPFRTSRKKFLEVPRFDKENPFEGLDDINLWIPLSENHDIWIKTLTCAFLDSGGTKCEILQLLKPMCEVKTDFCQTVLPYLIHDILLQDTNESWRNLLSTHVQGFFTSCLRHFSQTSRIHNPCKLGFRPSSGTIFNDAFWLDLNYLEVAKVAQSCAAHFTALLYAEIYADKKSMDDQEKRSLAFEEGSQSTTISSLSEKSKEETGISLQDLLLEIYRSIGEPDSLYGCGGGKMLQPITRLRTYEHEAMWGKALVTYDLETAIPSSTRQAGIIQALQNLGLCHILSVYLKGLDYENKDWCPELEELHYQAAWRNMQWDHCTSVSKEVEGTSYHESLYNALQSLRDREFSTFYESLKYARVKEVEEMCKRSLESVYSLYPTLSRLQAIGELESIGELFSRSVTHRQLSEVYIKWQKHSQLLKDSDFSFQEPIMALRTVILEILMEKEMDNSQRECIKDILTKHLVELSILARTFKNTQLPERAIFQIKQYNSVSCGVSEWQLEEAQVFWAKKEQSLALSILKQMIKKLDASCAANNPSLKLTYTECLRVCGNWLAETCLENPAVIMQTYLEKAVEVAGNYDGESSDELRNGKMKAFLSLARFSDTQYQRIENYMKSSEFENKQALLKRAKEEVGLLREHKIQTNRYTVKVQRELELDELALRALKEDRKRFLCKAVENYINCLLSGEEHDMWVFRLCSLWLENSGVSEVNGMMKRDGMKIPTYKFLPLMYQLAARMGTKMMGGLGFHEVLNNLISRISMDHPHHTLFIILALANANRDEFLTKPEVARRSRITKNVPKQSSQLDEDRTEAANRIICTIRSRRPQMVRSVEALCDAYIILANLDATQWKTQRKGINIPADQPITKLKNLEDVVVPTMEIKVDHTGEYGNLVTIQSFKAEFRLAGGVNLPKIIDCVGSDGKERRQLVKGRDDLRQDAVMQQVFQMCNTLLQRNTETRKRKLTICTYKVVPLSQRSGVLEWCTGTVPIGEFLVNNEDGAHKRYRPNDFSAFQCQKKMMEVQKKSFEEKYEVFMDVCQNFQPVFRYFCMEKFLDPAIWFEKRLAYTRSVATSSIVGYILGLGDRHVQNILINEQSAELVHIDLGVAFEQGKILPTPETVPFRLTRDIVDGMGITGVEGVFRRCCEKTMEVMRNSQETLLTIVEVLLYDPLFDWTMNPLKALYLQQRPEDETELHPTLNADDQECKRNLSDIDQSFNKVAERVLMRLQEKLKGVEEGTVLSVGGQVNLLIQQAIDPKNLSRLFPGWKAWV

SEQ ID NO: 799915 - protein, 1641 aa, Homo sapiens
MSLVLNDLLICCRQLEHDRATERKKEVEKFKRLIRDPETIKHLDRHSDSKQGKYLNWDAVFRFLQKYIQKETECLRIAKPNVSASTQASRQKKMQEISSLVKYFIKCANRRAPRLKCQELLNYIMDTVKDSSNGAIYGADCSNILLKDILSVRKYWCEISQQQWLELFSVYFRLYLKPSQDVHRVLVARIIHAVTKGCCSQTDGLNSKFLDFFSKAIQCARQEKSSSGLNHILAALTIFLKTLAVNFRIRVCELGDEILPTLLYIWTQHRLNDSLKEVIIELFQLQIYIHHPKGAKTQEKGAYESTKWRSILYNLYDLLVNEISHIGSRGKYSSGFRNIAVKENLIELMADICHQVFNEDTRSLEISQSYTTTQRESSDYSVPCKRKKIELGWEVIKDHLQKSQNDFDLVPWLQIATQLISKYPASLPNCELSPLLMILSQLLPQQRHGERTPYVLRCLTEVALCQDKRSNLESSQKSDLLKLWNKIWCITFRGISSEQIQAENFGLLGAIIQGSLVEVDREFWKLFTGSACRPSCPAVCCLTLALTTSIVPGTVKMGIEQNMCEVNRSFSLKESIMKWLLFYQLEGDLENSTEVPPILHSNFPHLVLEKILVSLTMKNCKAAMNFFQSVPECEHHQKDKEELSFSEVEELFLQTTFDKMDFLTIVRECGIEKHQSSIGFSVHQNLKESLDRCLLGLSEQLLNNYSSEITNSETLVRCSRLLVGVLGCYCYMGVIAEEEAYKSELFQKAKSLMQCAGESITLFKNKTNEEFRIGSLRNMMQLCTRCLSNCTKKSPNKIASGFFLRLLTSKLMNDIADICKSLASFIKKPFDRGEVESMEDDTNGNLMEVEDQSSMNLFNDYPDSSVSDANEPGESQSTIGAINPLAEEYLSKQDLLFLDMLKFLCLCVTTAQTNTVSFRAADIRRKLLMLIDSSTLEPTKSLHLHMYLMLLKELPGEEYPLPMEDVLELLKPLSNVCSLYRRDQDVCKTILNHVLHVVKNLGQSNMDSENTRDAQGQFLTVIGAFWHLTKERKYIFSVRMALVNCLKTLLEADPYSKWAILNVMGKDFPVNEVFTQFLADNHHQVRMLAAESINRLFQDTKGDSSRLLKALPLKLQQTAFENAYLKAQEGMREMSHSAENPETLDEIYNRKSVLLTLIAVVLSCSPICEKQALFALCKSVKENGLEPHLVKKVLEKVSETFGYRRLEDFMASHLDYLVLEWLNLQDTEYNLSSFPFILLNYTNIEDFYRSCYKVLIPHLVIRSHFDEVKSIANQIQEDWKSLLTDCFPKILVNILPYFAYEGTRDSGMAQQRETATKVYDMLKSENLLGKQIDHLFISNLPEIVVELLMTLHEPANSSASQSTDLCDFSGDLDPAPNPPHFPSHVIKATFAYISNCHKTKLKSILEILSKSPDSYQKILLAICEQAAETNNVYKKHRILKIYHLFVSLLLKDIKSGLGGAWAFVLRDVIYTLIHYINQRPSCIMDVSLRSFSLCCDLLSQVCQTAVTYCKDALENHLHVIVGTLIPLVYEQVEVQKQVLDLLKYLVIDNKDNENLYITIKLLDPFPDHVVFKDLRITQQKIKYSRGPFSLLEEINHFLSVSVYDALPLTRLEGLKDLRRQLELHKDQMVDIMRASQGANFK

SEQ ID NO: 799916 - protein, 3017 aa, Homo sapiens
MSLVLNDLLICCRQLEHDRATERKKEVEKFKRLIRDPETIKHLDRHSDSKQGKYLNWDAVFRFLQKYIQKETECLRIAKPNVSASTQASRQKKMQEISSLVKYFIKCANRRAPRLKCQELLNYIMDTVKDSSNGAIYGADCSNILLKDILSVRKYWCEISQQQWLELFSVYFRLYLKPSQDVHRVLVARIIHAVTKGCCSQTDGLNSKFLDFFSKAIQCARQEKSSSGLNHILAALTIFLKTLAVNFRIRVCELGDEILPTLLYIWTQHRLNDSLKEVIIELFQLQIYIHHPKGAKTQEKGAYESTKWRSILYNLYDLLVNEISHIGSRGKYSSGFRNIAVKENLIELMADICHQVFNEDTRSLEISQSYTTTQRESSDYSVPCKRKKIELGWEVIKDHLQKSQNDFDLVPWLQIATQLISKYPASLPNCELSPLLMILSQLLPQQRHGERTPYVLRCLTEVALCQDKRSNLESSQKSDLLKLWNKIWCITFRGISSEQIQAENFGLLGAIIQGSLVEVDREFWKLFTGSACRPSCPAVCCLTLALTTSIVPGTVKMGIEQNMCEVNRSFSLKESIMKWLLFYQLEGDLENSTEVPPILHSNFPHLVLEKILVSLTMKNCKAAMNFFQSVPECEHHQKDKEELSFSEVEELFLQTTFDKMDFLTIVRECGIEKHQSSIGFSVHQNLKESLDRCLLGLSEQLLNNYSSEITNSETLVRCSRLLVGVLGCYCYMGVIAEEEAYKSELFQKAKSLMQCAGESITLFKNKTNEEFRIGSLRNMMQLCTRCLSNCTKKSPNKIASGFFLRLLTSKLMNDIADICKSLASFIKKPFDRGEVESMEDDTNGNLMEVEDQSSMNLFNDYPDSSVSDANEPGESQSTIGAINPLAEEYLSKQDLLFLDMLKFLCLCVTTAQTNTVSFRAADIRRKLLMLIDSSTLEPTKSLHLHMYLMLLKELPGEEYPLPMEDVLELLKPLSNVCSLYRRDQDVCKTILNHVLHVVKNLGQSNMDSENTRDAQGQFLTVIGAFWHLTKERKYIFSVRMALVNCLKTLLEADPYSKWAILNVMGKDFPVNEVFTQFLADNHHQVRMLAAESINRLFQDTKGDSSRLLKALPLKLQQTAFENAYLKAQEGMREMSHSAENPETLDEIYNRKSVLLTLIAVVLSCSPICEKQALFALCKSVKENGLEPHLVKKVLEKVSETFGYRRLEDFMASHLDYLVLEWLNLQDTEYNLSSFPFILLNYTNIEDFYRSCYKVLIPHLVIRSHFDEVKSIANQIQEDWKSLLTDCFPKILVNILPYFAYEGTRDSGMAQQRETATKVYDMLKSENLLGKQIDHLFISNLPEIVVELLMTLHEPANSSASQSTDLCDFSGDLDPAPNPPHFPSHVIKATFAYISNCHKTKLKSILEILSKSPDSYQKILLAICEQAAETNNVYKKHRILKIYHLFVSLLLKDIKSGLGGAWAFVLRDVIYTLIHYINQRPSCIMDVSLRSFSLCCDLLSQVCQTAVTYCKDALENHLHVIVGTLIPLVYEQVEVQKQVLDLLKYLVIDNKDNENLYITIKLLDPFPDHVVFKDLRITQQKIKYSRGPFSLLEEINHFLSVSVYDALPLTRLEGLKDLRRQLELHKDQMVDIMRASQDNPQDGIMVKLVVNLLQLSKMAINHTGEKEVLEAVGSCLGEVGPIDFSTIAIQHSKDASYTKALKLFEDKELQWTFIMLTYLNNTLVEDCVKVRSAAVTCLKNILATKTGHSFWEIYKMTTDPMLAYLQPFRTSRKKFLEVPRFDKENPFEGLDDINLWIPLSENHDIWIKTLTCAFLDSGGTKCEILQLLKPMCEVKTDFCQTVLPYLIHDILLQDTNESWRNLLSTHVQGFFTSCLRHFSQTSRIHNPCKLGFRPSSGTIFNDAFWLDLNYLEVAKVAQSCAAHFTALLYAEIYADKKSMDDQEKRSLAFEEGSQSTTISSLSEKSKEETGISLQDLLLEIYRSIGEPDSLYGCGGGKMLQPITRLRTYEHEAMWGKALVTYDLETAIPSSTRQAGIIQALQNLGLCHILSVYLKGLDYENKDWCPELEELHYQAAWRNMQWDHCTSVSKEVEGTSYHESLYNALQSLRDREFSTFYESLKYARVKEVEEMCKRSLESVYSLYPTLSRLQAIGELESIGELFSRSVTHRQLSEVYIKWQKHSQLLKDSDFSFQEPIMALRTVILEILMEKEMDNSQRECIKDILTKHLVELSILARTFKNTQLPERAIFQIKQYNSVSCGVSEWQLEEAQVFWAKKEQSLALSILKQMIKKLDASCAANNPSLKLTYTECLRVCGNWLAETCLENPAVIMQTYLEKAVEVAGNYDGESSDELRNGKMKAFLSLARFSDTQYQRIENYMKSSEFENKQALLKRAKEEVGLLREHKIQTNRYTVKVQRELELDELALRALKEDRKRFLCKAVENYINCLLSGEEHDMWVFRLCSLWLENSGVSEVNGMMKRDGMKIPTYKFLPLMYQLAARMGTKMMGGLGFHEVLNNLISRISMDHPHHTLFIILALANANRDEFLTKPEVARRSRITKNVPKQSSQLDEDRTEAANRIICTIRSRRPQMVRSVEALCDAYIILANLDATQWKTQRKGINIPADQPITKLKNLEDVVVPTMEIKVDHTGEYGNLVTIQSFKAEFRLAGGVNLPKIIDCVGSDGKERRQLVKGRDDLRQDAVMQQVFQMCNTLLQRNTETRKRKLTICTYKVVPLSQRSGVLEWCTGTVPIGEFLVNNEDGAHKRYRPNDFSAFQCQKKMMEVQKKSFEEKYEVFMDVCQNFQPVFRYFCMEKFLDPAIWFEKRLAYTRSVATSSIVGYILGLGDRHVQNILINEQSAELVHIDLGVAFEQGKILPTPETVPFRLTRDIVDGMGITGVEGVFRRCCEKTMEVMRNSQETLLTIVEVLLYDPLFDWTMNPLKALYLQQRPEDETELHPTLNADDQECKRNLSDIDQSFNKVAERVLMRLQEKLKGVEEGTVLSVGGQVNLLIQQTPVTLHLA

SEQ ID NO: 799917 - protein, 2747 aa, Homo sapiens
MSLVLNDLLICCRQLEHDRATERKKEVEKFKRLIRDPETIKHLDRHSDSKQGKYLNWDAVFRFLQKYIQKETECLRIAKPNVSASTQASRQKKMQEISSLVKYFIKCANRRAPRLKCQELLNYIMDTVKDSSNGAIYGADCSNILLKDILSVRKYWCEISQQQWLELFSVYFRLYLKPSQDVHRVLVARIIHAVTKGCCSQTDGLNSKFLDFFSKAIQCARQEKSSSGLNHILAALTIFLKTLAVNFRIRVCELGDEILPTLLYIWTQHRLNDSLKEVIIELFQLQIYIHHPKGAKTQEKGAYESTKWRSILYNLYDLLVNEISHIGSRGKYSSGFRNIAVKENLIELMADICHQVFNEDTRSLEISQSYTTTQRESSDYSVPCKRKKIELGWEVIKDHLQKSQNDFDLVPWLQIATQLISKYPASLPNCELSPLLMILSQLLPQQRHGERTPYVLRCLTEVALCQDKRSNLESSQKSDLLKLWNKIWCITFRGISSEQIQAENFGLLGAIIQGSLVEVDREFWKLFTGSACRPSCPAVCCLTLALTTSIVPGTVKMGIEQNMCEVNRSFSLKESIMKWLLFYQLEGDLENSTEVPPILHSNFPHLVLEKILVSLTMKNCKAAMNFFQSVPECEHHQKDKEELSFSEVEELFLQTTFDKMDFLTIVRECGIEKHQSSIGFSVHQNLKESLDRCLLGLSEQLLNNYSSEITNSETLVRCSRLLVGVLGCYCYMGVIAEEEAYKSELFQKAKSLMQCAGESITLFKNKTNEEFRIGSLRNMMQLCTRCLSNCTKKSPNKIASGFFLRLLTSKLMNDIADICKSLASFIKKPFDRGEVESMEDDTNGNLMEVEDQSSMNLFNDYPDSSVSDANEPGESQSTIGAINPLAEEYLSKQDLLFLDMLKFLCLCVTTAQTNTVSFRAADIRRKLLMLIDSSTLEPTKSLHLHMYLMLLKELPGEEYPLPMEDVLELLKPLSNVCSLYRRDQDVCKTILNHVLHVVKNLGQSNMDSENTRDAQGQFLTVIGAFWHLTKERKYIFSVRMALVNCLKTLLEADPYSKWAILNVMGKDFPVNEVFTQFLADNHHQVRMLAAESINRLFQDTKGDSSRLLKALPLKLQQTAFENAYLKAQEGMREMSHSAENPETLDEIYNRKSVLLTLIAVVLSCSPICEKQALFALCKSVKENGLEPHLVKKVLEKVSETFGYRRLEDFMASHLDYLVLEWLNLQDTEYNLSSFPFILLNYTNIEDFYRSCYKVLIPHLVIRSHFDEVKSIANQIQEDWKSLLTDCFPKILVNILPYFAYEGTRDSGMAQQRETATKVYDMLKSENLLGKQIDHLFISNLPEIVVELLMTLHEPANSSASQSTDLCDFSGDLDPAPNPPHFPSHVIKATFAYISNCHKTKLKSILEILSKSPDSYQKILLAICEQAAETNNVYKKHRILKIYHLFVSLLLKDIKSGLGGAWAFVLRDVIYTLIHYINQRPSCIMDVSLRSFSLCCDLLSQVCQTAVTYCKDALENHLHVIVGTLIPLVYEQVEVQKQVLDLLKYLVIDNKDNENLYITIKLLDPFPDHVVFKDLRITQQKIKYSRGPFSLLEEINHFLSVSVYDALPLTRLEGLKDLRRQLELHKDQMVDIMRASQDNPQDGIMVKLVVNLLQLSKMAINHTGEKEVLEAVGSCLGEVGPIDFSTIAIQHSKDASYTKALKLFEDKELQWTFIMLTYLNNTLVEDCVKVRSAAVTCLKNILATKTGHSFWEIYKMTTDPMLAYLQPFRTSRKKFLEVPRFDKENPFEGLDDINLWIPLSENHDIWIKTLTCAFLDSGGTKCEILQLLKPMCEVKTDFCQTVLPYLIHDILLQDTNESWRNLLSTHVQGFFTSCLRHFSQTSRIHNPCKLGFRPSSGTIFNDAFWLDLNYLEVAKVAQSCAAHFTALLYAEIYADKKSMDDQEKRSLAFEEGSQSTTISSLSEKSKEETGISLQDLLLEIYRSIGEPDSLYGCGGGKMLQPITRLRTYEHEAMWGKALVTYDLETAIPSSTRQAGIIQALQNLGLCHILSVYLKGLDYENKDWCPELEELHYQAAWRNMQWDHCTSVSKEVEGTSYHESLYNALQSLRDREFSTFYESLKYARVKEVEEMCKRSLESVYSLYPTLSRLQAIGELESIGELFSRSVTHRQLSEVYIKWQKHSQLLKDSDFSFQEPIMALRTVILEILMEKEMDNSQRECIKDILTKHLVELSILARTFKNTQLPERAIFQIKQYNSVSCGVSEWQLEEAQVFWAKKEQSLALSILKQMIKKLDASCAANNPSLKLTYTECLRVCGNWLAETCLENPAVIMQTYLEKAVEVAGNYDGESSDELRNGKMKAFLSLARFSDTQYQRIENYMKSSEFENKQALLKRAKEEVGLLREHKIQTNRYTVKVQRELELDELALRALKEDRKRFLCKAVENYINCLLSGEEHDMWVFRLCSLWLENSGVSEVNGMMKRDGMKIPTYKFLPLMYQLAARMGTKMMGGLGFHEVLNNLISRISMDHPHHTLFIILALANANRDEFLTKPEVARRSRITKNVPKQSSQLDEDRTEAANRIICTIRSRRPQMVRSVEALCDAYIILANLDATQWKTQRKGINIPADQPITKLKNLEDVVVPTMEIKVDHTGEYGNLVTIQSFKAEFRLAGGVNLPKIIDCVGSDGKERRQLVKGRDDLRQDAVMQQVFQMCNTLLQRNTETRKRKLTICTYKVTICTSVSSPKTYKRCHLVG

SEQ ID NO: 799918 - protein, 2407 aa, Homo sapiens
MSLVLNDLLICCRQLEHDRATERKKEVEKFKRLIRDPETIKHLDRHSDSKQGKYLNWDAVFRFLQKYIQKETECLRIAKPNVSASTQASRQKKMQEISSLVKYFIKCANRRAPRLKCQELLNYIMDTVKDSSNGAIYGADCSNILLKDILSVRKYWCEISQQQWLELFSVYFRLYLKPSQDVHRVLVARIIHAVTKGCCSQTDGLNSKFLDFFSKAIQCARQEKSSSGLNHILAALTIFLKTLAVNFRIRVCELGDEILPTLLYIWTQHRLNDSLKEVIIELFQLQIYIHHPKGAKTQEKGAYESTKWRSILYNLYDLLVNEISHIGSRGKYSSGFRNIAVKENLIELMADICHQVFNEDTRSLEISQSYTTTQRESSDYSVPCKRKKIELGWEVIKDHLQKSQNDFDLVPWLQIATQLISKYPASLPNCELSPLLMILSQLLPQQRHGERTPYVLRCLTEVALCQDKRSNLESSQKSDLLKLWNKIWCITFRGISSEQIQAENFGLLGAIIQGSLVEVDREFWKLFTGSACRPSCPAVCCLTLALTTSIVPGTVKMGIEQNMCEVNRSFSLKESIMKWLLFYQLEGDLENSTEVPPILHSNFPHLVLEKILVSLTMKNCKAAMNFFQSVPECEHHQKDKEELSFSEVEELFLQTTFDKMDFLTIVRECGIEKHQSSIGFSVHQNLKESLDRCLLGLSEQLLNNYSSEITNSETLVRCSRLLVGVLGCYCYMGVIAEEEAYKSELFQKAKSLMQCAGESITLFKNKTNEEFRIGSLRNMMQLCTRCLSNCTKKSPNKIASGFFLRLLTSKLMNDIADICKSLASFIKKPFDRGEVESMEDDTNGNLMEVEDQSSMNLFNDYPDSSVSDANEPGESQSTIGAINPLAEEYLSKQDLLFLDMLKFLCLCVTTAQTNTVSFRAADIRRKLLMLIDSSTLEPTKSLHLHMYLMLLKELPGEEYPLPMEDVLELLKPLSNVCSLYRRDQDVCKTILNHVLHVVKNLGQSNMDSENTRDAQGQFLTVIGAFWHLTKERKYIFSVRMALVNCLKTLLEADPYSKWAILNVMGKDFPVNEVFTQFLADNHHQVRMLAAESINRLFQDTKGDSSRLLKALPLKLQQTAFENAYLKAQEGMREMSHSAENPETLDEIYNRKSVLLTLIAVVLSCSPICEKQALFALCKSVKENGLEPHLVKKVLEKVSETFGYRRLEDFMASHLDYLVLEWLNLQDTEYNLSSFPFILLNYTNIEDFYRSCYKVLIPHLVIRSHFDEVKSIANQIQEDWKSLLTDCFPKILVNILPYFAYEGTRDSGMAQQRETATKVYDMLKSENLLGKQIDHLFISNLPEIVVELLMTLHEPANSSASQSTDLCDFSGDLDPAPNPPHFPSHVIKATFAYISNCHKTKLKSILEILSKSPDSYQKILLAICEQAAETNNVYKKHRILKIYHLFVSLLLKDIKSGLGGAWAFVLRDVIYTLIHYINQRPSCIMDVSLRSFSLCCDLLSQVCQTAVTYCKDALENHLHVIVGTLIPLVYEQVEVQKQVLDLLKYLVIDNKDNENLYITIKLLDPFPDHVVFKDLRITQQKIKYSRGPFSLLEEINHFLSVSVYDALPLTRLEGLKDLRRQLELHKDQMVDIMRASQDNPQDGIMVKLVVNLLQLSKMAINHTGEKEVLEAVGSCLGEVGPIDFSTIAIQHSKDASYTKALKLFEDKELQWTFIMLTYLNNTLVEDCVKVRSAAVTCLKNILATKTGHSFWEIYKMTTDPMLAYLQPFRTSRKKFLEVPRFDKENPFEGLDDINLWIPLSENHDIWIKTLTCAFLDSGGTKCEILQLLKPMCEVKTDFCQTVLPYLIHDILLQDTNESWRNLLSTHVQGFFTSCLRHFSQTSRIHNPCKLGFRPSSGTIFNDAFWLDLNYLEVAKVAQSCAAHFTALLYAEIYADKKSMDDQEKRSLAFEEGSQSTTISSLSEKSKEETGISLQDLLLEIYRSIGEPDSLYGCGGGKMLQPITRLRTYEHEAMWGKALVTYDLETAIPSSTRQAGIIQALQNLGLCHILSVYLKGLDYENKDWCPELEELHYQAAWRNMQWDHCTSVSKEVEGTSYHESLYNALQSLRDREFSTFYESLKYARVKEVEEMCKRSLESVYSLYPTLSRLQAIGELESIGELFSRSVTHRQLSEVYIKWQKHSQLLKDSDFSFQEPIMALRTVILEILMEKEMDNSQRECIKDILTKHLVELSILARTFKNTQLPERAIFQIKQYNSVSCGVSEWQLEEAQVFWAKKEQSLALSILKQMIKKLDASCAANNPSLKLTYTECLRVCGNWLAETCLENPAVIMQTYLEKAVEVAGNYDGESSDELRNGKMKAFLSLARFSDTQYQRIENYMKSSEFENKQALLKRAKEEVGLLREHKIQTNR

SEQ ID NO: 799919 - protein, 1350 aa, Homo sapiens
MSLVLNDLLICCRQLEHDRATERKKEVEKFKRLIRDPETIKHLDRHSDSKQGKYLNWDAVFRFLQKYIQKETECLRIAKPNVSASTQASRQKKMQEISSLVKYFIKCANRRAPRLKCQELLNYIMDTVKDSSNGAIYGADCSNILLKDILSVRKYWCEISQQQWLELFSVYFRLYLKPSQDVHRVLVARIIHAVTKGCCSQTDGLNSKFLDFFSKAIQCARQEKSSSGLNHILAALTIFLKTLAVNFRIRVCELGDEILPTLLYIWTQHRLNDSLKEVIIELFQLQIYIHHPKGAKTQEKGAYESTKWRSILYNLYDLLVNEISHIGSRGKYSSGFRNIAVKENLIELMADICHQVFNEDTRSLEISQSYTTTQRESSDYSVPCKRKKIELGWEVIKDHLQKSQNDFDLVPWLQIATQLISKYPASLPNCELSPLLMILSQLLPQQRHGERTPYVLRCLTEVALCQDKRSNLESSQKSDLLKLWNKIWCITFRGISSEQIQAENFGLLGAIIQGSLVEVDREFWKLFTGSACRPSCPAVCCLTLALTTSIVPGTVKMGIEQNMCEVNRSFSLKESIMKWLLFYQLEGDLENSTEVPPILHSNFPHLVLEKILVSLTMKNCKAAMNFFQSVPECEHHQKDKEELSFSEVEELFLQTTFDKMDFLTIVRECGIEKHQSSIGFSVHQNLKESLDRCLLGLSEQLLNNYSSEITNSETLVRCSRLLVGVLGCYCYMGVIAEEEAYKSELFQKAKSLMQCAGESITLFKNKTNEEFRIGSLRNMMQLCTRCLSNCTKKSPNKIASGFFLRLLTSKLMNDIADICKSLASFIKKPFDRGEVESMEDDTNGNLMEVEDQSSMNLFNDYPDSSVSDANEPGESQSTIGAINPLAEEYLSKQDLLFLDMLKFLCLCVTTAQTNTVSFRAADIRRKLLMLIDSSTLEPTKSLHLHMYLMLLKELPGEEYPLPMEDVLELLKPLSNVCSLYRRDQDVCKTILNHVLHVVKNLGQSNMDSENTRDAQGQFLTVIGAFWHLTKERKYIFSVRMALVNCLKTLLEADPYSKWAILNVMGKDFPVNEVFTQFLADNHHQVRMLAAESINRLFQDTKGDSSRLLKALPLKLQQTAFENAYLKAQEGMREMSHSAENPETLDEIYNRKSVLLTLIAVVLSCSPICEKQALFALCKSVKENGLEPHLVKKVLEKVSETFGYRRLEDFMASHLDYLVLEWLNLQDTEYNLSSFPFILLNYTNIEDFYRSCYKVLIPHLVIRSHFDEVKSIANQIQEDWKSLLTDCFPKILVNILPYFAYEGTRDSGMAQQRETATKVYDMLKSENLLGKQVWLQFLCTFHSLNDMRYNL

SEQ ID NO: 799920 - protein, 425 aa, Homo sapiens
MAGRRAQPGSAPPRPAAPHPRPASRAFPQHCRPRDAERPPSPRSPLMPGCELPVGTCPDMCPAAERAQREREHRLHRLEVVPGCRQDPPRADPQRAVKEYSRPAAGKPRPPPSQLRPPSVLLATVRYLAGEVAESADIARAEVASFVADRLRAVRLDLALQGAGDAEAAVVLEAALATLLAVVARLGPDAARGPADPVLLQAQVQEGFGSLRRCYARGAGPHPRQPAFQGLFLLYNLGESGSWRLGSSVGTGAHHDSGGSVEALHEVLQLPAALRACPPLRKALAVDAAFREGNAARLFRLLQTLPYLPSCAVQCHVGHARREALARFARAFSTPKGQTLPLGFMVNLLALDGLREARDLCQAHGLPLDGEERVVFLRGRYVEEGLPPASTCKVLVESKLRGRTLEEVVMAEEEDEGTDRPGSPA

SEQ ID NO: 799921 - protein, 404 aa, Homo sapiens
MAGRRAQPGSAPPRPAAPHPRPASRAFPQHCRPRDAERPPSPRSPLMPGCELPVGTCPDMCPAAERAQREREHRLHRLEVVPGCRQDPPRADPQRAVKEYSRPAAGKPRPPPSQLRPPSVLLATVRYLAGEVAESADIARAEVASFVADRLRAVRLDLALQGAGDAEAAVVLEAALATLLAVVARLGPDAARGPADPVLLQAQVQEGFGSLRRCYARGAGPHPRQPAFQGLFLLYNLGSVEALHEVLQLPAALRACPPLRKALAVDAAFREGNAARLFRLLQTLPYLPSCAVQCHVGHARREALARFARAFSTPKGQTLPLGFMVNLLALDGLREARDLCQAHGLPLDGEERVVFLRGRYVEEGLPPASTCKVLVESKLRGRTLEEVVMAEEEDEGTDRPGSPA

SEQ ID NO: 799922 - protein, 358 aa, Homo sapiens
MPGCELPVGTCPDMCPAAERAQREREHRLHRLEVVPGCRQDPPRADPQRAVKEYSRPAAGKPRPPPSQLRPPSVLLATVRYLAGEVAESADIARAEVASFVADRLRAVRLDLALQGAGDAEAAVVLEAALATLLAVVARLGPDAARGPADPVLLQAQVQEGFGSLRRCYARGAGPHPRQPAFQGLFLLYNLGSVEALHEVLQLPAALRACPPLRKALAVDAAFREGNAARLFRLLQTLPYLPSCAVQCHVGHARREALARFARAFSTPKGQTLPLGFMVNLLALDGLREARDLCQAHGLPLDGEERVVFLRGRYVEEGLPPASTCKVLVESKLRGRTLEEVVMAEEEDEGTDRPGSPA

SEQ ID NO: 799923 - protein, 206 aa, Homo sapiens
MAGRRAQPGSAPPRPAAPHPRPASRAFPQHCRPRDAERPPSPRSPLMPGCELPVGTCPDMCPAAERAQREREHRLHRLEVVPGCRQDPPRADPQRAVKEYSRPAAGKPRPPPSQLRPPSVLLATVRYLAGEVAESADIARAEVASFVADRLRAVRLDLALQGAGPANPPSRASFCSITWARWKPCMRFYSCLLPCAPARPSARPWR

SEQ ID NO: 799924 - protein, 385 aa, Homo sapiens
MAGRRAQPGSAPPRPAAPHPRPASRAFPQHCRPRDAERPPSPRSPLMPGCELPVGTCPDMCPAAERAQREREHRLHRLEVVPGCRQDPPRADPQRAVKEYSRPAAGKPRPPPSQLRPPSVLLATVRYLAGEVAESADIARAEVASFVADRLRAVRLDLALQGAGDAEAAVVLEAALATLLAVVARLGPDAARGPADPVLLQAQVQEGFGSLRRCYARGAGPHPRQPAFQGLFLLYNLGSVEALHEVLQLPAALRAARLFRLLQTLPYLPSCAVQCHVGHARREALARFARAFSTPKGQTLPLGFMVNLLALDGLREARDLCQAHGLPLDGEERVVFLRGRYVEEGLPPASTCKVLVESKLRGRTLEEVVMAEEEDEGTDRPGSPA

SEQ ID NO: 799925 - protein, 184 aa, Homo sapiens
MPSEWFIFVHTVPLKKAGSVEALHEVLQLPAALRACPPLRKALAVDAAFREGNAARLFRLLQTLPYLPSCAVQCHVGHARREALARFARAFSTPKGQTLPLGFMVNLLALDGLREARDLCQAHGLPLDGEERVVFLRGRYVEEGLPPASTCKVLVESKLRGRTLEEVVMAEEEDEGTDRPGSPA

SEQ ID NO: 799926 - protein, 269 aa, Homo sapiens
MAGRRAQPGSAPPRPAAPHPRPASRAFPQHCRPRDAERPPSPRSPLMPGCELPVGTCPDMCPAAERAQREREHRLHRLEVVPGCRQDPPRADPQRAVKEYSRPAAGKPRPPPSQLRPPSVLLATVRYLAGEVAESADIARAEVASFVADRLRAVRLDLALQGAGDAEAAVVLEAALATLLAVVARLGPDAARGPADPVLLQAQVQEGFGSLRRCYARGAGPHPRQPAFQGLFLLYNLEMGSRMLPLEFLGSSDPPAPPSQVAGCGHHAQ

SEQ ID NO: 799927 - protein, 428 aa, Homo sapiens
TKRLVAAGTTPVYHGSGPGYTLKTLRGAREAELGARWGPLAALERAEPQRRSWTTTQCISGGQLDWTGPLMPGCELPVGTCPDMCPAAERAQREREHRLHRLEVVPGCRQDPPRADPQRAVKEYSRPAAGKPRPPPSQLRPPSVLLATVRYLAGEVAESADIARAEVASFVADRLRAVRLDLALQGAGDAEAAVVLEAALATLLAVVARLGPDAARGPADPVLLQAQVQEGFGSLRRCYARGAGPHPRQPAFQGLFLLYNLGSVEALHEVLQLPAALRACPPLRKALAVDAAFREGNAARLFRLLQTLPYLPSCAVQCHVGHARREALARFARAFSTPKGQTLPLGFMVNLLALDGLREARDLCQAHGLPLDGEERVVFLRGRYVEEGLPPASTCKVLVESKLRGRTLEEVVMAEEEDEGTDRPGSPA

SEQ ID NO: 799928 - protein, 339 aa, Homo sapiens
MPGCELPVGTCPDMCPAAERAQREREHRLHRLEVVPGCRQDPPRADPQRAVKEYSRPAAGKPRPPPSQLRPPSVLLATVRYLAGEVAESADIARAEVASFVADRLRAVRLDLALQGAGDAEAAVVLEAALATLLAVVARLGPDAARGPADPVLLQAQVQEGFGSLRRCYARGAGPHPRQPAFQGLFLLYNLGSVEALHEVLQLPAALRAARLFRLLQTLPYLPSCAVQCHVGHARREALARFARAFSTPKGQTLPLGFMVNLLALDGLREARDLCQAHGLPLDGEERVVFLRGRYVEEGLPPASTCKVLVESKLRGRTLEEVVMAEEEDEGTDRPGSPA

SEQ ID NO: 799929 - protein, 707 aa, Homo sapiens
DESYSEEEEEMPDSDENGSYSTSSDPSDDSKAVAIIKSVGELSVPEKYKSIHQIRPSCAFPVCHDTEERCRLVLSYVLEGLKSVDSSIKKESDLPAADPSTPIPLKYEDESSRGGPEGLEKQMALFLDKMGSLQKGNYSSQSGMIPGSWQHKMKLQLILKSSKAYYVLSDAAMSLQKYGRALRYIKLALQSHDTYCCLCTNMLSEVLLFLSQYLTLCGDIQLMLAQNANNRAAHLEEFHYQTKEDQEILHSLHRESSCQGFAWATDLSTDLESQLSVSCKCYEAANEILQFSDLKSQNPEHYVQVLKRMGNIRNEIGVFYMNQAAALQSERLVSKSVSAAEQQLWKKSFSCFEKGIHNFESIEDATNAALLLCNTGRLMRICAQAHCGAGDELKREFSPEEGLYYNKAIDYYLKALRSLGTRDIHPAVWDSVNWELSTTYFTMATLQQDYAPLSRKAQEQIEKEVSEAMMKSLKYCDVDSVSARQPLCQYRAATIHHRLASMYHSCLRNQVGDEHLRKQHRVLADLHYSKAAKLFQLLKDAPCELLRVQLERVAFAEFQMTSQNSNVGKLKTLSGALDIMVRTEHAFQLIQKELIEEFGQPKSGDAAAAADASPSLNREEVMKLLSIFESRLSFLLLQSIKLLSSTKKKTSNNIEDDTILKTNKHIYSQLLRATANKTATLLERINVIVHLLGQLAAGSAASSNAVQ

SEQ ID NO: 799930 - protein, 148 aa, Homo sapiens
MTSQNSNVGKLKTLSGALDIMVRTEHAFQLIQKELIEEFGQPKSGDAAAAADASPSLNREEVMKLLSIFESRLSFLLLQSIKLLSSTKKKTSNNIEDDTILKTNKHIYSQLLRATANKTATLLERINVIVHLLGQLAAGSAASSNAVQ

SEQ ID NO: 799931 - protein, 707 aa, Homo sapiens; identical to SEQ ID NO: 799929

SEQ ID NO: 799932 - protein, 477 aa, Homo sapiens
DESYSEEEEEMPDSDENGSYSTSSDPSDDSKAVAIIKSVGELSVPEKYKSIHQIRPSCAFPVCHDTEERCRLVLSYVLEGLKSVDSSIKKESDLPAADPSTPIPLKYEDESSRGGPEGLEKQMALFLDKMGSLQKGNYSSQSGMIPGSWQHKMKLQLILKSSKAYYVLSDAAMSLQKYGRALRYIKLALQSHDTYCCLCTNMLSEVLLFLSQYLTLCGDIQLMLAQNANNRAAHLEEFHYQTKEDQEILHSLHRESSCQGFAWATDLSTDLESQLSVSCKCYEAANEILQFSDLKSQNPEHYVQVLKRMGNIRNEIGVFYMNQAAALQSERLVSKSVSAAEQQLWKKSFSCFEKGIHNFESIEDATNAALLLCNTGRLMRICAQAHCGAGDELKREFSPEEGLYYNKKEKKKQRKQVHHHAQPESESSSTDWLLVALRWEHRVVFSLLGITFFIEIFSLTYFFHFLIILSLYKLSQN

SEQ ID NO: 799933 - protein, 366 aa, Homo sapiens
DESYSEEEEEMPDSDENGSYSTSSDPSDDSKAVAIIKSVGELSVPEKYKSIHQIRPSCAFPVCHDTEERCRLVLSYVLEGLKSVDSSIKKESDLPAADPSTPIPLKYEDESSRGGPEGLEKQMALFLDKMGSLQKGNYSSQSGMIPGSWQHKMKLQLILKSSKAYYVLSDAAMSLQKYGRALRYIKLALQSHDTYCCLCTNMLSEVLLFLSQYLTLCGDIQLMLAQNANNRAAHLEEFHYQTKEDQEILHSLHRESSCQGVPQAWTTWFTVGLCSLAHAYLSIQKRGRNIRVLIFALYLFIYFLRRSFALVAQAGVQWCNLGSLKPPPPGFKQFSCLSLPSSWNYRHAPPCPASPPWPPKVLGLQV

SEQ ID NO: 799934 - protein, 585 aa, Homo sapiens
MALFLDKMGSLQKGNYSSQSGMIPGSWQHKMKLQLILKSSKAYYVLSDAAMSLQKYGRALRYIKLALQSHDTYCCLCTNMLSEVLLFLSQYLTLCGDIQLMLAQNANNRAAHLEEFHYQTKEDQEILHSLHRESSCQGFAWATDLSTDLESQLSVSCKCYEAANEILQFSDLKSQNPEHYVQVLKRMGNIRNEIGVFYMNQAAALQSERLVSKSVSAAEQQLWKKSFSCFEKGIHNFESIEDATNAALLLCNTGRLMRICAQAHCGAGDELKREFSPEEGLYYNKAIDYYLKALRSLGTRDIHPAVWDSVNWELSTTYFTMATLQQDYAPLSRKAQEQIEKEVSEAMMKSLKYCDVDSVSARQPLCQYRAATIHHRLASMYHSCLRNQVGDEHLRKQHRVLADLHYSKAAKLFQLLKDAPCELLRVQLERVAFAEFQMTSQNSNVGKLKTLSGALDIMVRTEHAFQLIQKELIEEFGQPKSGDAAAAADASPSLNREEVMKLLSIFESRLSFLLLQSIKLLSSTKKKTSNNIEDDTILKTNKHIYSQLLRATANKTATLLERINVIVHLLGQLAAGSAASSNAVQ

SEQ ID NO: 799935 - protein, 564 aa, Homo sapiens
DESYSEEEEEMPDSDENGSYSTSSDPSDDSKAVAIIKSVGELSVPEKYKSIHQIRPSCAFPVCHDTEERCRLVLSYVLEGLKSVDSSIKKESDLPAADPSTPIPLKYEDESSRGGPEGLEKQMALFLDKMGSLQKGNYSSQSGMIPGSWQHKMKLQLILKSSKAYYVLSDAAMSLQKYGRALRYIKLALQSHDTYCCLCTNMLSEVLLFLSQYLTLCGDIQLMLAQNANNRAAHLEEFHYQTKEDQEILHSLHRESSCQGFAWATDLSTDLESQLSVSCKCYEAANEILQFSDLKSQNPEHYVQVLKRMGNIRNEIGVFYMNQAAALQSERLVSKSVSAAEQQLWKKSFSCFEKGIHNFESIEDATNAALLLCNTGRLMRICAQAHCGAGDELKREFSPEEGLYYNKAIDYYLKALRSLGTRDIHPAVWDSVNWELSTTYFTMATLQQDYAPLSRKAQEQIEKEVSEAMMKSLKYCDVDSVSARQPLCQYRAATIHHRLASMYHSCLRNQVGDEHLRKQHRVLADLHYSKAAKLFQLLKDAPCELLRVQLERVAFAEFQMTSKS

SEQ ID NO: 799936 - protein, 164 aa, Homo sapiens
MALVLEPDADDPRAQAGHLHQLLLHESVGPRVGGVAGPQSVQLLLVQHSPHAGRLLRLLVHVRAQRGLPARPSVCQDRSQDPRNERSPPEEVGVSEEEERGLPRTLERERDRRGPRARRCPGTGWEVRICRGPTRALPLLQSPFGQGQATCVEDSSTVMDGPPG

SEQ ID NO: 799937 - protein, 142 aa, Homo sapiens
FRSCSMATWRTWSCEAKESFSCTWLSQHQLLRLISKRELLCNFRIGADIFTCAHTVCFHSLIILFSLLKERLIRINMLVCLTWMVEEQRAVLESLFHYQLTSAWFFWVRTSNKTVLCVSFFFLAPPISLINTNPIKISQNYI

SEQ ID NO: 799938 - protein, 420 aa, Homo sapiens
MWWRDLTRLRLWLKREAIPGEGRKAAKVNAGVGEKGIYTASSRGGPPSARSKAVTVVAEGAASRSWLSMDAPELGPGLVERLEQLATCPLCGGSFEDPVLLACEHSFCRACLARRWGTPPATGTEASPTACPCCGLPCPRRSLRSNVRLAVEVRISRELREKLAEPGARAGRRRGGRIPTMGCLDLPGEDMRKTWRRFEVPTSKSSNSEDDLPEDYPVVKKMLHRLTADLTLDPGTAHRRLLISADRRSVQLAPPGTPAPPDGPKRFNQLPAVLGAQGFGAGRHCWEVETADAASCRDSSGEDADDEESHYAVGAAGESVQRKGCVRLCPAGAVWAVEGRGGRLWALTAPEPTLLGGVEPPPRRIRVDLDWERGRVAFYDGRSLDLLYAFQAPGPLGERIFPLFCTCDPRAPLRIVPAES

SEQ ID NO: 799939 - protein, 230 aa, Homo sapiens
MRKTWRRFEVPTSKSSNSEDDLPEDYPVVKKMLHRLTADLTLDPGTAHRRLLISADRRSVQLAPPGTPAPPDGPKRFNQLPAVLGAQGFGAGRHCWEVETADAASCRDSSGEDADDEESHYAVGAAGESVQRKGCVRLCPAGAVWAVEGRGGRLWALTAPEPTLLGGVEPPPRRIRVDLDWERGRVAFYDGRSLDLLYAFQAPGPLGERIFPLFCTCDPRAPLRIVPAES

SEQ ID NO: 799940 - protein, 203 aa, Homo sapiens
MGPLPASPSPADLTLDPGTAHRRLLISADRRSVQLAPPGTPAPPDGPKRFNQLPAVLGAQGFGAGRHCWEVETADAASCRDSSGEDADDEESHYAVGAAGESVQRKGCVRLCPAGAVWAVEGRGGRLWALTAPEPTLLGGVEPPPRRIRVDLDWERGRVAFYDGRSLDLLYAFQAPGPLGERIFPLFCTCDPRAPLRIVPAES

SEQ ID NO: 799941 - protein, 354 aa, Homo sapiens
MWWRDLTRLRLWLKREAIPGEGRKAAKVNAGVGEKGIYTASSRGGPPSARSKAVTVVAEGAASRSWLSMDAPELGPGLVERLEQLATCPLCGGSFEDPVLLACEHSFCRACLARRWGTPPATGTEASPTACPCCGLPCPRRSLRSNVRLAVEVRISRELREKLAEPGARAGRRRGGRIPTMGCLDLPGEDMRKTWRRFEVPTSKSSNSEDDLPEDYPVVKKMLHRLTADLTLDPGTAHRRLLISADRRSVQLAPPGTPAPPDGPKRFNQLPAVLGAQGFGAGRHCWEVETADAASCRDSSGEDADDEESHYAVGAAGESVQRKGCAPGPLGERIFPLFCTCDPRAPLRIVPAES

SEQ ID NO: 799942 - protein, 199 aa, Homo sapiens
MLHRLTADLTLDPGTAHRRLLISADRRSVQLAPPGTPAPPDGPKRFNQLPAVLGAQGFGAGRHCWEVETADAASCRDSSGEDADDEESHYAVGAAGESVQRKGCVRLCPAGAVWAVEGRGGRLWALTAPEPTLLGGVEPPPRRIRVDLDWERGRVAFYDGRSLDLLYAFQAPGPLGERIFPLFCTCDPRAPLRIVPAES

SEQ ID NO: 799943 - protein, 342 aa, Homo sapiens
DFRQLDLEKQGVSGMATKRLARQLGLIRRKSIAPANGNLGRSKSKQLFDYLIVIDFESTCWNDGKHHHSQEIIEFPAVLLNTSTGQIDSEFQAYVQPQEHPILSEFCMELTGIKQAQVDEGVPLKICLSQFCKWIHKIQQQKNIIFATGISEPSASEVKLCAFVTWSDWDLGVCLEYECKRKQLLKPVFLNSWIDLRATYKLFYRRKPKGLSGALQEVGIEFSGREHSGLDDSRNTALLAWKMIRDGCVMKITRSLNKGPFLLPSWTWNSDLASGDQHAFLQQEFGCGTYRTLLQKPNMSKQEKGNILWLTMVWLSLACLQRKNYNDCMLNTASQTVTTEKF

SEQ ID NO: 799944 - protein, 218 aa, Homo sapiens
MELTGIKQAQVDEGVPLKICLSQFCKWIHKIQQQKNIIFATGISEPSASEVKLCAFVTWSDWDLGVCLEYECKRKQLLKPVFLNSWIDLRATYKLFYRRKPKGLSGALQEVGIEFSGREHSGLDDSRNTALLAWKMIRDGCVMKITRSLNKGPFLLPSWTWNSDLASGDQHAFLQQEFGYFFNFLSFGLLFRTTNLSRKGQVPILAVEPTEPYFRSPI

SEQ ID NO: 799945 - protein, 308 aa, Homo sapiens
DFRQLDLEKQGVSGMATKRLARQLGLIRRKSIAPANGNLGRSKSKQLFDYLIVIDFESTCWNDGKHHHSQEIIEFPAVLLNTSTGQIDSEFQAYVQPQEHPILSEFCMELTGIKQAQVDEGVPLKICLSQFCKWIHKIQQQKNIIFATGISEPSASEVKLCAFVTWSDWDLGVCLEYECKRKQLLKPVFLNSWIDLRATYKLFYRRKPKGLSGALQEVGIEFSGREHSGLDDSRNTALLAWKMIRDGCVMKITRSLNKVPTKKNFSILARNLNTIQVEEMSACNISIQGPSIYNKEPKNIINPHEKVQ

SEQ ID NO: 799946 - protein, 91 aa, Homo sapiens
RLPAAGLGKARSVGNGDQAARAVLEGVPGRGRVAPGPALALAAEQGTAGGICGEGLYSPQPRRLRPALSGTVGKAPPWTSVFSLGPPSTRG

SEQ ID NO: 799947 - protein, 325 aa, Homo sapiens
DFRQLDLEKQGVSGMATKRLARQLGLIRRKSIAPANGNLGRSKSKQLFDYLIVIDFESTCWNDGKHHHSQEIIEFPAVLLNTSTGQIDSEFQAYVQPQEHPILSEFCMELTGIKQAQVDEGVPLKICLSQFCKWIHKIQQQKNIIFATGISEPSASEVKLCAFVTWSDWDLGVCLEYECKRKQLLKPVFLNSWIDLRATYKLFYRRKPKGLSGALQEVGIEFSGREHSGLDDSRNTALLAWKMIRDGCVMKITRSLNKGPFLLPSWTWNSDLASGDQHAFLQQEFGYFFNFLSFGLLFRTTNLSRKGQVPILAVEPTEPYFRSPI

SEQ ID NO: 799948 - protein, 402 aa, Homo sapiens
RLPAAGLGKARSVGNGDQAARAKGYTRQQFCQESTLNKGDRVIYNVARPPYCCVRFPLAGTGPHILYLSRLTSNIELFKRGKGRGEQRKKEVTCGMLRKQLGLIRRKSIAPANGNLGRSKSKQLFDYLIVIDFESTCWNDGKHHHSQEIIEFPAVLLNTSTGQIDSEFQAYVQPQEHPILSEFCMELTGIKQAQVDEGVPLKICLSQFCKWIHKIQQQKNIIFATGISEPSASEVKLCAFVTWSDWDLGVCLEYECKRKQLLKPVFLNSWIDLRATYKLFYRRKPKGLSGALQEVGIEFSGREHSGLDDSRNTALLAWKMIRDGCVMKITRSLNKGPFLLPSWTWNSDLASGDQHAFLQQEFGYFFNFLSFGLLFRTTNLSRKGQVPILAVEPTEPYFRSPI

SEQ ID NO: 799949 - protein, 290 aa, Homo sapiens
DFRQLDLEKQGVSGMATKRLARQLGLIRRKSIAPANGNLGRSKSKQLFDYLIVIDFESTCWNDGKHHHSQEIIEFPAVLLNTSTGQIDSEFQAYVQPQEHPILSEFCMELTGIKQAQVDEGVPLKICLSQFCKWIHKIQQQKNIIFATGISEPSASEVKLCAFVTWSDWDLGVCLEYECKRKQLLKPVFLNSWIDLRATYKLFYRRKPKGLSGALQEVGIEFSGREHSGLDDSRNTALLAWKMIRDGCVMARNLNTIQVEEMSACNISIQGPSIYNKEPKNIINPHEKVQ

SEQ ID NO: 799950 - protein, 594 aa, Homo sapiens
SGAPAALVPAAAGDHSPPLRRLHPRPPPGRASGAPAPSPWTRRPRCAGRRRGRKMAWVLKMDEVIESGLVHDFDASLSGIGQELGAGAYSMSDVLALPIFKQEDSSLPLDGETEHPPFQYVMCAATSPAVKLHDETLTYLNQGQSYEIRMLDNRKMGDMPEINGKLVKSIIRVVFHDRRLQYTEHQQLEGWKWNRPGDRLLDLDIPMSVGIIDTRTNPSQLNAVEFLWDPAKRTSAFIQVHCISTEFTPRKHGGEKGVPFRIQVDTFKQNENGEYTDHLHSASCQIKVFKPKGADRKQKTDREKMEKRTAHEKEKYQPSYDTTILTEMRLEPIIEDAVEHEQKKSSKRTLPADYGDSLAKRGSCSPWPDAPTAYVNNSPSPAPTFTSPQQSTCSVPDSNSSSPNHQGDGASQTSGEQIQPSATIQETQQWLLKNRFSSYTRLFSNFSGADLLKLTKEDLVQICGAADGIRLYNSLKSRSVRPRLTIYVCREQPSSTVLQGQQQAASSASENGSGAPYVYHAIYLEEMIASEVARKLALVFNIPLHQINQVYRQGPTGIHILVSDQMVQNFQDESCFLFSTVKAESSDGIHIILK

SEQ ID NO: 799951 - protein, 388 aa, Homo sapiens
MSVGIIDTRTNPSQLNAVEFLWDPAKRTSAFIQVHCISTEFTPRKHGGEKGVPFRIQVDTFKQNENGEYTDHLHSASCQIKVFKPKGADRKQKTDREKMEKRTAHEKEKYQPSYDTTILTEMRLEPIIEDAVEHEQKKSSKRTLPADYGDSLAKRGSCSPWPDAPTAYVNNSPSPAPTFTSPQQSTCSVPDSNSSSPNHQGDGASQTSGEQIQPSATIQETQQWLLKNRFSSYTRLFSNFSGADLLKLTKEDLVQICGAADGIRLYNSLKSRSVRPRLTIYVCREQPSSTVLQGQQQAASSASENGSGAPYVYHAIYLEEMIASEVARKLALVFNIPLHQINQVYRQGPTGIHILVSDQMVQNFQDESCFLFSTVKAESSDGIHIILK

SEQ ID NO: 799952 - protein, 468 aa, Homo sapiens
SGAPAALVPAAAGDHSPPLRRLHPRPPPGRASGAPAPSPWTRRPRCAGRRRGRKMAWVLKMDEVIESGLVHDFDASLSGIGQELGAGAYSMSDVLALPIFKQEDSSLPLDGETEHPPFQYVMCAATSPAVKLHDETLTYLNQGQSYEIRMLDNRKMGDMPEINGKLVKSIIRVVFHDRRLQYTEHQQLEGWKWNRPGDRLLDLDIPMSVGIIDTRTNPSQLNAVEFLWDPAKRTSAFIQVHCISTEFTPRKHGGEKGVPFRIQVDTFKQNENGEYTDHLHSASCQIKVFKPKGADRKQKTDREKMEKRTAHEKEKYQPSYDTTILTECSPWPDAPTAYVNNSPSPAPTFTSPQQSTCSVPDSNSSSPNHQGDGASQTSGEQIQPSATIQETQQWLLKNRFSSYTRLFSNFSGADLLKLTKEDLVQICGAADGIRLYNSLKSRAGPDMMQALMRAEVDCKTGRNAHGQY

SEQ ID NO: 799953 - protein, 594 aa, Homo sapiens; identical to SEQ ID NO: 799950

SEQ ID NO: 799954 - protein, 572 aa, Homo sapiens
SGAPAALVPAAAGDHSPPLRRLHPRPPPGRASGAPAPSPWTRRPRCAGRRRGRKMAWVLKMDEVIESGLVHDFDASLSGIGQELGAGAYSMSDVLALPIFKQEDSSLPLDGETEHPPFQYVMCAATSPAVKLHDETLTYLNQGQSYEIRMLDNRKMGDMPEINGKLVKSIIRVVFHDRRLQYTEHQQLEGWKWNRPGDRLLDLDIPMSVGIIDTRTNPSQLNAVEFLWDPAKRTSAFIQVHCISTEFTPRKHGGEKGVPFRIQVDTFKQNENGEYTDHLHSASCQIKVFKPKGADRKQKTDREKMEKRTAHEKEKYQPSYDTTILTEMRLEPIIEDAVEHEQKKSSKRTLPADYGDSLAKRGSCSPWPDAPTAYVNNSPSPAPTFTSPQQSTCSVPDSNSSSPNHQGDGASQTSGEQIQPSATIQETQQWLLKNRFSSYTRLFSNFSGADLLKLTKEDLVQICGAADGIRLYNSLKSRSVRPRLTIYVCREQPSSTVLQGQQQAASSASENGSGAPYVYHAIYLEEMIASEVARQGPTGIHILVSDQMVQNFQDESCFLFSTVKGTLHVCVS

SEQ ID NO: 799955 - protein, 468 aa, Homo sapiens; identical to SEQ ID NO: 799952

SEQ ID NO: 799956 - protein, 558 aa, Homo sapiens
SGAPAALVPAAAGDHSPPLRRLHPRPPPGRASGAPAPSPWTRRPRCAGRRRGRKMAWVLKMDEVIESGLVHDFDASLSGIGQELGAGAYSMSDVLALPIFKQEDSSLPLDGETEHPPFQYVMCAATSPAVKLHDETLTYLNQGQSYEIRMLDNRKMGDMPEINGKLVKSIIRVVFHDRRLQYTEHQQLEGWKWNRPGDRLLDLDIPMSVGIIDTRTNPSQLNAVEFLWDPAKRTSAFIQVHCISTEFTPRKHGGEKGVPFRIQVDTFKQNENGEYTDHLHSASCQIKVFKPKGADRKQKTDREKMEKRTAHEKEKYQPSYDTTILTECSPWPDAPTAYVNNSPSPAPTFTSPQQSTCSVPDSNSSSPNHQGDGASQTSGEQIQPSATIQETQQWLLKNRFSSYTRLFSNFSGADLLKLTKEDLVQICGAADGIRLYNSLKSRSVRPRLTIYVCREQPSSTVLQGQQQAASSASENGSGAPYVYHAIYLEEMIASEVARKLALVFNIPLHQINQVYRQGPTGIHILVSDQMVQNFQDESCFLFSTVKAESSDGIHIILK

SEQ ID NO: 799957 - protein, 576 aa, Homo sapiens
SGAPAALVPAAAGDHSPPLRRLHPRPPPGRASGAPAPSPWTRRPRCAGRRRGRKMAWVLKMDEVIESGLVHDFDASLSGIGQELGAGAYSMSDVLALPIFKQEDSSLPLDGETEHPPFQYVMCAATSPAVKLHDETLTYLNQGQSYEIRMLDNRKMGDMPEINGKLVKSIIRVVFHDRRLQYTEHQQLEGWKWNRPGDRLLDLDIPMSVGIIDTRTNPSQLNAVEFLWDPAKRTSAFIQVHCISTEFTPRKHGGEKGVPFRIQVDTFKQNENGEYTDHLHSASCQIKVFKPKGADRKQKTDREKMEKRTAHEKEKYQPSYDTTILTEMRLEPIIEDAVEHEQKKSSKRTLPADYGDSLAKRGSCSPWPDAPTAYVNNSPSPAPTFTSPQQSTCSVPDSNSSSPNHQGDGASQTSGEQIQPSATIQETQQWLLKNRFSSYTRLFSNFSGADLLKLTKEDLVQICGAADGIRLYNSLKSRSVRPRLTIYVCREQPSSTVLQGQQQAASSASENGSGAPYVYHAIYLEEMIASEVARQGPTGIHILVSDQMVQNFQDESCFLFSTVKAESSDGIHIILK

SEQ ID NO: 799958 - protein, 594 aa, Homo sapiens; identical to SEQ ID NO: 799950

SEQ ID NO: 799959 - protein, 594 aa, Homo sapiens; identical to SEQ ID NO: 799950

SEQ ID NO: 799960 - protein, 343 aa, Homo sapiens
SGAPAALVPAAAGDHSPPLRRLHPRPPPGRASGAPAPSPWTRRPRCAGRRRGRKMAWVLKMDEVIESGLVHDFDASLSGIGQELGAGAYSMSDVLALPIFKQEDSSLPLDGETEHPPFQYVMCAATSPAVKLHDETLTYLNQGQSYEIRMLDNRKMGDMPEINGKLVKSGMSGPRCCWALSVEGHSIGKTCPLWICLFSESIIRVVFHDRRLQYTEHQQLEGWKWNRPGDRLLDLDIPMSVGIIDTRTNPSQLNAVEFLWDPAKRTSAFIQVHCISTEFTPRKHGGEKGVPFRIQVDTFKQNENGEYTDHLHSASCQIKVFKPKGADRKQKTDREQWYDHGSL

SEQ ID NO: 799961 - protein, 71 aa, Homo sapiens [sequence omitted]

SEQ ID NO: 799962 - protein, 104 aa, Homo sapiens
GDGGHHPLNPRVPVPHLARTAPPLHPREYCKQRWQVQACTGRGLQETDPWPLIWCSGSQAQSQAWALHPHPLRGARTERSPQVTQVYLSVLMLLINTYPRLGNL

SEQ ID NO: 799963 - protein, 537 aa, Homo sapiens
PTSSGRALALSPPQSATGPGVPMCQVGEDYGEPAPEEPPPAPRPSREQKCVKCKEAQPVVVIRAGDAFCRDCFKAFYVHKFRAMLGKNRLIFPGEKVLLAWSGGPSSSSMVWQVLEGLSQDSAKRLRFVAGVIFVDEGAACGQSLEERSKTLAEVKPILQATGFPWHVVALEEVFSLPPSVLWCSAQELVGSEGAYKAAVDSFLQQQHVLGAGGGPGPTQGEEQPPQPPLDPQNLARPPAPAQTEALSQLFCSVRTLTAKEELLQTLRTHLILHMARAHGYSKVMTGDSCTRLAIKLMTNLALGRGAFLAWDTGFSDERHGDVVVVRPMRDHTLKEVAFYNRLFSVPSVFTPAVDTKAPEKASIHRLMEAFILRLQTQFPSTVSTVYRTSEKLVKGPRDGPAAGDSGPRCLLCMCALDVDAADSATAFGAQTSSRLSRMQSPIPLTETRTPPGPCCSPGVGWAQRCGQGACRREDPQACIEEQLCYSCRVNMKDLPSLDPLPPYILAEAQLRTQRAWGLQEIRDCLIEDSDDEAGQS

SEQ ID NO: 799964 - protein, 537 aa, Homo sapiens; identical to SEQ ID NO: 799963

SEQ ID NO: 799965 - protein, 518 aa, Homo sapiens
PTSSGRALALSPPQSATGPGVPMCQVGEDYGEPAPEEPPPAPRPSREQKCVKCKEAQPVVVIRAGDAFCRDCFKAFYVHKFRAMLGKNRLIFPGEKVLLAWSGGPSSSSMVWQVLEGLSQDSAKRLRFVAGVIFVDEGAACGQSLEERSKTLAEVKPILQATGFPWHVVALEEVFSLPPSVLWCSAQELVGSEGAYKAAVDSFLQQQHVLGAGGGPGPTQGEEQPPQPPLDPQNLARPPAPAQTEALSQLFCSVRTLTAKEELLQTLRTHLILHMARAHGYSKVMTGDSCTRLAIKLMTNLALGRGAFLAWDTGFSDERHGDVVVVRPMRDHTLKEVAFYNRLFSVPSVFTPAVDTKTQFPSTVSTVYRTSEKLVKGPRDGPAAGDSGPRCLLCMCALDVDAADSATAFGAQTSSRLSRMQSPIPLTETRTPPGPCCSPGVGWAQRCGQGACRREDPQACIEEQLCYSCRVNMKDLPSLDPLPPYILAEAQLRTQRAWGLQEIRDCLIEDSDDEAGQS

SEQ ID NO: 799966 - protein, 562 aa, Homo sapiens
PTSSGRALALSPPQSATGPGVPMCQVGEDYGEPAPEEPPPAPRPSREQKCVKCKEAQPVVVIRAGDAFCRDCFKAFYVHKFRAMLGKNRLIFPGEKVLLAWSGGPSSSSMVWQVLEGLSQDSAKRLRFVAGVIFVDEGAACGQSLEERSKTLAEVKPILQATGFPWHVVALEEVFSLPPSVLWCSAQELVGSEGAYKAAVDSFLQQQHVLGAGGGPGPTQGEEQPPQPPLDPQNLARPPAPAQTEALSQLFCSVRTLTAKEELLQTLRTHLILHMARAHGYSKVMTGDSCTRLAIKLMTNLALGRGAFLAWDTGFSDERHGDVVVVRPMRDHTLKEVAFYNRLFSVPSVFTPAVDTKAPEKASIHRLMEAFILRLQTQFPSTVSTVYRTSEKLVKGPRDGPAAGDSGPRCLLCMCALDVDAADSATAFGAQTSSRLSRMQSPIPLTETRTPPGPCCSPGVGWAQRCGQGACRREDPQACIEEQLCYSCRVNMKDLPSLDPLPPYILAEAQLRTQRYWGPHCRGAWVRGLGAGAHCSFLSRAWGLQEIRDCLIEDSDDEAGQS

SEQ ID NO: 799967 - protein, 503 aa, Homo sapiens
IRLGTRLGGAGVPMCQVGEDYGEPAPEEPPPAPRPRDCFKAFYVHKFRAMLGKNRLIFPGEKVLLAWSGGPSSSSMVWQVLEGLSQDSAKRLRFVAGVIFVDEGAACGQSLEERSKTLAEVKPILQATGFPWHVVALEEVFSLPPSVLWCSAQELVGSEGAYKAAVDSFLQQQHVLGAGGGPGPTQGEEQPPQPPLDPQNLARPPAPAQTEALSQLFCSVRTLTAKEELLQTLRTHLILHMARAHGYSKVMTGDSCTRLAIKLMTNLALGRGAFLAWDTGFSDERHGDVVVVRPMRDHTLKEVAFYNRLFSVPSVFTPAVDTKAPEKASIHRLMEAFILRLQTQFPSTVSTVYRTSEKLVKGPRDGPAAGDSGPRCLLCMCALDVDAADSATAFGAQTSSRLSRMQSPIPLTETRTPPGPCCSPGVGWAQRCGQGACRREDPQACIEEQLCYSCRVNMKDLPSLDPLPPYILAEAQLRTQRAWGLQEIRDCLIEDSDDEAGQS

SEQ ID NO: 799968 - protein, 528 aa, Homo sapiens
IRLGTRLGGAGVPMCQVGEDYGEPAPEEPPPAPRPSREQKCVKCKEAQPVVVIRAGDAFCRDCFKAFYVHKFRAMLGKNRLIFPGEKVLLAWSGGPSSSSMVWQVLEGLSQDSAKRLRFVAGVIFVDEGAACGQSLEERSKTLAEVKPILQATGFPWHVVALEEVFSLPPSVLWCSAQELVGSEGAYKAAVDSFLQQQHVLGAGGGPGPTQGEEQPPQPPLDPQNLARPPAPAQTEALSQLFCSVRTLTAKEELLQTLRTHLILHMARAHGYSKVMTGDSCTRLAIKLMTNLALGRGAFLAWDTGFSDERHGDVVVVRPMRDHTLKEVAFYNRLFSVPSVFTPAVDTKAPEKASIHRLMEAFILRLQTQFPSTVSTVYRTSEKLVKGPRDGPAAGDSGPRCLLCMCALDVDAADSATAFGAQTSSRLSRMQSPIPLTETRTPPGPCCSPGVGWAQRCGQGACRREDPQACIEEQLCYSCRVNMKDLPSLDPLPPYILAEAQLRTQRAWGLQEIRDCLIEDSDDEAGQS

SEQ ID NO: 799969 - protein, 473 aa, Homo sapiens
PTSSGRALALSPPQSATGPGVPMCQVGEDYGEPAPEEPPPAPRPSREQKCVKCKEAQPVVVIRAGDAFCRDCFKAFYVHKFRAMLGKNRLIFPGEKVLLAWSGGPSSSSMVWQVLEGLSQDSAKRLRFVAGVIFVDEGAACGQSLEERSKTLAEVKPILQATGFPWHVVALEEVFSLPPSVLWCSAQELVGSEGAYKAAVDSFLQQQHVLGAGGGPGPTQGEEQPPQPPLDPQNLARPPAPAQTEALSQLFCSVRTLTAKEELLQTLRTHLILHMARAHGYSKVMTGDSCTRLAIKLMTNLALGRGAFLAWDTGFSDERHGDVVVVRPMRDHTLKEVAFYNRLFSVPSVFTPAVDTKAPEKASIHRLMEAFILRLQTQFPSTVSTVYRTSEKLVKGPRDGPAAGDSGPRCLLCMCALDVDAADSATAFGAQTSSRLSRMQSPIPLTETRTPPGPCCSPGVGWAQRCGQGACRR

SEQ ID NO: 799970 - protein, 516 aa, Homo sapiens
MIETGVNRDEGERRLRSRPGAAASREQKCVKCKEAQPVVVIRAGDAFCRDCFKAFYVHKFRAMLGKNRLIFPGEKVLLAWSGGPSSSSMVWQVLEGLSQDSAKRLRFVAGVIFVDEGAACGQSLEERSKTLAEVKPILQATGFPWHVVALEEVFSLPPSVLWCSAQELVGSEGAYKAAVDSFLQQQHVLGAGGGPGPTQGEEQPPQPPLDPQNLARPPAPAQTEALSQLFCSVRTLTAKEELLQTLRTHLILHMARAHGYSKVMTGDSCTRLAIKLMTNLALGRGAFLAWDTGFSDERHGDVVVVRPMRDHTLKEVAFYNRLFSVPSVFTPAVDTKAPEKASIHRLMEAFILRLQTQFPSTVSTVYRTSEKLVKGPRDGPAAGDSGPRCLLCMCALDVDAADSATAFGAQTSSRLSRMQSPIPLTETRTPPGPCCSPGVGWAQRCGQGACRREDPQACIEEQLCYSCRVNMKDLPSLDPLPPYILAEAQLRTQRAWGLQEIRDCLIEDSDDEAGQS

SEQ ID NO: 799971 - protein, 603 aa, Homo sapiens
IRLGTRLGGAGVPMCQVGEDYGEPAPEEPPPAPRPSREQKCVKCKEAQPVVVIRAGDAFCRDCFKAFYVHKFRAMLGKNRLIFPGEKVLLAWSGGPSSSSMVWQVLEGLSQDSAKRLRFVAGVIFVDERTPGVLTVALRSAAREKPLPTRHTWRNHHSSAMEAPTCGDEASNGKPRWQMALTACPDMDPLMSPDSFCLLVITEGAACGQSLEERSKTLAEVKPILQATGFPWHVVALEEVFSLPPSVLWCSAQELVGSEGAYKAAVDSFLQQQHVLGAGGGPGPTQGEEQPPQPPLDPQNLARPPAPAQTEALSQLFCSVRTLTAKEELLQTLRTHLILHMARAHGYSKVMTGDSCTRLAIKLMTNLALGRGAFLAWDTGFSDERHGDVVVVRPMRDHTLKEVAFYNRLFSVPSVFTPAVDTKAPEKASIHRLMEAFILRLQTQFPSTVSTVYRTSEKLVKGPRDGPAAGDSGPRCLLCMCALDVDAADSATAFGAQTSSRLSRMQSPIPLTETRTPPGPCCSPGVGWAQRCGQGACRREDPQACIEEQLCYSCRVNMKDLPSLDPLPPYILAEAQLRTQRAWGLQEIRDCLIEDSDDEAGQS

SEQ ID NO: 799972 - protein, 118 aa, Homo sapiens
MVARVWSLMRFLIKGSVAGGAVYLVYDQELLGPSDKSQAALQKAGEVVPPAMYQFSQYVCQQTGLQIPQLPAPPKIYFPIRDSWNAGIMTVMSALSVAPSKAREYSKEGWEYVKARTK

SEQ ID NO: 799973 - protein, 118 aa, Homo sapiens; identical to SEQ ID NO: 799972

SEQ ID NO: 799974 - protein, 115 aa, Homo sapiens
MVARVWSLMRFLIKGSVAGGAVYLVYDQELLGPSDKSQAALQKAGEVVPPAMYQFSQYVCQQTGLQIPQLPAPPKIYFPIRDSWNAGWYGGALVVPATWEAEARESLEPRRRRLQ

SEQ ID NO: 799975 - protein, 884 aa, Homo sapiens
NSAPSSPRRPSSLKRLFRATRPSGTEARAGRHVRFAASGNDASCVSRQYGRAMAASTGYVRLWGAARCWVLRRPMLAAAGGRVPTAAGAWLLRGQRTCDASPPWALWGRGPAIGGQWRGFWEASSRGGGAFSGGEDASEGGAEEGAGGAGGSAGAGEGPVITALTPMTIPDVFPHLPLIAITRNPVFPRFIKIIEVKNKKLVELLRRKVRLAQPYVGVFLKRDDSNESDVVESLDEIYHTGTFAQIHEMQDLGDKLRMIVMGHRRVHISRQLEVEPEEPEAENKHKPRRKSKRGKKEAEDELSARHPAELAMEPTPELPAEVLMVEVENVVHEDFQVTEEVKALTAEIVKTIRDIIALNPLYRESVLQMMQAGQRVVDNPIYLSDMGAALTGAESHELQDVLEETNIPKRLYKALSLLKKEFELSKLQQRLGREVEEKIKQTHRKYLLQEQLKIIKKELGLEKDDKDAIEEKFRERLKELVVPKHVMDVVDEELSKLGLLDNHSSEFNVTRNYLDWLTSIPWGKYSNENLDLARAQAVLEEDHYGMEDVKKRILEFIAVSQLRGSTQGKILCFYGPPGVGKTSIARSIARALNREYFRFSVGGMTDVAEIKGHRRTYVGAMPGKIIQCLKKTKTENPLILIDEVDKIGRGYQGDPSSALLELLDPEQNANFLDHYLDVPVDLSKVLFICTANVTDTIPEPLRDRMEMINVSGYVAQEKLAIAERYLVPQARALCGLDESKAKLSSDVLTLLIKQYCRESGVRNLQKQVEKVLRKSAYKIVSGEAESVEVTPENLQDFVGKPVFTVERMYDVTPPGVVMGLAWTAMGGSTLFVETSLRRPQDKDAKGDKDGSLEVTGQLGEVMKGERPHSLHLRQSLPHAARPRQ

SEQ ID NO: 799976 - protein, 884 aa, Homo sapiens; identical to SEQ ID NO: 799975

SEQ ID NO: 799977 - protein, 884 aa, Homo sapiens; identical to SEQ ID NO: 799975

SEQ ID NO: 799978 - protein, 861 aa, Homo sapiens
NSAPSSPRRPSSLKRLFRATRPSGTEARAGRHVRFAASGNDASCVSRQYGRAMAASTGYVRLWGAARCWVLRRPMLAAAGGRVPTAAGAWLLRGQRTCDASPPWALWGRGPAIGGQWRGFWEASSRGGGAFSGGEDASEGGAEEGAGGAGGSAGAGEGPVITALTPMTIPDVFPHLPLIAITRNPVFPRFIKIIEVKNKKLVELLRRKVRLAQPYVGVFLKRDDSNESDVVESLDEIYHTGTFAQIHEMQDLGDKLRMIVMGHRRVHISRQLEVEPEEPEAENKHKPRRKSKRGKKEAEDELSARHPAELAMEPTPELPAEVLMVEVENVVHEDFQVTEEVKALTAEIVKTIRDIIALNPLYRESVLQMMQAGQRVVDNPIYLSDMGAALTGAESHELQDVLEETNIPKRLVEEKIKQTHRKYLLQEQLKIIKKELGLEKDDKDAIEEKFRERLKELVVPKHVMDVVDEELSKLGLLDNHSSEFNVTRNYLDWLTSIPWGKYSNENLDLARAQAVLEEDHYGMEDVKKRILEFIAVSQLRGSTQGKILCFYGPPGVGKTSIARSIARALNREYFRFSVGGMTDVAEIKGHRRTYVGAMPGKIIQCLKKTKTENPLILIDEVDKIGRGYQGDPSSALLELLDPEQNANFLDHYLDVPVDLSKVLFICTANVTDTIPEPLRDRMEMINVSGYVAQEKLAIAERYLVPQARALCGLDESKAKLSSDVLTLLIKQYCRESGVRNLQKQVEKVLRKSAYKIVSGEAESVEVTPENLQDFVGKPVFTVERMYDVTPPGVVMGLAWTAMGGSTLFVETSLRRPQDKDAKGDKDGSLEVTGQLGEVMKGERPHSLHLRQSLPHAARPRQ

SEQ ID NO: 799979 - protein, 573 aa, Homo sapiens
MEPTPELPAEVLMVEVENVVHEDFQVTEEVKALTAEIVKTIRDIIALNPLYRESVLQMMQAGQRVVDNPIYLSDMGAALTGAESHELQDVLEETNIPKRLYKALSLLKKEFELSKLQQRLGREVEEKIKQTHRKYLLQEQLKIIKKELGLEKDDKDAIEEKFRERLKELVVPKHVMDVVDEELSKLGLLDNHSSEFNVTRNYLDWLTSIPWGKYSNENLDLARAQAVLEEDHYGMEDVKKRILEFIAVSQLRGSTQGKILCFYGPPGVGKTSIARSIARALNREYFRFSVGGMTDVAEIKGHRRTYVGAMPGKIIQCLKKTKTENPLILIDEVDKIGRGYQGDPSSALLELLDPEQNANFLDHYLDVPVDLSKVLFICTANVTDTIPEPLRDRMEMINVSGYVAQEKLAIAERYLVPQARALCGLDESKAKLSSDVLTLLIKQYCRESGVRNLQKQVEKVLRKSAYKIVSGEAESVEVTPENLQDFVGKPVFTVERMYDVTPPGVVMGLAWTAMGGSTLFVETSLRRPQDKDAKGDKDGSLEVTGQLGEVMKGERPHSLHLRQSLPHAARPRQ

SEQ ID NO: 799980 - protein, 884 aa, Homo sapiens; identical to SEQ ID NO: 799975

SEQ ID NO: 799981 - protein, 884 aa, Homo sapiens; identical to SEQ ID NO: 799975

SEQ ID NO: 799982 - protein, 884 aa, Homo sapiens; identical to SEQ ID NO: 799975

SEQ ID NO: 799983 - protein, 910 aa, Homo sapiens
NSAPSSPRRPSSLKRLFRATRPSGTEARAGRHVRFAASGNDASCVSRQYGRAMAASTGYVRLWGAARCWVLRRPMLAAAGGRVPTAAGAWLLRGQRTCDASPPWALWGRGPAIGGQWRGFWEASSRGGGAFSGGEDASEGGAEEGAGGAGGSAGAGEGPVITALTPMTIPDVFPHLPLIAITRNPVFPRFIKIIEVKNKKLVELLRRKVRLAQPYVGVFLKRDDSNESDVVESLDEIYHTGTFAQIHEMQDLGDKLRMIVMGHRRVHISRQLEVEPEEPEAENKHKPRRKSKRGKKEAEDELSARHPAELAMEPTPELPAEVLMVEVENVVHEDFQVTEEVKALTAEIVKTIRDIIALNPLYRESVLQMMQAGQRVVDNPIYLSDMGAALTGAESHELQDVLEETNIPKRLYKALSLLKKEFELSKLQQRLGREVEEKIKQTHRKYLLQEQLKIIKKELGLEKDDKDAIEEKFRERLKELVVPKHVMDVVDEELSKLGLLDNHSSEFNVTRNYLDWLTSIPWGKYSNENLDLARAQAVLEEDHYGMEDVKKRILEFIAVSQLRGSTQGKILCFYGPPGVGKTSIARSIARALNREYFRFSVGGMTDVAEIKGHRRTYVGAMPGKIIQCLKKTKTENPLILIDEVDKIGRGYQGDPSSALLELLDPEQNANFLDHYLDVPVDLSKVGGLSGAWACWGGSAASPPAPCRRPQVLFICTANVTDTIPEPLRDRMEMINVSGYVAQEKLAIAERYLVPQARALCGLDESKAKLSSDVLTLLIKQYCRESGVRNLQKQVEKVLRKSAYKIVSGEAESVEVTPENLQDFVGKPVFTVERMYDVTPPGVVMGLAWTAMGGSTLFVETSLRRPQDKDAKGDKDGSLEVTGQLGEVMKGERPHSLHLRQSLPHAARPRQ

SEQ ID NO: 799984 - protein, 573 aa, Homo sapiens; identical to SEQ ID NO: 799979

SEQ ID NO: 799985 - protein, 603 aa, Homo sapiens
ARYEAGVKSAEAGKKEAEDELSARHPAELAMEPTPELPAEVLMVEVENVVHEDFQVTEEVKALTAEIVKTIRDIIALNPLYRESVLQMMQAGQRVVDNPIYLSDMGAALTGAESHELQDVLEETNIPKRLYKALSLLKKEFELSKLQQRLGREVEEKIKQTHRKYLLQEQLKIIKKELGLEKDDKDAIEEKFRERLKELVVPKHVMDVVDEELSKLGLLDNHSSEFNVTRNYLDWLTSIPWGKYSNENLDLARAQAVLEEDHYGMEDVKKRILEFIAVSQLRGSTQGKILCFYGPPGVGKTSIARSIARALNREYFRFSVGGMTDVAEIKGHRRTYVGAMPGKIIQCLKKTKTENPLILIDEVDKIGRGYQGDPSSALLELLDPEQNANFLDHYLDVPVDLSKVLFICTANVTDTIPEPLRDRMEMINVSGYVAQEKLAIAERYLVPQARALCGLDESKAKLSSDVLTLLIKQYCRESGVRNLQKQVEKVLRKSAYKIVSGEAESVEVTPENLQDFVGKPVFTVERMYDVTPPGVVMGLAWTAMGGSTLFVETSLRRPQDKDAKGDKDGSLEVTGQLGEVMKGERPHSLHLRQSLPHAARPRQ

SEQ ID NO: 799986 - protein, 618 aa, Homo sapiens
ERITIGRVPGFTFVTEGLASCSESKWAGKKEAEDELSARHPAELAMEPTPELPAEVLMVEVENVVHEDFQVTEEVKALTAEIVKTIRDIIALNPLYRESVLQMMQAGQRVVDNPIYLSDMGAALTGAESHELQDVLEETNIPKRLYKALSLLKKEFELSKLQQRLGREVEEKIKQTHRKYLLQEQLKIIKKELGLEKDDKDAIEEKFRERLKELVVPKHVMDVVDEELSKLGLLDNHSSEFNVTRNYLDWLTSIPWGKYSNENLDLARAQAVLEEDHYGMEDVKKRILEFIAVSQLRGSTQGKILCFYGPPGVGKTSIARSIARALNREYFRFSVGGMTDVAEIKGHRRTYVGAMPGKIIQCLKKTKTENPLILIDEVDKIGRGYQGDPSSALLELLDPEQNANFLDHYLDVPVDLSKVLFICTANVTDTIPEPLRDRMEMINVSGYVAQEKLAIAERYLVPQARALCGLDESKAKLSSDVLTLLIKQYCRESGVRNLQKQVEKVLRKSAYKIVSGEAESVEVTPENLQDFVGKPVFTVERMYDVTPPGVVMGLAWTAMGGSTLFVETSLRRPQDKDAKGDKDGSLEVTGQLGEVMKGERPHSLHLRQSLPHAARPRQ

SEQ ID NO: 799987 - protein, 593 aa, Homo sapiens
MRGKKEAEDELSARHPAELAMEPTPELPAEVLMVEVENVVHEDFQVTEEVKALTAEIVKTIRDIIALNPLYRESVLQMMQAGQRVVDNPIYLSDMGAALTGAESHELQDVLEETNIPKRLYKALSLLKKEFELSKLQQRLGREVEEKIKQTHRKYLLQEQLKIIKKELGLEKDDKDAIEEKFRERLKELVVPKHVMDVVDEELSKLGLLDNHSSEFNVTRNYLDWLTSIPWGKYSNENLDLARAQAVLEEDHYGMEDVKKRILEFIAVSQLRGSTQGKILCFYGPPGVGKTSIARSIARALNREYFRFSVGGMTDVAEIKGHRRTYVGAMPGKIIQCLKKTKTENPLILIDEVDKIGRGYQGDPSSALLELLDPEQNANFLDHYLDVPVDLSKVLFICTANVTDTIPEPLRDRMEMINVSGYVAQEKLAIAERYLVPQARALCGLDESKAKLSSDVLTLLIKQYCRESGVRNLQKQVEKVLRKSAYKIVSGEAESVEVTPENLQDFVGKPVFTVERMYDVTPPGVVMGLAWTAMGGSTLFVETSLRRPQDKDAKGDKDGSLEVTGQLGEVMKGERPHSLHLRQSLPHAARPRQ

SEQ ID NO: 799988 - protein, 984 aa, Homo sapiens
NSAPSSPRRPSSLKRLFRATRPSGTEARAGRHVRFAASGNDASCVSRQYGRAMAASTGYVRLWGAARCWVLRRPMLAAAGGRVPTAAGAWLLRGQRTCDASPPWALWGRGPAIGGQWRGFWEASSRGGGAFSGGEDASEGGAEEGAGGAGGSAGAGEGPVITALTPMTIPDVFPHLPLIAITRNPVFPRFIKIIEVKNKKLVELLRRKVRLAQPYVGVFLKRDDSNESDVVESLDEIYHTGTFAQIHEMQDLGDKLRMIVMGHRRVHISRQLEVEPEEPEAENKHKPRRKSKRGKKEAEDELSARHPAELAMEPTPELPAEVLMVEVENVVHEDFQVTEEVKALTAEIVKTIRDIIALNPLYRESVLQMMQAGQRVVDNPIYLSDMGAALTGAESHELQDVLEETNIPKRLYKALSLLKKEFELSKLQQRLGREVEEKIKQTHRKYLLQEQLKIIKKELGLEKDDKDAIEEKFRERLKELVVPKHVMDVVDEELSKLGLLDNHSSEFNVTRNYLDWLTSIPWGKYSNENLDLARAQAVLEEDHYGMEDVKKRILEFIAVSQLRGSTQGKILCFYGPPGVGKTSIARSIARALNREYFRFSVGGMTDVAEIKGHRRTYVGAMPGKIIQCLKKTKTENPLILIDEVRAERPGDPLTRQCRVQDEAEAFRVLGSPSQLRGHRRDAGPDGTDGSLPTHSHAQQAARPRQGVGAALTRGLPSPDPGVSPLGGLARGTARGTTCCLLPQVDKIGRGYQGDPSSALLELLDPEQNANFLDHYLDVPVDLSKVLFICTANVTDTIPEPLRDRMEMINVSGYVAQEKLAIAERYLVPQARALCGLDESKAKLSSDVLTLLIKQYCRESGVRNLQKQVEKVLRKSAYKIVSGEAESVEVTPENLQDFVGKPVFTVERMYDVTPPGVVMGLAWTAMGGSTLFVETSLRRPQDKDAKGDKDGSLEVTGQLGEVMKGERPHSLHLRQSLPHAARPRQ

SEQ ID NO: 799989 - protein, 1010 aa, Homo sapiens
NSAPSSPRRPSSLKRLFRATRPSGTEARAGRHVRFAASGNDASCVSRQYGRAMAASTGYVRLWGAARCWVLRRPMLAAAGGRVPTAAGAWLLRGQRTCDASPPWALWGRGPAIGGQWRGFWEASSRGGGAFSGGEDASEGGAEEGAGGAGGSAGAGEGPVITALTPMTIPDVFPHLPLIAITRNPVFPRFIKIIEVKNKKLVELLRRKVRLAQPYVGVFLKRDDSNESDVVESLDEIYHTGTFAQIHEMQDLGDKLRMIVMGHRRVHISRQLEVEPEEPEAENKHKPRRKSKRGKKEAEDELSARHPAELAMEPTPELPAEVLMVEVENVVHEDFQVTEEVKALTAEIVKTIRDIIALNPLYRESVLQMMQAGQRVVDNPIYLSDMGAALTGAESHELQDVLEETNIPKRLYKALSLLKKEFELSKLQQRLGREVEEKIKQTHRKYLLQEQLKIIKKELGLEKDDKDAIEEKFRERLKELVVPKHVMDVVDEELSKLGLLDNHSSEFNVTRNYLDWLTSIPWGKYSNENLDLARAQAVLEEDHYGMEDVKKRILEFIAVSQLRGSTQGKILCFYGPPGVGKTSIARSIARALNREYFRFSVGGMTDVAEIKGHRRTYVGAMPGKIIQCLKKTKTENPLILIDEVRAERPGDPLTRQCRVQDEAEAFRVLGSPSQLRGHRRDAGPDGTDGSLPTHSHAQQAARPRQGVGAALTRGLPSPDPGVSPLGGLARGTARGTTCCLLPQVDKIGRGYQGDPSSALLELLDPEQNANFLDHYLDVPVDLSKVGGLSGAWACWGGSAASPPAPCRRPQVLFICTANVTDTIPEPLRDRMEMINVSGYVAQEKLAIAERYLVPQARALCGLDESKAKLSSDVLTLLIKQYCRESGVRNLQKQVEKVLRKSAYKIVSGEAESVEVTPENLQDFVGKPVFTVERMYDVTPPGVVMGLAWTAMGGSTLFVETSLRRPQDKDAKGDKDGSLEVTGQLGEVMKGERPHSLHLRQSLPHAARPRQ

SEQ ID NO: 799990 - protein, 645 aa, Homo sapiens
MEERKHSLFFSPEIAYPKDKALRGKETGFGFSFDSLGPVSLGLVSPPGTALLHLPGRPWPGPVGGGEGVDGAGGWGSQGHAPTQPTTLLEHCWAPATLPHTWQALTAEIVKTIRDIIALNPLYRESVLQMMQAGQRVVDNPIYLSDMGAALTGAESHELQDVLEETNIPKRLYKALSLLKKEFELSKLQQRLGREVEEKIKQTHRKYLLQEQLKIIKKELGLEKDDKDAIEEKFRERLKELVVPKHVMDVVDEELSKLGLLDNHSSEFNVTRNYLDWLTSIPWGKYSNENLDLARAQAVLEEDHYGMEDVKKRILEFIAVSQLRGSTQGKILCFYGPPGVGKTSIARSIARALNREYFRFSVGGMTDVAEIKGHRRTYVGAMPGKIIQCLKKTKTENPLILIDEVDKIGRGYQGDPSSALLELLDPEQNANFLDHYLDVPVDLSKVLFICTANVTDTIPEPLRDRMEMINVSGYVAQEKLAIAERYLVPQARALCGLDESKAKLSSDVLTLLIKQYCRESGVRNLQKQVEKVLRKSAYKIVSGEAESVEVTPENLQDFVGKPVFTVERMYDVTPPGVVMGLAWTAMGGSTLFVETSLRRPQDKDAKGDKDGSLEVTGQLGEVMKGERPHSLHLRQSLPHAARPRQ

SEQ ID NO: 799991 - protein, 580 aa, Homo sapiens
MAASTGYVRLWGAARCWVLRRPMLAAAGGRVPTAAGAWLLRGQRTCDASPPWALWGRGPAIGGQWRGFWEASSRGGGAFSGGEDASEGGAEEGAGGAGGSAGAGEGPVITALTPMTIPDVFPHLPLIAITRNPVFPRFIKIIEVQEQLKIIKKELGLEKDDKDAIEEKFRERLKELVVPKHVMDVVDEELSKLGLLDNHSSEFNVTRNYLDWLTSIPWGKYSNENLDLARAQAVLEEDHYGMEDVKKRILEFIAVSQLRGSTQGKILCFYGPPGVGKTSIARSIARALNREYFRFSVGGMTDVAEIKGHRRTYVGAMPGKIIQCLKKTKTENPLILIDEVDKIGRGYQGDPSSALLELLDPEQNANFLDHYLDVPVDLSKVLFICTANVTDTIPEPLRDRMEMINVSGYVAQEKLAIAERYLVPQARALCGLDESKAKLSSDVLTLLIKQYCRESGVRNLQKQVEKVLRKSAYKIVSGEAESVEVTPENLQDFVGKPVFTVERMYDVTPPGVVMGLAWTAMGGSTLFVETSLRRPQDKDAKGDKDGSLEVTGQLGEVMKGERPHSLHLRQSLPHAARPRQ

SEQ ID NO: 799992 - protein, 447 aa, Homo sapiens
TRGSPTTSTLLQEQLKIIKKELGLEKDDKDAIEEKFRERLKELVVPKHVMDVVDEELSKLGLLDNHSSEFNVTRNYLDWLTSIPWGKYSNENLDLARAQAVLEEDHYGMEDVKKRILEFIAVSQLRGSTQGKILCFYGPPGVGKTSIARSIARALNREYFRFSVGGMTDVAEIKGHRRTYVGAMPGKIIQCLKKTKTENPLILIDEVDKIGRGYQGDPSSALLELLDPEQNANFLDHYLDVPVDLSKVLFICTANVTDTIPEPLRDRMEMINVSGYVAQEKLAIAERYLVPQARALCGLDESKAKLSSDVLTLLIKQYCRESGVRNLQKQVEKVLRKSAYKIVSGEAESVEVTPENLQDFVGKPVFTVERMYDVTPPGVVMGLAWTAMGGSTLFVETSLRRPQDKDAKGDKDGSLEVTGQLGEVMKGERPHSLHLRQSLPHAARPRQ

SEQ ID NO: 799993 - protein, 906 aa, Homo sapiens
NSAPSSPRRPSSLKRLFRATRPSGTEARAGRHVRFAASGNDASCVSRQYGRAMAASTGYVRLWGAARCWVLRRPMLAAAGGRVPTAAGAWLLRGQRTCDASPPWALWGRGPAIGGQWRGFWEASSRGGGAFSGGEDASEGGAEEGAGGAGGSAGAGEGPVITALTPMTIPDVFPHLPLIAITRNPVFPRFIKIIEVKNKKLVELLRRKVRLAQPYVGVFLKRDDSNESDVVESLDEIYHTGTFAQIHEMQDLGDKLRMIVMGHRALTAEIVKTIRDIIALNPLYRESVLQMMQAGQRVVDNPIYLSDMGAALTGAESHELQDVLEETNIPKRLYKALSLLKKEFELSKLQQRLGREVEEKIKQTHRKYLLQEQLKIIKKELGLEKDDKDAIEEKFRERLKELVVPKHVMDVVDEELSKLGLLDNHSSEFNVTRNYLDWLTSIPWGKYSNENLDLARAQAVLEEDHYGMEDVKKRILEFIAVSQLRGSTQGKILCFYGPPGVGKTSIARSIARALNREYFRFSVGGMTDVAEIKGHRRTYVGAMPGKIIQCLKKTKTENPLILIDEVRAERPGDPLTRQCRVQDEAEAFRVLGSPSQLRGHRRDAGPDGTDGSLPTHSHAQQAARPRQGVGAALTRGLPSPDPGVSPLGGLARGTARGTTCCLLPQVDKIGRGYQGDPSSALLELLDPEQNANFLDHYLDVPVDLSKVLFICTANVTDTIPEPLRDRMEMINVSGYVAQEKLAIAERYLVPQARALCGLDESKAKLSSDVLTLLIKQYCRESGVRNLQKQVEKVLRKSAYKIVSGEAESVEVTPENLQDFVGKPVFTVERMYDVTPPGVVMGLAWTAMGGSTLFVETSLRRPQDKDAKGDKDGSLEVTGQLGEVMKGERPHSLHLRQSLPHAARPRQ

SEQ ID NO: 799994 - protein, 536 aa, Homo sapiens
  misc_feature (536)..(536): Xaa can be any naturally occurring amino acid
NSAPSSPRRPSSLKRLFRATRPSGTEARAGRHVRFAASGNDASCVSRQYGRAMAASTGYVRLWGAARCWVLRRPMLAAAGGRVPTAAGAWLLRGQRTCDASPPWALWGRGPAIGGQWRGFWEASSRGGGAFSGGEDASEGGAEEGAGGAGGSAGAGEGPVITALTPMTIPDVFPHLPLIAITRNPVFPRFIKIIEVKNKKLVELLRRKVRLAQPYVGVFLKRDDSNESDVVESLDEIYHTGTFAQIHEMQDLGDKLRMIVMGHRRVHISRQLEVEPEEPEAENKHKPRRKSKRGKKEAEDELSARHPAELAMEPTPELPAEVLMVEVENVVHEDFQVTEEVKALTAEIVKTIRDIIALNPLYRESVLQMMQAGQRVVDNPIYLSDMGAALTGAESHELQDVLEETNIPKRLYKALSLLKKEFELSKLQQRLGREVEEKIKQTHRKYLLQEQLKIIKKELGLEKDDKDAIEEKFRERLKELVVPKHVMDVVDEELSKLGLLDNHSSEFNVTRNYLDWLTSIPWGKYSNENLTARQAX

SEQ ID NO: 799995 - protein, 134 aa, Homo sapiens
MQHAPANDYLVTSHIHLHVPEGATPKDGPSAGCTIVTALLSLAMGRPVRQNLAMTGEVSLTGKILPVGGIKEKTIAAKRAGVTCIVLPAENKKDFYDLAAFITEGLEVHFVEHYREIFDIAFPDEQAEALAVER

SEQ ID NO: 799996 - protein, 140 aa, Homo sapiens
MRSECVLGAASDSGQEAPRDTWFLQGWKASRRFLIKGSVAGGAVYLVYDQELLGPSDKSQAALQKAGEVVPPAMYQFSQYVCQQTGLQIPQLPAPPKIYFPIRDSWNAGIMTVMSALSVAPSKAREYSKEGWEYVKARTK

SEQ ID NO: 799997 - protein, 140 aa, Homo sapiens
SPARARVDLSGSDLFSGHLQASARHLTPLSPHGARAGPNYISQEAPRPGANSAVLTTFPRQPCGGPGLKASISQRPSAARPQPFSGVSEPQDTTTPRGPCVGQERLHLPEASAAPRQEAAGEPSVLARGSERPWWPGCGR

SEQ ID NO: 799998 - protein, 102 aa, Homo sapiens
MVARVWSLMRFLIKGSVAGGAVYLVYDQELLGPSDKSQAALQKAGEVVPPAMYQFSQYVCQQTGLQIPQVLRAGNEARVWRVVSSGRSLQPCTMLSSILMLT

SEQ ID NO: 799999 - protein, 37 aa, Homo sapiens
MQAGQRVVDNPIYLSDMGAALTGAESHELQDVLEETN

SEQ ID NO: 800000 - protein, 832 aa, Homo sapiens
MAASTGYVRLWGAARCWVLRRPMLAAAGGRVPTAAGAWLLRGQRTCDASPPWALWGRGPAIGGQWRGFWEASSRGGGAFSGGEDASEGGAEEGAGGAGGSAGAGEGPVITALTPMTIPDVFPHLPLIAITRNPVFPRFIKIIEVKNKKLVELLRRKVRLAQPYVGVFLKRDDSNESDVVESLDEIYHTGTFAQIHEMQDLGDKLRMIVMGHRRVHISRQLEVEPEEPEAENKHKPRRKSKRGKKEAEDELSARHPAELAMEPTPELPAEVLMVEVENVVHEDFQVTEEVKALTAEIVKTIRDIIALNPLYRESVLQMMQAGQRVVDNPIYLSDMGAALTGAESHELQDVLEETNIPKRLYKALSLLKKEFELSKLQQRLGREVEEKIKQTHRKYLLQEQLKIIKKELGLEKDDKDAIEEKFRERLKELVVPKHVMDVVDEELSKLGLLDNHSSEFNVTRNYLDWLTSIPWGKYSNENLDLARAQAVLEEDHYGMEDVKKRILEFIAVSQLRGSTQGKILCFYGPPGVGKTSIARSIARALNREYFRFSVGGMTDVAEIKGHRRTYVGAMPGKIIQCLKKTKTENPLILIDEVDKIGRGYQGDPSSALLELLDPEQNANFLDHYLDVPVDLSKVLFICTANVTDTIPEPLRDRMEMINVSGYVAQEKLAIAERYLVPQARALCGLDESKAKLSSDVLTLLIKQYCRESGVRNLQKQVEKVLRKSAYKIVSGEAESVEVTPENLQDFVGKPVFTVERMYDVTPPGVVMGLAWTAMGGSTLFVETSLRRPQDKDAKGDKDGSLEVTGQLGEVMKGERPHSLHLRQSLPHAARPRQ

SEQ ID NO: 800001 - protein, 118 aa, Homo sapiens; identical to SEQ ID NO: 799972

SEQ ID NO: 800002 - protein, 113 aa, Homo sapiens
EGRKERRERVEEEDETECKKRIREREGIRRGEERMIREEESRRERGKRNVEGRTTGRLAVVREKARGRDESVATACLMTTRAMVKRLTLRQRGCASAPFLDKFEGPFVLGDLQ

SEQ ID NO: 800003 - protein, 884 aa, Homo sapiens; identical to SEQ ID NO: 799975

SEQ ID NO: 800004 - protein, 884 aa, Homo sapiens; identical to SEQ ID NO: 799975

SEQ ID NO: 800005 - protein, 710 aa, Homo sapiens
MYEAGVNLAEAVFPRFIKIIEVKNKKLVELLRRKVRLAQPYVGVFLKRDDSNESDVVESLDEIYHTGTFAQIHEMQDLGDKLRMIVMGHRRVHISRQLEVEPEEPEAENKHKPRRKSKRGKKEAEDELSARHPAELAMEPTPELPAEVLMVEVENVVHEDFQVTEEVKALTAEIVKTIRDIIALNPLYRESVLQMMQAGQRVVDNPIYLSDMGAALTGAESHELQDVLEETNIPKRLYKALSLLKKEFELSKLQQRLGREVEEKIKQTHRKYLLQEQLKIIKKELGLEKDDKDAIEEKFRERLKELVVPKHVMDVVDEELSKLGLLDNHSSEFNVTRNYLDWLTSIPWGKYSNENLDLARAQAVLEEDHYGMEDVKKRILEFIAVSQLRGSTQGKILCFYGPPGVGKTSIARSIARALNREYFRFSVGGMTDVAEIKGHRRTYVGAMPGKIIQCLKKTKTENPLILIDEVDKIGRGYQGDPSSALLELLDPEQNANFLDHYLDVPVDLSKVLFICTANVTDTIPEPLRDRMEMINVSGYVAQEKLAIAERYLVPQARALCGLDESKAKLSSDVLTLLIKQYCRESGVRNLQKQVEKVLRKSAYKIVSGEAESVEVTPENLQDFVGKPVFTVERMYDVTPPGVVMGLAWTAMGGSTLFVETSLRRPQDKDAKGDKDGSLEVTGQLGEVMKGERPHSLHLRQSLPHAARPRQ

SEQ ID NO: 800006 - protein, 543 aa, Homo sapiens
ARSRLGLNRPRRDIIALNPLYRESVLQMMQAGQRVVDNPIYLSDMGAALTGAESHELQDVLEETNIPKRLYKALSLLKKEFELSKLQQRLGREVEEKIKQTHRKYLLQEQLKIIKKELGLEKDDKDAIEEKFRERLKELVVPKHVMDVVDEELSKLGLLDNHSSEFNVTRNYLDWLTSIPWGKYSNENLDLARAQAVLEEDHYGMEDVKKRILEFIAVSQLRGSTQGKILCFYGPPGVGKTSIARSIARALNREYFRFSVGGMTDVAEIKGHRRTYVGAMPGKIIQCLKKTKTENPLILIDEVDKIGRGYQGDPSSALLELLDPEQNANFLDHYLDVPVDLSKVLFICTANVTDTIPEPLRDRMEMINVSGYVAQEKLAIAERYLVPQARALCGLDESKAKLSSDVLTLLIKQYCRESGVRNLQKQVEKVLRKSAYKIVSGEAESVEVTPENLQDFVGKPVFTVERMYDVTPPGVVMGLAWTAMGGSTLFVETSLRRPQDKDAKGDKDGSLEVTGQLGEVMKGERPHSLHLRQSLPHAARPRQ

SEQ ID NO: 800007 - protein, 900 aa, Homo sapiens
NSAPSSPRRPSSLKRLFRATRPSGTEARAGRHVRFAASGNDASCVSRQYGRAMAASTGYVRLWGAARCWVLRRPMLAAAGGRVPTAAGAWLLRGQRTCDASPPWALWGRGPAIGGQWRGFWEASSRGGGAFSGGEDASEGGAEEGAGGAGGSAGAGEGPVITALTPMTIPDVFPHLPLIAITRNPVFPRFIKIIEVKNKKLVELLRRKVRLAQPYVGVFLKRDDSNESDVVESLDEIYHTGTFAQIHEMQDLGDKLRMIVMGHRRVHISRQLEVEPEEPEAENKHKPRRKSKRGKKEAEDELSARHPAELAMEPTPELPAEVLMVEVENVVHEDFQVTEEVKALTAEIVKTIRDIIALNPLYRESVLQMMQAGQRVVDNPIYLSDMGAALTGAESHELQDVLEETNIPKRLYKALSLLKKEFELSKLQQRLGREVEEKIKQTHRKYLLQEQLKIIKKELGLEKDDKDAIEEKFRERLKELVVPKHVMDVVDEELSKLGLLDNHSSEFNVTRNYLDWLTSIPWGKYSNENLDLARAQAVLEEDHYGMEDVKKRILEFIAVSQLRGSTQGKILCFYGPPGVGKTSIARSIARALNREYFRFSVGGMTDVAEIKGHRRTYVGAMPGKIIQCLKKTKTENPLILIDEVDKIGRGYQGDPSSALLELLDPEQNANFLDHYLDVPVDLSKVLFICTANVTDTIPEPLRDRMEMINVSGYVAQEKLAIAERYLVPQARALCGLDESKAKLSSDVLTLLIKQYCRESGVRNLQKQVEKVLRKSAYKIVSGEAESVEVTPENLQDFVGKPVFTVERMYDVTPPGVVMGLAWTAMGERGGGRRPQSHSHFYPRTSRSHLVHLCSGPQVALNGLWRGVVCWEPRGSGLREGKAVTHGGGSTPWALWIWVPL

SEQ ID NO: 800008 - protein, 785 aa, Homo sapiens
NSAPSSPRRPSSLKRLFRATRPSGTEARAGRHVRFAASGNDASCVSRQYGRAMAASTGYVRLWGAARCWVLRRPMLAAAGGRVPTAAGAWLLRGQRTCDASPPWALWGRGPAIGGQWRGFWEASSRGGGAFSGGEDASEGGAEEGAGGAGGSAGAGEGPVITALTPMTIPDVFPHLPLIAITRNPVFPRFIKIIEVKNKKLVELLRRKVRLAQPYVGVFLKRDDSNESDVVESLDEIYHTGTFAQIHEMQDLGDKLRMIVMGHRRVHISRQLEVEPEEPEAENKHKPRRKSKRGKKEAEDELSARHPAELAMEPTPELPAEVLMVEVENVVHEDFQVTEEVKALTAEIVKTIRDIIALNPLYRESVLQMMQAGQRVVDNPIYLSDMGAALTGAESHELQDVLEETNIPKRLYKALSLLKKEFELSKLQQRLGREVEEKIKQTHRKYLLQEQLKIIKKELGLEKDDKDAIEEKFRERLKELVVPKHVMDVVDEELSKLGLLDNHSSEFNVTRNYLDWLTSIPWGKYSNENLDLARAQAVLEEDHYGMEDVKKRILEFIAVSQLRGSTQGKILCFYGPPGVGKTSIARSIARALNREYFRFSVGGMTDVAEIKGHRRTYVGAMPGKIIQCLKKTKTENPLILIDEVDKIGRGYQGDPSSALLELLDPEQNANFLDHYLDVPVDLSKVLFICTANVTDTIPEPLRDRMEMINVSGYVAQEKLAIAERYLVPQARALCGLDESKAKLSSDVLTLLIKQYCRESGVRNLQKQVEMAGLWIWAASGLAALI

SEQ ID NO: 800009 - protein, 444 aa, Homo sapiens
NSAPSSPRRPSSLKRLFRATRPSGTEARAGRHVRFAASGNDASCVSRQYGRAMAASTGYVRLWGAARCWVLRRPMLAAAGGRVPTAAGAWLLRGQRTCDASPPWALWGRGPAIGGQWRGFWEASSRGGGAFSGGEDASEGGAEEGAGGAGGSAGAGEGPVITALTPMTIPDVFPHLPLIAITRNPVFPRFIKIIEVKNKKLVELLRRKVRLAQPYVGVFLKRDDSNESDVVESLDEIYHTGTFAQIHEMQDLGDKLRMIVMGHRRVHISRQLEVEPEEPEAENKHKPRRKSKRGKKEAEDELSARHPAELAMEPTPELPAEVLMVEVENVVHEDFQVTEEVKALTAEIVKTIRDIIALNPLYRESVLQMMQAGQRVVDNPIYLSDMGAALTGAESHELQDVLEETNIPKRLKDLSWRRRLTEQVKAGRGGGKHSTPVCGPPLSG

SEQ ID NO: 800010 - protein, 342 aa, Homo sapiens
NSAPSSPRRPSSLKRLFRATRPSGTEARAGRHVRFAASGNDASCVSRQYGRAMAASTGYVRLWGAARCWVLRRPMLAAAGGRVPTAAGAWLLRGQRTCDASPPWALWGRGPAIGGQWRGFWEASSRGGGAFSGGEDASEGGAEEGAGGAGGSAGAGEGPVITALTPMTIPDVFPHLPLIAITRNPVFPRFIKIIEVKNKKLVELLRRKVRLAQPYVGVFLKRDDSNESDVVESLDEIYHTGTFAQIHEMQDLGDKLRMIVMGHRRVHISRQLEVEPEEPEAENKHKPRRKSKRGKKEAEDELSARHPAELAMEPTPELPAEVLMVEVENVVHEDFQVTEEVK

SEQ ID NO: 800011 - protein, 111 aa, Homo sapiens
MRSECVLGAASDSGQEAPRDTWFLQGWKASRRFLIKGSVAGGAVYLVYDQELLGPSDKSQAALQKAGEVVPPAMYQFSQYVCQQTGLQIPQLPAPPKIYFPIRDSWNAGGI

SEQ ID NO: 800012 - protein, 171 aa, Homo sapiens
MAASTGYVRLWGAARCWVLRRPMLAAAGGRVPTAAGAWLLRGQRTCDASPPWALWGRGPAIGGQWRGFWEASSRGGGAFSGGEDASEGGAEEGAGGAGGSAGAGEGPVITALTPMTIPDVFPHLPLIAITRNPVFPRFIKIIEEVSGPRMVFIRPGPLRSAERQMPLAPGA

SEQ ID NO: 800013 - protein, 244 aa, Homo sapiens
PPAHVTVFGPARTMAGMVDFQDEEQVKSFLENMEVECNYHCYHEKDPDGCYRLVDYLEGIRKNFDEAAKVLKFNCEENQHSDSCYKLGAYYVTGKGGLTQDLKAAARCFLMACEKPGKKSIAACHNVGLLAHDGQVNEDGQPDLGKARDYYTRACDGGYTSSCFNLSAMFLQGAPGFPKDMDLACKYSMKACDLGHIWACANASRMYKLGDGVDKDEAKAEVLKNRAQQLHKEQQKGVQPLTFG

SEQ ID NO: 800014 - protein, 244 aa, Homo sapiens; identical to SEQ ID NO: 800013

SEQ ID NO: 800015 - protein, 244 aa, Homo sapiens; identical to SEQ ID NO: 800013

SEQ ID NO: 800016 - protein, 244 aa, Homo sapiens; identical to SEQ ID NO: 800013

SEQ ID NO: 800017 - protein, 102 aa, Homo sapiens
DRPCRGSSWEEGEHLGASAEPLAILQRDEDGPNIDNMTMEAERPDPELFDPSSCPGEWLSEPDCTLESVRGPRAQGLPPRRSHQHGPPRGATSFLQHVTGHH

SEQ ID NO: 800018 - protein, 449 aa, Homo sapiens
MATQAKRPRVAGPVDGGDLDPVACFLSWCRRVGLELSPKVAVSRQGTVAGYGMVARESVQAGELLFVVPRAALLSQHTCSIGGLLERERVALQSQSGWVPLLLALLHELQAPASRWRPYFALWPELGRLEHPMFWPEEERRCLLQGTGVPEAVEKDLANIRSEYQSIVLPFMEAHPDLFSLRVRSLELYHQLVALVMAYSFQEPLEEEEDEKEPNSPVMVPAADILNHLANHNANLEYSANCLRMVATQPIPKGHEIFNTYGQMANWQLIHMYGFVEPYPDNTDDTADIQMVTVREAALQGTKTEAERHLVYERWDFLCKLEMVGEEGAFVIGREEVLTEEELTTTLKVLCMPAEEFRELKDQDGGGDDKREEGSLTITNIPKLKASWRQLLQNSVLLTLQTYATDLKTDQGLLSNKEVYAKLSWREQQALQVRYGQKMILHQLLELTS

SEQ ID NO: 800019 - protein, 270 aa, Homo sapiens [sequence omitted]

SEQ ID NO: 800020 - protein, 248 aa, Homo sapiens
MATQAKRPRVAGPVDGGDLDPVACFLSWCRRVGLELSPKVAVSRQGTVAGYGMVARESVQAGELLFVVPRAALLSQHTCSIGGLLERERVALQSQSGWVPLLLALLHELQAPASRWRPYFALWPELGRLEHPMFWPEEERRCLLQGTGVPEAVEKDLANIRSEYQSIVLPFMEAHPDLFSLRVRSLELYHQLVALVMAYSFQEPLEEEEDEKEPNSPVMVPAADILNHLANHNANLEYSAMTQLTFRW

SEQ ID NO: 800021 - protein, 64 aa, Homo sapiens
RRGAHTCVFLRASCAAEPVGLGATAAGAAPRAAGPGLTLEALLCALARAGPLGAPDVLVRALGG

SEQ ID NO: 800022 - protein, 270 aa, Homo sapiens [sequence omitted]

SEQ ID NO: 800023 - protein, 294 aa, Homo sapiens
MATQAKRPRVAGPVDGGDLDPVACFLSWCRRVGLELSPKVSERAGGRRTRGGARAALTSPPAQVAVSRQGTVAGYGMVARESVQAGELLFVVPRAALLSQHTCSIGGLLERERVALQSQSGWVPLLLALLHELQAPASRWRPYFALWPELGRLEHPMFWPEEERRCLLQGTGVPEAVEKDLANIRSEYQSIVLPFMEAHPDLFSLRVRSLELYHQLVALVMAYSFQEPLEEEEDEKEPNSPVMVPAADILNHLANHNANLEYSAVSGVSLGALIEHDSSHCVLGSILLLVLQNE

SEQ ID NO: 800024 - protein, 303 aa, Homo sapiens
RLVRGSFESATRPGEASRVAGPVDGGDLDPVACFLSWCRRVGLELSPKVSERAGGRRTRGGARAALTSPPAQVAVSRQGTVAGYGMVARESVQAGELLFVVPRAALLSQHTCSIGGLLERERVALQSQSGWVPLLLALLHELQAPASRWRPYFALWPELGRLEHPMFWPEEERRCLLQGTGVPEAVEKDLANIRSEYQSIVLPFMEAHPDLFSLRVRSLELYHQLVALVMAYSFQEPLEEEEDEKEPNSPVMVPAADILNHLANHNANLEYSAVSGVSLGALIEHDSSHCVLGSILLLVLQNE

SEQ ID NO: 800025 - protein, 385 aa, Homo sapiens
AKSRGRARDPRPSAPGRTLCAHLFFCMVDIIFHYPFLGAMGDHSKKKPGTAMCVGCGSQIHDQFILRVSPDLEWHAACLKCAECSQYLDETCTCFVRDGKTYCKRDYVRLFGIKCAKCQVGFSSSDLVMRARDSVYHIECFRCSVCSRQLLPGDEFSLREHELLCRADHGLLLERAAAGSPRSPGPLPGARGLHLPDAGSGRQPALRPHVHKQTEKTTRVRTVLNEKQLHTLRTCYAANPRPDALMKEQLVEMTGLSPRVIRVWFQNKRCKDKKKSILMKQLQQQQHSDKTSLQGLTGTPLVAGSPIRHENAVQGSAVEVQTYQPPWKALSEFALQSDLDQPAFQQLVSFSESGSLGNSSGSDVTSLSSQLPDTPNSMVPSPVET

SEQ ID NO: 800026 - protein, 121 aa, Homo sapiens
GRRPSADTAAPWARRLFGIKCAKCQVGFSSSDLVMRARDSVYHIECFRCSVCSRQLLPGDEFSLREHELLCRADHGLLLERAAAGSPRSPGPLPGARGLHLPGKRAGACAGVSGVYVRACV

SEQ ID NO: 800027 - protein, 265 aa, Homo sapiens
CHRCCHYRCHCRCCLCPAEMTVGRPEGAPGGAEGSRQIFPPESFADTEAGEELSGDGLVLPRASKLDEFLSPEEEIDSTSDSTGSIYQNLQELKQKGRWCLLESLFQSDPESDENLSEDEEDLESFFQDKDRGMVQVQCPQALRCGSTRRCSSLNNLPSNIPRPQTQPPSGSRPPSQHRSVSSWASSITVPRPFRMTLREARKKAEWLGSPASFEQERQRAQRQGEEEAECHRQFRAQPVPAHVYLPLYQEIMERSEARRQAGIQ

SEQ ID NO: 800028 - protein, 246 aa, Homo sapiens
MRPLLGLLLVFAGCTFALYLLSTRLPRGRRLGSTEEAGGRSLWFPSDLAELRELSEVLREYRKEHQAYVFLLFCGAYLYKQGFAIPGSSFLNVLAGALFGPWLGLLLCCVLTSVGATCCYLLSSIFGKQLVVSYFPDKVALLQRKVEENRNSLFFFLLFLRLFPMTPNWFLNLSAPILNIPIVQFFFSVLIEARSCYVAQTDLELLTPKVILLPQPPKVLGLQLAQRHLSLHTAHGTLLVREPIRV

SEQ ID NO: 800029 - protein, 264 aa, Homo sapiens
MRPLLGLLLVFAGCTFALYLLSTRLPRGRRLGSTEEAGGRSLWFPSDLAELRELSEVLREYRKEHQAYVFLLFCGAYLYKQGFAIPGSSFLNVLAGALFGPWLGLLLCCVLTSVGATCCYLLSSIFGKQLVVSYFPDKVALLQRKVEENRNSLFFFLLFLRLFPMTPNWFLNLSAPILNIPIVQFFFSVLIGLIPYNFICVQTGSILSTLTSLDALFSWDTVFKLLAIAMVALIPGTLIKKFSQKHLQLNETSTANHIHSRKDT

SEQ ID NO: 800030 - protein, 123 aa, Homo sapiens
RGLSPPAAASRSASELLGCPAGRGAEPTCARFSASFWSSPAAPSPCTCCRRDCPAGGDWAPPRRLEAGRCGSPPTWQSCGSSLRSFESTGRSTRPTCSCSSAAPTSTNRALPSPAPASWFDPI

SEQ ID NO: 800031 - protein, 264 aa, Homo sapiens; identical to SEQ ID NO: 800029

SEQ ID NO: 800032 - protein, 264 aa, Homo sapiens; identical to SEQ ID NO: 800029

SEQ ID NO: 800033 - protein, 247 aa, Homo sapiens
RNHPVSLCNSSGRLQQINKAHHPPWVYLSQQSTWVGPEASNHLHACQGLSGAAMKSLVLLLCLAQLWGCHSAPHGPGLIYRQPNCDDPETEEAALVAIDYINQNLPWGYKHTLNQIDEVKVWPQQPSGELFEIEIDTLETTCHVLDPTPVARCSVRQLKEHAVEGDCDFQLLKLDGKFSVVYACPLLAPLNDTRVVHAAKAALAAFNAQNNGSNFQLEEISRAQLVIVPPTSTMWGYLFATMCGKRH

SEQ ID NO: 800034 - protein, 420 aa, Homo sapiens
RNHPVSLCNSSGRLQQINKAHHPPWVYLSQQSTWVGPEASNHLHACQGLSGAAMKSLVLLLCLAQLWGCHSAPHGPGLIYRQPNCDDPETEEAALVAIDYINQNLPWGYKHTLNQIDEVKVWPQQPSGELFEIEIDTLETTCHVLDPTPVARCSVRQLKEHAVEGDCDFQLLKLDGKFSVVYAKCDSSPDSAEDVRKVCQDCPLLAPLNDTRVVHAAKAALAAFNAQNNGSNFQLEEISRAQLVPLPPSTYVEFTVSGTDCVAKEATEAAKCNLLAEKQYGFCKATLSEKLGGAEVAVTCTVFQTQPVTSQPQPEGANEAVPTPVVDPDAPPSPPLGAPGLPPAGSPPDSHVLLAAPPGHQLHRAHYDLRHTFMGVVSLGSPSGEVSHPRKTRTVVQPSVGAAAGPVVPPCPGRIRHFKV

SEQ ID NO: 800035 - protein, 247 aa, Homo sapiens
RNHPVSLCNSSGRLQQINKAHHPPWVYLSQQSTWVGPEASNHLHACQGLSGAAMKSLVLLLCLAQLWGCHSAPHGPGLIYRQPNCDDPETEEAALVAIDYINQNLPWGYKHTLNQIDEVKVWPQQPSGELFEIEIDTLETTCHVLDPTPVARCSVRQLKEHAVEGDCDFQLLKLDGKFSVVYAKCDSSPDSAEDVRKVCQDCPLLAPLNDTRVVHAAKAALAAFNAQNNGSNFQLEEISRAQLVGKD

SEQ ID NO: 800036 - protein, 247 aa, Homo sapiens; identical to SEQ ID NO: 800035

SEQ ID NO: 800037 - protein, 110 aa, Homo sapiens
RNHPVSLCNSSGRLQQINKAHHPPWVYLSQQSTWVGPEASNHLHACQGLSGAAMKSLVLLLCLAQLWGCHSAPHGPGLIYRQPNCDDPETEEAALVAIDYINQTALRRAV

SEQ ID NO: 800038 - protein, 240 aa, Homo sapiens
RNHPVSLCNSSGRLQQINKAHHPPWVYLSQQSTWVGPEASNHLHACQGLSGAAMKSLVLLLCLAQLWGCHSAPHGPGLIYRQPNCDDPETEEAALVAIDYINQNLPWGYKHTLNQIDEVKVWPQQPSGELFEIEIDTLETTPVARCSVRQLKEHAVEGDCDFQLLKLDGKFSVVYAKCDSSPDSAEDVRKVCQDCPLLAPLNDTRVVHAAKAALAAFNAQNNGSNFQLEEISRAQLVGKD

SEQ ID NO: 800039 - protein, 484 aa, Homo sapiens
RNHPVSLCNSSGRLQQINKAHHPPWVYLSQQSTWVGPEASNHLHACQGLSGAAMKSLVLLLCLAQLWGCHSAPHGPGLIYRQPNCDDPETEEAALVAIDYINQNLPWGYKHTLNQIDEVKVWPQQPSGELFEIEIDTLETTCHVLDPTPVARCSVRQLKEHAVEGDCDFQLLKLDGKFSVVYACPLLAPLNDTRVVHAAKAALAAFNAQNNGSNFQLEEISRAQLVDLVMDTCPSYKEDTTPTSKAQALENNNPIATALCKPLRDMSSGPTHGLLNGAPRRRLLPALLLCPFHCKSSFLKSIFMYSSQPLPPSTYVEFTVSGTDCVAKEATEAAKCNLLAEKQYGFCKATLSEKLGGAEVAVTCTVFQTQPVTSQPQPEGANEAVPTPVVDPDAPPSPPLGAPGLPPAGSPPDSHVLLAAPPGHQLHRAHYDLRHTFMGVVSLGSPSGEVSHPRKTRTVVQPSVGAAAGPVVPPCPGRIRHFKV

SEQ ID NO: 800040 - protein, 293 aa, Homo sapiens
RNHPVSLCNSSGRLQQINKAHHPPWVYLSQQSTWVGPEASNHLHACQGLSGAAMKSLVLLLCLAQLWGCHSAPHGPGLIYRQPNCDDPETEEAALVAIDYINQNLPWGYKHTLNQIDEVKVWPQQPSGELFEIEIDTLETTCHVLDPTPVARCSVRQLKEHAVEGDCDFQLLKLDGKFSVVYACPLLAPLNDTRVVHAAKAALAAFNAQNNGSNFQLEEISRAQLVPLPPSTYVEFTVSGTDCVAKEATEAQCTVGKIACRTHKAGAVRRRSAASTVETRGPGTGPCSGAFGG

SEQ ID NO: 800041 - protein, 110 aa, Homo sapiens; identical to SEQ ID NO: 800037

SEQ ID NO: 800042 - protein, 443 aa, Homo sapiens
RNHPVSLCNSSGRLQQINKAHHPPWVYLSQQSTWVGPEASNHLHACQGLSGAAMKSLVLLLCLAQLWGCHSAPHGPGLIYRQPNCDDPETEEAALVAIDYINQNLPWGYKHTLNQIDEVKVWPQQPSGELFEIEIDTLETTCHVLDPTPVARCSVRQLKEHAVEGDCDFQLLKLDGKFSVVYAKCDSSPDSAEDVRKVCQDCPLLAPLNDTRVVHAAKAALAAFNAQNNGSNFQLEEISRAQLVPLPPSTYVEFTVSGTDCVAKEATEAAKCNLLAEKQYGFCKATLSEKLGGAEVAVTCTVFQTQPVTSQPQPEGANEAVPTPVVDPDAPPSPPLGAPGLPPAGSPPDSHVLLAAPPGHQLHRAHYDLRHTFHGVVSLGSPQEKLLYPGLHVRGGSDTSRSRLDMAEMRRFGTENIATILSKPGHGWGALSAGHASVTCDLH

SEQ ID NO: 800043 - protein, 281 aa, Homo sapiens
RNHPVSLCNSSGRLQQINKAHHPPWVYLSQQSTWVGPEASNHLHACQGLSGAAMKSLVLLLCLAQLWGCHSAPHGPGLIYRQPNCDDPETEEAALVAIDYINQNLPWGYKHTLNQIDEVKVWPQQPSGELFEIEIDTLETTCHVLDPTPVARCSVRQLKEHAVEGDCDFQLLKLDGKFSVVYAKCDSSPDSAEDVRKVCQDCPLLAPLNDTRVVHAAKAALAAFNAQNNGSNFQLEEISRAQLVPLPPSTYVEFTVSGTDCVAKEATEAAKCNLLAEKRLQ

SEQ ID NO: 800044 - protein, 229 aa, Homo sapiens
RNHPVSLCNSSGRLQQINKAHHPPWVYLSQQSTWVGPEASNHLHACQGLSGAAMKSLVLLLCLAQLWGCHSAPHGPGLIYRQPNCDDPETEEAALVAIDYINQNLPWGYKHTLNQIDEVKVWPQQPSGELFEIEIDTLETTCHVLDPTPVARCSVRQLKEHAVEGDCDFQLLKLDGKFSVVYACPLLAPLNDTRVVHAAKAALAAFNAQNNGSNFQLEEISRAQLVGKD

SEQ ID NO: 800045 - protein, 402 aa, Homo sapiens
RNHPVSLCNSSGRLQQINKAHHPPWVYLSQQSTWVGPEASNHLHACQGLSGAAMKSLVLLLCLAQLWGCHSAPHGPGLIYRQPNCDDPETEEAALVAIDYINQNLPWGYKHTLNQIDEVKVWPQQPSGELFEIEIDTLETTCHVLDPTPVARCSVRQLKEHAVEGDCDFQLLKLDGKFSVVYACPLLAPLNDTRVVHAAKAALAAFNAQNNGSNFQLEEISRAQLVPLPPSTYVEFTVSGTDCVAKEATEAAKCNLLAEKQYGFCKATLSEKLGGAEVAVTCTVFQTQPVTSQPQPEGANEAVPTPVVDPDAPPSPPLGAPGLPPAGSPPDSHVLLAAPPGHQLHRAHYDLRHTFMGVVSLGSPSGEVSHPRKTRTVVQPSVGAAAGPVVPPCPGRIRHFKV

SEQ ID NO: 800046 - protein, 327 aa, Homo sapiens
RPPLLRPETIVEEPEPHGTAVVARGAGRGTMNEEEQFVNIDLNDDNICSVCKLGTDKETLSFCHICFELNIEGVPKSDLLHTKSLRGHKDCFEKYHLIANQGCPRSKLSKSTYEEVKTILSKKINWIVQYAQNKDLDSDSECSKNPQHHLFNFRHKPEEKLLPQFDSQVPKYSAKWIDGSAGGISNCTQRILEQRENTDFGLSMLQDSGATLCRNSVLWPHSHNQAQKKEETISSPEANVQTQHPHYSREELNSMTLGEVEQLNAKLLQQIQEVFEELTHQVQEKDSLASQLHVRHVAIEQLLKNCSKLPCLQVGRTGMKSHLPINN

SEQ ID NO: 800047 - protein, 122 aa, Homo sapiens
LGAAARPQRRRPGQDPAPRDAEAGRTGRRGPRTLSSLWEESRSDGTRLSRPPGSRMPRLSQLRLGPLRRCPAGTVKPPLGLRCSCPGHGGTPSPGIRYPRAFCCRRSPFDAKLRNSEFARRI

SEQ ID NO: 800048 - protein, 297 aa, Homo sapiens
MNEEEQFVNIDLNDDNICSVCKLGTDKETLSFCHICFELNIEGVPKSDLLHTKSLRGHKDCFEKYHLIANQGCPRSKLSKSTYEEVKTILSKKINWIVQYAQNKDLDSDSECSKNPQHHLFNFRHKPEEKLLPQFDSQVPKYSAKWIDGSAGGISNCTQRILEQRENTDFGLSMLQDSGATLCRNSVLWPHSHNQAQKKEETISSPEANVQTQHPHYSREELNSMTLGEVEQLNAKLLQQIQEVFEELTHQVQEKDSLASQLHVRHVAIEQLLKNCSKLPCLQVGRTGMKSHLPINN

SEQ ID NO: 800049 - protein, 104 aa, Homo sapiens
MCLLINTLDTLHPEANVQTQHPHYSREELNSMTLGEVEQLNAKLLQQIQEVFEELTHQVQEKDSLASQLHVRHVAIEQLLKNCSKLPCLQVGRTGMKSHLPINN

SEQ ID NO: 800050 - protein, 251 aa, Homo sapiens
RPPLLRPETIVEEPEPHGTAVVARGAGRGTMNEEEQFVNIDLNDDNICSVCKLGTDKETLSFCHICFELNIEGVPKSDLLHTKSLRGHKDCFEKYHLIANQGCPRSKLSKSTYEEVKTILSKKINWIVQYAQNKDLDSDSECSKNPQHHLFNFRHKPEEKLLPQFDSQVPKYSAKWIDGSAGGISNCTQRILEQRENTDFGLSMLQDSGATLCRNSVLWPHSHNQAQKKEETISSPEANVQTQHPHYSREE

SEQ ID NO: 800051 - protein, 327 aa, Homo sapiens; identical to SEQ ID NO: 800046

SEQ ID NO: 800052 - protein, 251 aa, Homo sapiens; identical to SEQ ID NO: 800050

SEQ ID NO: 800053 - protein, 275 aa, Homo sapiens
RIMDEKTASELKILYGHSGPVYGASFSPDRNYLLSSSEDGTVRLWSLQTFTCLVGYKGHNYPVWDTQFSPYGYYFVSGGHDRVARLWATDHYQPLRIFAGHLADVNCTRFHPNSNYVATGSADRTVRLWDVLNGNCVRIFTGHKGPIHSLTFSPNGRFLATGATDGRVLLWDIGHGLMVGELKGHTDTVCSLRFSRDGEILASGSMDNTVRLWDAIKAFEDLETDDFTTATGHINLPENSQELLLGTYMTKSTPVVHLHFTRRNLVLAAGAYSPQ

SEQ ID NO: 800054 - protein, 697 aa, Homo sapiens [sequence omitted]

SEQ ID NO: 800055 - protein, 697 aa, Homo sapiens [sequence omitted]

SEQ ID NO: 800056 - protein, 130 aa, Homo sapiens [sequence omitted]

SEQ ID NO: 800057 - protein, 133 aa, Homo sapiens
ALLGKGHLGLPGGGVVLRYRPPGRQPTVPTRASFRCGSALWRPPSKVYKVTRMSAGRGGAAGALPAAASGSLRPSHGRHRKACDKKLMAFNPGRTRKTPSKICINFAALLLGGGGGSSSHLIKFSPSLLPTAL

SEQ ID NO: 800058 - protein, 125 aa, Homo sapiens
ALLGKGHLGLPGGGVVLRYRPPGRQPTVPTRASFRCGSALWRPPSKVYKVTRMSAGRAAASGSLRPSHGRHRKACDKKLMAFNPGRTRKTPSKICINFAALLLGGGGGSSSHLIKFSPSLLPTAL

SEQ ID NO: 800059 - protein, 128 aa, Homo sapiens
QLPVLEHPELGPCRVEAGRSGVGSPRRPQRAPPPAPLTAKEEDSAVSVPSIGGLHHPHLGGQPLPEAVQPCGSAGTPAVPEGWRRQNQGPAGDKGVSQEGMRQQEVSSPRVCGWVGRGPIWKSRAQWI

SEQ ID NO: 800060 - protein, 107 aa, Homo sapiens
RRVPVAAPGSQTLRRLSPAPGDRSPPPPPLRGRSPLLSPRPSPRPWEQTRGLRSASQPPTRSSGGGLGRGGRCSVWMAPPISGRLHPPPAGARGAAGWEQANVLRPG

SEQ ID NO: 800061 - protein, 107 aa, Homo sapiens; identical to SEQ ID NO: 800060

SEQ ID NO: 800062 - protein, 115 aa, Homo sapiens
MHVAAASERELLGNAQRERDREGCSAHGSDLKSVALSRYFENIPKGLDQEGWTRGGIQPQMPGGYALSQPVSCMEATPNPMESLRHLHPHVGRTLTSADPFYQNTPHSSRCVAHS

SEQ ID NO: 800063 - protein, 469 aa, Homo sapiens
THCFSCLASSRRAGFSAELCFLQPLPDLRASAEERPPGALPHSIMMGKLPLGVVSPYVKMSSGGYTDPLKFYATSYCTAYGREDFKPRVGSHVGTGYKSNFQPVVSCQASLEALDNPARGEQAQDHFQSVASQSYRPLEVPDGKHPLPWSMRQTSSGYGREKPSAGPPTKEVRKVHFDTQEHGPQAITGLEPREVPLLHQQQGQDPLERENFRHGPRFMTSEYNSKYLRDPLDQPDFLQKKSIGAKEGSGFTKQSHQSPIVFQPPSQGLPGDPALLPGQSVTKSDFLPKTHLHGDEFLPVLARGSKRETAFSRGNERILNPRVPPPCPEPSSVSHQQFQPLHRMQQTNVALLGRETVGKKEPTGFSLNNPMYVRSPCDPDRDQRYLTTYNQGYFENIPKGLDQEGWTRGGIQPQMPGGYALSQPVSCMEATPNPMESLRHLHPHVGRTLTSADPFYQNTPHSSRCVAHS

SEQ ID NO: 800064 - protein, 469 aa, Homo sapiens; identical to SEQ ID NO: 800063

SEQ ID NO: 800065 - protein, 413 aa, Homo sapiens
THCFSCLASSRRAGFSAELCFLQPLPDLRASAEERPPGALPHSIMMGKLPLGVVSPYVKMSSGGYTDPLKFYATSYCTAYGREDFKPRVGSHVGTGYKSNFQPVVSCQASLEALDNPARGEQAQDHFQSVASQSYRPLEVPDGKHPLPWSMRQTSSGYGREKPSAGPPTKEVRKVHFDTQEHGPQAITGLEPREVPLLHQQQGQDPLERENFRHGVQFQVSQGPSRPARFLAEEIDRRKGGEWLHQTVPPEPHCLPTALTGPPWGPVPPPCPEPSSVSHQQFQPLHRMQQTNVALLGRETVGKKEPTGFSLNNPMYVRSPCDPDRDQRYLTTYNQGYFENIPKGLDQEGWTRGGIQPQMPGGYALSQPVSCMEATPNPMESLRHLHPHVGRTLTSADPFYQNTPHSSRCVAHS

SEQ ID NO: 800066 - protein, 414 aa, Homo sapiens
THCFSCLASSRRAGFSAELCFLQPLPDLRASAEERPPGALPHSIMMGKLPLGVVSPYVKMSSGGYTDPLKFYATSYCTAYGREDFKPRVGSHVGTGYKSNFQPVVSCQASLEALDNPARGEQAQDHFQSVASQSYRPLEVPDGKHPLPWSMRQTSSGYGREKPSAGPPTKEVRKVHFDTQEHGPQAITGLEPREVPLLHQQQGQDPLERENFRHGPRFMTSEYNSKYLRDPLDQPDFLQKKSIGAKEGSGFTKQSHQSPIVFQPPSQGLPGDPALLPGQSVTKSDFLPKTHLHGDEFLPVLARGSKRETAFSRGNERILNPRVPPPCPEPSSVSHQQFQPLHRMQQTNVALLGRETVGKKEPTGFSLNNPMYVRSPCDPDRDQRYLTTYNQGTLTSADPFYQNTPHSSRCVAHS

SEQ ID NO: 800067 - protein, 449 aa, Homo sapiens
THCFSCLASSRRAGFSAELCFLQPLPDLRASAEERPPGALPHSIMMGKLPLGVVSPYVKMSSGGYTDPLKFYATSYCTAYGREDFKPRVGSHVGTGYKSNFQPVVSCQASLEALDNPARGEQAQDHFQSVASQSYRPLEVPDGKHPLPWSMRQTSSGYGREKPSAGPPTKEVRKVHFDTQEHGPQAITGLEPREVPLLHQQQGQDPLERENFRHGPRFMTSEYNSKYLRDPLDQPDFLQKKSIGAKEGSGFTKQSHQSPIVFQPPSQGLPGDPGDEFLPVLARGSKRETAFSRGNERILNPRVPPPCPEPSSVSHQQFQPLHRMQQTNVALLGRETVGKKEPTGFSLNNPMYVRSPCDPDRDQRYLTTYNQGYFENIPKGLDQEGWTRGGIQPQMPGGYALSQPVSCMEATPNPMESLRHLHPHVGRTLTSADPFYQNTPHSSRCVAHS

SEQ ID NO: 800068 - protein, 97 aa, Homo sapiens
RKHSCRKVASLRRTMAELGEADEAELQRLVAAEQQKAQFTAQVHHFMELCWDKCVEKPGNRLDSRTENCLSSCVDRFIDTTLAITSRFAQIVQKGGQ

SEQ ID NO: 800069 - protein, 97 aa, Homo sapiens; identical to SEQ ID NO: 800068

SEQ ID NO: 800070 - protein, 97 aa, Homo sapiens; identical to SEQ ID NO: 800068

SEQ ID NO: 800071 - protein, 79 aa, Homo sapiens
RKHSCRKVASLRRTMAELGEADEAELQRLVAAEQQKAQFTAQATCPEKRYSSTVGFGVAVTPLPHWIVRIICDNVFEND

SEQ ID NO: 800072 - protein, 97 aa, Homo sapiens; identical to SEQ ID NO: 800068

SEQ ID NO: 800073 - protein, 97 aa, Homo sapiens; identical to SEQ ID NO: 800068

SEQ ID NO: 800074 - protein, 79 aa, Homo sapiens; identical to SEQ ID NO: 800071

SEQ ID NO: 800075 - protein, 137 aa, Homo sapiens [sequence omitted]

SEQ ID NO: 800076 - protein, 282 aa, Homo sapiens
MGKQQSSLEGGDRPLSWEESTEHSSLALNSGLPNGETSSGGQPRLAEPDIYQEKLSQVRDVRSKDLGSSTDWGLPALDSWVNITRFCDSQLKHGAPRPGMKSSPHDSHTCVTYPERNHILCIHIGTKTQSRRPQNWSLCIRPVFRLLKLAVLDGGSRIPPGTHFSQTGSADGMGRRLHSAHDPGLSKTSTAEMEHGLHEARTVRTSQATPCRGLSRECGEDEQYSAENLRRISRSLSGTVVSEREEAPVSSHSGDSSNVRKPLETGHRCSSSSYLPVIHDPS

SEQ ID NO: 800077 - protein, 320 aa, Homo sapiens
MGKQQSSLEGGDRPLSWEESTEHSSLALNSGLPNGETSSGGQPRLAEPDIYQEKLSQVRDVRSKDLGSSTDWGLPALDSWVNITRFCDSQLKHGAPRPGMKSSPHDSHTCVTYPERNHILCIHIGTKTQSRRPQNWSLCIRPVFRLLKLAVLDGGSRIPPGTHFSQTGSADGMGRRLHSAHDPGLSKTSTAEMEHGLHEARTVRTSQATPCRGLSRECGEDEQYSAENLRRISRSLSGTVVSEREEAPVSSHSFVSRIRVHLFRAPSSLLSKNTVQVKKQGESEGCNVRKGPVYSAKIRTRSHYFIYKHSAGAQRNVHSM

SEQ ID NO: 800078 - protein, 115 aa, Homo sapiens
MGAVGREGLSSNPRDPRDYSREGARAPRTTVARHQSFTSSVPDFPHHVPKMCLGSTKWGGVGVAESGPGGVGMGSTERCSVCLKTQKSSLVRWYSPVSPEAELGGWLGPRSSRLQ

SEQ ID NO: 800079 - protein, 149 aa, Homo sapiens
MFNKFMECSGISLQYMILLPDQQFPALRNALFCLEAALDSGVTNGYNHAILAYAFALAGKEKQVESLLQTLDQSATKLNNVIYWERERKPKTEEFPSFIPWAPSAQTEKSCYVLLAVISRKIPDLTYASKIVQWLAQQMNSHGGFSSNQ

SEQ ID NO: 800080 - protein, 70 aa, Homo sapiens
HRGKESAFPYRLIVFFIFLILHKSDRTDSVDSTLVPGFIRDIIYQVLQCTTARQILCSDKDHISRELRFM

SEQ ID NO: 800081 - protein, 70 aa, Homo sapiens; identical to SEQ ID NO: 800080

SEQ ID NO: 800082 - protein, 239 aa, Homo sapiens
YSPTSHAPRMPPATGLPEGGPTPPGARDPQSGRWMRPHPMHPSAGDGGVNINSGSHPHPRQDTQCTPQLRDAGSDPGTSEIPATPPVSGSRTSGDTSSASSNPRDGVSLCCPGWSPTPGLKRSACLSLSKGWDNRCKPLHLASNELLCEENVIVEVRGLQPGLNSQGQKWVQPGMTSSKSLAPGLSGAPSSYLPLPSLHSPSHSWLGQPPDISLFANSYSSLKASPSMLSSPRSSLLYL

SEQ ID NO: 800083 - protein, 536 aa, Homo sapiens
EFGTSGTSFTSSTRSRDFCCSEAIQGSLTRRERRASGVRTRRSQGSSAMASKILLNVQEEVTCPICLELLTEPLSLDCGHSLCRACITVSNKEAVTSMGGKSSCPVCGISYSFEHLQANQHLANIVERLKEVKLSPDNGKKRDLCDHHGEKLLLFCKEDRKVICWLCERSQEHRGHHTVLTEEVFKECQEKLQAVLKRLKKEEEEAEKLEADIREEKTSWKYQVQTERQRIQTEFDQLRSILNNEEQRELQRLEEEEKKTLDKFAEAEDELVQQKQLVRELISDVECRSQWSTMELLQDMSGIMKWSEIWRLKKPKMVSKKLKTVFHAPDLSRMLQMFRELTAVRCYWVDVTLNSVNLNLNLVLSEDQRQVISVPIWPFQCYNYGVLGSQYFSSGKHYWEVDVSKKTAWILGVYCRTYSRHMKYVVRRCANRQNLYTKYRPLFGYWVIGLQNKCKYGVFEESLSSDPEVLTLSMAVPPCRVGVFLDYEAGIVSFFNVTSHGSLIYKFSKCCFSQPVYPYFNPWNCPAPMTLCPPSS

SEQ ID NO: 800084 - protein, 488 aa, Homo sapiens
MASKILLNVQEEVTCPICLELLTEPLSLDCGHSLCRACITVSNKEAVTSMGGKSSCPVCGISYSFEHLQANQHLANIVERLKEVKLSPDNGKKRDLCDHHGEKLLLFCKEDRKVICWLCERSQEHRGHHTVLTEEVFKECQEKLQAVLKRLKKEEEEAEKLEADIREEKTSWKYQVQTERQRIQTEFDQLRSILNNEEQRELQRLEEEEKKTLDKFAEAEDELVQQKQLVRELISDVECRSQWSTMELLQDMSGIMKWSEIWRLKKPKMVSKKLKTVFHAPDLSRMLQMFRELTAVRCYWVDVTLNSVNLNLNLVLSEDQRQVISVPIWPFQCYNYGVLGSQYFSSGKHYWEVDVSKKTAWILGVYCRTYSRHMKYVVRRCANRQNLYTKYRPLFGYWVIGLQNKCKYGVFEESLSSDPEVLTLSMAVPPCRVGVFLDYEAGIVSFFNVTSHGSLIYKFSKCCFSQPVYPYFNPWNCPAPMTLCPPSS

SEQ ID NO: 800085 - protein, 243 aa, Homo sapiens
MELLQDMSGIMKWSEIWRLKKPKMVSKKLKTVFHAPDLSRMLQMFRELTAVRCYWVDVTLNSVNLNLNLVLSEDQRQVISVPIWPFQCYNYGVLGSQYFSSGKHYWEVDVSKKTAWILGVYCRTYSRHMKYVVRRCANRQNLYTKYRPLFGYWVIGLQNKCKYGVFEESLSSDPEVLTLSMAVPPCRVGVFLDYEAGIVSFFNVTSHGSLIYKFSKCCFSQPVYPYFNPWNCPAPMTLCPPSS

SEQ ID NO: 800086 - protein, 372 aa, Homo sapiens
MCGSERILQAGNILEIRVGQAGARRVATMTSPVLVDIREEVTCPICLELLTEPLSIDCGHSFCQACITPNGRESVIGQEGERSCPVCQTSYQPGNLRPNRHLANIVRRLREVVLGPGKQLKAVLCADHGEKLQLFCQEDGKVICWLCERSQEHRGHHTFLVEEVAQEYQEKFQESLKKLKNEEQEAEKLTAFIREKKTSWKNQMEPERCRIQTEFNQLRNILDRVEQRELKKLEQEEKKGLRIIEEAENDLVHQTQSLRELISDLERRCQGSTMELLQDVSDVTERSEFWTLRKPEALPTKLRSMFRAPDLKRMLRVCRGEMKWPGDILTGFLTIPLNVVRREIPDMRQLVLFNIIDSFHHYRADRCPKLLG

SEQ ID NO: 800087 - protein, 488 aa, Homo sapiens; identical to SEQ ID NO: 800084

SEQ ID NO: 800088 - protein, 388 aa, Homo sapiens
ESFGLGGGRGCFKSLALIQATDSRFYQAGNFSSASRAQEYQEKFQESLKKLKNEEQEAEKLTAFIREKKTSWKNQMEPERCRIQTEFNQLRNILDRVEQRELKKLEQEEKKGLRIIEEAENDLVHQTQSLRELISDLERRCQGSTMELLQDVSDVTERSEFWTLRKPEALPTKLRSMFRAPDLKRMLRVCRELTDVQSYWVDVTLNPHTANLNLVLAKNRRQVRFVGAKVSGPSCLEKHYDCSVLGSQHFSSGKHYWEVDVAKKTAWILGVCSNSLGPTFSFNHFAQNHSAYSRYQPQSGYWVIGLQHNHEYRAYEDSSPSLLLSMTVPPRRVGVFLDYEAGTVSFYNVTNHGFPIYTFSKYYFPTTLCPYFNPCNCVIPMTLRRPSS

SEQ ID NO: 800089 - protein, 349 aa, Homo sapiens
MASKILLNVQEEVTCPICLELLTEPLSLDCGHSLCRACITVSNKEAVTSMGGKSSCPVCGISYSFEHLQANQHLANIVERLKEVKLSPDNGKKRDLCDHHGEKLLLFCKEDRKVICWLCERSQEHRGHHTVLTEEVFKECQEKLQAVLKRLKKEEEEAEKLEADIREEKTSWKYQVQTERQRIQTEFDQLRSILNNEEQRELQRLEEEEKKTLDKFAEAEDELVQQKQLVRELISDVECRSQWSTMELLQDMSGIMKWSEIWRLKKPKMVSKKLKTVFHAPDLSRMLQMFRELTAVRCYWVDVTLNSVNLNLNLVLSEDQRQVISVPIWPFQCYNYGVLGSQYFSLMFP

SEQ ID NO: 800090 - protein, 270 aa, Homo sapiens
MASKILLNVQEEVTCPICLELLTEPLSLDCGHSLCRACITVSNKEAVTSMGGKSSCPVCGISYSFEHLQANQHLANIVERLKEVKLSPDNGKKRDLCDHHGEKLLLFCKEDRKVICWLCERSQEHRGHHTVLTEEVFKECQEKLQAVLKRLKKEEEEAEKLEADIREEKTSWKYQVQTERQRIQTEFDQLRSILNNEEQRELQRLEEEEKKTLDKFAEAEDELVQQKQLVRELISDVECRSQWSTMELLQDMSGIMKWCVWVATSGACEL

SEQ ID NO: 800091 - protein, 273 aa, Homo sapiens
MASKILLNVQEEVTCPICLELLTEPLSLDCGHSLCRACITVSNKEAVTSMGGKSSCPVCGISYSFEHLQANQHLANIVERLKEVKLSPDNGKKRDLCDHHGEKLLLFCKEDRKVICWLCERSQEHRGHHTVLTEEVFKECQEKLQAVLKRLKKEEEEAEKLEADIREEKTSWKNQMEPERCRIQTEFNQLRNILDRVEQRELKKLEQEEKKGLRIIEEAENDLVHQTQSLRELISDLERRCQGSTMELLQDVSDVTERSEFWTLRKPEALPTS

SEQ ID NO: 800092 - protein, 842 aa, Homo sapiens
MCGSERILQAGNILEIRVGQAGARRVATMTSPVLVDIREEVTCPICLELLTEPLSIDCGHSFCQACITPNGRESVIGQEGERSCPVCQTSYQPGNLRPNRHLANIVRRLREVVLGPGKQLKAVLCADHGEKLQLFCQEDGKVICWLCERSQEHRGHHTFLVEEVAQEYQEKFQESLKKLKNEEQEAEKLTAFIREKKTSWKNQMEPERCRIQTEFNQLRNILDRVEQRELKKLEQEEKKGLRIIEEAENDLVHQTQSLRELISDLERRCQGSTMELLQDVSDVTERSEFWTLRKPEALPTKLRSMFRAPDLKRMLRVCRELTDVQSYWAIQGSLTRRERRASGVRTRRSQGSSAMASKILLNVQEEVTCPICLELLTEPLSLDCGHSLCRACITVSNKEAVTSMGGKSSCPVCGISYSFEHLQANQHLANIVERLKEVKLSPDNGKKRDLCDHHGEKLLLFCKEDRKVICWLCERSQEHRGHHTVLTEEVFKECQEKLQAVLKRLKKEEEEAEKLEADIREEKTSWKYQVQTERQRIQTEFDQLRSILNNEEQRELQRLEEEEKKTLDKFAEAEDELVQQKQLVRELISDVECRSQWSTMELLQDMSGIMKWSEIWRLKKPKMVSKKLKTVFHAPDLSRMLQMFRELTAVRCYWVDVTLNSVNLNLNLVLSEDQRQVISVPIWPFQCYNYGVLGSQYFSSGKHYWEVDVSKKTAWILGVYCRTYSRHMKYVVRRCANRQNLYTKYRPLFGYWVIGLQNKCKYGVFEESLSSDPEVLTLSMAVPPCRVGVFLDYEAGIVSFFNVTSHGSLIYKFSKCCFSQPVYPYFNPWNCPAPMTLCPPSS

SEQ ID NO: 800093 - protein, 534 aa, Homo sapiens
ESFGLGGGRGCFKSLALIQATDSRILQAGNILEIRVGQAGARRVATMTSPVLVDIREEVTCPICLELLTEPLSIDCGHSFCQACITPNGRESVIGQEGERSCPVCQTSYQPGNLRPNRHLANIVRRLREVVLGPGKQLKAVLCADHGEKLQLFCQEDGKVICWLCERSQEHRGHHTFLVEEVAQEYQEKFQESLKKLKNEEQEAEKLTAFIREKKTSWKNQMEPERCRIQTEFNQLRNILDRVEQRELKKLEQEEKKGLRIIEEAENDLVHQTQSLRELISDLERRCQGSTMELLQDVSDVTERSEFWTLRKPEALPTKLRSMFRAPDLKRMLRVCRELTDVQSYWVDVTLNPHTANLNLVLAKNRRQVRFVGAKVSGPSCLEKHYDCSVLGSQHFSSGKHYWEVDVAKKTAWILGVCSNSLGPTFSFNHFAQNHSAYSRYQPQSGYWVIGLQHNHEYRAYEDSSPSLLLSMTVPPRRVGVFLDYEAGTVSFYNVTNHGFPIYTFSKYYFPTTLCPYFNPCNCVIPMTLRRPSS

SEQ ID NO: 800094 - protein, 169 aa, Homo sapiens
MEPERCRIQTEFNQLRNILDRVEQRELKKLEQEEKKGLRIIEEAENDLVHQTQSLRELISDLERRCQGSTMELLQDVSDVTERSEFWTLRKPEALPTKLRSMFRAPDLKRMLRVCRGEMKWPGDILTGFLTIPLNVVRREIPDMRQLVLFNIIDSFHHYRADRCPKLLG

SEQ ID NO: 800095 - protein, 535 aa, Homo sapiens
MCGSERILQAGNILEIRVGQAGARRVATMTSPVLVDIREEVTCPICLELLTEPLSIDCGHSFCQACITPNGRESVIGQEGERSCPVCQTSYQPGNLRPNRHLANIVRRLREVVLGPGKQLKAVLCADHGEKLQLFCQEDGKVICWLCERSQEHRGHHTFLVEEVAQEYQEKFQESLKKLKNEEQEAEKLTAFIREKKTSWKNQMEPERCRIQTEFNQLRNILDRVEQRELKKLEQEEKKGLRIIEEAENDLVHQTQSLRELISDLERRCQGSTMELLQDVSDVTERSEFWTLRKPEALPTKLRSMFRAPDLKRMLRVCRELTDVQSYWAYTRPMSPFSSADVVPFPTVDVTLNPHTANLNLVLAKNRRQVRFVGAKVSGPSCLEKHYDCSVLGSQHFSSGKHYWEVDVAKKTAWILGVCSNSLGPTFSFNHFAQNHSAYSRYQPQSGYWVIGLQHNHEYRAYEDSSPSLLLSMTVPPRRVGVFLDYEAGTVSFYNVTNHGFPIYTFSKYYFPTTLCPYFNPCNCVIPMTLRRPSS

SEQ ID NO: 800096 - protein, 387 aa, Homo sapiens
MCGSERILQAGNILEIRVGQAGARRVATMTSPVLVDIREEVTCPICLELLTEPLSIDCGHSFCQACITPNGRESVIGQEGERSCPVCQTSYQPGNLRPNRHLANIVRRLREVVLGPGKQLKAVLCADHGEKLQLFCQEDGKVICWLCERSQEHRGHHTFLVEEVAQEYQEKFQESLKKLKNEEQEAEKLTAFIREKKTSWKNQMEPERCRIQTEFNQLRNILDRVEQRELKKLEQEEKKGLRIIEEAENDLVHQTQSLRELISDLERRCQGSTMELLQDVSDVTERSEFWTLRKPEALPTKLRSMFRAPDLKRMLRVCRGEMKWPGDILTGFLTIPLNVVRREIPDMRQLVLFNIIDSFHHYRADRCPKLLGHPGVFNQKREESLRS

SEQ ID NO: 800097 - protein, 349 aa, Homo sapiens; identical to SEQ ID NO: 800089

SEQ ID NO: 800098 - protein, 349 aa, Homo sapiens; identical to SEQ ID NO: 800089

SEQ ID NO: 800099 - protein, 535 aa, Homo sapiens; identical to SEQ ID NO: 800095

SEQ ID NO: 800100 - protein, 191 aa, Homo sapiens
LGVPRPQVPGAPAPRPSGCNISAQRSFCEHPGVVATASPPPTQQDSPRTGPHSQSAGSAPQQRSREPEDPGTRGGGGGRAAAALRAWGRPRSADALFRGWGVKSLWLFRHGVNGNTWAAATLRAFWPRRAAGNRSDARARPFCVLAVSPVPKPEAWERSNWENGARLVNSFRSSETMSWILDLNVLAERGL

SEQ ID NO: 800101 - protein, 201 aa, Homo sapiens
LGVPRPQVPGAPAPRPSGCNISAQRSFCEHPGVVATASPPPTQQDSPRTGPHSQSAGSAPQQRSREPEDPGTRGGGGGRAAAALRAWGRPRSADALFRGWGVKSLWLFRHGVNGNTWAAATLRAFWPRRAAGNRSDARARPFCVLAVSPVPKPEAWERSNWENGARLVNSFRSSETMSWILDLNVLAERGLAFIENLLCLG

SEQ ID NO: 800102 - protein, 1798 aa, Homo sapiens
MARGSARLAGVPRIPGSGVPGSRVGGRSAQGPRLGPEARVPAQAGSRLPGAHPRAPGAWLPSGARPRPASLAGVGVAGEGAESPGSCLVPEARPSPAVAPARVAESPDARRPLPAAWQHPFLNVFRHFRVDEWKRSAKQGDVAVVTDKTLKGAVYRIRGSVSAANYIQLPKSSTQSLGLTGRYLYVLFRPLPSKHFVIHLDVSSKDNQVIRVSFSNLFKEFKSTATWLQFPLVLEARTPQRDLVGLAPSGARWTCLQLDLQDVLLVYLNRCYGHLKSIRLCASLLVRNLYTSDLCFEPAISGAQWAKLPVTPMPREMAFPVPKGESWHDRYIHVRFPSESLKVPSKPIEKSCSPPEAVLLGPGPQPLPCPVASSKPVRFSVSPVVQTPSPTAQSGRAALAPRPFPEVSLSQERSDASNADGPGFHSLEPWAQLEASDIHTAAAGTHVLTHESAEVPVARTGSCEGFLPDPVLRLKGVIGFGGHGTRQALWTPDGAAVVYPCHAVIVVLLVDTGEQRFFLGHTDKVSALALDGSSSLLASAQARAPSVMRLWDFQTGRCLCLFRSPMHVVCSLSFSDSGALLCGVGKDHHGRTVTGPWLRVGVGLLLMHADSWKGLGFLKLQLHVTLGPCSVSSLWWGSLHSGVHAAPVPCTKTTTSSSHFTSRLFGHRSRFKPAFTHLASFSLLVMRLEDFHVAEPLQLTHAWASMAPPHSRSTRHLGGGTFLNIFFLRESLVLSPRLECSGAIIAHCSLDPLPDLPASWTPAILLPQLPRYLGHRRVPPHLANFFFFFFLRWHLALSPRMECSGAILAHCKLRLPGSHHSPASASPVAGTTGACQHAWLIFFFCIFSRDEAFTLLARMVSRFVFLTFCRDRVSLHCSGWSQTPGLKQSSHLSLPKCWDHRHEPLCPATSCFLSTFRLAGGFVLLCEWVAVLSIAGLCRSPKASGGEDGGAGFLPLSTAARSEAGLRMREKPPPGGARLGLAESRWPRLALPCGLSLGLLQMVVAWGTGQVGLGGEVVVLAKAHTDFDVQAFRVTFFDETRMASCGQGSVRLWRLRGGVLRSCPVDLGEHHALQFTDLAFKQARDGCPEPSAAMLFVCSRSGHILEIDCQRMVVRHARRLLPTRTPGGPHPQKQTFSSGPGIAISSLSVSPAMCAVGSEDGFLRLWPLDFSSVLLEAGDAVGTLSQLRESLAWMLGRGRPSPRGSAVSRPGSWLHRVPRGQVAYPEPWGGRCQGGPRGSLTEGPGGTWVVCEAPQPGSRLAKSGGLEGAASCSRVEPGTLSSRECICWGVGDPKPEHAAHPGVALEAPDPTPPTEHEGPVSSVCVSPDGLRVLSATSSGHLGFLDTLSRVYHMLARSHTAPVLALAMEQRRGQLATVSQDRTVRIWDLATLQQLYDFTSSEDAPCAVTFHPTRPTFFCGFSSGAVRSFSLEAAEVLVEHTCHRGAVTGLTATPDGRLLFSSCSQGSLAQYSCADPQWHVLRVAADMVCPDAPASPSALAVSRDGRLLAFVGPSRCTVTVMGSASLDELLRVDIGTLDLASSRLDSAMAVCFGPAALGHLLVSTSSNRVVVLDAVSGRIIRELPGVHPEPCPSLTLSEDARFLLIAAGRTIKVWDYATQASPGPQVYIGHSEPVQAVAFSPDQQQVLSAGDAVFLWDVLAPTESDQSFPGAPPACKTGPGAGPLEDAASRASELPRQQVPKPCQASPPRLGVCARPPEGGDGARDTRNSGAPRTTYLASCKAFTPARVSCSPHSAKGTCPPPASGGWLRLKAVVGYSGNGRANMVWRPDTGFFAYTCGR

SEQ ID NO: 800103 - protein, 1140 aa, Homo sapiens
MARAWQHPFLNVFRHFRVDEWKRSAKQGDVAVVTDKTLKGAVYRIRGSVSAANYIQLPKSSTQSLGLTGRYLYVLFRPLPSKHFVIHLDVSSKDNQVIRVSFSNLFKEFKSTATWLQFPLVLEARTPQRDLVGLAPSGARWTCLQLDLQDVLLVYLNRCYGHLKSIRLCASLLVRNLYTSDLCFEPAISGAQWAKLPVTPMPREMAFPVPKGESWHDRYIHVRFPSESLKVPSKPIEKSCSPPEAVLLGPGPQPLPCPVASSKPVRFSVSPVVQTPSPTAQSGRAALAPRPFPEVSLSQERSDASNADGPGFHSLEPWAQLEASDIHTAAAGTHVLTHESAEVPVARTGSCEGFLPDPVLRLKGVIGFGGHGTRQALWTPDGAAVVYPCHAVIVVLLVDTGEQRFFLGHTDKVSALALDGSSSLLASAQARAPSVMRLWDFQTGRCLCLFRSPMHVVCSLSFSDSGALLCGVGKDHHGRTMVVAWGTGQVGLGGEVVVLAKAHTDFDVQAFRVTFFDETRMASCGQGSVRLWRLRGGVLRSCPVDLGEHHALQFTDLAFKQARDGCPEPSAAMLFVCSRSGHILEIDCQRMVVRHARRLLPTRTPGGPHPQKQTFSSGPGIAISSLSVSPAMCAVGSEDGFLRLWPLDFSSVLLEAEHEGPVSSVCVSPDGLRVLSATSSGHLGFLDTLSRVYHMLARSHTAPVLALAMEQRRGQLATVSQDRTVRIWDLATLQQLYDFTSSEDAPCAVTFHPTRPTFFCGFSSGAVRSFSLEAAEVLVEHTCHRGAVTGLTATPDGRLLFSSCSQGSLAQYSCADPQWHVLRVAADMVCPDAPASPSALAVSRDGRLLAFVGPSRCTVTVMGSASLDELLRVDIGTLDLASSRLDSAMAVCFGPAALGHLLVSTSSNRVVVLDAVSGRIIRELPGVHPEPCPSLTLSEDARFLLIAAGRTIKVWDYATQASPGPQVYIGHSEPVQAVAFSPDQQQVLSAGDAVFLWDVLAPTESDQSFPGAPPACKTGPGAGPLEDAASRASELPRQQVPKPCQASPPRLGVCARPPEGGDGARDTRNSGAPRTTYLASCKAFTPARVSCSPHSAKGTCPPPASGGWLRLKAVVGYSGNGRANMVWRPDTGFFAYTCGR

SEQ ID NO: 800104 - protein, 1223 aa, Homo sapiens
MARGSARLAGVPRIPGSGVPGSRVGGRSAQGPRLGPEARVPAQAGSRLPGAHPRAPGAWLPSGARPRPASLAGVGVAGEGAESPGSCLVPEARPSPAVAPARVAESPDARRPLPAAWQHPFLNVFRHFRVDEWKRSAKQGDVAVVTDKTLKGAVYRIRGSVSAANYIQLPKSSTQSLGLTGRYLYVLFRPLPSKHFVIHLDVSSKDNQVIRVSFSNLFKEFKSTATWLQFPLVLEARTPQRDLVGLAPSGARWTCLQLDLQDVLLVYLNRCYGHLKSIRLCASLLVRNLYTSDLCFEPAISGAQWAKLPVTPMPREMAFPVPKGESWHDRYIHVRFPSESLKVPSKPIEKSCSPPEAVLLGPGPQPLPCPVASSKPVRFSVSPVVQTPSPTAQSGRAALAPRPFPEVSLSQERSDASNADGPGFHSLEPWAQLEASDIHTAAAGTHVLTHESAEVPVARTGSCEGFLPDPVLRLKGVIGFGGHGTRQALWTPDGAAVVYPCHAVIVVLLVDTGEQRFFLGHTDKVSALALDGSSSLLASAQARAPSVMRLWDFQTGRCLCLFRSPMHVVCSLSFSDSGALLCGVGKDHHGRTMVVAWGTGQVGLGGEVVVLAKAHTDFDVQAFRVTFFDETRMASCGQGSVRLWRLRGGVLRSCPVDLGEHHALQFTDLAFKQARDGCPEPSAAMLFVCSRSGHILEIDCQRMVVRHARRLLPTRTPGGPHPQKQTFSSGPGIAISSLSVSPAMCAVGSEDGFLRLWPLDFSSVLLEAEHEGPVSSVCVSPDGLRVLSATSSGHLGFLDTLSRVYHMLARSHTAPVLALAMEQRRGQLATVSQDRTVRIWDLATLQQLYDFTSSEDAPCAVTFHPTRPTFFCGFSSGAVRSFSLEAAEVLVEHTCHRGAVTGLTATPDGRLLFSSCSQGSLAQYSCADPQWHVLRVAADMVCPDAPASPSALAVSRDGRLLAFVGPSRCTVTVMGSASLDELLRVDIGTLDLASSRLDSAMAVCFGPAALGHLLVSTSSNRVVVLDAVSGRIIRELPGVHPEPCPSLTLSEDARFLLIAAGRTIKVWDYATQASPGPQVYIGHSEPVQAVAFSPDQQQVLSAGDAVFLWDVLAPTESDQSFPGAPPACKTGPGAGPLEDAASRASELPRQQVPKPCQASPPRLGVCARPPEGGDGARDTRNSGAPRTTYLASCKAFTPARVSCSPHSAKALGHRWPCWAPAAS

SEQ ID NO: 800105 - protein, 831 aa, Homo sapiens
MREKPPPGGARLGLAESRWPRLALPCGLSLGLLQMVVAWGTGQVGLGGEVVVLAKAHTDFDVQAFRVTFFDETRMASCGQGSVRLWRLRGGVLRSCPVDLGEHHALQFTDLAFKQARDGCPEPSAAMLFVCSRSGHILEIDCQRMVVRHARRLLPTRTPGGPHPQKQTFSSGPGIAISSLSVSPAMCAVGSEDGFLRLWPLDFSSVLLEAGDAVGTLSQLRESLAWMLGRGRPSPRGSAVSRPGSWLHRVPRGQVAYPEPWGGCCQGGPRGSLTEGPGGTWVVCEAPQPGSRLAKSGGLEGAASCSRVEPGTLSSRECICWGVGDPKPEHAAHPGVALEAPDPTPPTEHEGPVSSVCVSPDGLRVLSATSSGHLGFLDTLSRVYHMLARSHTAPVLALAMEQRRGQLATVSQDRTVRIWDLATLQQLYDFTSSEDAPCAVTFHPTRPTFFCGFSSGAVRSFSLEAAEVLVEHTCHRGAVTGLTATPDGRLLFSSCSQGSLAQYSCADPQWHVLRVAADMVCPDAPASPSALAVSRDGRLLAFVGPSRCTVTVMGSASLDELLRVDIGTLDLASSRLDSAMAVCFGPAALGHLLVSTSSNRVVVLDAVSGRIIRELPGVHPEPCPSLTLSEDARFLLIAAGRTIKVWDYATQASPGPQVYIGHSEPVQAVAFSPDQQQVLSAGDAVFLWDVLAPTESDQSFPGAPPACKTGPGAGPLEDAASRASELPRQQVPKPCQASPPRLGVCARPPEGGDGARDTRNSGAPRTTYLASCKAFTPARVSCSPHSAKGTCPPPASGGWLRLKAVVGYSGNGRANMVWRPDTGFFAYTCGR

SEQ ID NO: 800106 - protein, 141 aa, Homo sapiens
WPPDGTLWWPPADLPSPLTQQLPLMRAPRACAPPGPGTVPTAPTPPTPASPSAPGCPLQLAWVCPNTASHVQALGHRWPCWAPAASGSPSSQGTCPPPASGGWLRLKAVVGYSGNGRANMVWRPDTGGGQEPTPTPSQDAA

SEQ ID NO: 800107 - protein, 1252 aa, Homo sapiens
MARGSARLAGVPRIPGSGVPGSRVGGRSAQGPRLGPEARVPAQAGSRLPGAHPRAPGAWLPSGARPRPASLAGVGVAGEGAESPGSCLVPEARPSPAVAPARVAESPDARRPLPAAWQHPFLNVFRHFRVDEWKRSAKQGDVAVVTDKTLKGAVYRIRGSVSAANYIQLPKSSTQSLGLTGRYLYVLFRPLPSKHFVIHLDVSSKDNQVIRVSFSNLFKEFKSTATWLQFPLVLEARTPQRDLVGLAPSGARWTCLQLDLQDVLLVYLNRCYGHLKSIRLCASLLVRNLYTSDLCFEPAISGAQWAKLPVTPMPREMAFPVPKGESWHDRYIHVRFPSESLKVPSKPIEKSCSPPEAVLLGPGPQPLPCPVASSKPVRFSVSPVVQTPSPTAQSGRAALAPRPFPEVSLSQERSDASNADGPGFHSLEPWAQLEASDIHTAAAGTHVLTHESAEVPVARTGSCEGFLPDPVLRLKGVIGFGGHGTRQALWTPDGAAVVYPCHAVIVVLLVDTGEQRFFLGHTDKVSALALDGSSSLLASAQARAPSVMRLWDFQTGRCLCLFRSPMHVVCSLSFSDSGALLCGVGKDHHGRTMVVAWGTGQVGLGGEVVVLAKAHTDFDVQAFRVTFFDETRMASCGQGSVRLWRLRGGVLRSCPVDLGEHHALQFTDLAFKQARDGCPEPSAAMLFVCSRSGHILEIDCQRMVVRHARRLLPTRTPGGPHPQKQTFSSGPGIAISSLSVSPAMCAVGSEDGFLRLWPLDFSSVLLEAEHEGPVSSVCVSPDGLRVLSATSSGHLGFLDTLSRVYHMLARSHTAPVLALAMEQRRGQLATVSQDRTVRIWDLATLQQLYDFTSSEDAPCAVTFHPTRPTFFCGFSSGAVRSFSLEAAEVLVEHTCHRGAVTGLTATPDGRLLFSSCSQGSLAQYSCADPQWHVLRVAADMVCPDAPASPSALAVSRDGRLLAFVGPSRCTVTVMGSASLDELLRVDIGTLDLASSRLDSAMAVCFGPAALGHLLVSTSSNRVVVLDAVSGRIIRELPGVHPEPCPSLTLSEDARFLLIAAGRTIKVWDYATQASPGPQVYIGHSEPVQAVAFSPDQQQVLSAGDAVFLWDVLAPTESDQSFPGAPPACKTGPGAGPLEDAASRASELPRQQVPKPCQASPPRLGVCARPPEGGDGARDTRNSGAPRTTYLASCKAFTPARVSCSPHSAKGTCPPPASGGWLRLKAVVGYSGNGRANMVWRPDTGFFAYTCGR

SEQ ID NO: 800108 - protein, 1259 aa, Homo sapiens
MARGSARLAGVPRIPGSGVPGSRVGGRSAQGPRLGPEARVPAQAGSRLPGAHPRAPGAWLPSGARPRPASLAGVGVAGEGAESPGSCLVPEARPSPAVAPARVAESPDARRPLPAAWQHPFLNVFRHFRVDEWKRSAKQGDVAVVTDKTLKGAVYRIRGSVSAANYIQLPKSSTQSLGLTGRYLYVLFRPLPSKHFVIHLDVSSKDNQVIRVSFSNLFKEFKSTATWLQFPLVLEARTPQRDLVGLAPSGARWTCLQLDLQDVLLVYLNRCYGHLKSIRLCASLLVRNLYTSDLCFEPAISGAQWAKLPVTPMPREMAFPVPKGESWHDRYIHVRFPSESLKVPSKPIEKSCSPPEAVLLGPGPQPLPCPVASSKPVRFSVSPVVQTPSPTAQSGRAALAPRPFPEVSLSQERSDASNADGPGFHSLEPWAQLEASDIHTAAAGTHVLTHESAEVPVARTGSCEGFLPDPVLRLKGVIGFGGHGTRQALWTPDGAAVVYPCHAVIVVLLVDTGEQRFFLGHTDKVSALALDGSSSLLASAQARAPSVMRLWDFQTGRCLCLFRSPMHVVCSLSFSDSGALLCGVGKDHHGRTMVVAWGTGQVGLGGEVVVLAKAHTDFDVQAFRVTFFDETRMASCGQGSVRLWRLRGGVLRSCPVDLGEHHALQFTDLAFKQARDGCPEPSAAMLFVCSRSGHILEIDCQRMVVRHARRLLPTRTPGGPHPQKQTFSSGPGIAISSLSVSPAMCAVGSEDGFLRLWPLDFSSVLLEAEHEGPVSSVCVSPDGLRVLSATSSGHLGFLDTLSRVYHMLARSHTAPVLALAMEQRRGQLATVSQDRTVRIWDLATLQQLYDFTSSEDAPCAVTFHPTRPTFFCGFSSGAVRSFSLEAAEVLVEHTCHRGAVTGLTATPDGRLLFSSCSQGSLAQYSCADPQWHVLRVAADMVCPDAPASPSALAVSRDGRLLAFVGPSRCTVTVMGSASLDELLRVDIGTLDLASSRLDSAMAVCFGPAALGHLLVSTSSNRVVVLDAVSGRIIRELPGVHPEPCPSLTLSEDARFLLIAAGRTIKVWDYATQASPGPQVYIGHSEPVQAVAFSPDQQQVLSAGDAVFLWDVLAPTESDQSFPGAPPACKTGPGAGPLEDAASRASELPRQQVPKPCQASPPRLGVCARPPEGGDGARDTRNSGAPRTTYLASCKAFTPARVSCSPHSAKGTCPPPASGGWLRLKAVVGYSGNGRANMVWRPDTGGGQEPTPTPSQDAAA

SEQ ID NO: 800109 - protein, 1224 aa, Homo sapiens
MARGSARLAGVPRIPGSGVPGSRVGGRSAQGPRLGPEARVPAQAGSRLPGAHPRAPGAWLPSGARPRPASLAGVGVAGEGAESPGSCLVPEARPSPAVAPARVAESPDARRPLPAAWQHPFLNVFRHFRVDEWKRSAKQGDVAVVTDKTLKGAVYRIRGSVSAANYIQLPKSSTQSLGLTGRYLYVLFRPLPSKHFVIHLDVSSKDNQVIRVSFSNLFKEFKSTATWLQFPLVLEARTPQRDLVGLAPSGARWTCLQLDLQDVLLVYLNRCYGHLKSIRLCASLLVRNLYTSDLCFEPAISGAQWAKLPVTPMPREMAFPVPKGESWHDRYIHVRFPSESLKVPSKPIEKSCSPPEAVLLGPGPQPLPCPVASSKPVRFSVSPVVQTPSPTAQSGRAALAPRPFPEVSLSQERSDASNADGPGFHSLEPWAQLEASDIHTAAAGTHVLTHESAEVPVARTGSCEGFLPDPVLRLKGVIGFGGHGTRQALWTPDGAAVVYPCHAVIVVLLVDTGEQRFFLGHTDKVSALALDGSSSLLASAQARAPSVMRLWDFQTGRCLCLFRSPMHVVCSLSFSDSGALLCGVGKDHHGRTMVVAWGTGQVGLGGEVVVLAKAHTDFDVQAFRVTFFDETRMASCGQGSVRLWRLRGGVLRSCPVDLGEHHALQFTDLAFKQARDGCPEPSAAMLFVCSRSGHILEIDCQRMVVRHARRLLPTRTPGGPHPQKQTFSSGPGIAISSLSVSPAMCAVGSEDGFLRLWPLDFSSVLLEAEHEGPVSSVCVSPDGLRVLSATSSGHLGFLDTLSRVYHMLARSHTAPVLALAMEQRRGQLATVSQDRTVRIWDLATLQQLYDFTSSEDAPCAVTFHPTRPTFFCGFSSGAVRSFSLEAAEVLVEHTCHRGAVTGLTATPDGRLLFSSCSQGSLAQYSCADPQWHVLRVAADMVCPDAPASPSALAVSRDGRLLAFVGPSRCTVTVMGSASLDELLRVDIGTLDLASSRLDSAMAVCFGPAALGHLLVSTSSNRVVVLDAVSGRIIRELPGVHPEPCPSLTLSEDARFLLIAAGRTIKVWDYATQASPGPQVYIGHSEPVQAVAFSPDQQQVLSAGDAVFLWDVLAPTESDQSFPGAPPACKTGPGAGPLEDAASRASELPRQQVPKPCQASPPRLGVCARPPEGGDGHLPASRQRWVAASEGCRRLQREWAGQHGLEAGHRWGPRAYPHPQPRCGR

SEQ ID NO: 800110 - protein, 1205 aa, Homo sapiens
MARGSARLAGVPRIPGSGVPGSRVGGRSAQGPRLGPEARVPAQAGSRLPGAHPRAPGAWLPSGARPRPASLAGVGVAGEGAESPGSCLVPEARPSPAVAPARVAESPDARRPLPAAWQHPFLNVFRHFRVDEWKRSAKQGDVAVVTDKTLKGAVYRIRGSVSAANYIQLPKSSTQSLGLTGRYLYVLFRPLPSKHFVIHLDVSSKDNQVIRVSFSNLFKEFKSTATWLQFPLVLEARTPQRDLVGLAPSGARWTCLQLDLQDVLLVYLNRCYGHLKSIRLCASLLVRNLYTSDLCFEPAISGAQWAKLPVTPMPREMAFPVPKGESWHDRYIHVRFPSESLKVPSKPIEKSCSPPEAVLLGPGPQPLPCPVASSKPVRFSVSPVVQTPSPTAQSGRAALAPRPFPEVSLSQERSDASNADGPGFHSLEPWAQLEASDIHTAAAGTHVLTHESAEVPVARTGSCEGFLPDPVLRLKGVIGFGGHGTRQALWTPDGAAVVYPCHAVIVVLLVDTGEQRFFLGHTDKVSALALDGSSSLLASAQARAPSVMRLWDFQTGRCLCLFRSPMHVVCSLSFSDSGALLCGVGKDHHGRTMVVAWGTGQVGLGGEVVVLAKAHTDFDVQAFRVTFFDETRMASCGQGSVRLWRLRGGVLRSCPVDLGEHHALQFTDLAFKQARDGCPEPSAAMLFVCSRSGHILEIDCQRMVVRHARRLLPTRTPGGPHPQKQTFSSGPGIAISSLSVSPAMCAVGSEDGFLRLWPLDFSSVLLEAEHEGPVSSVCVSPDGLRVLSATSSGHLGFLDTLSRVYHMLARSHTAPVLALAMEQRRGQLATVSQDRTVRIWDLATLQQLYDFTSSEDAPCAVTFHPTRPTFFCGFSSGAVRSFSLEAAEVLVEHTCHRGAVTGLTATPDGRLLFSSCSQGSLAQYSCADPQWHVLRVAADMVCPDAPASPSALAVSRDGRLLAFVGPSRCTVTVMGSASLDELLRVDIGTLDLASSRLDSAMAVCFGPAALGHLLVSTSSNRVVVLDAVSGRIIRELPGVHPEPCPSLTLSEDARFLLIAAGRTIKVYIGHSEPVQAVAFSPDQQQVLSAGDAVFLWDVLAPTESDQSFPGAPPACKTGPGAGPLEDAASRASELPRQQVPKPCQASPPRLGVCARPPEGGDGHLPASRQRWVAASEGCRRLQREWAGQHGLEAGHRLLCLHVRPP

SEQ ID NO: 800111 - protein, 55 aa, Homo sapiens
GRPGACGETACSVGSLKSSGQCNATSSASSLPGARDTRNSGAPRTTYLASCKAFT

SEQ ID NO: 800112 - protein, 740 aa, Homo sapiens
MQWTKVLGLGLGAAALLGLGIILGHFAIPKKANSLAPQDLDLEILETVMGQLDAHRIRENLRELSREPHLASSPRDEDLVQLLLQRWKDPESGLDSAEASTYEVLLSFPSQEQPNVVDIVGPTGGIIHSCHRTEENVTGEQGGPDVVQPYAAYAPSGTPQGLLVYANRGAEEDFKELQTQGIKLEGTIALTRYGGVGRGAKAVNAAKHGVAGVLVYTDPADINDGLSSPDETFPNSWYLPPSGVERGSYYEYFGDPLTPYLPAVPSSFRVDLANVSGFPPIPTQPIGFQDARDLLCNLNGTLAPATWQGALGCHYRLGPGFRPDGDFPADSQVNVSVYNRLELRNSSNVLGIIRGAVEPDRYVLYGNHRDSWVHGAVDPSSGTAVLLELSRVLGTLLKKGTWRPRRSIVFASWGAEEFGLIGSTEFTEEFFNKLQERTVAYINVDISVFANATLRVQGTPPVQSVVFSATKEIRSPGPGDLSIYDNWIRYFNRSSPVYGLVPSLGSLGAGSDYAPFVHFLGISSMDIAYTYDRSKTSARIYPTYHTAFDTFDYVDKFLDPGFSSHQAVARTAGSVILRLSDSFFLPLKVSDYSETLRSFLQAAQQDLGALLEQHSISLGPLVTAVEKFEAEAAALGQRISTLQKGSPDPLQVRMLNDQLMLLERTFLNPRAFPEERYYSHVLWAPRTGSVVTFPGLSNACSRARDTASGSEAWAEVQRQLSIVVTALEGAAATLRPVADL

SEQ ID NO: 800113 - protein, 240 aa, Homo sapiens
MWTSFWTRVRRETRGILRPGQERLKTEPWPCHLAAGFSSHQAVARTAGSVILRLSDSFFLPLKVSDYSETLRSFLQAAQQDLGALLEQHSISLGMHSPDPEVWGALHPHELSHCLFLTGPLVTAVEKFEAEAAALGQRISTLQKGSPDPLQVRMLNDQLMLLERTFLNPRAFPEERYYSHVLWAPRTGSVVTFPGLSNACSRARDTASGSEAWAEVQRQLSIVVTALEGAAATLRPVADL

SEQ ID NO: 800114 - protein, 339 aa, Homo sapiens
PPHVSSLSPEGTLGSGGPCPPTLYPPFPGTWRPRRSIVFASWGAEEFGLIGSTEFTEEFFNKLQERTVAYINVDISVFANATLRVQGTPPVQSVVFSATKEDPLTRPWRPEHLRQLDPVLQPQQPGVRPGPQSKTSARIYPTYHTAFDTFDYVDKFLDPGFSSHQAVARTAGSVILRLSDSFFLPLKVSDYSETLRSFLQAAQQDLGALLEQHSISLGPLVTAVEKFEAEAAALGQRISTLQKGSPDPLQVRMLNDQLMLLERTFLNPRAFPEERYYSHVLWAPRTGSVVTFPGLSNACSRARDTASGSEAWAEVQRQLSIVVTALEGAAATLRPVADL

SEQ ID NO: 800115 - protein, 110 aa, Homo sapiens [sequence omitted]

SEQ ID NO: 800116 - protein, 339 aa, Homo sapiens; identical to SEQ ID NO: 800114

SEQ ID NO: 800117 - protein, 110 aa, Homo sapiens [sequence omitted]

SEQ ID NO: 800118 - protein, 522 aa, Homo sapiens
MQWTKVLGLGLGAAALLGLGIILGHFAIPKKANSLAPQDLDLEILETVMGQLDAHRIRENLRELSREPHLASSPRDEDLVQLLLQRWKDPESGLDSAEASTYEVLLSFPSQEQPNVVDIVGPTGGIIHSCHRTEENVTGEQGGPDVVQPYAAYAPSGTPQGLLVYANRGAEEDFKELQTQGIKLEGTIALTRYGGVGRGAKAVNAAKHGVAGVLVYTDPADINDGLSSPDETFPNSWYLPPSGVERGSYYEYFGDPLTPYLPAVPSSFRVDLANVSGFPPIPTQPIGFQDARDLLCNLNGTLAPATWQGALGCHYRLGPGFRPDGDFPADSQVNVSVYNRLELRNSSNVLGIIRGAVEPDRYVLYGNHRDSWVHGAVDPSSGTAVLLELSRVLGTLLKKGTWRPRRSIVFASWGAEEFGLIGSTEFTEEFFNKLQERTVAYINVDISVFANATLRVQGTPPVQSVVFSATKEIRSPGPGDLSIYDNWIRYFNRSSPVYGLVPRLQQPSGCGPDSGECDSPAQ

SEQ ID NO: 800119 - protein, 468 aa, Homo sapiens
MPPWGAALALILAVLALLGLLGPRLRGPWGRAVGERTLPGAQDRDDGEEADGGGPADQFSDGREPLPGGCSLVCKPSALAQCLLRALRRSEALEAGPRSWFSGPHLQTLCHFVLPVAPGPELAREYLQLADDGLVALDWVVGPCVRGRRITSAGGLPAVLLVIPNAWGRLTRNVLGLCLLALERGYYPVIFHRRGHHGCPLVSPRLQPFGDPSDLKEAVTYIRFRHPAAPLFAVSEGSGSALLLSYLGECGSSSYVTGAACISPVLRCREWFEAGLPWPYERGFLLHQKIALSRYATALEDTVDTSRLFRSRSLREFEEALFCHTKSFPISWDAYWDRNDPLRDVDEAAVPVLCICSADDPVCGPPDHTLTTELFHSNPYFFLLLSRHGGHCGFLRQEPLPAWSHEVILESFRALTEFFRTEERIKGLSRHRASFLGGRRRGGALQRREVSSSSNLEEIFNWKRSYTR

SEQ ID NO: 800120 - protein, 149 aa, Homo sapiens
TAIAKFVRVGRLYENTRRIEQGALQVSARNGADLAPKPHWRDPKGILQIGSALMQDLRALLDHGSRSQNLGYPTCSLWHHFRGLLQRAAARTVYLLRYGLSLSQEKHKPHNLGVFWLVAPFSDPTTGLSLSRARRHIWDQRKQKHQEVD

SEQ ID NO: 800121 - protein, 113 aa, Homo sapiens
VSPRLQPFGDPSDLKEAVTYIRFRHPAAPLFAVSEGSGSALLLSYLGECGSSSYVTGAACISPVLRCREWFEAGLPWPYERGFLLHQKIALSRWVTEAADQHGKNRGPELAKN

SEQ ID NO: 800122 - protein, 468 aa, Homo sapiens; identical to SEQ ID NO: 800119

SEQ ID NO: 800123 - protein, 468 aa, Homo sapiens; identical to SEQ ID NO: 800119

SEQ ID NO: 800124 - protein, 468 aa, Homo sapiens; identical to SEQ ID NO: 800119

SEQ ID NO: 800125 - protein, 121 aa, Homo sapiens [sequence omitted]

SEQ ID NO: 800126 - protein, 121 aa, Homo sapiens [sequence omitted]

SEQ ID NO: 800127 - protein, 121 aa, Homo sapiens [sequence omitted]

SEQ ID NO: 800128 - protein, 121 aa, Homo sapiens [sequence omitted]

SEQ ID NO: 800129 - protein, 74 aa, Homo sapiens
RAAGSAHAAECGTGAPGCGCGTEASAGAARLEGVEREPTTRFASLRPARRLLHTCRSHAGGLDIEGREVDLGDI

SEQ ID NO: 800130 - protein, 71 aa, Homo sapiens
RAAGSAHAAECGTGAPGCGCGTEASAGAARLEGVERETGDINICKMNVGSLGKGGTTRSREGASRSQRAYD

SEQ ID NO: 800131 - protein, 129 aa, Homo sapiens
MASPEHPGSPGCMGPITQCTARTQQEAPATGPDLPHPGPDGHLDTHSGLSSNSSMTTRELQQYWQNQKCRWKHVKLLFEIASARIEERKVSKFVMGKSRPGEMTYPGSRGETGTAPEPDPRCPRQSDML

SEQ ID NO: 800132 - protein, 316 aa, Homo sapiens
MASPEHPGSPGCMGPITQCTARTQQEAPATGPDLPHPGPDGHLDTHSGLSSNSSMTTRELQQYWQNQKCRWKHVKLLFEIASARIEERKVSKFVVYQIIVIQTGSFDNNKAVLERRYSDFAKLQKALLKTFREEIEDVEFPRKHLTGNFAEEMICERRRALQEYLGLLYAIRCVRRSREFLDFLTRPELREAFGCLRAGQYPRALELLLRVLPLQEKLTAHCPAAAVPALCAVLLCHRDLDRPAEAFAAGERALQRLQAREGHRYYAPLLDAMVRLAYALGKDFVTLQERLEESQLRRPTPRGITLKELTVREYLH

SEQ ID NO: 800133 - protein, 102 aa, Homo sapiens
MASPEHPGSPGCMGPITQCTARTQQEAPATGPDLPHPGPDGHLDTHSGLSSNSSMTTRELQQYWQNQKCRWKHVKLLFEIASARIEERKVSKFVAPAPDATP

SEQ ID NO: 800134 - protein, 161 aa, Homo sapiens
QGMLYTGLVNFTLGVLRPPQPPPGGGHSSLWLRPEVYQIIVIQTGSFDNNKAVLERRYSDFAKLQKALLKTFREEIEDVEFPRKHLTGNFAEEMICERRRALQEYLGLLYAIRCVRRSREFLDFLTRPELREAFGCLRAGQYPRALELLLRVLPLQEKLTA

SEQ ID NO: 800135 - protein, 175 aa, Homo sapiens
PPPEAPGEKRGRREGRSLWRKMAAAWGSSLTAATQRAVTPWPRGRLLTASLGPQARREASSSSPEAGEGQIRLTDSCVQRLLEITEGSEFLRLQVEGGGCSGFQYKFSLDTVINPDDRVFEQGGARVVVDSDSLAFVKGAQVDFSQELIRSSFQVLNNPQAQQGCSCGSSFSIKL

SEQ ID NO: 800136 - protein, 120 aa, Homo sapiens
PPPEAPGEKREETRGAELVEEDGCRLGVVPNGRDAESGHSLAEGQSGFQYKFSLDTVINPDDRVFEQGGARVVVDSDSLAFVKGAQVDFSQELIRSSFQVLNNPQAQQGCSCGSSFSIKL

SEQ ID NO: 800137 - protein, 175 aa, Homo sapiens; identical to SEQ ID NO: 800135

SEQ ID NO: 800138 - protein, 175 aa, Homo sapiens; identical to SEQ ID NO: 800135

SEQ ID NO: 800139 - protein, 175 aa, Homo sapiens; identical to SEQ ID NO: 800135

SEQ ID NO: 800140 - protein, 466 aa, Homo sapiens
MLLGGPPRSPRSGTSPKGPWSSTGHVQFGKSPQTWPRRTRPRSPEPAAPSGVRGSTWTRRRDSPRRAGPTALSRYVGHLWMGRRPPSPEARGPVPRSSAASRARRSLASPGISPGPLTATIGGAVAGGGPRQGRAEAHKEVFPGQRVGKMAAPMELFCWSGGWGLPSVDLDSLAVLTYARFTGAPLKVHKISNPWQSPSGTLPALRTSHGEVISVPHKIITHLRKEKYNADYDLSARQGADTLAFMSLLEEKLLPVLVHTFWIDTKNYVEVTRKWYAEAMPFPLNFFLPGRMQRQYMERLQLLTGEHRPEDEEELEKELYREARECLTLLSQRLGSQKFFFGDAPASLDAFVFSYLALLLQAKLPSGKLQVHLRGLHNLCAYCTHILSLYFPWDGAEVPPQRQTPAGPETEEEPYRRRNQILSVLAGLAAMVGYALLSGIVSIQRATPARAPGTRTLGMAEEDEEE

SEQ ID NO: 800141 - protein, 435 aa, Homo sapiens
MLLGGPPRSPRSGTSPKGPWSSTGHVQFGKSPQTWPRRTRPRSPEPAAPSGVRGSTWTRRRDSPRRAGPTALSRYVGHLWMGRRPPSPEARGPVPRSSAASRARRSLASPGISPGPLTATIGGAVAGGGPRQGRAEAHKEVFPGQRVGKMAAPMELFCWSGGWGLPSVDLDSLAVLTYARFTGAPLKVHKISNPWQSPSGTLPALRTSHGEVISVPHKIITHLRKEVHTFWIDTKNYVEVTRKWYAEAMPFPLNFFLPGRMQRQYMERLQLLTGEHRPEDEEELEKELYREARECLTLLSQRLGSQKFFFGDAPASLDAFVFSYLALLLQAKLPSGKLQVHLRGLHNLCAYCTHILSLYFPWDGAEVPPQRQTPAGPETEEEPYRRRNQILSVLAGLAAMVGYALLSGIVSIQRATPARAPGTRTLGMAEEDEEE

SEQ ID NO: 800142 - protein, 466 aa, Homo sapiens; identical to SEQ ID NO: 800140

SEQ ID NO: 800143 - protein, 253 aa, Homo sapiens
MWRGMLRNRDWSLKYNADYDLSARQGADTLAFMSLLEEKLLPVLVHTFWIDTKNYVEVTRKWYAEAMPFPLNFFLPGRMQRQYMERLQLLTGEHRPEDEEELEKELYREARECLTLLSQRLGSQKFFFGDAPASLDAFVFSYLALLLQAKLPSGKLQVHLRGLHNLCAYCTHILSLYFPWDGAEVPPQRQTPAGPETEEEPYRRRNQILSVLAGLAAMVGYALLSGIVSIQRATPARAPGTRTLGMAEEDEEE

SEQ ID NO: 800144 - protein, 253 aa, Homo sapiens; identical to SEQ ID NO: 800143

SEQ ID NO: 800145 - protein, 236 aa, Homo sapiens
MLLGGPPRSPRSGTSPKGPWSSTGHVQFGKSPQTWPRRTRPRSPEPAAPSGVRGSTWTRRRDSPRRAGPTALSRYVGHLWMGRRPPSPEARGPVPRSSAASRARRSLASPGISPGPLTATIGGAVAGGGPRQGRAEAHKEVFPGQRVGKMAAPMELFCWSGGWGLPSVDLDSLAVLTYARFTGAPLKVHKISNPWQSPSGTLPALRTSHGEVISVPHKIITHLRKEVGDLDRGGCQ

SEQ ID NO: 800146 - protein, 362 aa, Homo sapiens
MRFIEQYLMELNTLSISESEGPRKEKYNADYDLSAQQGADTLAFMSLLEEKLIPVLVSVPRPPSIHGQPGRGREHTDPHRDSGEHGGQKPTLNQTGALAQTCLFLPAHPIQVHTFWIDTKNYVEVTRKWYAEAMPFPLNFFLPGRMQRQYMERLQLLTGEHRPEDEEELEKEVALRPGAIVGDEPQGCWPGMGVLRCRGGTVPAAASLPVSPLQLYREARECLTLLSQRLGSQKFFFGDAPASLDAFVFSYLALLLQAKLPSGKLQVHLRGLHNLCAYCTHILSLYFPWDGAEVPPQRQTPAGPETEEEPYRRRNQILSVLAGLAAMVGYALLSGIVSIQRATPARAPGTRTLGMAEEDEEE

SEQ ID NO: 800147 - protein, 236 aa, Homo sapiens; identical to SEQ ID NO: 800145

SEQ ID NO: 800148 - protein, 236 aa, Homo sapiens
AARHRKGLKSCGALSVPFMQPWIEPYSGPAGATWGSLPIPGLELCVLSFPGGRLLPRAHLPRLTLPPAPSLPLLPQWFSSIPPFSLCSSPASLDAFVFSYLALLLQAKLPSGKLQVHLRGLHNLCAYCTHILSLYFPWDGGKGQMGGAALGRVGRDPRTSSPNTPSFLDPPAEVPPQRQTPAGPETEEEPYRRRNQILSVLAGLAAMVGYALLSGIVSIQRATPARAPGTRTLGMA

SEQ ID NO: 800149 - protein, 71 aa, Homo sapiens
AEVPPQRQTPAGPETEEEPYRRRNQILSVLAGLAAMVGYALLSGIVSIQRATPARAPGTRTLGMAEEDEEE

SEQ ID NO: 800150 - protein, 466 aa, Homo sapiens; identical to SEQ ID NO: 800140

SEQ ID NO: 800151 - protein, 473 aa, Homo sapiens
MLLGGPPRSPRSGTSPKGPWSSTGHVQFGKSPQTWPRRTRPRSPEPAAPSGVRGSTWTRRRDSPRRAGPTALSRYVGHLWMGRRPPSPEARGPVPRSSAASRARRSLASPGISPGPLTATIGGAVAGGGPRQGRAEAHKEVFPGQRVGKMAAPMELFCWSGGWGLPSVDLDSLAVLTYARFTGAPLKVHKISNPWQSPSGTQYPFGGTLPALRTSHGEVISVPHKIITHLRKEKYNADYDLSARQGADTLAFMSLLEEKLLPVLVHTFWIDTKNYVEVTRKWYAEAMPFPLNFFLPGRMQRQYMERLQLLTGEHRPEDEEELEKELYREARECLTLLSQRLGSQKFFFGDAPASLDAFVFSYLALLLQAKLPSGKLQVHLRGLHNLCAYCTHILSLYFPWDGAEVPPQRQTPAGPETEEEPYRRRNQILSVLAGLAAMVGYALLSGIVSIQRATPARAPGTRTLGMAEEDEEE

SEQ ID NO: 800152 - protein, 236 aa, Homo sapiens; identical to SEQ ID NO: 800145

SEQ ID NO: 800153 - protein, 181 aa, Homo sapiens
MRFIEQYLMELNTLSISESEGPRKEKYNADYDLSAQQGADTLAFMSLLEEKLIPVLVSVPRPPSIHGQPGRGREHTDPHRDSGEHGGQKPTLNQTGALAQTCLFLPAHPIQVHTFWIDTKNYVEVTRKWYAEAMPFPLNFFLPGRMQRQYMERLQLLTGEHRPEDEEELEKEVALRPGAIV

SEQ ID NO: 800154 - protein, 1183 aa, Homo sapiens
MQLLQLLLGLLGPGGYLFLLGDCQEVTTLTVKYQVSEEVPSGTVIGKLSQELGREERRRQAGAAFQVLQLPQALPIQVDSEEGLLSTGRRLDREQLCRQWDPCLVSFDVLATGDLALIHVEIQVLDINDHQPRFPKGEQELEISESASLRTRIPLDRALDPDTGPNTLHTYTLSPSEHFALDVIVGPDETKHAELIVVKELDREIHSFFDLVLTAYDNGNPPKSGTSLVKVNVLDSNDNSPAFAESSLALEIQEDAAPGTLLIKLTATDPDQGPNGEVEFFLSKHMPPEVLDTFSIDAKTGQVILRRPLDYEKNPAYEVDVQARDLGPNPIPAHCKVLIKVLDVNDNIPSIHVTWASQPSLVSEALPKDSFIALVMADDLDSGHNGLVHCWLSQELGHFRLKRTNGNTYMLLTNATLDREQWPKYTLTLLAQDQGLQPLSAKKQLSIQISDINDNAPVFEKSRYEVSTRENNLPSLHLITIKAHDADLGINGKVSYRIQDSPVAHLVAIDSNTGEVTAQRSLNYEEMAGFEFQVIAEDSGQPMLASSVSVWVSLLDANDNAPEVVQPVLSDGKASLSVLVNASTGHLLVPIETPNGLGPAGTDTPPLATHSSRPFLLTTIVARDADSGANGEPLYSIRSGNEAHLFILNPHTGQLFVNVTNASSLIGSEWELEIVVEDQGSPPLQTRALLRVMFVTSVDHLRDSARKPGALSMSMLTVICLAVLLGIFGLILALFMSICRTEKKDNRAYNCREAESTYRQQPKRPQKHIQKADIHLVPVLRGQAGEPCEVGQSHKDVDKEAMMEAGWDPCLQAPFHLTPTLYRTLRNQGNQGAPAESREVLQDTVNLLFNHPRQRNASRENLNLPEPQPATGQPRSRPLKVAGSPTGRLAGDQGSEEAPQRPPASSATLRRQRHLNGKVSPEKESGPRQILRSLVRLSVAAFAERNPVEELTVDSPPVQQISQLLSLLHQGQFQPKPNHRGNKYLAKPGGSRSAIPDTDGPSARAGGQTDPEQEEGPLDPEEDLSVKQLLEEELSSLLDPSTGLALDRLSAPDPAWMARLSLPLTTNYRDNVISPDAAATEEPRTFQTFGKAEAPELSPTGTRLASTFVSEMSSLLEMLLEQRSSMPVEAASEALRRLSVCGRTLSLDLATSAASGMKVQGDPGGKTGTEGKSRGSSSSSRCL

SEQ ID NO: 800155 - protein, 640 aa, Homo sapiens
  misc_feature (6)..(6): Xaa can be any naturally occurring amino acid
SSSGTXTLSHVGDALSCGEKVVQPVLSDGKASLSVLVNASTGHLLVPIETPNGLGPAGTDTPPLATHSSRPFLLTTIVARDADSGANGEPLYSIRSGNEAHLFILNPHTGQLFVNVTNASSLIGSEWELEIVVEDQGSPPLQTRALLRVMFVTSVDHLRDSARKPGALSMSMLTVICLAVLLGIFGLILALFMSICRTEKKDNRAYNCREAESTYRQQPKRPQKHIQKADIHLVPVLRGQAGEPCEVGQSHKDVDKEAMMEAGWDPCLQAPFHLTPTLYRTLRNQGNQGAPAESREVLQDTVNLLFNHPRQRNASRENLNLPEPQPATGQPRSRPLKVAGSPTGRLAGDQGSEEAPQRPPASSATLRRQRHLNGKVSPEKESGPRQILRSLVRLSVAAFAERNPVEELTVDSPPVQQISQLLSLLHQGQFQPKPNHRGNKYLAKPGGSRSAIPDTDGPSARAGGQTDPEQEEGPLDPEEDLSVKQLLEEELSSLLDPSTGLALDRLSAPDPAWMARLSLPLTTNYRDNVISPDAAATEEPRTFQTFGKAEAPELSPTGTRLASTFVSEMSSLLEMLLEQRSSMPVEAASEALRRLSVCGRTLSLDLATSAASGMKVQGDPGGKTGTEGKSRGSSSSSRCL

SEQ ID NO: 800156 - protein, 389 aa, Homo sapiens
MQLLQLLLGLLGPGGYLFLLGDCQEVTTLTVKYQVSEEVPSGTVIGKLSQELGREERRRQAGAAFQVLQLPQALPIQVDSEEGLLSTGRRLDREQLCRQWDPCLVSFDVLATGDLALIHVEIQVLDINDHQPRFPKGEQELEISESASLRTRIPLDRALDPDTGPNTLHTYTLSPSEHFALDVIVGPDETKHAELIVVKELDREIHSFFDLVLTAYDNGNPPKSGTSLVKVNVLDSNDNSPAFAESSLALEIQEDAAPGTLLIKLTATDPDQGPNGEVEFFLSKHMPPEVLDTFSIDAKTGQVILRRPLDYEKNPAYEVDVQARDLGPNPIPAHCKVLIKVLDVNDNIPSIHVTWASQPSLVSEALPKDSFIALVMADDLDSGKGGLLG

SEQ ID NO: 800157 - protein, 209 aa, Homo sapiens
MNLYGNVPTHGLVGFFCRSAIPDTDGPSARAGGQTDPEQEEGPLDPEEDLSVKQLLEEELSSLLDPSTGLALDRLSAPDPAWMARLSLPLTTNYRDNVISPDAAATEEPRTFQTFGKAEAPELSPTGTRLASTFVSEMSSLLEMLLEQRSSMPVEAASEALRRLSVCGRTLSLDLATSAASGMKVQGDPGGKTGTEGKSRGSSSSSRCL

SEQ ID NO: 800158 - protein, 387 aa, Homo sapiens
MNRHHLQDHFLEIDKKNCCVFRDDFIAKVLPPVLGLEFIFGLLGNGLALWIFCFHLKSWKSSRIFLFNLAVADFLLIICLPFVMDYYVRRSDWKFGDIPCRLVLFMFAMNRQGSIIFLTVVAVDRYFRVVHPHHALNKISNWTAAIISCLLWGITVGLTVHLLKKKLLIQNGPANVCISFSICHTFRWHEAMFLLEFLLPLGIILFCSARIIWSLRQRQMDRHAKIKRAITFIMVVAIVFVICFLPSVVVRIRIFWLLHTSGTQNCEVYRSVDLAFFITLSFTYMNSMLDPVVYYFSSPSFPNFFSTLINRCLQRKMTGEPDNNRSTSVELTGDPNKTRGAPEALMANSGEPWSPSYLGPTSNNHSKKGHCHQEPASLEKQLGCCIE

SEQ ID NO: 800159 - protein, 387 aa, Homo sapiens; identical to SEQ ID NO: 800158

SEQ ID NO: 800160 - protein, 176 aa, Homo sapiens
MEFHYVAQADLELLTSSNPPASASQSTGITGGSHRARPGPVHFIDKVTDKPSHSHPFALKENWNLNPEPSSPPSPLFLEAPSRQASQHHGASPGAGTSAGCPFEKCCSTEPCLSGLGDVGRGEAASLRARPGSGASRGQGPGSRVSCRRDLGKPLHAPAGFSAGEVHTTPLGNLGA

SEQ ID NO: 800161 - protein, 129 aa, Homo sapiens
SGSMGVLLEDVSGWGRCPNREGCPDGGGSTVVEMPTWGALRLGGVPSLVTPLSLPLIGPLPRYAQVKAFSADQVAFPGERPQHHGSYLHAPRWSARLIPAPRPGAGEPARQSRSSGWGVAVPFSTHVSF

SEQ ID NO: 800162 - protein, 176 aa, Homo sapiens; identical to SEQ ID NO: 800160

SEQ ID NO: 800163 - protein, 176 aa, Homo sapiens; identical to SEQ ID NO: 800160

SEQ ID NO: 800164 - protein, 176 aa, Homo sapiens; identical to SEQ ID NO: 800160

SEQ ID NO: 800165 - protein, 72 aa, Homo sapiens
QPEIMWAFPWEEPLYVITFYIVAVEAKWTESPRQHEVVLQVILEKLTYHTTHQPMQKPVYVQSAECLGPPKK

SEQ ID NO: 800166 - protein, 91 aa, Homo sapiens
GARGERWDLTLAAEFGAPLSGGARAALLPLADCEASCVCDAPAVSQVCPVLSLRTHQKGQARIRWEVEPRHDQKLFPYEEHLEMAMLNLTL

SEQ ID NO: 800167 - protein, 128 aa, Homo sapiens
GARGERWDLTLAAEFGAPLSGGARAALLPLAGGRRGERRGPQGSRESRGRRDGSPCRSPRHARHSLEAKLTDSSDSELLRDILQKTVKHPVCVTHPPSVKYARCFLSELIKKTCCIAQKPSCCWSGSC

SEQ ID NO: 800168 - protein, 104 aa, Homo sapiens
MGLGDRRGRRRASASAAFRTASSSSCNCSRCSSADTRSSTSIPLVPDKLSSGRRGSAGCRATQELQCPRGPSRLPGSKRGASHAPFLSRYLGLGHLDMSQGRGL

SEQ ID NO: 800169 - protein, 157 aa, Homo sapiens
RICENGPDCAGCNVEYQSCNTNPCPELKKTTPWTPWTPVNISDNGGHYEQRFRYTCKARLADPNLLEVGRQRIEMRYCSSDGTSGCSTDGLSGDFLRAGRYSAHTVNGAWSAWTSWSQCSRDCSRGIRNRKRVCNNPEPKYGGMPCLGPSLEYQECN

SEQ ID NO: 800170 - protein, 101 aa, Homo sapiens
RPPQQCRTKLRRQKRNDDSAYVIIQLIFILFQSPLESCLARAVTGSWERGSTAESQPDGGHHLISKYMHGYLDPASDRSSENMKLNAVKNYSLELLKISKT

SEQ ID NO: 800171 - protein, 135 aa, Homo sapiens
REREREGLLLDEKADCPAVTPELISTRDTTALRWRVRVFRNQTREATVSAVVRVELNRWRAGVSNGRSSEVREVLKLYKNLLYLGRDYPKGADYFKKRLKNIFLKNKDVKNPEKIKELIAQGEFVMKELEACVLP

SEQ ID NO: 800172 - protein, 1549 aa, Homo sapiens
MSLSFCGNNISSYNINDGVLQNSCFVDALNLVPHVFLLFITFPILFIGWGSQSSKVQIHHNTWLHFPGHNLRWILTFALLFVHVCEIAEGIVSDSRRESRHLHLFMPAVMGFVATTTSIVYYHNIETSNFPKLLLALFLYWVMAFITKTIKLVKYCQSGLDISNLRFCITGMMVILNGLLMAVEINVIRVRRYVFFMNPQKVKPPEDLQDLGVRFLQPFVNLLSKATYWWMNTLIISAHKKPIDLKAIGKLPIAMRAVTNYVCLKDAYEEQKKKVADHPNRTPSIWLAMYRAFGRPILLSSTFRYLADLLGFAGPLCISGIVQRVNETQNGTNNTTGISETLSSKEFLENAYVLAVLLFLALILQRTFLQASYYVTIETGINLRGALLAMIYNKILRLSTSNLSMGEMTLGQINNLVAIETNQLMWFLFLCPNLWAMPVQIIMGVILLYNLLGSSALVGAAVIVLLAPIQYFIATKLAEAQKSTLDYSTERLKKTNEILKGIKLLKLYAWEHIFCKSVEETRMKELSSLKTFALYTSLSIFMNAAIPIAAVLATFVTHAYASGNNLKPAEAFASLSLFHILVTPLSLLFTVVRFAVKAIISVQKLNEFLLSDEIGDDSWRTGESSLPFESCKKHTGVQPKTINRKQPGRYHLDSYEQSTRRLRPAETEDIAIKVTNGYFSWGSGLATLSNIDIRIPTGQLTMIVGQVGCGKSSLLLAILGEMQTLEGKVHWSNVNESEPSFEATRSRNRYSVAYAAQKPWLLNATVEENITFGSPFNKQRYKAVTDACSLQPDIDLLPFGDQTEIGERGINLSGGQRQRICVARALYQNTNIVFLDDPFSALDIHLSDHLMQEGILKFLQDDKRTLVLVTHKLQYLTHADWIIAMKDGSVLREGTLKDIQTKDVELYEHWKTLMNRQDQELEKDMEADQTTLERKTLRRAMYSREAKAQMEDEDEEEEEEEDEDDNMSTVMRLRTKMPWKTCWRYLTSGGFFLLILMIFSKLLKHSVIVAIDYWLATWTSEYSINNTGKADQTYYVAGFSILCGAGIFLCLVTSLTVEWMGLTAAKNLHHNLLNKIILGPIRFFDTTPLGLILNRFSADTNIIDQHIPPTLESLTRSTLLCLSAIGMISYATPVFLVALLPLGVAFYFIQKYFRVASKDLQELDDSTQLPLLCHFSETAEGLTTIRAFRHETRFKQRMLELTDTNNIAYLFLSAANRWLEVRTDYLGACIVLTASIASISGSSNSGLVGLGLLYALTITNYLNWVVRNLADLEVQMGAVKKVNSFLTMESENYEGTMDPSQVPEHWPQEGEIKIHDLCVRYENNLKPVLKHVKAYIKPGQKVGICGRTGSGKSSLSLAFFRMVDIFDGKIVIDGIDISKLPLHTLRSRLSIILQDPILFSGSIRFNLDPECKCTDDRLWEALEIAQLKNMVKSLPGGLDAVVTEGGENFSVGQRQLFCLARAFVRKSSILIMDEATASIDMATENILQKVVMTAFADRTVVTMAHRVSSIMDAGLVLVFSEGILVECDTVPNLFAHKNGPFSTLVMTNK

SEQ ID NO: 800173 - protein, 1513 aa, Homo sapiens
MSLSFCGNNISSYNINDGVLQNSCFVDALNLVPHVFLLFITFPILFIGWGSQSSKVQIHHNTWLHFPGHNLRWILTFALLFVHVCEIAEGIVSDSRRESRHLHLFMPAVMGFVATTTSIVYYHNIETSNFPKLLLALFLYWVMAFITKTIKLVKYCQSGLDISNLRFCITGMMVILNGLLMAVEINVIRVRRYVFFMNPQKVKPPEDLQDLGVRFLQPFVNLLSKATYWWMNTLIISAHKKPIDLKAIGKLPIAMRAVTNYVCLKDAYEEQKKKVADHPNRTPSIWLAMYRAFGRPILLSSTFRYLADLLGFAGPLCISGIVQRVNETQNGTNNTTGISETLSSKEFLENAYVLAVLLFLALILQRTFLQASYYVTIETGINLRGALLAMIYNKILRLSTSNLSMGEMTLGQINNLVAIETNQLMWFLFLCPNLWAMPVQIIMGVILLYNLLGSSALVGAAVIVLLAPIQYFIATKLAEAQKSTLDYSTERLKKTNEILKGIKLLKLYAWEHIFCKSVEETRMKELSSLKTFALYTSLSIFMNAAIPIAAVLATFVTHAYASGNNLKPAEAFASLSLFHILVTPLSLLFTVVRFAVKAIISVQKLNEFLLSDEIGDDSWRTGESSLPFESCKKHTGVVTNGYFSWGSGLATLSNIDIRIPTGQLTMIVGQVGCGKSSLLLAILGEMQTLEGKVHWSNVNESEPSFEATRSRNRYSVAYAAQKPWLLNATVEENITFGSPFNKQRYKAVTDACSLQPDIDLLPFGDQTEIGERGINLSGGQRQRICVARALYQNTNIVFLDDPFSALDIHLSDHLMQEGILKFLQDDKRTLVLVTHKLQYLTHADWIIAMKDGSVLREGTLKDIQTKDVELYEHWKTLMNRQDQELEKDMEADQTTLERKTLRRAMYSREAKAQMEDEDEEEEEEEDEDDNMSTVMRLRTKMPWKTCWRYLTSGGFFLLILMIFSKLLKHSVIVAIDYWLATWTSEYSINNTGKADQTYYVAGFSILCGAGIFLCLVTSLTVEWMGLTAAKNLHHNLLNKIILGPIRFFDTTPLGLILNRFSADTNIIDQHIPPTLESLTRSTLLCLSAIGMISYATPVFLVALLPLGVAFYFIQKYFRVASKDLQELDDSTQLPLLCHFSETAEGLTTIRAFRHETRFKQRMLELTDTNNIAYLFLSAANRWLEVRTDYLGACIVLTASIASISGSSNSGLVGLGLLYALTITNYLNWVVRNLADLEVQMGAVKKVNSFLTMESENYEGTMDPSQVPEHWPQEGEIKIHDLCVRYENNLKPVLKHVKAYIKPGQKVGICGRTGSGKSSLSLAFFRMVDIFDGKIVIDGIDISKLPLHTLRSRLSIILQDPILFSGSIRFNLDPECKCTDDRLWEALEIAQLKNMVKSLPGGLDAVVTEGGENFSVGQRQLFCLARAFVRKSSILIMDEATASIDMATENILQKVVMTAFADRTVVTMAHRVSSIMDAGLVLVFSEGILVECDTVPNLFAHKNGPFSTLVMTNK

SEQ ID NO: 800174 - protein, 88 aa, Homo sapiens
DGEGLRPQARRAGLLPSFLLLSRGVCPGPEQSVQFRNSIGGSSWSPTTLKIIRSGALRVSPRGGKLSSESSASGFEIYILRQCRKSVF

SEQ ID NO: 800175 - protein, 1549 aa, Homo sapiens
MSLSFCGNNISSYNINDGVLQNSCFVDALNLVPHVFLLFITFPILFIGWGSQSSKVQIHHNTWLHFPGHNLRWILTFALLFVHVCEIAEGIVSDSRRESRHLHLFMPAVMGFVATTTSIVYYHNIETSNFPKLLLALFLYWVMAFITKTIKLVKYCQSGLDISNLRFCITGMMVILNGLLMAVEINVIRVRRYVFFMNPQKVKPPEDLQDLGVRFLQPFVNLLSKATYWWMNTLIISAHKKPIDLKAIGKLPIAMRAVTNYVCLKDAYEEQKKKVADHPNRTPSIWLAMYRAFGRPILLSSTFRYLADLLGFAGPLCISGIVQRVNETQNGTNNTTGISETLSSKEFLENAYVLAVLLFLALILQRTFLQASYYVTIETGINLRGALLAMIYNKILRLSTSNLSMGEMTLGQINNLVAIETNQLMWFLFLCPNLWAMPVQIIMGVILLYNLLGSSALVGAAVIVLLAPIQYFIATKLAEAQKSTLDYSTERLKKTNEILKGIKLLKLYAWEHIFCKSVEETRMKELSSLKTFALYTSLSIFMNAAIPIAAVLATFVTHAYASGNNLKPAEAFASLSLFHILVTPLSLLFTVVRFAVKAIISVQKLNEFLLSDEIGDDSWRTGESSLPFESCKKHTGVQPKTINRKQPGRYHLDSYEQSTRRLRPAETEDIAIKVTNGYFSWGSGLATLSNIDIRIPTGQLTMIVGQVGCGKSSLLLAILGEMQTLEGKVHWSNVNESEPSFEATRSRNRYSVAYAAQKPWLLNATVEENITFGSPFNKQRYKAVTDACSLQPDIDLLPFGDQTEIGERGINLSGGQRQRICVARALYQNTNIVFLDDPFSALDIHLSDHLMQEGILKFLQDDKRTLVLVTHKLQYLTHADWIIAMKDGSVLREGTLKDIQTKDVELYEHWKTLMNRQDQELEKDMEADQTTLERKTLRRAMYSREAKAQMEDEDEEEEEEEDEDDNMSTVMRLRTKMPWKTCWRYLTSGGFFLLILMIFSKLLKHSVIVAIDYWLATWTSEYSINNTGKADQTYYVAGFSILCGAGIFLCLVTSLTVEWMGLTAAKNLHHNLLNKIILGPIRFFDTTPLGLILNRFSADTNIIDQHIPPTLESLTRSTLLCLSAIGMISYATPVFLVALLPLGVAFYFIQKYFRVASKDLQELDDSTQLPLLCHFSETAEGLTTIRAFRHETRFKQRMLELTDTNNIAYLFLSAANRWLEVRTDYLGACIVLTASIASISGSSNSGLVGLGLLYALTITNYLNWVVRNLADLEVQMGAVKKVNSFLTMESENYEGTMDPSQVPEHWPQEGEIKIHDLCVRYENNLKPVLKHVKAYIKPGQKVGICGRTGSGKSSLSLAFFRMVDIFDGKIVIDGIDISKLPLHTLRSRLSIILQDPILFSGSIRFNLDPECKCTDDRLWEALEIAQLKNMVKSLPGGLDAVVTEGGENFSVGQRQLFCLARAFVRKSSILIMDEATASIDMATENILQKVVMTAFADRTVVTMAHRVHTILTADLVIVMKRGNILEYDTPESLLAQENGVFASFVRADM

SEQ ID NO: 800176 - protein, 1549 aa, Homo sapiens; identical to SEQ ID NO: 800172

SEQ ID NO: 800177 - protein, 680 aa, Homo sapiens
RESHRTRLPSPKLLGGAMGRYRIRVATGAWLFSGSYNRVQLWLVGTRGEAELELQLRPARGEEEEFDHDVAEDLGLLQFVRLRKHHWLVDDAWFCDRITVQGPGACAEVAFPCYRWVQGEDILSLPEGTARLPGDNALDMFQKHREKELKDRQQIYCWATWKEGLPLTIAADRKDDLPPNMRFHEEKRLDFEWTLKAGALEMALKRVYTLLSSWNCLEDFDQIFWGQKSALAEKVRQCWQDDELFSYQFLNGANPMLLRRSTSLPSRLVLPSGMEELQAQLEKELQNGSLFEADFILLDGIPANVIRGEKQYLAAPLVMLKMEPNGKLQPMVIQIQPPNPSSPTPTLFLPSDPPLAWLLAKSWVRNSDFQLHEIQYHLLNTHLVAEVIAVATMRCLPGLHPIFKFLIPHIRYTMEINTRARTQLISDGGIFDKAVSTGGGGHVQLLRRAAAQLTYCSLCPPDDLADRGLLGLPGALYAHDALRLWEIIARYVEGIVHLFYQRDDIVKGDPELQAWCREITEVGLCQAQDRGFPVSFQSQSQLCHFLTMCVFTCTAQHAAINQGQLDWYAWVPNAPCTMRMPPPTTKEDVTMATVMGSLPDVRQACLQMAISWHLSRRQPDMVPLGHHKEKYFSGPKPKAVLNQFRTDLEKLEKEITARNEQLDWPYEYLKPSCIENSVTI

SEQ ID NO: 800178 - protein, 133 aa, Homo sapiens
MCVFTCTAQHAAINQGQLDWYAWVPNAPCTMRMPPPTTKEDVTMATVMGSLPDVRQACLQMAISWHLSRRQPDMVPLGHHKEKYFSGPKPKAVLNQFRTDLEKLEKEITARNEQLDWPYEYLKPSCIENSVTI

SEQ ID NO: 800179 - protein, 118 aa, Homo sapiens
PKEQVVRGRERGDAVFGGPEKLRLQQERGSVLETASVGSLLLSLAWVRPAQEEEFDHDVAEDLGLLQFVRLRKHHWLVDDAWFCDRITVQGPGACAEVAFPCYRWVQGEDILSLPEGT

SEQ ID NO: 800180 - protein, 542 aa, Homo sapiens
ALAGSPAERELKDRQQIYCWATWKEGLPLTIAADRKDDLPPNMRFHEEKRLDFEWTLKAGALEMALKRVYTLLSSWNCLEDFDQIFWGQKSALAEKVRQCWQDDELFSYQFLNGANPMLLRRSTSLPSRLVLPSGMEELQAQLEKELQNGSLFEADFILLDGIPANVIRGEKQYLAAPLVMLKMEPNGKLQPMVIQIQPPNPSSPTPTLFLPSDPPLAWLLAKSWVRNSDFQLHEIQYHLLNTHLVAEVIAVATMRCLPGLHPIFKFLIPHIRYTMEINTRARTQLISDGGIFDKAVSTGGGGHVQLLRRAAAQLTYCSLCPPDDLADRGLLGLPGALYAHDALRLWEIIARYVEGIVHLFYQRDDIVKGDPELQAWCREITEVGLCQAQDRGFPVSFQSQSQLCHFLTMCVFTCTAQHAAINQGQLDWYAWVPNAPCTMRMPPPTTKEDVTMATVMGSLPDVRQACLQMAISWHLSRRQPDMVPLGHHKEKYFSGPKPKAVLNQFRTDLEKLEKEITARNEQLDWPYEYLKPSCIENSVTI

SEQ ID NO: 800181 - protein, 73 aa, Homo sapiens
IPITGRINLFSSVCPQLFVPTELCFRKLASRASFRCAAAFFKASECGPAPTVRQARCKRVRFQSIDDQWEGLS

SEQ ID NO: 800182 - protein, 104 aa, Homo sapiens
RIRPLWPGGFFSPVREVATFVEGHELRNLRLWEIEIMAGPESDAQYQFTGIKKYFNSYTLTGRMNCVLATYGSIALIVLYFKLKSKKTPAVKATIDGFKTVYGF

SEQ ID NO: 800183 - protein, 208 aa, Homo sapiens
RIRPLWPGGFFSPVREVATFVEGHELRNLRLWEIEIMAGPESDAQYQFTGIKKYFNSYTFTGRMNCVLATYGSIALIVLYFKLRSKKTPAVKATIDGFKTVYGFKLHLLSSHARKKKVIRIIFFFRPGREVVTFVEGHQLRNLRLWQIEIMAGPESDAQYQFTGIKKYFNSYTLTGRMNCVLATYGSIALIVLYFKLRSKKTPAVKAT

SEQ ID NO: 800184 - protein, 208 aa, Homo sapiens; identical to SEQ ID NO: 800183

SEQ ID NO: 800185 - protein, 70 aa, Homo sapiens
DAWVDPRVALKDTSCGICGFGSCLFPPSCALGSWPAGPPLGALQPFSKRVNVARPLQFARPAVKGLDFSL

SEQ ID NO: 800186 - protein, 70 aa, Homo sapiens; identical to SEQ ID NO: 800185

SEQ ID NO: 800187 - protein, 208 aa, Homo sapiens; identical to SEQ ID NO: 800183

SEQ ID NO: 800188 - protein, 208 aa, Homo sapiens; identical to SEQ ID NO: 800183

SEQ ID NO: 800189 - protein, 70 aa, Homo sapiens; identical to SEQ ID NO: 800185

SEQ ID NO: 800190 - protein, 70 aa, Homo sapiens; identical to SEQ ID NO: 800185

SEQ ID NO: 800191 - protein, 208 aa, Homo sapiens; identical to SEQ ID NO: 800183

SEQ ID NO: 800192 - protein, 208 aa, Homo sapiens; identical to SEQ ID NO: 800183

SEQ ID NO: 800193 - protein, 70 aa, Homo sapiens; identical to SEQ ID NO: 800185

SEQ ID NO: 800194 - protein, 70 aa, Homo sapiens; identical to SEQ ID NO: 800185

SEQ ID NO: 800195 - protein, 208 aa, Homo sapiens; identical to SEQ ID NO: 800183

SEQ ID NO: 800196 - protein, 208 aa, Homo sapiens; identical to SEQ ID NO: 800183

SEQ ID NO: 800197 - protein, 172 aa, Homo sapiens
RIRPLWPGGFFSPVREVATFVEGHELRNLRLWEIEIMAGPESDAQYQFTGIKKYFNSYTFTGRMNCVLATYGSIALIVLYFKLRSKKTPAVKATIDGFKTVYGFKLHLLSSHARKKKVIRIIFFFRPGREVVTFVEGHQLRNLRLWQIEIMAGPESDAQYQFTGIKKYKKNS

SEQ ID NO: 800198 - protein, 58 aa, Homo sapiens
MAGPESDAQYQFTGIKKYFNSYTLTGRMNCVLATYGSIALIVLYFKLRSKKTPAVKAT

SEQ ID NO: 800199 - protein, 1001 aa, Homo sapiens
MPTEKKISSASDCINSMVEGSELKKVRSNSRIYHRYFLLDADMQSLRWEPSKKDSEKAKIDIKSIKEVRTGKNTDIFRSNGISDQISEDCAFSVIYGENYESLDLVANSADVANIWVTGLRYLISYGKHTLDMLESSQDNMRTSWVSQMFSEIDVDNLGHITLCNAVQCIRNLNPGLKTSKIELKFKELHKSKDKAGTEVTKEEFIEVFHELCTRPEIYFLLVQFSSNKEFLDTKDLMMFLEAEQGVAHINEEISLEIIHKYEPSKEGQEKGWLSIDGFTNYLMSPDCYIFDPEHKKVCQDMKQPLSHYFINSSHNTYLIEDQFRGPSDITGYIRALKMGCRSVELDVWDGPDNEPVIYTGHTMTSQIVFRSVIDIINKYAFFASEYPLILCLENHCSIKQQKVMVQHMKKLLGDKLYTTSPNVEESYLPSPDVLKGKILIKAKKLSSNCSGVEGDVTDEDEGAEMSQRMGKENMEQPNNVPVKRFQLCKELSELVSICKSVQFKEFQVSFQVQKYWEVCSFNEVLASKYANENPGDFVNYNKRFLARVFPSPMRIDSSNMNPQDFWKCGCQIVAMNFQTPGLMMDLNIGWFRQNGNCGYVLRPAIMREEVSFFSANTKDSVPGVSPQLLHIKIISGQNFPKPKGSGAKGDVVDPYVYVEIHGIPADCAEQRTKTVHQNGDAPIFDESFEFQINLPELAMVRFVVLDDDYIGDEFIGQYTIPFECLQTGYRHVPLQSLTGEVLAHASLFVHVAITNRRGGGKPHKRGLSVRKGKKSREYASLRTLWIKTVDEVFKNAQPPIRDATDLRENMQNAVVSFKELCGLSSVANLMQCMLAVSPRFLGPDNTPLVVLNLSEQYPTMELQGIVPEVLKKIVTTYDMMIQSLKALIENADAVYEKIVHCQKAAMEFHEHLHSIGTKEGLKERKLQKAVESFTWNITILKGQADLLKYAKNETLENLKQIHFAAVSCGLNKPGTENADVQKPRRSLEVIPEKANDETGE

SEQ ID NO: 800200 - protein, 1113 aa, Homo sapiens
PRAAARGGGGDAGARGRGFVQAGRGAPMAECGRGGAAGGALPTSPGPALGAKGALKAGVGEGGGGGGRLGHGRARYDSGGVSNGDCSLGVSGDEARASPTRGPRGVALAPTPSAVVCTLPRESKPGGLPRRSSIIKDGTKQKRERKKTVSFSSMPTEKKISSASDCINSMVEGSELKKVRSNSRIYHRYFLLDADMQSLRWEPSKKDSEKAKIDIKSIKEVRTGKNTDIFRSNGISDQISEDCAFSVIYGENYESLDLVANSADVANIWVTGLRYLISYGKHTLDMLESSQDNMRTSWVSQMFSEIDVDNLGHITLCNAVQCIRNLNPGLKTSKIELKFKELHKSKDKAGTEVTKEEFIEVFHELCTRPEIYFLLVQFSSNKEFLDTKDLMMFLEAEQGVAHINEEISLEIIHKYEPSKEGQEKGWLSIDGFTNYLMSPDCYIFDPEHKKVCQDMKQPLSHYFINSSHNTYLIEDQFRGPSDITGYIRALKMGCRSVELDVWDGPDNEPVIYTGHTMTSQIVFRSVIDIINKYAFFASEYPLILCLENHCSIKQQKVMVQHMKKLLGDKLYTTSPNVEESYLPSPDVLKGKILIKAKKLSSNCSGVEGDVTDEDEGAEMSQRMGKENMEQPNNVPVKRFQLCKELSELVSICKSVQFKEFQVSFQVQKYWEVCSFNEVLASKYANENPGDFVNYNKRFLARVFPSPMRIDSSNMNPQDFWKCGCQIVAMNFQTPGLMMDLNIGWFRQNGNCGYVLRPAIMREEVSFFSANTKDSVPGVSPQLLHIKIISGQNFPKPKGSGAKGDVVDPYVYVEIHGIPADCAEQRTKTVHQNGDAPIFDESFEFQINLPELAMVRFVVLDDDYIGDEFIGQYTIPFECLQTGYRHVPLQSLTGEVLAHASLFVHVAITNRRGGGKPHKRGLSVRKGKKSREYASLRTLWIKTVDEVFKNAQPPIRDATDLRENMQNAVVSFKELCGLSSVANLMQCMLAVSPRFLGPDNTPLVVLNLSEQYPTMELQGIVPEVLKKIVTTYDMMIQSLKALIENADAVYEKIVHCQKAAMEFHEHLHSIGTKEGLKERKLQKAVESFTWNITILKIRKTGRRSIFVPQTPIMV

SEQ ID NO: 800201 - protein, 1154 aa, Homo sapiens
PRAAARGGGGDAGARGRGFVQAGRGAPMAECGRGGAAGGALPTSPGPALGAKGALKAGVGEGGGGGGRLGHGRARYDSGGVSNGDCSLGVSGDEARASPTRGPRGVALAPTPSAVVCTLPRESKPGGLPRRSSIIKDGTKQKRERKKTVSFSSMPTEKKISSASDCINSMVEGSELKKVRSNSRIYHRYFLLDADMQSLRWEPSKKDSEKAKIDIKSIKEVRTGKNTDIFRSNGISDQISEDCAFSVIYGENYESLDLVANSADVANIWVTGLRYLISYGKHTLDMLESSQDNMRTSWVSQMFSEIDVDNLGHITLCNAVQCIRNLNPGLKTSKIELKFKELHKSKDKAGTEVTKEEFIEVFHELCTRPEIYFLLVQFSSNKEFLDTKDLMMFLEAEQGVAHINEEISLEIIHKYEPSKEGQEKGWLSIDGFTNYLMSPDCYIFDPEHKKVCQDMKQPLSHYFINSSHNTYLIEDQFRGPSDITGYIRALKMGCRSVELDVWDGPDNEPVIYTGHTMTSQIVFRSVIDIINKYAFFASEYPLILCLENHCSIKQQKVMVQHMKKLLGDKLYTTSPNVEESYLPSPDVLKGKILIKAKKLSSNCSGVEGDVTDEDEGAEMSQRMGKENMEQPNNVPVKRFQLCKELSELVSICKSVQFKEFQVSFQVQKYWEVCSFNEVLASKYANENPGDFVNYNKRFLARVFPSPMRIDSSNMNPQDFWKCGCQIVAMNFQTPGLMMDLNIGWFRQNGNCGYVLRPAIMREEVSFFSANTKDSVPGVSPQLLHIKIISGQNFPKPKGSGAKGDVVDPYVYVEIHGIPADCAEQRTKTVHQNGDAPIFDESFEFQINLPELAMVRFVVLDDDYIGDEFIGQYTIPFECLQTGYRHVPLQSLTGEVLAHASLFVHVAITNRRGGGKPHKRGLSVRKGKKSREYASLRTLWIKTVDEVFKNAQPPIRDATDLRENMQNAVVSFKELCGLSSVANLMQCMLAVSPRFLGPDNTPLVVLNLSEQYPTMELQGIVPEVLKKIVTTYDMMIQSLKALIENADAVYEKIVHCQKAAMEFHEHLHSIGTKEGLKERKLQKAVESFTWNITILKGQADLLKYAKNETLENLKQIHFAAVSCGLNKPGTENADVQKPRRSLEVIPEKANDETGE

SEQ ID NO: 800202 - protein, 226 aa, Homo sapiens
SLLRALGGSPPTATLRLACENAQPPIRDATDLRENMQNAVVSFKELCGLSSVANLMQCMLAVSPRFLGPDNTPLVVLNLSEQYPTMELQGIVPEVLKKIVTTYDMMIQSLKALIENADAVYEKIVHCQKAAMEFHEHLHSIGTKEGLKERKLQKAVESFTWNITILKGQADLLKYAKNETLENLKQIHFAAVSCGLNKPGTENADVQKPRRSLEVIPEKANDETGE

SEQ ID NO: 800203 - protein, 126 aa, Homo sapiens
LSPPPGAAVQLRRAPQAAESAGSYATADPQRRRLPSPVATASSVQPRRFRVPAVPSPKCSGFRLGSGKCRSRLGSGSPSSALGSSVPKATHLGCSAGSPWFLLHRRVEAWGTAFCYTSPRSAKQME

SEQ ID NO: 800204 - protein, 105 aa, Homo sapiens
ALEGVLHAAEHAAKLGPGQRPRGLLRLPRGHGRSGRQNPVSEPPVASHRREPPRWSTGARCCQAPDCRACPPGDLAVSVFTSPVRHSGYPEGYRFCKGRDFKEQP

SEQ ID NO: 800205 - protein, 105 aa, Homo sapiens; identical to SEQ ID NO: 800204

SEQ ID NO: 800206 - protein, 102 aa, Homo sapiens
DGDANLRDATRSSEQRSFPLVEAQAQAPPHGEARPLAEPALSLRQPIDASPRADPVPAPDRSLSGGSAHSGRFLKPRLRRSSGETDEETTIPRPYFNYYGAV

SEQ ID NO: 800207 - protein, 102 aa, Homo sapiens; identical to SEQ ID NO: 800206

SEQ ID NO: 800208 - protein, 168 aa, Homo sapiens
SPSAAASMCEQRMCCSCVYSTSVISTRLSEPFGCTGHGLELLEEAAQSCCCPTRHLAKGPAPVCAGTSHRRLLMAGLWTHTLVRKPSSGPQATRGSSQARRQLPEPVPAAALCAGTWATASPPLALLGLGRQAHLPTCILSSSTPRSRRVHTLLQPGWAGASGLTPQP

SEQ ID NO: 800209 - protein, 87 aa, Homo sapiens
LCVPLSHTPCVSAPFCGVAAYVRADRRPVCVPPSTTASVRARLRVWQDMACAFQLCERLFLDAGCIQMLAARDLGGSLVASGRLGIC

SEQ ID NO: 800210 - protein, 228 aa, Homo sapiens
MRRISLTSSPVRLLLFLLLLLIALEIMVYNSDNNMVKPLGLLGKKVNATSTWGELTQTLGEVGRDLRMLLCDIKPQIKTSDPSTLQVEMFCQREAERCTGASWQFATNGEKSLLFDAMNMTWTVINHEASKIKETWKKDRGLEKYFRKLSKGDCDHWLREFLGHWEAMPEPTVSPVNASDIHWSSSSLPDRWIILGAFILLVLMGIVLICVWWQNGEWQAGLWPLRTS

SEQ ID NO: 800211 - protein, 186 aa, Homo sapiens
MVKPLGLLGKKVNATSTWGELTQTLGEVGRDLRMLLCDIKPQIKTSDPSTLQVEMFCQREAERCTGASWQFATNGEKSLLFDAMNMTWTVINHEASKIKETWKKDRGLEKYFRKLSKGDCDHWLREFLGHWEAMPEPTVSPVNASDIHWSSSSLPDRWIILGAFILLVLMGIVLICVWWQNGRRST

SEQ ID NO: 800212 - protein, 110 aa, Homo sapiens
MNYVDHCKEQNVPVPKEPIIFSKFASSIVGPYDEVVLPPQSQVTSIWPMRDLQVCSIPKLLAYICFLAKTFQAHHVLSVLDQGTRCSLLGSGIRDQHLDVRCTYTNSGYY

SEQ ID NO: 800213 - protein, 121 aa, Homo sapiens
MAHVAGFTVAHDVSARDWLTRCNGKQWLLGKTFDTFCPLGPALVTKDSVADPHNLKICCRVNGEVVQSSNTNQMVFKTEDLIAWVSQFVTFYPGDVILTGTPPPPPRCRCIQETSCLSQGL

SEQ ID NO: 800214 - protein, 206 aa, Homo sapiens
MNYVDHCKEQNVPVPKEPIIFSKFASSIVGPYDEVVLPPQSQEVDWEVELAVVIGKKGKHIKVLVSPMIYPPVWPNPLPPYATDAMAHVAGFTVAHDVSARDWLTRCNGKQWLLGKTFDTFCPLGPALVTKDSVADPHNLKICCRVNGEVVQSSNTNQMVFKTEDLIAWVSQFVTFYPGDVILTGTPPPPPRCRCIQETSCLSQGL

SEQ ID NO: 800215 - protein, 121 aa, Homo sapiens; identical to SEQ ID NO: 800213

SEQ ID NO: 800216 - protein, 121 aa, Homo sapiens; identical to SEQ ID NO: 800213

SEQ ID NO: 800217 - protein, 121 aa, Homo sapiens; identical to SEQ ID NO: 800213

SEQ ID NO: 800218 - protein, 338 aa, Homo sapiens
MFHCIPLWRCNRHVESIDKRHCSLVYVPEEIYRYARSLEELLLDANQLRELPEQFFQLVKLRKLGLSDNEIQRLPPEIANFMQLVELDVSRNEIPEIPESISFCKALQVADFSGNPLTRLPESFPELQNLTCLSVNDISLQSLPENIGNLYNLASLELRENLLTYLPDSLTQLRRLEELDLGNNEIYNLPESIGALLHLKDLWLDGNQLSELPQEIGNLKNLLCLDVSENRLERLPEEISGLTSLTDLVISQNLLETIPDGIGKLKKLSILKVDQNRLTQLPEAVGECESLTELVLTENQLLTLPKSIGKLKKLSNLNADRNKLVSLPKEVCAFREIT

SEQ ID NO: 800219 - protein, 524 aa, Homo sapiens
MFHCIPLWRCNRHVESIDKRHCSLVYVPEEIYRYARSLEELLLDANQLRELPEQFFQLVKLRKLGLSDNEIQRLPPEIANFMQLVELDVSRNEIPEIPESISFCKALQVADFSGNPLTRLPESFPELQNLTCLSVNDISLQSLPENIGNLYNLASLELRENLLTYLPDSLTQLRRLEELDLGNNEIYNLPESIGALLHLKDLWLDGNQLSELPQEIGNLKNLLCLDVSENRLERLPEEISGLTSLTDLVISQNLLETIPDGIGKLKKLSILKVDQNRLTQLPEAVGECESLTELVLTENQLLTLPKSIGKLKKLSNLNADRNKLVSLPKEIGGCCSLTVFCVRDNRLTRIPAEVSQATELHVLDVAGNRLLHLPLSLTALKLKALWLSDNQSQPLLTFQTDTDYTTGEKILTCVLLPQLPSEPTCQENLPRCGALENLVNDVSDEAWNERAVNRVSAIRFVEDEKDEEDNETRTLLRRATPHPGELKHMKKTVENLRNDMNAAKGLDSNKNEVNHAIDRVTTSV

SEQ ID NO: 800220 - protein, 443 aa, Homo sapiens [sequence omitted]

SEQ ID NO: 800221 - protein, 231 aa, Homo sapiens
DAWVGRVGRGRVGRPTRPKKLSNLNADRNKLVSLPKEIGGCCSLTVFCVRDNRLTRIPAEVSQATELHVLDVAGNRLLHLPLSLTALKLKALWLSDNQSQPLLTFQTDTDYTTGEKILTCVLLPQLPSEPTCQENLPRCGALENLVNDVSDEAWNERAVNRVSAIRFVEDEKDEEDNETRTLLRRATPHPGELKHMKKTVENLRNDMNAAKGLDSNKNEVNHAIDRVTTSV

SEQ ID NO: 800222 - protein, 154 aa, Homo sapiens
MFHCIPLWRCNRHVESIDKRHCSLVYVPEEIYRYARSLEELLLDANQLRELPEQFFQLVKLRKLGLSDNEIQRLPPEIANFMQLVELDVSRNEIPEIPESISFCKALQVADFSGNPLTRLPESFPELQNLTCLSVNDISLQSLPENIGKQKTTS

SEQ ID NO: 800223 - protein, 524 aa, Homo sapiens; identical to SEQ ID NO: 800219

SEQ ID NO: 800224 - protein, 524 aa, Homo sapiens; identical to SEQ ID NO: 800219

SEQ ID NO: 800225 - protein, 330 aa, Homo sapiens
PPTPDTRHPTTPAPHHTHTTHLPTARYEAVCYSAEDRLERLPEEISGLTSLTDLVISQNLLETIPDGIGKLKKLSILKVDQNRLTQLPEAVGECESLTELVLTENQLLTLPKSIGKLKKLSNLNADRNKLVSLPKEIGGCCSLTVFCVRDNRLTRIPAEVSQATELHVLDVAGNRLLHLPLSLTALKLKALWLSDNQSQPLLTFQTDTDYTTGEKILTCVLLPQLPSEPTCQENLPRCGALENLVNDVSDEAWNERAVNRVSAIRFVEDEKDEEDNETRTLLRRATPHPGELKHMKKTVENLRNDMNAAKGLDSNKNEVNHAIDRVTTSV

SEQ ID NO: 800226 - protein, 966 aa, Homo sapiens
MANFQEHLSCSSSPHLPFSESKTFNGLQDELTAMGNHPSPKLLEDQQEKGMVRTELIESVHSPVTTTVLTSVSEDSRDQFENSVLQLREHDESETAVSQGNSNTVDGESTSGTEDIKIQFSRSGSGSGGFLEGLFGCLRPVWNIIGKAYSTDYKLQQQDTWEVPFEEISELQWLGSGAQGAVFLGKFRAEEVAIKKVREQNETDIKHLRKLKHPNIIAFKGVCTQAPCYCIIMEYCAHGQLYEVLRAGRKITPRLLVDWSTGIASGMNYLHLHKIIHRDLKSPNVLVTHTDAVKISDFGTSKELSDKSTKMSFAGTVAWMAPEVIRNEPVSEKVDIWSFGVVLWELLTGEIPYKDVDSSAIIWGVGSNSLHLPVPSTCPDGFKILMKQTWQSKPRNRPSFRQTLMHLDIASADVLATPQETYFKSQAEWREEVKKHFEKIKSEGTCIHRLDEELIRRRREELRHALDIREHYERKLERANNLYMELSAIMLQLEMREKELIKREQAVEKKYPGTYKRHPVRPIIHPNAMEKLMKRKGVPHKSGMQTKRPDLLRSEGIPTTEVAPTASPLSGSPKMSTSSSKSRYRSKPRHRRGNSRGSHSDFAAILKNQPAQENSPHPTYLHQAQSQYPSLHHHNSLQQQYQQPPPAMSQSHHPRLNMHGQDIATCANNLRYFGPAAALRSPLSNHAQRQLPGSSPDLISTAMAADCWRSSEPDKGQAGPWGCCQADAYDPCLQCRPEQYGSLDIPSAEPVGRSPDLSKSPAHNPLLENAQSSEKTEENEFSGCRSESSLGTSHLGTPPALPRKTRPLQKSGDDSSEEEEGEVDSEVEFPRRQRPHRCISSCQSYSTFSSENFSVSDGEEGNTSDHSNSPDELADKLEDRLAEKLDDLLSQTPEIPIDISSHSDGLSDKECAVRRVKTQMSLGKLCVEERGYENPMQFEESDCDSSDGECSDATVRTNKHYSSATW

SEQ ID NO: 800227 - protein, 128 aa, Homo sapiens
MANFQEHLSCSSSPHLPFSESKTFNGLQDELTAMGNHPSPKLLEDQQEKGMVRTELIESVHSPVTTTVLTSVSEDSRDQFENSVLQLREHDESETAVSQGNSNTVDGESTSGTEDIKIQFSRYLGSAI

SEQ ID NO: 800228 - protein, 571 aa, Homo sapiens
PSVPLCGHFKDVAIDVVKCVASPLETYFKSQAEWREEVKKHFEKIKSEGTCIHRLDEELIRRRREELRHALDIREHYERKLERANNLYMELSAIMLQLEMREKELIKREQAVEKKYPGTYKRHPVRPIIHPNAMEKLMKRKGVPHKSGMQTKRPDLLRSEGIPTTEVAPTASPLSGSPKMSTSSSKSRYRSKPRHRRGNSRGSHSDFAAILKNQPAQENSPHPTYLHQAQSQYPSLHHHNSLQQQYQQPPPAMSQSHHPRLNMHGQDIATCANNLRYFGPAAALRSPLSNHAQRQLPGSSPDLISTAMAADCWRSSEPDKGQAGPWGCCQADAYDPCLQCRPEQYGSLDIPSAEPVGRSPDLSKSPAHNPLLENAQSSEKTEENEFSGCRSESSLGTSHLGTPPALPRKTRPLQKSGDDSSEEEEGEVDSEVEFPRRQRPHRCISSCQSYSTFSSENFSVSDGEEGNTSDHSNSPDELADKLEDRLAEKLDDLLSQTPEIPIDISSHSDGLSDKECAVRRVKTQMSLGKLCVEERGYENPMQFEESDCDSSDGECSDATVRTNKHYSSATW

SEQ ID NO: 800229 - protein, 551 aa, Homo sapiens
MANFQEHLSCSSSPHLPFSESKTFNGLQDELTAMGNHPSPKLLEDQQEKGMVRTELIESVHSPVTTTVLTSVSEDSRDQFENSVLQLREHDESETAVSQGNSNTVDGESTSGTEDIKIQFSRSGSGSGGFLEGLFGCLRPVWNIIGKAYSTDYKLQQQDTWEVPFEEISELQWLGSGAQGAVFLGKFRAEEVAIKKVREQNETDIKHLRKLKHPNIIAFNVLVTHTDAVKISDFGTSKELSDKSTKMSFAGTVAWMAPEVIRNEPVSEKVDIWSFGVVLWELLTGEIPYKDVDSSAIIWGVGSNSLHLPVPSTCPDGFKILMKQTWQSKPRNRPSFRQTLMHLDIASADVLATPQETYFKSQAEWREEVKKHFEKIKSEGTCIHRLDEELIRRRREELRHALDIREHYERKLERANNLYMELSAIMLQLEMREKELIKREQAGGKNVSGDPKRNTGTHNNHIQSAGRHSWTREQGGCAPTTLGEGGPQRGQNGEHRKGLHKIKRVHQGYPVTGDKKEPHQQTEIKTRTTKEGTIRPRETRPQNTEENRKAT

SEQ ID NO: 800230 - protein, 55 aa, Homo sapiens
METWGDWRPRLGDPTVIRVFRQTLGAAPSEADEKKQKGEVSKSQLRAPAPGTPWG

SEQ ID NO: 800231 - protein, 393 aa, Homo sapiens
MAPPPPSPQLLLLAALARLLGPSEVMAGPAEEAGAHCPESLWPLPPQVSPRVTYTRVSPGQAEDVTFLYHPCAHPWLKLQLALLAYACMANPSLTPDFSLTQDRPLVLTAWGLALEMAWVEPAWAAHWLMRRRRRKQRKKKAWIYCESLSGPAPSEPTPGRGRLCRRGCVQALALAFALRSWRPPGTEVTSQGPRQPSSSGAKRRRLRAALGPQPTRSALRFPSASPGSLKAKQSMAGIPGRESNAPSVPTVSLLPGAPGGNASSRTEAQVPNGQGSPGGCVCSSQASPAPRAAAPPRAARGPTPRTEEAAWAAMALTFLLVLLTLATLCTRLHRNFRRGESIYWGPTADSQDTVAAVLKRRLLQPSRRVKRSRRRPLLPPTPDSGPEGESSE

SEQ ID NO: 800232 - protein, 368 aa, Homo sapiens
MAGPAEEAGAHCPESLWPLPPQVSPRVTYTRVSPGQAEDVTFLYHPCAHPWLKLQLALLAYACMANPSLTPDFSLTQDRPLVLTAWGLALEMAWVEPAWAAHWLMRRRRRKQRKKKAWIYCESLSGPAPSEPTPGRGRLCRRGCVQALALAFALRSWRPPGTEVTSQGPRQPSSSGAKRRRLRAALGPQPTRSALRFPSASPGSLKAKQSMAGIPGRESNAPSVPTVSLLPGAPGGNASSRTEAQVPNGQGSPGGCVCSSQASPAPRAAAPPRAARGPTPRTEEAAWAAMALTFLLVLLTLATLCTRLHRNFRRGESIYWGPTADSQDTVAAVLKRRLLQPSRRVKRSRRRPLLPPTPDSGPEGESSE

SEQ ID NO: 800233 - protein, 277 aa, Homo sapiens
MAWVEPAWAAHWLMRRRRRKQRKKKAWIYCESLSGPAPSEPTPGRGRLCRRGCVQALALAFALRSWRPPGTEVTSQGPRQPSSSGAKRRRLRAALGPQPTRSALRFPSASPGSLKAKQSMAGIPGRESNAPSVPTVSLLPGAPGGNASSRTEAQVPNGQGSPGGCVCSSQASPAPRAAAPPRAARGPTPRTEEAAWAAMALTFLLVLLTLATLCTRLHRNFRRGESIYWGPTADSQDTVAAVLKRRLLQPSRRVKRSRRRPLLPPTPDSGPEGESSE

SEQ ID NO: 800234 - protein, 368 aa, Homo sapiens; identical to SEQ ID NO: 800232

SEQ ID NO: 800235 - protein, 368 aa, Homo sapiens; identical to SEQ ID NO: 800232

SEQ ID NO: 800236 - protein, 368 aa, Homo sapiens; identical to SEQ ID NO: 800232

SEQ ID NO: 800237 - protein, 368 aa, Homo sapiens; identical to SEQ ID NO: 800232

SEQ ID NO: 800238 - protein, 393 aa, Homo sapiens; identical to SEQ ID NO: 800231

SEQ ID NO: 800239 - protein, 97 aa, Homo sapiens
GRRGRRGGAGAGGAGRARSLAGGAAGRRAGPGAAWNGASSAFAPTASPGSPREAPGSQRGDGWTGGGGGSPLSREPVASASAGVTKSDLHTSEPRAG

SEQ ID NO: 800240 - protein, 204 aa, Homo sapiens
MAGPAEEAGAHCPESLWPLPPQVSPRVTYTRVSPGQAEDVTFLYHPCAHPWLKLQLALLAYACMANPSLTPDFSLTQDRPLVLTAWGLALEMAWVEPAWAAHWLMRRRRRKQRKKKAWIYCESLSGPAPSEPTPGRGRLCRRGCVQALALAFALRSWRPPGTEVTSQGPRQPSSSGAKRRRLRAALGPQPTRSAWDGHRGGRGR

SEQ ID NO: 800241 - protein, 368 aa, Homo sapiens; identical to SEQ ID NO: 800232

SEQ ID NO: 800242 - protein, 393 aa, Homo sapiens; identical to SEQ ID NO: 800231

SEQ ID NO: 800243 - protein, 537 aa, Homo sapiens
METWGDWRPRLGDPTVIRVFRQTLGAAPSEADEKKQKGELWDRHLDPRSLPTFPPQILEREPEPAPRCGAGRPAHLLGVTPTNLKRVCQGSVPVSPAWATRSTGIPFPALHSAPRSHPGAAAVQLLYRLQGPAETNPRTRKGAPRLPSEPCALTRFLHLTFPASGLRRVMAGPAEEAGAHCPESLWPLPPQVSPRVTYTRVSPGQAEDVTFLYHPCAHPWLKLQLALLAYACMANPSLTPDFSLTQDRPLVLTAWGLALEMAWVEPAWAAHWLMRRRRRKQRKKKAWIYCESLSGPAPSEPTPGRGRLCRRGCVQALALAFALRSWRPPGTEVTSQGPRQPSSSGAKRRRLRAALGPQPTRSALRFPSASPGSLKAKQSMAGIPGRESNAPSVPTVSLLPGAPGGNASSRTEAQVPNGQGSPGGCVCSSQASPAPRAAAPPRAARGPTPRTEEAAWAAMALTFLLVLLTLATLCTRLHRNFRRGESIYWGPTADSQDTVAAVLKRRLLQPSRRVKRSRRRPLLPPTPDSGPEGESSE

SEQ ID NO: 800244 - protein, 386 aa, Homo sapiens
MAPPPPSPQLLLLAALARLLGPSEVMAGPAEEAGAHCPESLWPLPPQVSPRVTYTRVSPGQAEDVTFLYHPCAHPWLKLQLALLAYACMANPSLTPDFSLTQDRPLVLTAWGLALEMAWVEPAWAAHWLMRRRRRKQRKKKAWIYCESLSGPAPSEPTPGRGRLCRRGCVQALALAFALRSWRPPGTEVTSQGPRQPSSSGAKRRRLRAALGPQPTRSALRFPSASPGSLKAKQSMAGIPGRESNAPSVPTVSLLPGAPGGNASSRTEAQVPNGQGSPGGCVCSSQASPAPRAAAPPRAARGPTPRTEEAAWAAMALTFLLVLLTLATLCTRLHRNFRRGESIYWGPTADSQDTVAGEEFPPYPTRGPRPTSRRPPPPVASLPSRP

SEQ ID NO: 800245 - protein, 393 aa, Homo sapiens; identical to SEQ ID NO: 800231

SEQ ID NO: 800246 - protein, 378 aa, Homo sapiens
MAPPPPSPQLLLLAALARLLGPSEVMAGPAEEAGAHCPESLWPLPPQVSPRVTYTRVSPGQAEDVTFLYHPCAHPWLKLQLALLAYACMANPSLTPDFSLTQDRPLVLTAWGLALEMAWVEPAWAAHWLMRRRRRKQRKKKAWIYCESLSGPAPSEPTPGRGRLCRRGCVQALALAFALRSWRPPGTEVTSQGPRQPSSSGAKRRRLRAALGPQPTRSALRFPSASPGSLKAKQSMAGIPGRESNAPSVPTVSLLPGAPGGNASSRTEAQVPNGQGSPGGCVCSSQASPAPRAAAPPRAARGPTPRTEEAAWAAMALTFLLVLLTLATLCTRLHRNFRRGESIYWPRPLPRGPRAGRSLVAMARHWPSTAGAFLLVGC

SEQ ID NO: 800247 - protein, 426 aa, Homo sapiens
MAVETRAELVGKRFLCVAVGDEARSERWESGRGWRSWRAGVIRAVSHRDSRNPDLAVYVEFDDLEWDKREWVKVYEDFSTFLVEYHLIWAKRNDPSQTQGSKSKQIQWPALTFKPLVERNIPSSVTAVEFLVDKQLDFLTEDSAFQPYQDDIDSLNPVLRDNPQLHEEVKVWVKEQKVQEIFMQGPYSLNGYRVRVYRQDSATQWFTGIITHHDLFTRTMIVMNDQVLEPQNVDPSMVQMTFLDDVVHSLLKGENIGITSRRRSRANQNVNAVHSHYTRAQANSPRPAMNSQAAVPKQNTHQQQQQRSIRPNKRKGSDSSIPDEEKMKEEKYDYISRGENPKGKNKHLMNKRRKPEEDEKKLNMKRLRTDNVSDFSESSDSENSNKRIIDNSSEQKPENELKNKNTSKINGEEGKPHNNEKAGEET

SEQ ID NO: 800248 - protein, 426 aa, Homo sapiens; identical to SEQ ID NO: 800247

SEQ ID NO: 800249 - protein, 426 aa, Homo sapiens; identical to SEQ ID NO: 800247

SEQ ID NO: 800250 - protein, 141 aa, Homo sapiens [sequence omitted]

SEQ ID NO: 800251 - protein, 409 aa, Homo sapiens
AAPHRTQPSSATAAAAVAAAVAAARPSAVAGSSAATWTKVYVEFDDLEWDKREWVKVYEDFSTFLVEYHLIWAKRNDPSQTQGSKSKQIQWPALTFKPLVERNIPSSVTAVEFLVDKQLDFLTEDSAFQPYQDDIDSLNPVLRDNPQLHEEVKVWVKEQKVQEIFMQGPYSLNGYRVRVYRQDSATQWFTGIITHHDLFTRTMIVMNDQVLEPQNVDPSMVQMTFLDDVVHSLLKGENIGITSRRRSRANQNVNAVHSHYTRAQANSPRPAMNSQAAVPKQNTHQQQQQRSIRPNKRKGSDSSIPDEEKMKEEKYDYISRGENPKGKNKHLMNKRRKPEEDEKKLNMKRLRTDNVSDFSESSDSENSNKRIIDNSSEQKPENELKNKNTSKINGEEGKPHNNEKAGEET

SEQ ID NO: 800252 - protein, 426 aa, Homo sapiens; identical to SEQ ID NO: 800247

SEQ ID NO: 800253 - protein, 130 aa, Homo sapiens [sequence omitted]

SEQ ID NO: 800254 - protein, 130 aa, Homo sapiens [sequence omitted]

SEQ ID NO: 800255 - protein, 347 aa, Homo sapiens
RHEGVWCGHSKAKAASLACRDAKEAGLVRPLQGQSEKILLRTRNRQPMEPPMEPSGGEQEPGAVRFLDLPWEDVLLPHVLNRVPLRQLLRLQRVSRAFRSLVQLHLAGLRRFDAAQVGPQIPRAALARLLRDAEGLQELALAPCHEWLSDEDLVPVLARNPQLRSVALGGCGQLSRRALGALAEGCPRLQRLSLAHCDWVDGLALRGLADRCPALEELDLTACRQLKDEAIVYLAQRRGAGLRSLSLAVNANVGDAAVQELARNCPELHHLDLTGCLRVGSDGVRTLAEYCPVLRSLRVRHCHHVAESSLSRLRKRGVDIDVEPPLHQALVLLQDMAGFAPFVNLQV

SEQ ID NO: 800256 - protein, 70 aa, Homo sapiens
RPRQAHGMGVDWTRPLNPGDHQLWKGDLGNTVLNPPGVLSLGPRRSNPDHPPRMQQGDVKSDFRKNFLAA

SEQ ID NO: 800257 - protein, 300 aa, Homo sapiens
MEPPMEPSGGEQEPGAVRFLDLPWEDVLLPHVLNRVPLRQLLRLQRVSRAFRSLVQLHLAGLRRFDAAQVGPQIPRAALARLLRDAEGLQELALAPCHEWLSDEDLVPVLARNPQLRSVALGGCGQLSRRALGALAEGCPRLQRLSLAHCDWVDGLALRGLADRCPALEELDLTACRQLKDEAIVYLAQRRGAGLRSLSLAVNANVGDAAVQELARNCPELHHLDLTGCLRVGSDGVRTLAEYCPVLRSLRVRHCHHVAESSLSRLRKRGVDIDVEPPLHQALVLLQDMAGFAPFVNLQV

SEQ ID NO: 800258 - protein, 300 aa, Homo sapiens; identical to SEQ ID NO: 800257

SEQ ID NO: 800259 - protein, 300 aa, Homo sapiens; identical to SEQ ID NO: 800257

SEQ ID NO: 800260 - protein, 387 aa, Homo sapiens
MRSGFRCDEPAEAVAPERQTVSGAVALASFTSPHTHPVDDGGRHYSWGSPKRILGLGPGDAAKEAGLVRPLQGQSEKILLRTRNRQPMEPPMEPSGGEQEPGAVRFLDLPWEDVLLPHVLNRVPLRQLLRLQRVSRAFRSLVQLHLAGLRRFDAAQVGPQIPRAALARLLRDAEGLQELALAPCHEWLSDEDLVPVLARNPQLRSVALGGCGQLSRRALGALAEGCPRLQRLSLAHCDWVDGLALRGLADRCPALEELDLTACRQLKDEAIVYLAQRRGAGLRSLSLAVNANVGDAAVQELARNCPELHHLDLTGCLRVGSDGVRTLAEYCPVLRSLRVRHCHHVAESSLSRLRKRGVDIDVEPPLHQALVLLQDMAGFAPFVNLQV

SEQ ID NO: 800261 - protein, 266 aa, Homo sapiens
MEPPMEPSGGEQEPGAVRFLDLPWEDVLLPHVLNRVPLRQLLRLQRVSRAFRSLVQLHLAGLRRFDAAQVGPQIPRAALARLLRDAEGLQELALAPCHEWLSDEDLVPVLARNPQLRSVALGGCGQLSRRALGALAEGCPRLQRLSLAHCDWVDGLALRGLADRCPALEELDLTACRQLKDEAIVYLAQRRGAGLRSLSLAVNANVGDAAVQELARNCPELHHLDLTGCLRVGSDGVRCLGLIGREEGSHLASAGMGRAVVVKRPD

SEQ ID NO: 800262 - protein, 179 aa, Homo sapiens
PRGKRNLREGSRAGAGSGGRSWELGRRNITEADSQVIVAPGRQCQRPFTRRFLDLPWEDVLLPHVLNRVPLRQLLRLQRVSRAFRSLVQLHLAGLRRFDAAQVSRGLKPRPCLGTAPPLAQPPAPQYALLDPLGPPGLPGRDPRTKGQILGSDSEGKWGLSWESRRLPEKNSGQGCIGG

SEQ ID NO: 800263 - protein, 300 aa, Homo sapiens; identical to SEQ ID NO: 800257

SEQ ID NO: 800264 - protein, 300 aa, Homo sapiens; identical to SEQ ID NO: 800257

SEQ ID NO: 800265 - protein, 300 aa, Homo sapiens; identical to SEQ ID NO: 800257

SEQ ID NO: 800266 - protein, 333 aa, Homo sapiens
PRGKRNLREGSRAGAGSGGRSWELGRRNITEADSQVIVAPGRQCQRPFTRRFLDLPWEDVLLPHVLNRVPLRQLLRLQRVSRAFRSLVQLHLAGLRRFDAAQVGPQIPRAALARLLRDAEGLQELALAPCHEWLSDEDLVPVLARNPQLRSVALGGCGQLSRRALGALAEGCPRLQRLSLAHCDWVDGLALRGLADRCPALEELDLTACRQLKDEAIVYLAQRRGAGLRSLSLAVNANVGDAAVQELARNCPELHHLDLTGCLRVGSDGVRTLAEYCPVLRSLRVRHCHHVAESSLSRLRKRGVDIDVEPPLHQALVLLQDMAGFAPFVNLQV

SEQ ID NO: 800267 - protein, 266 aa, Homo sapiens; identical to SEQ ID NO: 800261

SEQ ID NO: 800268 - protein, 203 aa, Homo sapiens
FGHRRRLPGLSMSPRRTLPRPLSLCLSLCLCLCLAAALGSAQSGSCRDKKNCKVVFSQQELRKRLTPLQYHVTQEKGTESAFEGEYTHHKDPGIYKCVVCGTPLFKSETKFDSGSGWPSFHDVINSEAITFTDDFSYGMHRVETSCSQCGAHLGHIFDDGPRPTGKRYCINSAALSFTPADSSGTAEGGSGVASPAQADKAEL

SEQ ID NO: 800269 - protein, 174 aa, Homo sapiens
FGHRRRLPGLSMSPRRTLPRPLSLCLSLCLCLCLAAALGSAQSGSCRDKKNCKVVFSQQELRKRLTPLQYHVTQEKGTESAFEGEYTHHKDPGIYKCVVCGTPLFKFLCLLVPGWPSFHDVINSEAITFTDDFSYGMHRVETSCSQQEGPHQMLPLNLGFPGLQNCEPINFYSF

SEQ ID NO: 800270 - protein, 361 aa, Homo sapiens
MSTAREQPIFSTRAHVFQIDPATKRNWIPAGKHALTVSYFYDATRNVYRIISIGGAKAIINSTVTPNMTFTKTSQKFGQWADSRANTVYGLGFASEQHLTQFAEKFQEVKEAARLAREKSQDGGELTSPALGLASHQVPPSPLVSANGPGEEKLFRSQSADAPGPTERERLKKMLSEGSVGEVQWEAEFFALQDSNNKLAGALREANAAAAQWRQQLEAQRAEAERLRQRVAELEAQAASEVTPTGEKEGLGQGQSLEQLEALVQTKDQEIQTLKSQTGGPREALEAAEREETQQKVQDLETRNAELEHQLRAMERSLEEARAERERARAEVGRAAQLLDVRLFELSELREGLARLAEAAP

SEQ ID NO: 800271 - protein, 361 aa, Homo sapiens; identical to SEQ ID NO: 800270

SEQ ID NO: 800272 - protein, 361 aa, Homo sapiens; identical to SEQ ID NO: 800270

SEQ ID NO: 800273 - protein, 294 aa, Homo sapiens [sequence omitted]

SEQ ID NO: 800274 - protein, 128 aa, Homo sapiens
MSTAREQPIFSTRAHVFQIDPATKRNWIPAGKHALTVSYFYDATRNVYRIISIGGAKAIINSTVTPNMTFTKTSQKFGQWADSRANTVYGLGFASEQHLTQFAEKFQEVKEAARLAREKCSFRGDPHR

SEQ ID NO: 800275 - protein, 397 aa, Homo sapiens
DEEKKREKKNKAKGEKEKRETRQEEKRRQRRNKQGDILYRIECLVLCVGYEGVEGGAEGAGPGARERAGRPAARSQRRGGRTRLAPGHSRGADLAGRPDPARGGQNQVALCNLSGVGPLKRLGQSKLDQWFPQAQGGSPNFLSQHRAHFCSQILTPKATRRQRGSAERRYKTGLVGSVRGPPGGATAQQGGDAPEGFFRHWAEEPANPNKGCGRAPCGREGQGRREAPSGAATAGLGGRFQRVKERPERFCGARGWLTLGRASAASFKRVEPPTGVNKGRALGARAPVRGNPAWEALGVQPQGPREIQTLKSQTGGPREALEAAEREETQQKVQDLETRNAELEHQLRAMERSLEEARAERERARAEVGRAAQLLDVRLFELSELREGLARLAEAAP

SEQ ID NO: 800276 - protein, 250 aa, Homo sapiens
MSTAREQPIFSTRAHVFQIDPATKRNWIPAGKHALTVSYFYDATRNVYRIISIGGAKAIINSTVTPNMTFTKTSQKFGQWADSRANTVYGLGFASEQHLTQFAEKFQEVKEAARLAREKSQDGGELTSPALGLASHQVPPSPLVSANGPGEEKLFRSQSADAPGPTERERWFSMNDSGLGCGPGCRRHSWAHSSWKGTGGSQLSPGWAGPGWAGVGPSRLWLLAALGLFLSFSLCRISRSPDYISKREKK

SEQ ID NO: 800277 - protein, 361 aa, Homo sapiens; identical to SEQ ID NO: 800270

SEQ ID NO: 800278 - protein, 361 aa, Homo sapiens; identical to SEQ ID NO: 800270

SEQ ID NO: 800279 - protein, 325 aa, Homo sapiens [sequence omitted]

SEQ ID NO: 800280 - protein, 142 aa, Homo sapiens
MSTAREQPIFSTRAHVFQIDPATKRNWIPAGKHALTVSYFYDATRNVYRIISIGGAKAIINSTVTPNMTFTKTSQKFGQWADSRANTVYGLGFASEQHLTQFAEKFQEVKEAARLAREKCWGGPQSALVVGSFGAVFELLIV

SEQ ID NO: 800281 - protein, 115 aa, Homo sapiens
RPLWGVHFIPGVLGALGWLWAEEGHEGGQTLDASGRTGDLLGPPTLPTLSWQDLETRNAELEHQLRAMERSLEEARAERERARAEVGRAAQLLDVRLFELSELREGLARLAEAAP

SEQ ID NO: 800282 - protein, 101 aa, Homo sapiens
PYLFEQVAKDLAKKEAEQWYLDTLKQAGLEEDFVRNKGQGTRAVQEKETKIKDFPRFQETTKLSIRDPEQGLEGSLEQPASPRKVLEELSHQSPENLVSLA

SEQ ID NO: 800283 - protein, 97 aa, Homo sapiens
PYLFEQVAKDLAKKEAEQWYLDTLKQAGLEEDFVRNKGQGTRAVQEKETKIKDFPRFQETTKLSIRDPEQGLEGSLEQPASPRCVFFGGDRVTITWA

SEQ ID NO: 800284 - protein, 101 aa, Homo sapiens; identical to SEQ ID NO: 800282

SEQ ID NO: 800285 - protein, 919 aa, Homo sapiens
LVPTLFNLLSRCLEPLPQEQGNMEYTKQLILSCLLNICQKLSPDGGKIPKDILDEEKFNVELIVQCIRLSEMPQTHHHALLLLGTVAGIFPDKVLHNIMSIFTFMGANVMRLDDTYSFQVINKTVKMVIPALIQSDSGDSIEVSRNVEEIVVKIISVFVDALPHVPEHRRLPILVQLVDTLGAEKFLWILLILLFEQYVTKTVLAAAYGEKDAILEADTEFWFSVCCEFSVQHQIQSLMNILQYLLKLPEEKEETIPKAVSFNKSESQEEMLQVFNVETHTSKQLRHFKFLSVSFMSQLLSSNNFLKKVVESGGPEILKGLEERLLETVLGYISAVAQSMERNADKLTVKFWRALLSKAYDLLDKVNALLPTETFIPVIRGLVGNPLPSVRRKALDLLNNKLQQNISWKKTIVTRFLKLVPDLLAIVQRKKKEGEEEQAINRQTALYTLKLLCKNFGAENPDPFVPVLSTAVKLIAPERKEEKNVLGSALLCIAEVTSTLEALAIPQLPSLMPSLLTTMKNTSELVSSEVYLLSALAALQKVVETLPHFISPYLEGILSQVIHLEKITSEMGSASQANIRLTSLKKTLATTLAPRVLLPAIKKTYKQIEKNWKNHMGPFMSILQEHIGVMKKEELTSHQSQLTAFFLEALDFRAQHSENDLEEVGKTENCIIDCLVAMVVKLSEVTFRPLFFKLFDWAKTEDAPKDRLLTFYNLADCIAEKLKGLFTLFAGHLVKPFADTLDQVNISKTDEAFFDSENDPEKCCLLLQFILNCLYKIFLFDTQHFISKERAGALMMPLVDQLENRLGGEEKFQERVTKHLIPCIAQFSVAMADDSLWKPLNYQILLKTRDSSPKVRFAALITVLALAEKLKENYIVLLPESIPFLAELMEDECEEVEHQCQKTIQQLETVLGEPLQSYF

SEQ ID NO: 800286 - protein, 899 aa, Homo sapiens
LVPTLFNLLSRCLEPLPQEQGNMEYTKQLILSCLLNICQKLSPDGGKIPKDILDEEKFNVELIVQCIRLSEMPQTHHHALLLLGTVAGIFPDKVLHNIMSIFTFMGANVMRLDDTYSFQVINKTVKMVIPALIQSDSGDSIEVSRNVEEIVVKIISVFVDALPHVPEHRRLPILVQLVDTLGAEKFLWILLILLFEQYVTKTVLAAAYGEKDAILEADTEFWFSVCCEFSVQHQIQSLMNILQYLLKLPEEKEETIPKAVSFNKSESQEEMLQVFNVETHTSKQLRHFKFLSVSFMSQLLSSNNFLKKVVESGGPEILKGLEERLLETVLGYISAVAQSMERNADKLTVKFWRALLSKAYDLLDKVNALLPTETFIPVIRGLVGNPLPSVRRKALDLLNNKLQQNISWKKTIVTRFLKLVPDLLAIVQRKKKEGEEEQAINRQTALYTLKLLCKNFGAENPDPFVPVLSTAVKLIAPERKEEKNVLGSALLCIAEVTSTLEALAIPQLPSLMPSLLTTMKNTSELVSSEVYLLSALAALQKVVETLPHFISPYLEGILSQVIHLEKITSEMGSASQANIRLTSLKKTLATTLAPRVLLPAIKKTYKQIEKNWKNHMGPFMSILQEHIGVMKKEELTSHQSQLTAFFLEALDFRAQHSENDLEEVGKTENCIIDCLVAMVVKLSEVTFRPLFFKLFDWAKTEDAPKDRLLTFYNLADCIAEKLKGLFTLFAGHLVKPFADTLDQVNISKTDEAFFDSENDPEKCCLLLQFILNCLYKIFLFDTQHFISKERAGALMMPLVDQLENRLGGEEKFQERVTKHLIPCIAQFSVAMADDSLWKPLNYQILLKTRDSSPKVRFAALITVLALAEKLKENYIVLLPESIPFLAELMEGNSQTIPNH

SEQ ID NO: 800287 - protein, 424 aa, Homo sapiens
LVPTLFNLLSRCLEPLPQEQGNMEYTKQLILSCLLNICQKLSPDGGKIPKDILDEEKFNVELIVQCIRLSEMPQTHHHALLLLGTVAGIFPDKVLHNIMSIFTFMGANVMRLDDTYSFQVINKTVKMVIPALIQSDSGDSIEVSRNVEEIVVKIISVFVDALPHVPEHRRLPILVQLVDTLGAEKFLWILLILLFEQYVTKTVLAAAYGEKDAILEADTEFWFSVCCEFSVQHQIQSLMNILQYLLKLPEEKEETIPKAVSFNKSESQEEMLQVFNVETHTSKQLRHFKFLSVSFMSQLLSSNNFLKKVVESGGPEILKGLEERLLETVLGYISAVAQSMERNADKLTVKFWRALLSKAYDLLDKVNALLPTETFIPVIRGLVGNPLPSVRRKALDLLNNKLQQNISWKKTIVTRFLKLVPDYF

SEQ ID NO: 800288 - protein, 81 aa, Homo sapiens
  misc_feature (3)..(3): Xaa can be any naturally occurring amino acid
  misc_feature (8)..(8): Xaa can be any naturally occurring amino acid
  misc_feature (29)..(29): Xaa can be any naturally occurring amino acid
  misc_feature (33)..(33): Xaa can be any naturally occurring amino acid
  misc_feature (38)..(38): Xaa can be any naturally occurring amino acid
QKXPEVLXSVFKPPGIPAFSLWGRKPGPXLGVXTLLTXESQELSRYLNKAFHIGPRKKNSHPLLKPNVISHTGLALTFYSV

SEQ ID NO: 800289 - protein, 447 aa, Homo sapiens
FFQHFIECIFHFNNYEKHEKYNKFPQSEREKRLFSLKGKSNKERRMKIYKFLLEHFTDEQRFNITSKICLSILACFADGILPLDLDASELLSDTFEVLSSKEIKLLAMRSKPDKDLLMEEDDMALANVVMQEAQKKLISQVQKRNFIENIIPIIISLKTVLEKNKIPALRELMHYLREVMQDYRDELKDFFAVDKQLASELEYDMKKYQEQLVQEQELAKHADVAGTAGGAEVAPVAQVALCLETVPVPAGQENPAMSPAVSQPCTPRASAGHVAVSSPTPETGPLQRLLPKARPMSLSTIAILNSVKKAVESKSRHRSRSLGVLPFTLNSGSPEKTCSQVSSYSLEQESNGEIEHVTKRAISTPEKSISDVTFGAGVSYIGTPRTPSSAKEKIEGRSQGNDILCLSLPDKPPPQPQQWNVRSPARNKDTPACSRRSLRKTPLKTAN

SEQ ID NO: 800290 - protein, 392 aa, Homo sapiens
FFQHFIECIFHFNNYEKHEKYNKFPQSEREKRLFSLKGKSNKERRMKIYKFLLEHFTDEQRFNITSKICLSILACFADGILPLDLDASELLSDTFEVLSSKEIKLLAMRSKPDKDLLMEEDDMALANVVMQEAQKKLISQVQKRNFIENIIPIIISLKTVLEKNKIPALRELMHYLREVMQDYRDELKDFFAVDKQLASELEYDMKKYQEQLVQEQELAKHADVAGTAGGAEVAPVAQVALCLETVPVPAGQENPAMSPAVSQPCTPRASAGHVAVSSPTPETGPLQRLLPKARPMSLSTIAILNSVKKAVESKSRHRSRSLGVLPFTLNSGSPEKTCSQVSSYSLEQESNGEIEHVTKRAISTPEMSLHSVSQTPQWPAEQTMPLRHREHQ

SEQ ID NO: 800291 - protein, 325 aa, Homo sapiens
ELQIEHIPEEAQKKLISQVQKRNFIENIIPIIISLKTVLEKNKIPALRELMHYLREVMQDYRDELKDFFAVDKQLASELEYDMKKYQEQLVQEQELAKHADVAGTAGGAEVAPVAQVALCLETVPVPAGQENPAMSPAVSQPCTPRASAGHVAVSSPTPETGPLQRLLPKARPMSLSTIAILNSVKKAVESKSRHRSRSLGVLPFTLNSGSPEKTCSQVSSYSLEQESNGEIEHVTKRAISTPEKSISDVTFGAGVSYIGTPRTPSSAKEKIEGRSQGNDILCLSLPDKPPPQPQQWNVRSPARNKDTPACSRRSLRKTPLKTAN

SEQ ID NO: 800292 - protein, 368 aa, Homo sapiens
FFQHFIECIFHFNNYEKHEKYNKFPQSEREKRLFSLKGKSNKERRMKIYKFLLEHFTDEQRFNITSKICLSILACFADGILPLDLDASELLSDTFEVLSSKEIKLLAMRSKPDKDLLMEEDDMALANVVMQEAQKKLISQVQKRNFIENIIPIIISLKTVLEKNKIPALRELMHYLREVMQDYRDELKDFFAVDKQLASELEYDMKKYQEQLVQEQELAKHADVAGTAGGAEVAPVAQVALCLETVPVPAGQENPAMSPAVSQPCTPRASAGHVAVSSPTPETGPLQRLLPKARPMSLSTIAILNSVKKAVESKSRHRSRSLGVLPFTLNSGSPEKTCSQVSSYSLEQESNGEIEHVTKRAISTPESE

SEQ ID NO: 800293 - protein, 403 aa, Homo sapiens
MAPQLWELHLLSGPEHFSEAHVFLSLCLSACFADGILPLDLDASELLSDTFEVLSSKEIKLLAMRSKPDKDLLMEEDDMALANVVMQEAQKKLISQVQKRNFIENIIPIIISLKTVLEKNKIPALRELMHYLREVMQDYRDELKDFFAVDKQLASELEYDMKKYQEQLVQEQELAKHADVAGTAGGAEVAPVAQVALCLETVPVPAGQENPAMSPAVSQPCTPRASAGHVAVSSPTPETGPLQRLLPKARPMSLSTIAILNSVKKAVESKSRHRSRSLGVLPFTLNSGSPEKTCSQVSSYSLEQESNGEIEHVTKRAISTPEKSISDVTFGAGVSYIGTPRTPSSAKEKIEGRSQGNDILCLSLPDKPPPQPQQWNVRSPARNKDTPACSRRSLRKTPLKTAN

SEQ ID NO: 800294 - protein, 415 aa, Homo sapiens
FFQHFIECIFHFNNYEKHEKYNKFPQSEREKRLFSLKGKSNKERRMKIYKFLLEHFTDEQRFNITSKICLSILACFADGILPLDLDASELLSDTFEVLSSKEIKLLAMRSKPDKDLLMEEDDMALANVVMQEAQKKLISQVQKRNFIENIIPIIISLKTVLEKNKIPALRELMHYLREVMQDYRDELKDFFAVDKQLASELEYDMKKYQEQLVQEQELAKHADVAGTAGGAEVAPVAQVALCLETVPVPAGQENPAMSPAVSQPCTPRASAGHVAVSSPTPETGPLQRLLPKARPMSLSTIAILNSVKKAVESKSRHRSRSLGVLPFTLNSGSPEKTCSQVSSYSLEQESNGEIEHVTKRAISTPEKSISDVTFGAGVSYIGTPRTPSSAKGAQSWDATWKTPVSLQCPPESCAG

SEQ ID NO: 800295 - protein, 313 aa, Homo sapiens
TVTATIKIPKWSGNTYGQLCRETVCFSVEPVKKIFNYMIHVNRNIMDFKLFLVFVAGVFLFFYARTLSQSPTFYYSSGTVLGVLMTLVFVLLLVKRFIPKYSTFWALMVGCWFASVYIVCQLMEDLKWLWYENRIYVLGYVLIVGFFSFVVCYKHGPLADDRSRSLLMWMLRLLSLVLVYAGVAVPQFAYAAIILLMSSWSLHYPLRACSYMRWKMEQWFTSKELVVKYLTEDEYREQADAETNSALEELRRACRKPDFPSWLVVSRLHTPSKFADFVLGGSHLSPEEISLHEEQYGLGGAFLEEQLFNPSTA

SEQ ID NO: 800296 - protein, 276 aa, Homo sapiens
MIHVNRNIMDFKLFLVFVAGVFLFFYARTLSQSPTFYYSSGTVLGVLMTLVFVLLLVKRFIPKYSTFWALMVGCWFASVYIVCQLMEDLKWLWYENRIYVLGYVLIVGFFSFVVCYKHGPLADDRSRSLLMWMLRLLSLVLVYAGVAVPQFAYAAIILLMSSWSLHYPLRACSYMRWKMEQWFTSKELVVKYLTEDEYREQADAETNSALEELRRACRKPDFPSWLVVSRLHTPSKFADFVLGGSHLSPEEISLHEEQYGLGGAFLEEQLFNPSTA

SEQ ID NO: 800297 - protein, 236 aa, Homo sapiens
MIHVNRNIMDFKLFLVFVAGVFLFFYARTLSQSPTFYYSSGTVLGVLMTLVFVLLLVKRFIPKYSTFWALMVGCWFASVYIVCQLMEDLKWLWYENRIYVLGYVLIVGFFSFVVCYKHGPLADDRSRSLLMWMLRLLSLVLVYAGVAVPQFAYAAIILLMSSWSLHYPLRACSYMRWKMEQWFTSKELVVKYLTEDEYREQADAETNSALEELRRACRKPDFPSWLVVSRLHTPSN

SEQ ID NO: 800298 - protein, 252 aa, Homo sapiens
MPTQHLRTGLTRPHYTTPRARSCTGRVGSRVTPPGARPTSRAGWAATSGAAGHDPAHPPPARPIDSRVSCNPGTPTGDPGRRSAPIQAQRGATPVGPPVPRQLFRHSRAPRSRVRSDSSSSRGDRLQSGVRRCDTRPGAHPEGPQAAAPRVRAPVRPAEGVCRAGAGPASRGVAEVGGSSARPGPHARASPGLPPPLTGAGARLPDLQQQDDDGRQVGQVPSQPENVHGGGGGGGRRSAAAPGLGGSGGGGP

SEQ ID NO: 800299 - protein, 103 aa, Homo sapiens
FSKDGVFTMLARMVADVHRTLVYGGIFLYPANQKSPKGKLRLLYECNPVAYIIEQAGGLATTGTQPVLDVKPEAIHQRVPLILGSPEDVQEYLTCVQKNQAGS

SEQ ID NO: 800300 - protein, 339 aa, Homo sapiens
MTDRSPFETDMLTLTRYVMEKGRQAKGTGELTQLLNSMLTAIKAISSAVRKAGLAHLYGIAGSVNVTGDEVKKLDVLSNSLVINMLQSSYSTCVLVSEENKDAIITAKEKRGKYVVCFDPLDGSSNIDCLASIGTIFAIYRKTSEDEPSEKDALQCGRNIVAAGYALYGSATLVALSTGQGVDLFMLDPALGEFVLVEKDVKIKKKGKIYSLNEGYAKYFDAATTEYVQKKKFPEDGSAPYGARYVGSMVADVHRTLVYGGIFLYPANQKSPKGKLRLLYECNPVAYIIEQAGGLATTGTQPVLDVKPEAIHQRVPLILGSPEDVQEYLTCVQKNQAGS

SEQ ID NO: 800301 - protein, 163 aa, Homo sapiens
MPAPRHLTQRAPGQRFLGKSRRLQAVVPGIPPWCRRERGEPGRGGCGRWRRPGTGPVPGRGDPPSRAFRRSGQVGGGEGGGRGSRSKTELRLRVLRQQLLEDTVETQGGFIWVCKHPGPRLRFGRATPLLPRLARPHSARLVTARATCPRTLLRDGQKTWDSR

SEQ ID NO: 800302 - protein, 247 aa, Homo sapiens
MEFPKMLTRKIKLWDINAHITCRLCSGYLIDATTVTECLHTFCRSCLVKYLEENNTCPTCRIVIHQSHPLQYIGHDRTMQDIVYKLVPGLQEAEMRKQREFYHKLGMEVPGDIKGETCSAKQHLDSHRNGETKADDSSNKEAAEEKPEEDNDYHRSDEQVSICLECNSSKLRGLKRKWIRCSAQATVLHLKKFIAKKLNLSSFNELDILCNEEILGKDHTLKFVVVTRWRFKKAPLLLHYRPKMDLL

SEQ ID NO: 800303 - protein, 247 aa, Homo sapiens; identical to SEQ ID NO: 800302

SEQ ID NO: 800304 - protein, 247 aa, Homo sapiens; identical to SEQ ID NO: 800302

SEQ ID NO: 800305 - protein, 169 aa, Homo sapiens [sequence omitted]

SEQ ID NO: 800306 - protein, 180 aa, Homo sapiens
AYSTVFCHDRTMQDIVYKLVPGLQEAEMRKQREFYHKLGMEVPGDIKGETCSAKQHLDSHRNGETKADDSSNKEAAEEKPEEDNDYHRSDEQVSICLECNSSKLRGLKRKWIRCSAQATVLHLKKFIAKKLNLSSFNELDILCNEEILGKDHTLKFVVVTRWRFKKAPLLLHYRPKMDLL

SEQ ID NO: 800307 - protein, 247 aa, Homo sapiens; identical to SEQ ID NO: 800302

SEQ ID NO: 800308 - protein, 70 aa, Homo sapiens
TGVGELWGPHIFSLWRVTSPSRPFSSPPTGLQPCRESDAPGNTVLSHLLTRAPSACFPGLENLNSLQFSL

SEQ ID NO: 800309 - protein, 247 aa, Homo sapiens; identical to SEQ ID NO: 800302

SEQ ID NO: 800310 - protein, 247 aa, Homo sapiens; identical to SEQ ID NO: 800302

SEQ ID NO: 800311 - protein, 110 aa, Homo sapiens
MEFPKMLTRKIKLWDINAHITCRLCSGYLIDATTVTECLHTFCRSCLVKYLEENNTCPTCRIVIHQSHPLQYIGHDRTMQDIVYKLVPGLQEASACFPGLENLNSLQFSL

SEQ ID NO: 800312 - protein, 247 aa, Homo sapiens; identical to SEQ ID NO: 800302

SEQ ID NO: 800313 - protein, 242 aa, Homo sapiens
MLTRKIKLWDINAHITCRLCSGYLIDATTVTECLHTFCRSCLVKYLEENNTCPTCRIVIHQSHPLQYIGHDRTMQDIVYKLVPGLQEAEMRKQREFYHKLGMEVPGDIKGETCSAKQHLDSHRNGETKADDSSNKEAAEEKPEEDNDYHRSDEQVSICLECNSSKLRGLKRKWIRCSAQATVLHLKKFIAKKLNLSSFNELDILCNEEILGKDHTLKFVVVTRWRFKKAPLLLHYRPKMDLL

SEQ ID NO: 800314 - protein, 128 aa, Homo sapiens
MVRYVLFVLKGETKADDSSNKEAAEEKPEEDNDYHRSDEQVSICLECNSSKLRGLKRKWIRCSAQATVLHLKKFIAKKLNLSSFNELDILCNEEILGKDHTLKFVVVTRWRFKKAPLLLHYRPKMDLL

SEQ ID NO: 800315 - protein, 193 aa, Homo sapiens
SEDGADRTRDHPSTSLQYIGHDRTMQDIVYKLVPGLQEAEMRKQREFYHKLGMEVPGDIKGETCSAKQHLDSHRNGETKADDSSNKEAAEEKPEEDNDYHRSDEQVSICLECNSSKLRGLKRKWIRCSAQATVLHLKKFIAKKLNLSSFNELDILCNEEILGKDHTLKFVVVTRWRFKKAPLLLHYRPKMDLL

SEQ ID NO: 800316 - protein, 247 aa, Homo sapiens; identical to SEQ ID NO: 800302

SEQ ID NO: 800317 - protein, 247 aa, Homo sapiens; identical to SEQ ID NO: 800302

SEQ ID NO: 800318 - protein, 247 aa, Homo sapiens; identical to SEQ ID NO: 800302

SEQ ID NO: 800319 - protein, 247 aa, Homo sapiens; identical to SEQ ID NO: 800302

SEQ ID NO: 800320 - protein, 187 aa, Homo sapiens
MERSAFMELDAGSRLVMHLREWPALLVSSTGWTEFEQLTLDGHNLPSLVCVITGSVDLGVCLHMSSSGLDLPMKVVDMFGCCLPVCAVNFKCLHELVKHEENGLVFEDSEELAALQMLFSNFPDPAGKLNQFWKNLRESQQLRWDESWVQTVLPLVMDIQLLGQRLKPRDPCCPSRSFFSESQGKPF

SEQ ID NO: 800321 - protein, 207 aa, Homo sapiens
MKLGGTHSLFRACSEPEDAAMERSAFMELDAGSRLVMHLREWPALLVSSTGWTEFEQLTLDGHNLPSLVCVITGSVDLGVCLHMSSSGLDLPMKVVDMFGCCLPVCAVNFKCLHELVKHEENGLVFEDSEELAALQMLFSNFPDPAGKLNQFWKNLRESQQLRWDESWVQTVLPLVMDIQLLGQRLKPRDPCCPSRSFFSESQGKPF

SEQ ID NO: 800322 - protein, 111 aa, Homo sapiens
MDRWTDPQASTCGAEEAVRKGGGGKGLVQGVWLHRRHSSSHWHPAYKGKASKCAHQSLRVLLSGAHIQEQVCLSRVQARLCSVATGEEGPLLNTSLLLSLDQNKDLLARST

SEQ ID NO: 800323 - protein, 101 aa, Homo sapiens
SCLPGGWKEDILLCKGLSSKGSNFVQLLEILHLDHRTVELCHHLRDLCQSGCEGKTYTVCSGKGRQGSSPSSCQLNAAGKSLQSLHSIQRCLLSKNSAISL

SEQ ID NO: 800324 - protein, 86 aa, Homo sapiens
LFPRGSLKKREEQSDNPEEQDWPKTLSLIGGDILEEEPSSGLKFTGLPAVPLTGGRVWATETQPAEEREIWGKANASVMTLLFTNN

SEQ ID NO: 800325 - protein, 434 aa, Homo sapiens
MLRCLYHWHRPVLNRRWSRLCLLKQYLFTMKLQSPEFQSLFTEGLKSLTELFVKENHELRIAGGAVRDLLNGVKPQDIDFATTATPTQMKEMFQSAGIRMINNRGEKHGTITARLHEENFEITTLRIDVTTDGRHAEVEFTTDWQKDAERRDLTINSMFLGFDGTLFDYFNGYEDLKNKKVRFVGHAKQRIQEDYLRILRYFRFYGRIVDKPGDHDPETLEAIAENAKGLAGISGERIWVELKKILVGNHVNHLIHLIYDLDVAPYIGLPANASLEEFDKVSKNVDGFSPKPVTLLASLFKVQDDVTKLDLRLKIAKEEKNLGLFIVKNRKDLIKATDSSDPLKPYQDFIIDSREPDATTRVCELLKYQGEHCLLKEMQQWSIPPFPVSGHDIRKVGISSGKEIGALLQQLREQWKKSGYQMEKDELLSYIKKT

SEQ ID NO: 800326 - protein, 434 aa, Homo sapiens; identical to SEQ ID NO: 800325

SEQ ID NO: 800327 - protein, 356 aa, Homo sapiens
MLRCLYHWHRPVLNRRWSRLCLLKQYLFTMKLQSPEFQSLFTEGLKSLTELFVKENHELRIAGGAVRDLLNGVKPQDIDFATTATPTQMKEMFQSAGIRMINNRGEKHGTITARLHEENFEITTLRIDVTTDGRHAEVEFTTDWQKDAERRDLTINSMFLGFDGTLFDYFNGYEDLKNKKVRFVGHAKQRIQEDYLRILRYFRFYGRIVDKPGDHDPETLEAIAENAKGLAGISGERIWVELKKILVGNHVNHLIHLIYDLDVAPYIGLPANASLEEFDKVSKNVDGFSPKPVTLLASLFKVQDDVTKLDLRLKIAKEEKNLGLFIVKNRKDLIKATDSSDPLKPYQDFIIDVSIC

SEQ ID NO: 800328 - protein, 434 aa, Homo sapiens; identical to SEQ ID NO: 800325

SEQ ID NO: 800329 - protein, 434 aa, Homo sapiens; identical to SEQ ID NO: 800325

SEQ ID NO: 800330 - protein, 346 aa, Homo sapiens
MKEMFQSAGIRMINNRGEKHGTITARLHEENFEITTLRIDVTTDGRHAEVEFTTDWQKDAERRDLTINSMFLGFDGTLFDYFNGYEDLKNKKVRFVGHAKQRIQEDYLRILRYFRFYGRIVDKPGDHDPETLEAIAENAKGLAGISGERIWVELKKILVGNHVNHLIHLIYDLDVAPYIGLPANASLEEFDKVSKNVDGFSPKPVTLLASLFKVQDDVTKLDLRLKIAKEEKNLGLFIVKNRKDLIKATDSSDPLKPYQDFIIDSREPDATTRVCELLKYQGEHCLLKEMQQWSIPPFPVSGHDIRKVGISSGKEIGALLQQLREQWKKSGYQMEKDELLSYIKKT

SEQ ID NO: 800331 - protein, 165 aa, Homo sapiens
MLRCLYHWHRPVLNRRWSRLCLLKQYLFTMKLQSPEFQSLFTEGLKSLTELFVKENHELRIAGGAVRDLLNGVKPQDIDFATTATPTQMKEMFQSAGIRMINNRGEKHGTITARLHEENFEITTLRIDVTTDGRHAEVEFTTDWQKDAERRDLTINSMFLGNICR

SEQ ID NO: 800332 - protein, 163 aa, Homo sapiens
RTRGSTHASASLKCSTVVCVICLEKPKYRCPACRVPYCSVVCFRKHKEQCNPETRPVEKKIRSALPTKTVKPVENKDDDDSIADFLNSDEEEDRVSLQNLKNLGESATLRSLLLNPHLRQLMVNLDQGEDKAKLMRAYMQEPLFVEFADCCLGIVEPSQNEES

SEQ ID NO: 800333 - protein, 155 aa, Homo sapiens
MASLKCSTVVCVICLEKPKYRCPACRVPYCSVVCFRKHKEQCNPETRPVEKKIRSALPTKTVKPVENKDDDDSIADFLNSDEEEDRVSLQNLKNLGESATLRSLLLNPHLRQLMVNLDQGEDKAKLMRAYMQEPLFVEFADCCLGIVEPSQNEES

SEQ ID NO: 800334 - protein, 139 aa, Homo sapiens
MASLKCSTVVCVICLEKPKYRCPACRVPYCSVVCFRKHKEQCNPETRPVEKKIRSALPTKTVKPVENKGGRRQSFFAEFKEFRGICNIKKLIAQSTPQAVDGQPRSGRRQSKAHESLHARAFVCGVCRLLFRNCGAIPE

SEQ ID NO: 800335 - protein, 148 aa, Homo sapiens
MASLKCSTVVCVICLEKPKYRCPACRVPYCSVVCFRKHKEQCNPETRPVEKKIRSALPTKTVKPVENKDDDDSIADFLNSDEEEDRVSLQNLKNLDGLSSCHPGWSAAAQSRLTATSPSQIQAILMPQPPEQLGLQAPATTPNQFLYF

SEQ ID NO: 800336 - protein, 155 aa, Homo sapiens; identical to SEQ ID NO: 800333

SEQ ID NO: 800337 - protein, 107 aa, Homo sapiens
RTRGSTHASASLKCSTVVCVICLEKPKYRCPACRVPYCSVVCFRKHKGESATLRSLLLNPHLRQLMVNLDQGEDKAKLMRAYMQEPLFVEFADCCLGIVEPSQNEES

SEQ ID NO: 800338 - protein, 109 aa, Homo sapiens
MPGSGVCLIHKSFFVQLSSAKFNLSEVFLLTDGVRNGPQSRAPSDPPGALSDHKGYLLGPSSRSVHCSLTATGDCGCILSQILKLHTLPFSAVQACLSKFLILAEFGSR

SEQ ID NO: 800339 - protein, 109 aa, Homo sapiens; identical to SEQ ID NO: 800338

SEQ ID NO: 800340 - protein, 721 aa, Homo sapiens
MAAPVVAPPGVVVSRANKRSGAGPGGSGGGGARGAEEEPPPPLQAVLVADSFDRRFFPISKDQPRVLLPLANVALIDYTLEFLTATGVQETFVFCCWKAAQIKEHLLKSKWCRPTSLNVVRIITSELYRSLGDVLRDVDAKALVRSDFLLVYGDVISNINITRALEEHRLRRKLEKNVSVMTMIFKESSPSHPTRCHEDNVVVAVDSTTNRVLHFQKTQGLRRFAFPLSLFQGSSDGVEVRYDLLDCHISICSPQVAQLFTDNFDYQTRDDFVRGLLVNEEILGNQIHMHVTAKEYGARVSNLHMYSAVCADVIRRWVYPLTPEANFTDSTTQSCTHSRHNIYRGPEVSLGHGSILEENVLLGSGTVIGSNCFITNSVIGPGCHIGDNVVLDQTYLWQGVRVAAGAQIHQSLLCDNAEVKERVTLKPRSVLTSQVVVGPNITLPEGSVISLHPPDAEEDEDDGEFSDDSGADQEKDKVKMKGYNPAEVGAAGKGYLWKAAGMNMEEEEELQQNLWGLKINMEEESESESEQSMDSEEPDSRGGSPQMDDIKVFQNEVLGTLQRGKEENISCDNLVLEINSLKYAYNISLKEVMQVLSHVVLEFPLQQMDSPLDSSRYCALLLPLLKAWSPVFRNYIKRAADHLEALAAIEDFFLEHEALGISMAKVLMAFYQLEILAEETILSWFSQRDTTDKGQQLRKNQQLQRFIQWLKEAEEESSEDD

SEQ ID NO: 800341 - protein, 302 aa, Homo sapiens
MARYEAGDNVVLDQTYLWQGVRVAAGAQIHQSLLCDNAEVKERVTLKPRSVLTSQVVVGPNITLPEGSVISLHPPDAEEDEDDGEFSDDSGADQEKDKVKMKGYNPAEVGAAGKGYLWKAAGMNMEEEEELQQNLWGLKINMEEESESESEQSMDSEEPDSRGGSPQMDDIKVFQNEVLGTLQRGKEENISCDNLVLEINSLKYAYNISLKEVMQVLSHVVLEFPLQQMDSPLDSSRYCALLLPLLKAWSPVFRNYIKRAADHLEALAAIEDFFLEHEALGISMAKYDGFYSWDPGGGTIWG

SEQ ID NO: 800342 - protein, 746 aa, Homo sapiens
SPPPPPPPPPPPPPPSPLPPSVRYEAGCFVVAPPGVVVSRANKRSGAGPGGSGGGGARGAEEEPPPPLQAVLVADSFDRRFFPISKDQPRVLLPLANVALIDYTLEFLTATGVQETFVFCCWKAAQIKEHLLKSKWCRPTSLNVVRIITSELYRSLGDVLRDVDAKALVRSDFLLVYGDVISNINITRALEEHRLRRKLEKNVSVMTMIFKESSPSHPTRCHEDNVVVAVDSTTNRVLHFQKTQGLRRFAFPLSLFQGSSDGVEVRYDLLDCHISICSPQVAQLFTDNFDYQTRDDFVRGLLVNEEILGNQIHMHVTAKEYGARVSNLHMYSAVCADVIRRWVYPLTPEANFTDSTTQSCTHSRHNIYRGPEVSLGHGSILEENVLLGSGTVIGSNCFITNSVIGPGCHIGDNVVLDQTYLWQGVRVAAGAQIHQSLLCDNAEVKERVTLKPRSVLTSQVVVGPNITLPEGSVISLHPPDAEEDEDDGEFSDDSGADQEKDKVKMKGYNPAEVGAAGKGYLWKAAGMNMEEEEELQQNLWGLKINMEEESESESEQSMDSEEPDSRGGSPQMDDIKVFQNEVLGTLQRGKEENISCDNLVLEINSLKYAYNISLKEVMQVLSHVVLEFPLQQMDSPLDSSRYCALLLPLLKAWSPVFRNYIKRAADHLEALAAIEDFFLEHEALGISMAKVLMAFYQLEILAEETILSWFSQRDTTDKGQQLRKNQQLQRFIQWLKEAEEESSEDD

SEQ ID NO: 800343 - protein, 708 aa, Homo sapiens
MNIKGRNLFIFELARYSKITLFGNTNRGVKIVAVGYPKGFETSSFFSSCILQVLLPLANVALIDYTLEFLTATGVQETFVFCCWKAAQIKEHLLKSKWCRPTSLNVVRIITSELYRSLGDVLRDVDAKALVRSDFLLVYGDVISNINITRALEEHRLRRKLEKNVSVMTMIFKESSPSHPTRCHEDNVVVAVDSTTNRVLHFQKTQGLRRFAFPLSLFQGSSDGVEVRYDLLDCHISICSPQVAQLFTDNFDYQTRDDFVRGLLVNEEILGNQIHMHVTAKEYGARVSNLHMYSAVCADVIRRWVYPLTPEANFTDSTTQSCTHSRHNIYRGPEVSLGHGSILEENVLLGSGTVIGSNCFITNSVIGPGCHIGDNVVLDQTYLWQGVRVAAGAQIHQSLLCDNAEVKERVTLKPRSVLTSQVVVGPNITLPEGSVISLHPPDAEEDEDDGEFSDDSGADQEKDKVKMKGYNPAEVGAAGKGYLWKAAGMNMEEEEELQQNLWGLKINMEEESESESEQSMDSEEPDSRGGSPQMDDIKVFQNEVLGTLQRGKEENISCDNLVLEINSLKYAYNISLKEVMQVLSHVVLEFPLQQMDSPLDSSRYCALLLPLLKAWSPVFRNYIKRAADHLEALAAIEDFFLEHEALGISMAKVLMAFYQLEILAEETILSWFSQRDTTDKGQQLRKNQQLQRFIQWLKEAEEESSEDD

SEQ ID NO: 800344 - protein, 629 aa, Homo sapiens
MAAPVVAPPGVVVSRANKRSGAGPGGSGGGGARGAEEEPPPPLQAVLVADSFDRRFFPISKDQPRVLLPLANVALIDYTLEFLTATGVQETFVFCCWKAAQIKEHLLKSKWCRPTSLNVVRIITSELYRSLGDVLRDVDAKALVRSDFLLVYGDVISNINITRALEEHRLRRKLEKNVSVMTMIFKESSPSHPTRCHEDNVVVAVDSTTNRVLHFQKTQGLRRFAFPLSLFQGSSDGVEVRYDLLDCHISICSPQVAQLFTDNFDYQTRDDFVRGLLVNEEILGNQIHMHVTAKEYGARVSNLHMYSAVCADVIRRWVYPLTPEANFTDSTTQSCTHSRHNIYRGPEVSLGHGSILEENVLLGSGTVIGSNCFITNSVIGPGCHIGDNVVLDQTYLWQGVRVAAGAQIHQSLLCDNAEVKERVTLKPRSVLTSQVVVGPNITLPEGSVISLHPPDAEEDEDDGEFSDDSGADQEKDKVKMKGYNPAEVGAAGKGYLWKAAGMNMEEEEELQQNLWGLKINMEEESESESEQSMDSEEPDSRGGSPQMDDIKVFQNEVLGTLQRGKEENISCDNLVLEINSLKYAYNISLKEVMQVLSHVVLEFPLQQMDSPLDSSRYCALLLPVSKDWS

SEQ ID NO: 800345 - protein, 776 aa, Homo sapiens
MAAPVVAPPGVVVSRANKRSGAGPGGSGGGGARGAEEEPPPPLQAVLVADSFDRRFFPISKDQPRVLLPLANVALIDYTLEFLTATGVQETFVFCCWKAAQIKEHLLKSKWCRPTSLNVVRIITSELYRSLGDVLRDVDAKALVRSDFLLVYGDVISNINITRALEEHRLRRKLEKNVSVMTMIFKESSPSHPTRCHEDNVVVAVDSTTNRVLHFQKTQGLRRFAFPLSLFQGSSDGVEVRYDLLDCHISICSPQVAQLFTDNFDYQTRDDFVRGLLVNEEILGNQIHMHVTAKEYGARVSNLHMYSAVCADVIRRWVYPLTPEANFTDSTTQSCTHSRHNIYRGPEVSLGHGSILEENVLLGSGTVIGSNCFITNSVIGPGCHIGDNVVLDQTYLWQGVRVAAGAQIHQSLLCDNAEVKERVTLKPRSVLTSQVRPDLYCAQALNCMAVTLSQKGHYFHPYSCLKKLLSLSGCTFPPHPNGSVFFFPLVVVGPNITLPEGSVISLHPPDAEEDEDDGEFSDDSGADQEKDKVKMKGYNPAEVGAAGKGYLWKAAGMNMEEEEELQQNLWGLKINMEEESESESEQSMDSEEPDSRGGSPQMDDIKVFQNEVLGTLQRGKEENISCDNLVLEINSLKYAYNISLKEVMQVLSHVVLEFPLQQMDSPLDSSRYCALLLPLLKAWSPVFRNYIKRAADHLEALAAIEDFFLEHEALGISMAKVLMAFYQLEILAEETILSWFSQRDTTDKGQQLRKNQQLQRFIQWLKEAEEESSEDD

SEQ ID NO: 800346 - protein, 583 aa, Homo sapiens
MAAPVVAPPGVVVSRANKRSGAGPGGSGGGGARGAEEEPPPPLQAVLVADSFDRRFFPISKDQPRVLLPLANVALIDYTLEFLTATGVQETFVFCCWKAAQIKEHLLKSKWCRPTSLNVVRIITSELYRSLGDVLRDVDAKALVRSDFLLVYGDVISNINITRALEEHRLRRKLEKNVSVMTMIFKESSPSHPTRCHEDNVVVAVDSTTNRVLHFQKTQGLRRFAFPLSLFQGSSDGVEVRYDLLDCHISICSPQVAQLFTDNFDYQTRDDFVRGLLVNEEILGNQIHMHVTAKEYGARVSNLHMYSAVCADVIRRWVYPLTPEANFTDSTTQSCTHSRHNIYRGPEVSLGHGSILEENVLLGSGTVIGSNCFITNSVIGPGCHIGDNVVLDQTYLWQGVRVAAGAQIHQSLLCDNAEVKERVTLKPRSVLTSQVVVGPNITLPEGSVISLHPPDAEEDEDDGEFSDDSGADQEKDKVKMKGYNPAEVGAAGKGYLWKAAGMNMEEEEELQQNLWGLKINMEEESESESEQSMDSEEPDSRGGSPQMDDIKVFQNEVLGTLQRGKEENISCDNLVLEINSLNC

SEQ ID NO: 800347 - protein, 384 aa, Homo sapiens
MAAPVVAPPGVVVSRANKRSGAGPGGSGGGGARGAEEEPPPPLQAVLVADSFDRRFFPISKDQPRVLLPLANVALIDYTLEFLTATGVQETFVFCCWKAAQIKEHLLKSKWCRPTSLNVVRIITSELYRSLGDVLRDVDAKALVRSDFLLVYGDVISNINITRALEEHRLRRKLEKNVSVMTMIFKESSPSHPTRCHEDNVVVAVDSTTNRVLHFQKTQGLRRFAFPLSLFQGSSDGVEVRYDLLDCHISICSPQVAQLFTDNFDYQTRDDFVRGLLVNEEILGNQIHMHVTAKEYGARVSNLHMYSAVCADVIRRWVYPLTPEANFTDSTTQSCTHSRHNIYRGPEVITWCWTRPTCGRVFEWRLEHRSISLCFVTMLRSRNE

SEQ ID NO: 800348 - protein, 724 aa, Homo sapiens
MAAPVVAPPGVVVSRANKRSGAGPGGSGGGGARGAEEEPPPPLQAVLVADSFDRRFFPISKDQPRVLLPLANVALIDYTLEFLTATGVQETFVFCCWKAAQIKEHLLKSKWCRPTSLNVVRIITSELYRSLGDVLRDVDAKALVRSDFLLVYGDVISNINITRALEEHRLRRKLEKNVSVMTMIFKESSPSHPTRCHEDNVVVAVDSTTNRVLHFQKTQGLRRFAFPLSLFQGSSDGVEVRYDLLDCHISICSPQVAQLFTDNFDYQTRDDFVRGLLVNEEILGNQIHMHVTAKEYGARVSNLHMYSAVCADVIRRWVYPLTPEANFTDSTTQSCTHSRHNIYRGPEVSLGHGSILEENVLLGSGTVIGSNCFITNSVIGPGCHIGDNVVLDQTYLWQGVRVAAGAQIHQSLLCDNAEVKERVTLKPRSVLTSQVVVGPNITLPEGSVISLHPPDAEEDEDDGEFSDDSGADQEKDKVKMKGYNPAEVGAAGKGYLWKAAGMNMEEEEELQQNLWGLKINMEEESESESEQSMDSEEPDSRGGSPQMDDIKVFQNEVLGTLQRGKEENISCDNLVLEINSLKYAYNISLKEVMQVLSHVVLEFPLQQMDSPLDSSRYCALLLPLLKAWSPVFRNYIKRAADHLEALAAIEDFFLEHEALGISMAKVLMAFYQLEILAEETILSWFSQRDTTDKGQQLRKNQQVRQAVLLSPRWLSHSQVLAPRL

SEQ ID NO: 800349 - protein, 629 aa, Homo sapiens; identical to SEQ ID NO: 800344

SEQ ID NO: 800350 - protein, 433 aa, Homo sapiens [sequence omitted]

SEQ ID NO: 800351 - protein, 292 aa, Homo sapiens
MAAPVVAPPGVVVSRANKRSGAGPGGSGGGGARGAEEEPPPPLQAVLVADSFDRRFFPISKDQPRVLLPLANVALIDYTLEFLTATGVQETFVFCCWKAAQIKEHLLKSKWCRPTSLNVVRIITSELYRSLGDVLRDVDAKALVRSDFLLVYGDVISNINITRALEEHRLRRKLEKNVSVMTMIFKESSPSHPTRCHEDNVVVAVDSTTNRVLHFQKTQGLRRFAFPLSLFQGSSDGVEVRYDLLDCHISICSPQVITWCWTRPTCGRVFEWRLEHRSISLCFVTMLRSRNE

SEQ ID NO: 800352 - protein, 394 aa, Homo sapiens
ARRRPGVNRPRRHNIYRGPEVSLGHGSILEENVLLGSGTVIGSNCFITNSVIGPGCHIGDNVVLDQTYLWQGVRVAAGAQIHQSLLCDNAEVKERVTLKPRSVLTSQVVVGPNITLPEGSVISLHPPDAEEDEDDGEFSDDSGADQEKDKVKMKGYNPAEVGAAGKGYLWKAAGMNMEEEEELQQNLWGLKINMEEESESESEQSMDSEEPDSRGGSPQMDDIKVFQNEVLGTLQRGKEENISCDNLVLEINSLKYAYNISLKEVMQVLSHVVLEFPLQQMDSPLDSSRYCALLLPLLKAWSPVFRNYIKRAADHLEALAAIEDFFLEHEALGISMAKVLMAFYQLEILAEETILSWFSQRDTTDKGQQLRKNQQLQRFIQWLKEAEEESSEDD

SEQ ID NO: 800353 - protein, 242 aa, Homo sapiens [sequence omitted]

SEQ ID NO: 800354 - protein, 113 aa, Homo sapiens
MAAPVVAPPGVVVSRANKRSGAGPGGSGGGGARGAEEEPPPPLQAVLVADSFDRRFFPISKDQPRVSAAHASSQRAGRVAGLEQVLISANYNSMPLKDLRLCCYPKTGCRGTV

SEQ ID NO: 800355 - protein, 115 aa, Homo sapiens
SAVCADVIRRWVYPLTPEANFTDSTTQSCTHSRHNIYRGPEVSLGHGSILEENVLLGSGTVIGSNCFITNSVIGPGCHIGEHRWGIKPTILGTGTWGGHVSRNTRDGYTRDSPWE

SEQ ID NO: 800356 - protein, 107 aa, Homo sapiens
MAAPVVAPPGVVVSRANKRSGAGPGGSGGGGARGAEEEPPPPLQAVLVADSFDRRFFPISKDQPRVLLPLANVALIDYTLEFLTATGVQETFVFCCWKAAQIKEHLL

SEQ ID NO: 800357 - protein, 582 aa, Homo sapiens
MAAPVVAPPGVVVSRANKRSGAGPGGSGGGGARGAEEEPPPPLQAVLVADSFDRRFFPISKDQPRVLLPLANVALIDYTLEFLTATGVQETFVFCCWKAAQIKEHLLKSKWCRPTSLNVVRIITSELYRSLGDVLRDVDAKALVRSDFLLVYGDVISNINITRALEEHRLRRKLEKNVSVMTMIFKESSPSHPTRCHEDNVVVAVDSTTNRVLHFQKTQGLRRFAFPLSLFQGSSDGVEVRYDLLDCHISICSPQVAQLFTDNFDYQTRDDFVRGLLVNEEILGNQIHMHVTAKEYGARVSNLHMYSAVCADVIRRWVYPLTPEANFTDSTTQSCTHSRHNIYRGPEVSLGHGSILEENVLLGSGTVIGSNCFITNSVIGPGCHIGDNVVLDQTYLWQGVRVAAGAQIHQSLLCDNAEVKERVTLKPRSVLTSQVVVGPNITLPEGSVISLHPPDAEEDEDDGEFSDDSGADQEKDKVKMKGYNPAEVGAAGKGYLWKAAGMNMEEEEELQQNLWGLKINMEEESESESEQSMDSEEPDSRGGSPQMDDIKVFQNEVLGTLQRGKEENISCDNLVLEINSLK

SEQ ID NO: 800358 - protein, 582 aa, Homo sapiens; identical to SEQ ID NO: 800357

SEQ ID NO: 800359 - protein, 639 aa, Homo sapiens
MAAPVVAPPGVVVSRANKRSGAGPGGSGGGGARGAEEEPPPPLQAVLVADSFDRRFFPISKDQPRVLLPLANVALIDYTLEFLTATGVQETFVFCCWKAAQIKEHLLKSKWCRPTSLNVVRIITSELYRSLGDVLRDVDAKALVRSDFLLVYGDVISNINITRALEEHRLRRKLEKNVSVMTMIFKESSPSHPTRCHEDNVVVAVDSTTNRVLHFQKTQGLRRFAFPLSLFQGSSDGVEVRYDLLDCHISICSPQVAQLFTDNFDYQTRDDFVRGLLVNEEILGNQIHMHVTAKEYGARVSNLHMYSAVCADVIRRWVYPLTPEANFTDSTTQSCTHSRHNIYRGPEVSLGHGSILEENVLLGSGTVIGSNCFITNSVIGPGCHIGDNVVLDQTYLWQGVRVAAGAQIHQSLLCDNAEVKERVTLKPRSVLTSQVVVGPNITLPEGSVISLHPPDAEEDEDDGEFSDDSGADQEKDKVKMKGYNPAEVGAAGKGYLWKAAGMNMEEEEELQQNLWGLKINMEEESESESEQSMDSEEPDSRGGSPQMDDIKVFQNEVLGTLQRGKEENISCDNLVLEINSLKYAYNISLKEVMQVLSHVVLEFPLQQMDSPLDSSRYCALLLPELHKARSRPFGSVSSH

SEQ ID NO: 800360 - protein, 721 aa, Homo sapiens; identical to SEQ ID NO: 800340

SEQ ID NO: 800361 - protein, 721 aa, Homo sapiens; identical to SEQ ID NO: 800340

SEQ ID NO: 800362 - protein, 808 aa, Homo sapiens
MAAPVVAPPGVVVSRANKRSGAGPGGSGGGGARGAEEEPPPPLQAVLVADSFDRRFFPISKDQPRVLLPLANVALIDYTLEFLTATGVQETFVFCCWKAAQIKEHLLKSKWCRPTSLNVVRIITSELYRSLGDVLRDVDAKALVRSDFLLVYGDVISNINITRALEEHRLRRKLEKNVSVMTMIFKESSPSHPTRCHEDNVVVAVDSTTNRVLHFQKTQGLRRFAFPLSLFQGSSDGVEVRYDLLDCHISICSPQVAQLFTDNFDYQTRDDFVRGLLVNEEVRKVFQCLFRREEKAMIVSMLVTFDLFCILLRLRREEKQGTGGTVHKEDIFVAVRGRGELKRIRKVVLGGILPVFLAYGDLPFLLIQILGNQIHMHVTAKEYGARVSNLHMYSAVCADVIRRWVYPLTPEANFTDSTTQSCTHSRHNIYRGPEVSLGHGSILEENVLLGSGTVIGSNCFITNSVIGPGCHIGDNVVLDQTYLWQGVRVAAGAQIHQSLLCDNAEVKERVTLKPRSVLTSQVVVGPNITLPEGSVISLHPPDAEEDEDDGEFSDDSGADQEKDKVKMKGYNPAEVGAAGKGYLWKAAGMNMEEEEELQQNLWGLKINMEEESESESEQSMDSEEPDSRGGSPQMDDIKVFQNEVLGTLQRGKEENISCDNLVLEINSLKYAYNISLKEVMQVLSHVVLEFPLQQMDSPLDSSRYCALLLPLLKAWSPVFRNYIKRAADHLEALAAIEDFFLEHEALGISMAKVLMAFYQLEILAEETILSWFSQRDTTDKGQQLRKNQQLQRFIQWLKEAEEESSEDD

SEQ ID NO: 800363 - protein, 242 aa, Homo sapiens [sequence omitted]

SEQ ID NO: 800364 - protein, 344 aa, Homo sapiens
PTTARYEAGDNVVLDQTYLWQGVRVAAGAQIHQSLLCDNAEVKERVTLKPRSVLTSQVVVGPNITLPEGSVISLHPPDAEEDEDDGEFSDDSGADQEKDKVKMKGYNPAEVGAAGKGYLWKAAGMNMEEEEELQQNLWGLKINMEEESESESEQSMDSEEPDSRGGSPQMDDIKVFQNEVLGTLQRGKEENISCDNLVLEINSLKYAYNISLKEVMQVLSHVVLEFPLQQMDSPLDSSRYCALLLPLLKAWSPVFRNYIKRAADHLEALAAIEDFFLEHEALGISMAKVLMAFYQLEILAEETILSWFSQRDTTDKGQQLRKNQQLQRFIQWLKEAEEESSEDD

SEQ ID NO: 800365 - protein, 286 aa, Homo sapiens
YVDTPRVLERGSVISLHPPDAEEDEDDGEFSDDSGADQEKDKVKMKGYNPAEVGAAGKGYLWKAAGMNMEEEEELQQNLWGLKINMEEESESESEQSMDSEEPDSRGGSPQMDDIKVFQNEVLGTLQRGKEENISCDNLVLEINSLKYAYNISLKEVMQVLSHVVLEFPLQQMDSPLDSSRYCALLLPLLKAWSPVFRNYIKRAADHLEALAAIEDFFLEHEALGISMAKVLMAFYQLEILAEETILSWFSQRDTTDKGQQLRKNQQLQRFIQWLKEAEEESSEDD

SEQ ID NO: 800366 - protein, 113 aa, Homo sapiens; identical to SEQ ID NO: 800354

SEQ ID NO: 800367 - protein, 325 aa, Homo sapiens
MFANLKYVSLGILVFQTTSLVLTMRYSRTLKEEGPRYLSSTAVVVAELLKIMACILLVYKDSKCSLRALNRVLHDEILNKPMETLKLAIPSGIYTLQNNLLYVALSNLDAATYQVTYQLKILTTALFSVSMLSKKLGVYQWLSLVILMTGVAFVQWPSDSQLDSKELSAGSQFVGLMAVLTACFSSGFAGVYFEKILKETKQSVWIRNIQLGFFGSIFGLMGVYIYDGELVSKNGFFQGYNRLTWIVVVLQALGGLVIAAVIKYADNILKGFATSLSIILSTLISYFWLQDFVPTSVFFLGAILVITATFLYGYDPKPAGNPTKA

SEQ ID NO: 800368 - protein, 325 aa, Homo sapiens; identical to SEQ ID NO: 800367

SEQ ID NO: 800369 - protein, 307 aa, Homo sapiens
MFANLKYVSLGILVFQTTSLVLTMRYSRTFLKIMACILLVYKDSKCSLRALNRVLHDEILNKPMETLKLAIPSGIYTLQNNLLYVALSNLDAATYQVTYQLKILTTALFSVSMLSKKLGVYQWLSLVILMTGVAFVQWPSDSQLDSKELSAGSQFVGLMAVLTACFSSGFAGVYFEKILKETKQSVWIRNIQLGFFGSIFGLMGVYIYDGELVSKNGFFQGYNRLTWIVVVLQALGGLVIAAVIKYADNILKGFATSLSIILSTLISYFWLQDFVPTSVFFLGAILVITATFLYGYDPKPAGNPTKA

SEQ ID NO: 800370 - protein, 220 aa, Homo sapiens
MFANLKYVSLGILVFQTTSLVLTMRYSRTLKEEGPRYLSSTAVVVAELLKIMACILLVYKDSKCSLRALNRVLHDEILNKPMETLKLAIPSGIYTLQNNLLYVALSNLDAATYQVTYQLKILTTALFSVSMLSKKLGVYQWLSLVILMTGVAFVQWPSDSQLDSKELSAGSQFVGLMAVLTACFSSGFAGVYFEKILKETKQSVWIRNIQLVSFSLEPSL

SEQ ID NO: 800371 - protein, 325 aa, Homo sapiens; identical to SEQ ID NO: 800367

SEQ ID NO: 800372 - protein, 269 aa, Homo sapiens
MFANLKYVSLGILVFQTTSLVLTMRYSRTLKEEGPRYLSSTAVVVAELLKIMACILLVYKDSKCSLRALNRVLHDEILNKPMETLKLAIPSGIYTLQNNLLYVALSNLDAATYQVTYQLKILTTALFSVSMLSKKLGVYQWLSLVILMTGVAFVQWPSDSQLDSKELSAGSQFVGLMAVLTACFSSGFAGVYFEKILKETKQSVWIRNIQLGFFGSIFGLMGVYIYDGELVSKNGFFQGYNRLTWIVVVLQCLFPWSHPCNNSYFFVWL

SEQ ID NO: 800373 - protein, 137 aa, Homo sapiens
QRSQTRPLRARPSPTRRRAALEPLTVRVLLVVAVVVALHLHVLQKGLDLLLILEVHHAGHGSRRPKDGHARVQWRDFGSPQPPPYGFKQFSCLSLLNSWDYRRPPQCPPNFCIFSRDGVSPYRPGWSRTPDLVIRLN

SEQ ID NO: 800374 - protein, 414 aa, Homo sapiens
MLILTKTAGVFFKPSKRKVYEFLRSFNFHPGTLFLHKIVLGIETSCDDTAAAVVDETGNVLGEAIHSQTEVHLKTGGIVPPAAQQLHRENIQRIVQEALSASGVSPSDLSAIATTIKPGLALSLGVGLSFSLQLVGQLKKPFIPIHHMEAHALTIRLTNKVEFPFLVLLISGGHCLLALVQGVSDFLLLGKSLDIAPGDMLDKVARRLSLIKHPECSTMSGGKAIEHLAKQGNRFHFDIKPPLHHAKNCDFSFTGLQHVTDKIIMKKEKEEGIEKGQILSSAADIAATVQHTMACHLVKRTHRAILFCKQRDLLPQNNAVLVASGGVASNFYIRRALEILTNATQCTLLCPPPRLCTDNGIMIAWNGIERLRAGLGILHDIEGIRYEPKCPLGVDISKEVGEASIKVPQLKMEI

SEQ ID NO: 800375 - protein, 468 aa, Homo sapiens
RSLVTLLGGAARFHPISPMKVSGIIYRVSMLILTKTAGVFFKPSKRKVYEFLRSFNFHPGTLFLHKIVLGIETSCDDTAAAVVDETGNVLGEAIHSQTEVHLKTGGIVPPAAQQLHRENIQRIVQEALSASGVSPSDLSAIATTIKPGLALSLGVGLSFSLQLVGQLKKPFIPIHHMEAHALTIRLTNKVEFPFLVLLISGGHCLLALVQGVSDFLLLGKSLDIAPGDMLDKVARRLSLIKHPECSTMSGGKAIEHLAKQGNRFHFDIKPPLHHAKNCDFSFTGLQHVTDKIIMKKEKEEGIFLISKVEQINIPGLCLKIAAHFCRYEKGQILSSAADIAATVQHTMACHLVKRTHRAILFCKQRDLLPQNNAVLVASGGVASNFYIRRALEILTNATQCTLLCPPPRLCTDNGIMIAWNGIERLRAGLGILHDIEGIRYEPKCPLGVDISKEVGEASIKVPQLKMEI

SEQ ID NO: 800376 - protein, 267 aa, Homo sapiens
MEAHALTIRLTNKVEFPFLVLLISGGHCLLALVQGVSDFLLLGKSLDIAPGDMLDKVARRLSLIKHPECSTMSGGKAIEHLAKQGNRFHFDIKPPLHHAKNCDFSFTGLQHVTDKIIMKKEKEEGIEKGQILSSAADIAATVQHTMACHLVKRTHRAILFCKQRDLLPQNNAVLVASGGVASNFYIRRALEILTNATQCTLLCPPPRLCTDNGIMIAWNGIERLRAGLGILHDIEGIRYEPKCPLGVDISKEVGEASIKVPQLKMEI

SEQ ID NO: 800377 - protein, 157 aa, Homo sapiens
LAVISFFFIFTILKLQNAVFLSFRTGGIVPPAAQQLHRENIQRIVQEALSASGVSPSDLSAIATTIKPGLALSLGVGLSFSLQLVGQLKKPFIPIHHMEAHALTIRLTNKVEFPFLVLLISGGHCLLALVQGVSDFLLLGKSLDIAPGDMLDKVIKN

SEQ ID NO: 800378 - protein, 414 aa, Homo sapiens; identical to SEQ ID NO: 800374

SEQ ID NO: 800379 - protein, 206 aa, Homo sapiens
SLPELEAAEAGAPGSGPVDLFRELLEEGKGVIRGNKEYEEEKRQEKERQEKALGILTYLGQSAAEAQTQPPWYQLPPGRGGPPPGPAPDEKIKSRLDPLREMQKHLGKKRQHGGDEGSRSRKEKEGSEKQRPKEPPSLDQLRAERLRREAAERSRAEALLARVQGRALQEGQPEEDETDDRRRRYNSQFNPQLARRPRQQDPHLTH

SEQ ID NO: 800380 - protein, 106 aa, Homo sapiens
SASFHGQSKPRGQARNQGAGKYPPPTRKPWQAVVADAKTKAKQLSFLPWRRKVVSESQKTLTLHNSCQLLSRAAKLSSSPVSDVKLITDFGCISKGILIKSRCLRD

SEQ ID NO: 800381 - protein, 460 aa, Homo sapiens
MVFSLKVILFLSLLLSPVLKSSLVTLNNNGYDGIVIAINPSVPEDEKLIQNIKEMVTEASTHLFHATKQRAYFRNVSILIPMTYKSKSEYLIPKQETYDQADVIVADLYLKYGDDPYTLQYGQCGDKGQYIHFTPNFLLTNNLATYGPRGKVFVHGWAHLRWGVFDEYNVDQPFYISRRNTTEATRCSTRITVYMVLNECKGASCIARPFRRDSQTGLYEAKCTFIPKRSQTAKESIVFMQNLDSVTEFCTEKTHNKEAPNLKNKMCNHRSTWDVIMSSEDFQHLSPMTEINLPRPTFSLLKSKQRVVCLVLDKSGSMNAEDRLFRMNQAAELYLIQIIEKGSLVGLVTFDSFAKIQSKLIKIIDDNTYQKITANLPQEADGGTSICRGLKAGFQAIPQSNQSTFGSEIILLTDGEDYQISLCFGEVKQSGTVIHTIALGPSADEELETLSNMTGLHKGH

SEQ ID NO: 800382 - protein, 460 aa, Homo sapiens; identical to SEQ ID NO: 800381

SEQ ID NO: 800383 - protein, 443 aa, Homo sapiens
MEEDSLEDSNLPPKVWHSEMTVSVTGEPPSTVEEEGIPKETDIEIIPEIPETLEPLSLPDVLRISAVLEDTTDQLSILNYIMPVQYEGRQSICVKSREMNLEGTNLDKLPMASTITKIPSPLITEEGPNLPEIRHRGRFAVEFNKMQDLVFKKPTRQTIMTTETLKKIQIDRQFFSDVIADTIKELQDSATYNSLLQALSKERENKMHFYDIIAREEKGRKQIISLQKQLINVKKEWQFEVQSQNEYIANLKDQLQEMKAKSNLENRYMKTNTELQIAQTQKKCNRTEELLVEEIEKLRMKTEEEARTHTEIEMFLRKEQQKLEERLEFWMEKYDKDTEMKQNELNALKATKASDLAHLQDLAKMIREYEQVIIEDRIEKERSKKKVKQDLLELKSVIKLQAWWRGTMIRREIGGFKMPKDKVDSKDSKGKGKGKDKRRGKKK

SEQ ID NO: 800384 - protein, 345 aa, Homo sapiens
MNLEGTNLDKLPMASTITKIPSPLITEEGPNLPEIRHRGRFAVEFNKMQDLVFKKPTRQTIMTTETLKKIQIDRQFFSDVIADTIKELQDSATYNSLLQALSKERENKMHFYDIIAREEKGRKQIISLQKQLINVKKEWQFEVQSQNEYIANLKDQLQEMKAKSNLENRYMKTNTELQIAQTQKKCNRTEELLVEEIEKLRMKTEEEARTHTEIEMFLRKEQQKLEERLEFWMEKYDKDTEMKQNELNALKATKASDLAHLQDLAKMIREYEQVIIEDRIEKERSKKKVKQDLLELKSVIKLQAWWRGTMIRREIGGFKMPKDKVDSKDSKGKGKGKDKRRGKKK

SEQ ID NO: 800385 - protein, 144 aa, Homo sapiens [sequence omitted]

SEQ ID NO: 800386 - protein, 135 aa, Homo sapiens
DCWNDSLNHPPLQKLEERLEFWMEKYDKDTEMKQNELNALKATKASDLAHLQDLAKMIREYEQVIIEDRIEKERSKKKVKQDLLELKSVIKLQAWWRGTMIRREIGGFKMPKDKVDSKDSKGKGKGKDKRRGKKK

SEQ ID NO: 800387 - protein, 113 aa, Homo sapiens [sequence omitted]

SEQ ID NO: 800388 - protein, 139 aa, Homo sapiens
LLLSPARLPQPPPASLLKLEERLEFWMEKYDKDTEMKQNELNALKATKASDLAHLQDLAKMIREYEQVIIEDRIEKERSKKKVKQDLLELKSVIKLQAWWRGTMIRREIGGFKMPKDKVDSKDSKGKGKGKDKRRGKKK

SEQ ID NO: 800389 - protein, 436 aa, Homo sapiens
MEEDSLEDSNLPPKVWHSEMTVSVTGEPPSTVEEEGIPKETDIEIIPEIPETLEPLSLPDVLRISAVLEDTTDQLSILNYIMPVQYEGRQSICVKSREMNLEGTNLDKLPMASTITKIPSPLITEEGPNLPEIRHRGRFAVEFNKMQDLVFKKPTRQTIMTTETLKKIQIDRQFFSDVIADTIKELQDSATYNSLLQALSKERENKMHFYDIIAREEKGRKQIISLQKQLINVKKEWQFEVQSQNEYIANLKDQLQEMKAKSNLENRYMKTNTELQIAQTQKKCNRTEELLVEEIEKLRMKTEEEARTHTEIEMFLRKEQQKLEERLEFWMEKYDKDTEMKQNELNALKATKASDLAHLQDLAKMIREYEQVIIEDRIEKERSKKKVKQDLLELKSVIKLQAWWRGTMIRREIGGFKMPKDKVDSKDSKGKGKAAP

SEQ ID NO: 800390 - protein, 443 aa, Homo sapiens; identical to SEQ ID NO: 800383

SEQ ID NO: 800391 - protein, 443 aa, Homo sapiens; identical to SEQ ID NO: 800383

SEQ ID NO: 800392 - protein, 443 aa, Homo sapiens; identical to SEQ ID NO: 800383

SEQ ID NO: 800393 - protein, 139 aa, Homo sapiens
  misc_feature (14)..(14): Xaa can be any naturally occurring amino acid
MASRYDGPPTPNPXDLQKLEERLEFWMEKYDKDTEMKQNELNALKATKASDLAHLQDLAKMIREYEQVIIEDRIEKERSKKKVKQDLLELKSVIKLQAWWRGTMIRREIGGFKMPKDKVDSKDSKGKGKGKDKRRGKKK

SEQ ID NO: 800394 - protein, 296 aa, Homo sapiens [sequence omitted]

SEQ ID NO: 800395 - protein, 499 aa, Homo sapiens
VVVIIGEFFSASSVTIVDTVTLQYLGKHRDRYGLQRMWGSLGWGLAMLSVGIGIDYTHIEVLIDGKGCKPPEYRNYQIVFIVFGVLMTMALIVATQFRFRYNHFKNDDSKGKEVEIPQVERNNSTESSEETPTTTSHSQAFNFWDLIKLLCSVQYGSVLFVAWFMGFGYGFVFTFLYWHLEDLNGTTTLFGVCSVLSHVSELTAYFFSHKLIELIGHIRVLYIGLACNTARYIYISYLENAWTVLPMEVLQGVTHAAIWAACISYLSAAVPPELRTSAQGILQGLHLGLGRGCGAMIGGVLVNYFGAAATFRGIGMACLVILLLFALIQWLAVPDEEEDKTMLAERIPVPSSPVPIATIDLVQQQTEDVMPRIEPRLPPKKTKHQEEQEDVNKPAWGVSSSPWVTFVYALYQIKEMMQLTRDNRASEIQPLQGTNENRENSPAGRAQPVPCETHSDPSRNQPSPDAAASQTQTSPAHPSVDPCTEESEEQQAQLAAGGH

SEQ ID NO: 800396 - protein, 261 aa, Homo sapiens
MLRAGFLPMEVLQGVTHAAIWAACISYLSAAVPPELRTSAQGILQGLHLGLGRGCGAMIGGVLVNYFGAAATFRGIGMACLVILLLFALIQWLAVPDEEEDKTMLAERIPVPSSPVPIATIDLVQQQTEDVMPRIEPRLPPKKTKHQEEQEDVNKPAWGVSSSPWVTFVYALYQIKEMMQLTRDNRASEIQPLQGTNENRENSPAGRAQPVPCETHSDPSRNQPSPDAAASQTQTSPAHPSVDPCTEESEEQQAQLAAGGH

SEQ ID NO: 800397 - protein, 595 aa, Homo sapiens
VVVIIGEFFSASSVTIVDTVTLQYLGKHRDRYGLQRMWGSLGWGLAMLSVGIGIDYTHIEVLIDGKGCKPPEYRNYQIVFIVFGVLMTMALIVATQFRFRYNHFKNDDSKGKEVEIPQVERNNSTESSEETPTTTSHSQAFNFWDLIKLLCSVQYGSVLFVAWFMGFGYGFVFTFLYWHLEDLNGTTTLFGVCSVLSHVSELTAYFFSHKLIELIGHIRVLYIGLACNTARYIYISYLENAWTVLPMEVLQGVTHAAIWAACISYLSAAVPPELRTSAQGILQGLHLGLGRGCGAMIGGVLVNYFGAAATFRGIGMACLVILLLFALIQWLAVPDEEEDKTMLAERIPVPSSPVPIATIDLVQQQTEDVMPRIEPRLPPKKTKHQEEQEDVNKPAWGVSSSPWVTFVYALYQIKEMMQLTRDNRASEIQPLQLHIGKEDERGPMRIGKILLLVEPSLSHVRLTLTHLETSHPLTQQHLRRRPAPLTPVWTRAQRRVKSSRLSWPREDTEGILLISHPAWNQAPQPGHRVRPPSQDMPPLEEHSTAYASKYLNSLTWKHTHRSYSTYWQEKVNFRNLIGITTGKWSSMRTFSSLLG

SEQ ID NO: 800398 - protein, 166 aa, Homo sapiens
VVVIIGEFFSASSVTIVDTVTLQYLGKHRDRYGLQRMWGSLGWGLAMLSVGIGIDYTHIEVLIDGKGCKPPEYRNYQIVFIVFGVLMTMALIVATQFRFRYNHFKNDDSKGKEVEIPQVERNNSTESSEETPTTTSHSQAFNFWELRASCSSHTLHGIRLLSQDTG

SEQ ID NO: 800399 - protein, 499 aa, Homo sapiens; identical to SEQ ID NO: 800395

SEQ ID NO: 800400 - protein, 499 aa, Homo sapiens; identical to SEQ ID NO: 800395

SEQ ID NO: 800401 - protein, 499 aa, Homo sapiens; identical to SEQ ID NO: 800395

SEQ ID NO: 800402 - protein, 113 aa, Homo sapiens [sequence omitted]

SEQ ID NO: 800403 - protein, 194 aa, Homo sapiens
MLRAGFLPMEVLQGVTHAAIWAACISYLSAAVPPELRTSAQGILQGLHLGLGRGCGAMIGGVLVNYFGAAATFRGIGMACLVILLLFALIQWLAVPDEEEDKTMLAERIPVPSSPVPIATIDLVQQQTEDVMPRIEPRLPPKKTKHQEEQEDVNKPAWGVSSSPWVTFVYALYQIKEMMQLTRDKGTPGSSRTL

SEQ ID NO: 800404 - protein, 499 aa, Homo sapiens; identical to SEQ ID NO: 800395

SEQ ID NO: 800405 - protein, 404 aa, Homo sapiens
VVVIIGEFFSASSVTIVDTVTLQYLGKHRDRYGLQRMWGSLGWGLAMLSVGIGIDYTHIEVLIDGKGCKPPEYRNYQIVFIVFGVLMTMALIVATQFRFRYNHFKNDDSKGKEVEIPQVERNNSTESSEETPTTTSHSQAFNFWDLIKLLCSVQYGSVLFVAWFMGFGYGFVFTFLYWHLEDLNGTTTLFGVCSVLSHVSELTAYFFSHKLIELIGHIRVLYIGLACNTARYIYISYLENAWTVLPMEVLQGVTHAAIWAACISYLSAAVPPELRTSAQGILQGLHLGLGRGCGAMIGGVLVNYFGAAATFRGIGMACLVILLLFALIQWLAVPDEEEDKTMLAERIPVPSSPVPIATIDLVQQQTEDVMPRIEPRLPPKKTKHQEEQEDVNEEQQAQLAAGGH

SEQ ID NO: 800406 - protein, 158 aa, Homo sapiens [sequence omitted]

SEQ ID NO: 800407 - protein, 499 aa, Homo sapiens; identical to SEQ ID NO: 800395

SEQ ID NO: 800408 - protein, 269 aa, Homo sapiens
VVVIIGEFFSASSVTIVDTVTLQYLGKHRDRYGLQRMWGSLGWGLAMLSVGIGIDYTHIEVLIDGKGCKPPEYRNYQIVFIVFGVLMTMALIVATQFRFRYNHFKNDDSKGKEVEIPQVERNNSTESSEETPTTTSHSQAFNFWDLIKLLCSVQYGSVLFVAWFMGFGYGFVFTFLYWHLEDLNGTTTLFGVCSVLSHVSELTAYFFSHKLIELIGHIRVLYIGLACNTARYIYISYLENAWTVLPMEVLQGKLTAGIEIISLPSLSCG

SEQ ID NO: 800409 - protein, 114 aa, Homo sapiens [sequence omitted]

SEQ ID NO: 800410 - protein, 204 aa, Homo sapiens
MQSYASAMLSVFNSDDYSPAVQENIPALRRSSSFLCTESCNSKYQCETGENSKGNVQDRVKRPMNAFIVWSRDQRRKMALENPRMRNSEISKQLGYQWKMLTEAEKWPFFQEAQKLQAMHREKYPNYKYRPRRKAKMLPKNCSLLPADPASVLCSEVQLDNRLYRDDCTKATHSRMEHQLGHLPPINAASSPQQRDRYSHWTKL

SEQ ID NO: 800411 - protein, 323 aa, Homo sapiens
PRRAAAGPSATLDMALRRPPRLRLCARLPDFFLLLLFRGCLIGAVNLKSSNRTPVVQEFESVELSCIITDSQTSDPRIEWKKIQDEQTTYVFFDNKIQGDLAGRAEILGKTSLKIWNVTRRDSALYRCEVVARNDRKEIDEIVIELTVQVKPVTPVCRVPKAVPVGKMATLHCQESEGHPRPHYSWYRNDVPLPTDSRANPRFRNSSFHLNSETGTLVFTAVHKDDSGQYYCIASNDAGSARCEEQEMEVYDLNIGGIIGGVLVVLAVLALITLGICCAYRRGYFINNKQDGESYKNPGKPDGVNYIRTDEEGDFRHKSSFVI

SEQ ID NO: 800412 - protein, 117 aa, Homo sapiens
MFTTGRSAATTAPCEMARWLDSTSSASRREPRKGFLHSSLTSSAHRHHRSFFLKALLIGVAVSIVEKLFGSAFCKNNQNQEGKLVAGRGILPEEPCLSNRVSGFKENLRLRLSLKWY

SEQ ID NO: 800413 - protein, 127 aa, Homo sapiens [sequence omitted]

SEQ ID NO: 800414 - protein, 323 aa, Homo sapiens; identical to SEQ ID NO: 800411

SEQ ID NO: 800415 - protein, 82 aa, Homo sapiens
TKKRTDEIARWSSQVKGLAGRKVKRLNQKQFSNFDFKFFIRRRHCSHLWGDISNITQKPVFFKSRCSQPHMPCRAGLRTEVL

SEQ ID NO: 800416 - protein, 323 aa, Homo sapiens; identical to SEQ ID NO: 800411

SEQ ID NO: 800417 - protein, 323 aa, Homo sapiens; identical to SEQ ID NO: 800411

SEQ ID NO: 800418 - protein, 323 aa, Homo sapiens; identical to SEQ ID NO: 800411

SEQ ID NO: 800419 - protein, 123 aa, Homo sapiens
MSIALGLSLVLSLALGPCQSLLACVFVEQMQTGFCWVIQLFSLVCTVKGYYDPKEMMDRDQDCLLPVEEAGIIWDSVCFFFLLLQRRVFLSHYYLHVRADLQATALLASRGFALYNCQHPMSD

SEQ ID NO: 800420 - protein, 1487 aa, Homo sapiens
MTPLPPDYPWRWSRAVPMNSALIKWLYLPDFFRAPNSTNLISDFLLLLCASQQWQVFSAERTEEWQRMAGVNTDRLEPLRGEPNPVPNFIHCRSYLDMLKVAVFRYLFWLVLVVVFVTGATRISIFGLGYLLACFYLLLFGTALLQRDTRARLVLWDCLILYNVTVIISKNMLSLLACVFVEQMQTGFCWVIQLFSLVCTVKGYYDPKEMMDRDQDCLLPVEEAGIIWDSVCFFFLLLQRRVFLSHYYLHVRADLQATALLASRGFALYNAANLKSIDFHRRIEEKSLAQLKRQMERIRAKQEKHRQGRVDRSRPQDTLGPKDPGLEPGPDSPGGSSPPRRQWWRPWLDHATVIHSGDYFLFESDSEEEEEAVPEDPRPSAQSAFQLAYQAWVTNAQAVLRRRQQEQEQARQEQAGQLPTGGGPSQEVEPAEGPEEAAAGRSHVVQRVLSTAQFLWMLGQALVDELTRWLQEFTRHHGTMSDVLRAERYLLTQELLQGGEVHRGVLDQLYTSQAEATLPGPTEAPNAPSTVSSVGLWLLELKPLKQHDMTDHWCMPPWVTCAINDAACGMEEGMSPDPLGELLSARVASSCTHGDSIAGLCHADACVLVTWRLAAIPTKLGLDVRRSLFVPDGRRGRALRLLRAVYQCVAAHSELLCYFIIILNHMVTASAGSLVLPVLVFLWAMLSIPRPSKRFWMTAIVFTEIAVVVKYLFQFGFFPWNSHVVLRRYENKPYFPPRILGLEKTDGYIKYDLVQLMALFFHRSQLLCYGLWDHEEDSPSKEHDKSGEEEQGAEEGPGVPAATTEDHIQVEARVGPTDGTPEPQVELRPRDTRRISLRFRRRKKEGPARKGAAAIEAEDREEEEGEEEKEAPTGREKRPSRSGGRVRAAGRRLQGFCLSLAQGTYRPLRRFFHDILHTKYRAATDVYALMFLADVVDFIIIIFGFWAFGKHSAATDITSSLSDDQVPEAFLVMLLIQFSTMVVDRALYLRKTVLGKLAFQVALVLAIHLWMFFILPAVTERMFNQNVVAQLWYFVKCIYFALSAYQIRCGYPTRILGNFLTKKYNHLNLFLFQGFRLVPFLVELRAVMDWVWTDTTLSLSSWMCVEDIYANIFIIKCSRETEKKYPQPKGQKKKKIVKYGMGGLIILFLIAIIWFPLLFMSLVRSVVGVVNQPIDVTVTLKLGGYEPLFTMSAQQPSIIPFTAQAYEELSRQFDPQPLAMQFISQYSPEDIVTAQIEGSSGALWRISPPSRAQMKRELYNGTADITLRFTWNFQRDLAKGGTVEYANEKHMLALAPNSTARRQLASLLEGTSDQSVVIPNLFPKYIRAPNGPEANPVKQLQPNEEADYLGVRIQLRREQGAGATGFLEWWVIELQECRTDCNLLPMVIFSDKVSPPSLGFLAGYGIMGLYVSIVLVIGKFVRGFFSEISHSIMFEELPCVDRILKLCQDIFLVRETRELELEEELYAKLIFLYRSPETMIKWTREKE

SEQ ID NO: 800421 - protein, 1747 aa, Homo sapiens
TVRHLCLGPSRTSLLLPGPLFTPLASARGLPVSQTRGPLPREGGSKAGSPRVPGWGAVDLPQSCGCGGLRAGPGGTVAWEGALMPGLFQPFPNSTNLLPTEISQSLLYRGPVDPANWFGVRKGFPNLGYIQNHLQVLLLLVFEAIVYRRQEHYRRQHQLAPLPAQAVFASGTRQQLDQDLLGCLKYFINFFFYKFGLEICFLMAVNVIGQRMNFLVTLHGCWLVAILTRRHRQAIARLWPNYCLFLALFLLYQYLLCLGMPPALCIDYPWRWSRAVPMNSALIKWLYLPDFFRAPNSTNLISDFLLLLCASQQWQVFSAERTEEWQRMAGVNTDRLEPLRGEPNPVPNFIHCRSYLDMLKVAVFRYLFWLVLVVVFVTGATRISIFGLGYLLACFYLLLFGTALLQRDTRARLVLWDCLILYNVTVIISKNMLSLLACVFVEQMQTGFCWVIQLFSLVCTVKGYYDPKEMMDRDQDCLLPVEEAGIIWDSVCFFFLLLQRRVFLSHYYLHVRADLQATALLASRGFALYNAANLKSIDFHRRIEEKSLAQLKRQMERIRAKQEKHRQGRVDRSRPQDTLGPKDPGLEPGPDSPGGSSPPRRQWWRPWLDHATVIHSGDYFLFESDSEEEEEAVPEDPRPSAQSAFQLAYQAWVTNAQAVLRRRQQEQEQARQEQAGQLPTGGGPSQEVEPAEGPEEAAAGRSHVVQRVLSTAQFLWMLGQALVDELTRWLQEFTRHHGTMSDVLRAERYLLTQELLQGGEVHRGVLDQLYTSQAEATLPGPTEAPNAPSTVSSVGLWLLELKPLKQHDMTDHWCMPPWVTCAIKTLHVACEEGMSPDPLGELLSARVASSCTHGDSIAGLCHADACVLVTWRLAAIPTKLGLDVRRSLFVPDGRRGRALRLLRAVYQCVAAHSELLCYFIIILNHMVTASAGSLVLPVLVFLWAMLSIPRPSKRFWMTAIVFTEIAVVVKYLFQFGFFPWNSHVVLRRYENKPYFPPRILGLEKTDGYIKYDLVQLMALFFHRSQLLCYGLWDHEEDSPSKEHDKSGEEEQGAEEGPGVPAATTEDHIQVEARVGPTDGTPEPQVELRPRDTRRISLRFRRRKKEGPARKGAAAIEAEDREEEEGEEEKEAPTGREKRPSRSGGRVRAAGRRLQGFCLSLAQGTYRPLRRFFHDILHTKYRAATDVYALMFLADVVDFIIIIFGFWAFGKHSAATDITSSLSDDQVPEAFLVMLLIQFSTMVVDRALYLRKTVLGKLAFQVALVLAIHLWMFFILPAVTERMFNQNVVAQLWYFVKCIYFALSAYQIRCGYPTRILGNFLTKKYNHLNLFLFQGFRLVPFLVELRAVMDWVWTDTTLSLSSWMCVEDIYANIFIIKCSRETEKKYPQPKGQKKKKIVKYGMGGLIILFLIAIIWFPLLFMSLVRSVVGVVNQPIDVTVTLKLGGYEPLFTMSAQQPSIIPFTAQAYEELSRQFDPQPLAMQFISQYSPEDIVTAQIEGSSGALWRISPPSRAQMKRELYNGTADITLRFTWNFQRDLAKGGTVEYANEKHMLALAPNSTARRQLASLLEGTSDQSVVIPNLFPKYIRAPNGPEANPVKQLQPNEEADYLGVRIQLRREQGAGATGFLEWWVIELQECRTDCNLLPMVIFSDKVSPPSLGFLAGYGIMGLYVSIVLVIGKFVRGFFSEISHSIMFEELPCVDRILKLCQDIFLVRETRELELEEELYAKLIFLYRSPETMIKWTREKE

SEQ ID NO: 800422 - protein, 979 aa, Homo sapiens
LRIQCYYHKQELLQGGEVHRGVLDQLYTSQAEATLPGPTEAPNAPSTVSSGLGAEEPLSSMTDDMGSPLSTGYHTRSGSEEAVTDPGEREAGASLYQGLMRTASELLLDRRLRIPELEEAELFAEGQGRALRLLRAVYQCVAAHSELLCYFIIILNHMVTASAGSLVLPVLVFLWAMLSIPRPSKRFWMTAIVFTEIAVVVKYLFQFGFFPWNSHVVLRRYENKPYFPPRILGLEKTDGYIKYDLVQLMALFFHRSQLLCYGLWDHEEDSPSKEHDKSGEEEQGAEEGPGVPAATTEDHIQVEARVGPTDGTPEPQVELRPRDTRRISLRFRRRKKEGPARKGAAAIEAEDREEEEGEEEKEAPTGREKRPSRSGGRVRAAGRRLQGFCLSLAQGTYRPLRRFFHDILHTKYRAATDVYALMFLADVVDFIIIIFGFWAFGKHSAATDITSSLSDDQVPEAFLVMLLIQFSTMVVDRALYLRKTVLGKLAFQVALVLAIHLWMFFILPAVTERMFNQNVVAQLWYFVKCIYFALSAYQIRCGYPTRILGNFLTKKYNHLNLFLFQGFRLVPFLVELRAVMDWVWTDTTLSLSSWMCVEDIYANIFIIKCSRETEKKYPQPKGQKKKKIVKYGMGGLIILFLIAIIWFPLLFMSLVRSVVGVVNQPIDVTVTLKLGGYEPLFTMSAQQPSIIPFTAQAYEELSRQFDPQPLAMQFISQYSPEDIVTAQIEGSSGALWRISPPSRAQMKRELYNGTADITLRFTWNFQRDLAKGGTVEYANEKHMLALAPNSTARRQLASLLEGTSDQSVVIPNLFPKYIRAPNGPEANPVKQLQPNEEADYLGVRIQLRREQGAGATGFLEWWVIELQECRTDCNLLPMVIFSDKVSPPSLGFLAGYGIMGLYVSIVLVIGKFVRGFFSEISHSIMFEELPCVDRILKLCQDIFLVRETRELELEEELYAKLIFLYRSPETMIKWTREKE

SEQ ID NO: 800423 - protein, 1714 aa, Homo sapiens
MDLRPELPTTLGPVSLRQLGLEHTRYPCLDLGAMLLYTLTFWLLLRQFVKEKLLKWAESPAALTEVTVADTEPTRTQTLLQSLGELVKGVYAKYWIYVCAGMFIVVSFAGRLVVYKIVYMFLFLLCLTLFQVYYSLWRKLLKAFWWLVVAYTMLVLIAVYTFQFQDFPAYWRNLTGFTDEQLGDLGLEQFSVSELFSSILVPGFFLLACILQLHYFHRPFMQLTDMEHVSLPGTRLPRWAHRQDAVSGTPLLREEQQEHQQQQQEEEEEEDSRDEGLGVATPHQATQVPEGAAKWGLVAERLLELAAGFSDVLSRVQVFLRRLLELHVFKLVALYTVWVALKEVSVMNLLLVVLWAFALPYPRFRPMASCLSTVWTCVIIVCKMLYQLKVVNPQEYSSNCTEPFPNSTNLLPTEISQSLLYRGPVDPANWFGVRKGFPNLGYIQNHLQVLLLLVFEAIVYRRQEHYRRQHQLAPLPAQAVFASGTRQQLDQDLLGCLKYFINFFFYKFGLEICFLMAVNVIGQRMNFLVTLHGCWLVAILTRRHRQAIARLWPNYCLFLALFLLYQYLLCLGMPPALCIDYPWRWSRAVPMNSALIKWLYLPDFFRAPNSTNLISDFLLLLCASQQWQVFSAERTEEWQRMAGVNTDRLEPLRGEPNPVPNFIHCRSYLDMLKVAVFRYLFWLVLVVVFVTGATRISIFGLGYLLACFYLLLFGTALLQRDTRARLVLWDCLILYNVTVIISKNMLSLLACVFVEQMQTGFCWVIQLFSLVCTVKGYYDPKEMMDRDQDCLLPVEEAGIIWDSVCFFFLLLQRRVFLSHYYLHVRADLQATALLASRGFALYNAANLKSIDFHRRIEEKSLAQLKRQMERIRAKQEKHRQGRVDRSRPQDTLGPKDPGLEPGPDSPGGSSPPRRQWWRPWLDHATVIHSGDYFLFESDSEEEEEAVPEDPRPSAQSAFQLAYQAWVTNAQAVLRRRQQEQEQARQEQAGQLPTGGGPSQEVEPAEGPEEAAAGRSHVVQRVLSTAQFLWMLGQALVDELTRWLQEFTRHHGTMSDVLRAERYLLTQELLQGGEVHRGVLDQLYTSQAEATLPGPTEAPNAPSTVSSVGLWLLELKPLKQHDMTDHWCMPPWVTCAIKTLHVACEEGMSPDPLGELLSARVASSCTHGDSIAGLCHADACVLVTWRLAAIPTKLGLDVRRSLFVPDGRRGRALRLLRAVYQCVAAHSELLCYFIIILNHMVTASAGSLVLPVLVFLWAMLSIPRPSKRFWMTAIVFTEIAVVVKYLFQFGFFPWNSHVVLRRYENKPYFPPRILGLEKTDGYIKYDLVQLMALFFHRSQLLCYGLWDHEEDSPSKEHDKSGEEEQGAEEGPGVPAATTEDHIQVEARVGPTDGTPEPQVELRPRDTRRISLRFRRRKKEGPARKGAAAIEAEDREEEEGEEEKEAPTGREKRPSRSGGRVRAAGRRLQGFCLSLAQGTYRPLRRFFHDILHTKYRAATDVYALMFLADVVDFIIIIFGFWAFGKHSAATDITSSLSDDQVPEAFLVMLLIQFSTMVVDRALYLRKTVLGKLAFQVALVLAIHLWMFFILPAVTERMFNQNVVAQLWYFVKCIYFALSAYQIRCGYPTRILGNFLTKKYNHLNLFLFQGFRLVPFLVELRAVMDWVWTDTTLSLSSWMCVEDIYANIFIIKCSRETEKVPGPRAGAGTRARDMPSP

SEQ ID NO: 800424 - protein, 2562 aa, Homo sapiens
MDLRPELPTTLGPVSLRQLGLEHTRYPCLDLGAMLLYTLTFWLLLRQFVKEKLLKWAESPAALTEVTVADTEPTRTQTLLQSLGELVKGVYAKYWIYVCAGMFIVVSFAGRLVVYKIVYMFLFLLCLTLFQVYYSLWRKLLKAFWWLVVAYTMLVLIAVYTFQFQDFPAYWRNLTGFTDEQLGDLGLEQFSVSELFSSILVPGFFLLACILQLHYFHRPFMQLTDMEHVSLPGTRLPRWAHRQDAVSGTPLLREEQQEHQQQQQEEEEEEDSRDEGLGVATPHQATQVPEGAAKWGLVAERLLELAAGFSDVLSRVQVFLRRLLELHVFKLVALYTVWVALKEVSVMNLLLVVLWAFALPYPRFRPMASCLSTVWTCVIIVCKMLYQLKVVNPQEYSSNCTEPFPNSTNLLPTEISQSLLYRGPVDPANWFGVRKGFPNLGYIQNHLQVLLLLVFEAIVYRRQEHYRRQHQLAPLPAQAVFASGTRQQLDQDLLGCLKYFINFFFYKFGLEICFLMAVNVIGQRMNFLVTLHGCWLVAILTRRHRQAIARLWPNYCLFLALFLLYQYLLCLGMPPALCIDYPWRWSRAVPMNSALIKWLYLPDFFRAPNSTNLISDFLLLLCASQQWQVFSAERTEEWQRMAGVNTDRLEPLRGEPNPVPNFIHCRSYLDMLKVAVFRYLFWLVLVVVFVTGATRISIFGLGYLLACFYLLLFGTALLQRDTRARLVLWDCLILYNVTVIISKNMLSLLACVFVEQMQTGFCWVIQLFSLVCTVKGYYDPKEMMDRDQDCLLPVEEAGIIWDSVCFFFLLLQRRVFLSHYYLHVRADLQATALLASRGFALYNAANLKSIDFHRRIEEKSLAQLKRQMERIRAKQEKHRQGRVDRSRPQDTLGPKDPGLEPGPDSPGGSSPPRRQWWRPWLDHATVIHSGDYFLFESDSEEEEEAVPEDPRPSAQSAFQLAYQAWVTNAQAVLRRRQQEQEQARQEQAGQLPTGGGPSQEVEPAEGPEEAAAGRSHVVQRVLSTAQFLWMLGQALVDELTRWLQEFTRHHGTMSDVLRAERYLLTQELLQGGEVHRGVLDQLYTSQAEATLPGPTEAPNAPSTVSSVGLWLLELKPLKQHDMTDHWCMPPWVTCAIKTLHVACEEGMSPDPLGELLSARVASSCTHGDSIAGLCHADACVLVTWRLAAIPTKLGLDVRRSLFVPDGRRGRALRLLRAVYQCVAAHSELLCYFIIILNHMVTASAGSLVLPVLVFLWAMLSIPRPSKRFWMTAIVFTEIAVVVKYLFQFGFFPWNSHVVLRRYENKPYFPPRILGLEKTDGYIKYDLVQLMALFFHRSQLLCYGLWDHEEDSPSKEHDKSGEEEQGAEEGPGVPAATTEDHIQVEARVGPTDGTPEPQVELRPRDTRRISLRFRRRKKEGPARKGAAAIEAEDREEEEGEEEKEAPTGREKRPSRSGGRVRAAGRRLQGFCLSLAQGTYRPLRRFFHDILHTKYRAATDVYALMFLADVVDFIIIIFGFWAFGKHSAATDITSSLSDDQVPEAFLVMLLIQFSTMVVDRALYLRKTVLGKLAFQVALVLAIHLWMFFILPAVTERMFNQNVVAQLWYFVKCIYFALSAYQIRCGYPTRILGNFLTKKYNHLNLFLFQGFRLVPFLVELRAVMDWVWTDTTLSLSSWMCVEDIYANIFIIKCSRETEKVPGPRAGAGTRARDMPSPKTEALLPREPVVLEALPGLGAHGDMRRAHPLADHEASDLGSCEWVLGAEVGSGVGPVPGRLAAEQGLVQGGPDSHCLLHSCLMAFLRENSCVRPLPHVKSTTQGFLVDSQLSICLLTTSKRNPGPGTAAHPYHPSTVRDPGGRYCSRPGVQDLHGHKRDPASANVKIKQLAGNGSSCLWSQHFGRPKEEDQFEARSFKTSLGNIVSETLSTKNKRELGVMVHTCAPTSRVAGTTGVHHQAWLVFCIFGQVRLKLLTSKCWDDKCEPPHPAVGLFFIRVFSVFLQIHWLEMTELEEFSVILWLLEPYQLKFAENFSNSMDCLLNFLGVFGSTKYLFWKYLVYFVSFAKSRFMKICPFSSKSSIVLALKFRSLIHFEVNFGTWYEAGVAFHSPAWGGACTVLKKVVRSPERSQLPCLRSTTPEHEGSNWTLSSTPLACVCPPLLPPCHTEVRLGLFWAAGSAGECGCVTRRKGRAERMTCVVPPPEKYPQPKGQKKKKIVKYGMGGLIILFLIAIIWFPLLFMSLVRSVVGVVNQPIDVTVTLKLGGYEPLFTMSAQQPSIIPFTAQAYEELSRQFDPQPLAMQFISQYSPEDIVTAQIEGSSGALWRISPPSRAQMKRELYNGTADITLRFTWNFQRDLAKGGTVEYANEKHMLALAPNSTARRQLASLLEGTSDQSVVIPNLFPKYIRAPNGPEANPVKQLQPNEEADYLGVRIQLRREQGAGATGFLEWWVIELQECRTDCNLLPMVIFSDKVSPPSLGFLAGYGIMGLYVSIVLVIGKFVRGFFSEISHSIMFEELPCVDRILKLCQDIFLVRETRELELEEELYAKLIFLYRSPETMIKWTREKE

SEQ ID NO: 800425 - protein, 1714 aa, Homo sapiens; identical to SEQ ID NO: 800423

SEQ ID NO: 800426 - protein, 1723 aa, Homo sapiens
MDLRPELPTTLGPVSLRQLGLEHTRYPCLDLGAMLLYTLTFWLLLRQFVKEKLLKWAESPAALTEVTVADTEPTRTQTLLQSLGELVKGVYAKYWIYVCAGMFIVVSFAGRLVVYKIVYMFLFLLCLTLFQVYYSLWRKLLKAFWWLVVAYTMLVLIAVYTFQFQDFPAYWRNLTGFTDEQLGDLGLEQFSVSELFSSILVPGFFLLACILQLHYFHRPFMQLTDMEHVSLPGTRLPRWAHRQDAVSGTPLLREEQQEHQQQQQEEEEEEDSRDEGLGVATPHQATQVPEGAAKWGLVAERLLELAAGFSDVLSRVQVFLRRLLELHVFKLVALYTVWVALKEVSVMNLLLVVLWAFALPYPRFRPMASCLSTVWTCVIIVCKMLYQLKVVNPQEYSSNCTEPFPNSTNLLPTEISQSLLYRGPVDPANWFGVRKGFPNLGYIQNHLQVLLLLVFEAIVYRRQEHYRRQHQLAPLPAQAVFASGTRQQLDQDLLGCLKYFINFFFYKFGLEICFLMAVNVIGQRMNFLVTLHGCWLVAILTRRHRQAIARLWPNYCLFLALFLLYQYLLCLGMPPALCIDYPWRWSRAVPMNSALIKWLYLPDFFRAPNSTNLISDFLLLLCASQQWQVFSAERTEEWQRMAGVNTDRLEPLRGEPNPVPNFIHCRSYLDMLKVAVFRYLFWLVLVVVFVTGATRISIFGLGYLLACFYLLLFGTALLQRDTRARLVLWDCLILYNVTVIISKNMLSLLACVFVEQMQTGFCWVIQLFSLVCTVKGYYDPKEMMDRDQDCLLPVEEAGIIWDSVCFFFLLLQRRVFLSHYYLHVRADLQATALLASRGFALYNAANLKSIDFHRRIEEKSLAQLKRQMERIRAKQEKHRQGRVDRSRPQDTLGPKDPGLEPGPDSPGGSSPPRRQWWRPWLDHATVIHSGDYFLFESDSEEEEEAVPEDPRPSAQSAFQLAYQAWVTNAQAVLRRRQQEQEQARQEQAGQLPTGGGPSQEVEPAEGPEEAAAGRSHVVQRVLSTAQFLWMLGQALVDELTRWLQEFTRHHGTMSDVLRAERYLLTQELLQGGEVHRGVLDQLYTSQAEATLPGPTEAPNAPSTVSSVGLWLLELKPLKQHDMTDHWCMPPWVTCAIKTLHVACEEGMSPDPLGELLSARVASSCTHGDSIAGLCHADACVLVTWRLAAIPTKLGLDVRRSLFVPDGRRGRALRLLRAVYQCVAAHSELLCYFIIILNHMVTASAGSLVLPVLVFLWAMLSIPRPSKRFWMTAIVFTEIAVVVKYLFQFGFFPWNSHVVLRRYENKPYFPPRILGLEKTDGYIKYDLVQLMALFFHRSQLLCYGLWDHEEDSPSKEHDKSGEEEQGAEEGPGVPAATTEDHIQVEARVGPTDGTPEPQVELRPRDTRRISLRFRRRKKEGPARKGAAAIEAEDREEEEGEEEKEAPTGREKRPSRSGGRVRAAGRRLQGFCLSLAQGTYRPLRRFFHDILHTKYRAATDVYALMFLADVVDFIIIIFGFWAFGKHSAATDITSSLSDDQVPEAFLVMLLIQFSTMVVDRALYLRKTVLGKLAFQVALVLAIHLWMFFILPAVTERMFNQNVVAQLWYFVKCIYFALSAYQIRCGYPTRILGNFLTKKYNHLNLFLFQGFRLVPFLVELRAVMDWVWTDTTLSLSSWMCVEDIYANIFIIKCSRETEKKYPQPKGQKKKKIVNTSVPPTGPKPTL

SEQ ID NO: 800427 - protein, 2060 aa, Homo sapiens
  misc_feature (1948)..(1949): Xaa can be any naturally occurring amino acid
  misc_feature (1954)..(1954): Xaa can be any naturally occurring amino acid
  misc_feature (1958)..(1958): Xaa can be any naturally occurring amino acid
  misc_feature (1963)..(1964): Xaa can be any naturally occurring amino acid
  misc_feature (1968)..(1974): Xaa can be any naturally occurring amino acid
  misc_feature (1978)..(1978): Xaa can be any naturally occurring amino acid
  misc_feature (1983)..(1985): Xaa can be any naturally occurring amino acid
  misc_feature (1990)..(1991): Xaa can be any naturally occurring amino acid
  misc_feature (1995)..(1996): Xaa can be any naturally occurring amino acid
  misc_feature (1999)..(1999): Xaa can be any naturally occurring amino acid
MDLRPELPTTLGPVSLRQLGLEHTRYPCLDLGAMLLYTLTFWLLLRQFVKEKLLKWAESPAALTEVTVADTEPTRTQTLLQSLGELVKGVYAKYWIYVCAGMFIVVSFAGRLVVYKIVYMFLFLLCLTLFQVYYSLWRKLLKAFWWLVVAYTMLVLIAVYTFQFQDFPAYWRNLTGFTDEQLGDLGLEQFSVSELFSSILVPGFFLLACILQLHYFHRPFMQLTDMEHVSLPGTRLPRWAHRQDAVSGTPLLREEQQEHQQQQQEEEEEEDSRDEGLGVATPHQATQVPEGAAKWGLVAERLLELAAGFSDVLSRVQVFLRRLLELHVFKLVALYTVWVALKEVSVMNLLLVVLWAFALPYPRFRPMASCLSTVWTCVIIVCKMLYQLKVVNPQEYSSNCTEPFPNSTNLLPTEISQSLLYRGPVDPANWFGVRKGFPNLGYIQNHLQVLLLLVFEAIVYRRQEHYRRQHQLAPLPAQAVFASGTRQQLDQDLLGCLKYFINFFFYKFGLEICFLMAVNVIGQRMNFLVTLHGCWLVAILTRRHRQAIARLWPNYCLFLALFLLYQYLLCLGMPPALCIDYPWRWSRAVPMNSALIKWLYLPDFFRAPNSTNLISDFLLLLCASQQWQVFSAERTEEWQRMAGVNTDRLEPLRGEPNPVPNFIHCRSYLDMLKVAVFRYLFWLVLVVVFVTGATRISIFGLGYLLACFYLLLFGTALLQRDTRARLVLWDCLILYNVTVIISKNMLSLLACVFVEQMQTGFCWVIQLFSLVCTVKGYYDPKEMMDRDQDCLLPVEEAGIIWDSVCFFFLLLQRRVFLSHYYLHVRADLQATALLASRGFALYNAANLKSIDFHRRIEEKSLAQLKRQMERIRAKQEKHRQGRVDRSRPQDTLGPKDPGLEPGPDSPGGSSPPRRQWWRPWLDHATVIHSGDYFLFESDSEEEEEAVPEDPRPSAQSAFQLAYQAWVTNAQAVLRRRQQEQEQARQEQAGQLPTGGGPSQEVEPAEGPEEAAAGRSHVVQRVLSTAQFLWMLGQALVDELTRWLQEFTRHHGTMSDVLRAERYLLTQELLQGGEVHRGVLDQLYTSQAEATLPGPTEAPNAPSTVSSVGLWLLELKPLKQHDMTDHWCMPPWVTCAIKTLHVACEEGMSPDPLGELLSARVASSCTHGDSIAGLCHADACVLVTWRLAAIPTKLGLDVRRSLFVPDGRRGRALRLLRAVYQCVAAHSELLCYFIIILNHMVTASAGSLVLPVLVFLWAMLSIPRPSKRFWMTAIVFTEIAVVVKYLFQFGFFPWNSHVVLRRYENKPYFPPRILGLEKTDGYIKYDLVQLMALFFHRSQLLCYGLWDHEEDSPSKEHDKSGEEEQGAEEGPGVPAATTEDHIQVEARVGPTDGTPEPQVELRPRDTRRISLRFRRRKKEGPARKGAAAIEAEDREEEEGEEEKEAPTGREKRPSRSGGRVRAAGRRLQGFCLSLAQGTYRPLRRFFHDILHTKYRAATDVYALMFLADVVDFIIIIFGFWAFGKHSAATDITSSLSDDQVPEAFLVMLLIQFSTMVVDRALYLRKTVLGKLAFQVALVLAIHLWMFFILPAVTERMFNQNVVAQLWYFVKCIYFALSAYQIRCGYPTRILGNFLTKKYNHLNLFLFQGFRLVPFLVELRAVMDWVWTDTTLSLSSWMCVEDIYANIFIIKCSRETEKKYPQPKGQKKKKIVKYGMGGLIILFLIAIIWFPLLFMSLVRSVVGVVNQPIDVTVTLKLGGYEPLFTMSAQQPSIIPFTAQAYEELSRQFDPQPLAMQFISQYSPEDIVTAQIEGSSGALWRISPPSRAQMKRELYNGTADITLRFTWNFQRDLAKGGTVEYANEKHMLALAPNSTARRQLASLLEGTSDQSVVIPNLFPKYIRAPNGPEANPVKQLQPNEEADYLGVRIQLRREQGAGATGFLEWWEKEKXXYRKKXKKKXKEKKXXKVSXXXXXXXDGKXKKGKXXXKVMVXXKIEXXKKXEISHSIMFEELPCVDRILKLCQDIFLVRETRELELEEELYAKLIFLYRSPETMIKWTREKE

SEQ ID NO: 800428 - protein, 290 aa, Homo sapiens
PCESWCGEAAAVTEGVTCTQLAMQFISQYSPEDIVTAQIEGSSGALWRISPPSRAQMKRELYNGTADITLRFTWNFQRDLAKGGTVEYANEKHMLALAPNSTARRQLASLLEGTSDQSVVIPNLFPKYIRAPNGPEANPVKQLQPNEEADYLGVRIQLRREQGAGATGFLEWWVIELQECRTDCNLLPMVIFSDKVSPPSLGFLAGYGIMGLYVSIVLVIGKFVRGFFSEISHSIMFEELPCVDRILKLCQDIFLVRETRELELEEELYAKLIFLYRSPETMIKWTREKE

SEQ ID NO: 800429 - protein, 1676 aa, Homo sapiens
MDLRPELPTTLGPVSLRQLGLEHTRYPCLDLGAMLLYTLTFWLLLRQFVKEKLLKWAESPAALTEVTVADTEPTRTQTLLQSLGELVKGVYAKYWIYVCAGMFIVVSFAGRLVVYKIVYMFLFLLCLTLFQVYYSLWRKLLKAFWWLVVAYTMLVLIAVYTFQFQDFPAYWRNLTGFTDEQLGDLGLEQFSVSELFSSILVPGFFLLACILQLHYFHRPFMQLTDMEHVSLPGTRLPRWAHRQDAVSGTPLLREEQQEHQQQQQEEEEEEDSRDEGLGVATPHQATQVPEGAAKWGLVAERLLELAAGFSDVLSRVQVFLRRLLELHVFKLVALYTVWVALKEVSVMNLLLVVLWAFALPYPRFRPMASCLSTVWTCVIIVCKMLYQLKVVNPQEYSSNCTEPFPNSTNLLPTEISQSLLYRGPVDPANWFGVRKGFPNLGYIQNHLQVLLLLVFEAIVYRRQEHYRRQHQLAPLPAQAVFASGTRQQLDQDLLGCLKYFINFFFYKFGLEICFLMAVNVIGQRMNFLVTLHGCWLVAILTRRHRQAIARLWPNYCLFLALFLLYQYLLCLGMPPALCIDYPWRWSRAVPMNSALIKWLYLPDFFRAPNSTNLISDFLLLLCASQQWQVFSAERTEEWQRMAGVNTDRLEPLRGEPNPVPNFIHCRSYLDMLKVAVFRYLFWLVLVVVFVTGATRISIFGLGYLLACFYLLLFGTALLQRDTRARLVLWDCLILYNVTVIISKNMLSLLACVFVEQMQTGFCWVIQLFSLVCTVKGYYDPKEMMDRDQDCLLPVEEAGIIWDSVCFFFLLLQRRVFLSHYYLHVRADLQATALLASRGFALYNAANLKSIDFHRRIEEKSLAQLKRQMERIRAKQEKHRQGRVDRSRPQDTLGPKDPGLEPGPDSPGGSSPPRRQWWRPWLDHATVIHSGDYFLFESDSEEEEEAVPEDPRPSAQSAFQLAYQAWVTNAQAVLRRRQQEQEQARQEQAGQLPTGGGPSQEVEPAEGPEEAAAGRSHVVQRVLSTAQFLWMLGQALVDELTRWLQEFTRHHGTMSDVLRAERYLLTQELLQGGEVHRGVLDQLYTSQAEATLPGPTEAPNAPSTVSSVGLWLLELKPLKQHDMTDHWCMPPWVTCAIKTLHVACEEGMSPDPLGELLSARVASSCTHGDSIAGLCHADACVLVTWRLAAIPTKLGLDVRRSLFVPDGRRGRALRLLRAVYQCVAAHSELLCYFIIILNHMVTASAGSLVLPVLVFLWAMLSIPRPSKRFWMTAIVFTEIAVVVKYLFQFGFFPWNSHVVLRRYENKPYFPPRILGLEKTDGYIKYDLVQLMALFFHRSQLLCYGLWDHEEDSPSKEHDKSGEEEQGAEEGPGVPAATTEDHIQVEARVGPTDGTPEPQVELRPRDTRRISLRFRRRKKEGPARKGAAAIEAEDREEEEGEEEKEAPTGREKRPSRSGGRVRAAGRRLQGFCLSLAQGTYRPLRRFFHDILHTKYRAATDVYALMFLADVVDFIIIIFGFWAFGKHSAATDITSSLSDDQVPEAFLVMLLIQFSTMVVDRALYLRKTVLGKLAFQVALVLAIHLWMFFILPAVTERMFNQNVVAQLWYFVKCIYFALSAYQIRCGYPTRILGNFLTKKYNHLNLFLFQGSSWCGRLGSWSWRRSCTPSSSSSTAHRRP

SEQ ID NO: 800430 - protein, 1714 aa, Homo sapiens; identical to SEQ ID NO: 800423

SEQ ID NO: 800431 - protein, 171 aa, Homo sapiens
LSYRRPTRSGPKLWYFVKCIYFALSAYQIRCGYPTRILGNFLTKKYNHLNLFLFQGFRLVPFLVELRAVMDWVWTDTTLSLSSWMCVEDIYANIFIIKCSRETEKKYPQPKGQKKKKIVKYGMGGLIILFLIAIIWFPLLFMSLVRSVVGVVNQPIDVTVTLKLGGYERRP
